(19) United States
(12) Patent Application Publication
(10) Pub. No.: US 2024/0342206 A1
(43) Pub. Date: Oct. 17, 2024

(54) mRNAS FOR TREATMENT OR PROPHYLAXIS OF LIVER DISEASES

(71) Applicant: CureVac SE, Tübingen (DE)

(72) Inventors: Tim SONNTAG, Tübingen (DE); Marion PÖNISCH, Tübingen (DE); Frédéric CHEVESSIER-TÜNNESEN, Tübingen (DE); Michael OTT, Hannover (DE); Amar DEEP SHARMA, Hannover (DE)

(73) Assignee: CureVac SE, Tübingen (DE)

(21) Appl. No.: 18/293,542

(22) PCT Filed: Jul. 29, 2022
(86) PCT No.: PCT/EP2022/071449

§ 371 Date: Jan. 30, 2024

(30) Foreign Application Priority Data
Jul. 30, 2021 (WO) PCT/EP2021/071435

(51) Int. Cl. A61K 31/7105; A61K 9/00; A61K 9/127; A61K 9/51; A61K 38/00; A61P 1/16; C07K 14/705

(52) U.S. Cl. CPC A61K 31/7105; A61K 9/0019; A61K 9/1271; A61K 9/5123; A61P 1/16; C07K 14/70567; A61K 38/00

(57) ABSTRACT

The present invention relates to mRNA medicines for use in the therapy and prevention of liver diseases like liver fibrosis, liver cirrhosis, hepatocellular carcinoma (HCC), non-alcoholic fatty liver disease (NAFLD), non-alcoholic steatohepatitis (NASH) or liver cancer, and more particularly to mRNA medicines of this kind which can exhibit excellent therapeutic and preventive effects with respect to liver diseases individually developed or to complications resulting from diseases of these organs. In detail, the present invention relates to an mRNA suitable for treatment or prophylaxis of liver diseases. In particular, the present invention provides mRNAs encoding hepatocyte nuclear factor 4 alpha (HNF4A), human wild type and engineered variants thereof), or a fragment or a variant of any of these peptides or proteins. The present invention concerns said mRNA as well as compositions and kits comprising the mRNA. Furthermore, the present invention relates to the mRNA, compositions or kits as disclosed, preferably LNP formulations or compositions, herein for use as a medicament, in particular for treatment or prophylaxis of a liver disease. The present invention also provides the use of the RNA, compositions or kits as disclosed herein for increasing the expression of said encoded protein, in particular in gene therapy.

### TECHNICAL FIELD

[0001] The present invention relates to mRNA medicines for use in the therapy and prevention of liver diseases like liver fibrosis, liver cirrhosis, hepatocellular carcinoma (HCC), non-alcoholic fatty liver disease (NAFLD), non-alcoholic steatohepatitis (NASH) or liver cancer, and more particularly to mRNA medicines of this kind which can exhibit excellent therapeutic and preventive effects with respect to liver diseases individually developed or to complications resulting from diseases of these organs.

[0002] In detail, the present invention relates to an mRNA suitable for treatment or prophylaxis of liver diseases. In particular, the present invention provides mRNAs encoding hepatocyte nuclear factor 4 alpha (HNF4A), human wild type and engineered variants thereof), or a fragment or a variant of any of these peptides or proteins. The present invention concerns said mRNA as well as compositions and kits comprising the mRNA. Furthermore, the present invention relates to the mRNA, compositions or kits as disclosed, preferably LNP formulations or compositions, herein for use as a medicament, in particular for treatment or prophylaxis of a liver disease. The present invention also provides the use of the RNA, compositions or kits as disclosed herein for increasing the expression of said encoded protein, in particular in gene therapy.

### INTRODUCTION

[0003] Fibrosis is the formation of excess fibrous connective tissue or scar tissue in an organ or tissue in a reparative or reactive process. Fibrosis can occur in many tissues within the body, typically as a result of inflammation or damage, which include the lungs, liver, heart, and brain. Every year, millions of people are hospitalized due to the damaging effects of fibrosis. The liver for example is frequently exposed to insults, including toxic chemicals and alcohol, viral infection or metabolic overload. Although it can fully regenerate after acute injury, chronic liver damage causes liver fibrosis and liver cirrhosis, which can result in complete liver failure. With regard to the liver, liver diseases represent a major health concern worldwide. The major causes of liver injury range from viral diseases and autoimmune diseases over metabolic disorders to malnutrition and alcohol drug abuse and vary greatly in different populations.

[0004] Several therapeutic approaches were designed to stop or reduce the fibrotic response (for review, see Wallace K. et al.: Liver fibrosis. Biochem. J. (2008), 411:1-18). However, at present there is no therapeutic agent indicated and licensed for the primary treatment of liver fibrosis and still, no targeted anti-fibrotic therapy exists at this time. Also for other liver diseases, such as liver cirrhosis, hepatocellular carcinoma (HCC), non-alcoholic fatty liver disease (NAFLD), non-alcoholic steatohepatitis (NASH) or liver cancer, an effective cure is urgently needed. For example for non-alcoholic steatohepatitis (NASH), when simple lifestyle adjustments are not enough, insulin sensitizers, weight loss drugs, antioxidants, liver protection and lipid-lowering drugs are clinically integrated into the treatment plan. However, these drugs usually have potential safety risks and insufficient efficacy, which can not meet the treatment expectations.

[0005] Thus, there remains a considerable need for alternative or improved treatments for liver diseases like liver fibrosis, liver cirrhosis, hepatocellular carcinoma (HCC), non-alcoholic fatty liver disease (NAFLD), non-alcoholic steatohepatitis (NASH) or liver cancer.

[0006] Surprisingly, HNF4A was identified as an important player in treating, preventing, attenuating or inhibiting a liver disease, preferably selected from the group consisting of liver fibrosis, liver cirrhosis, hepatocellular carcinoma (HCC), non-alcoholic fatty liver disease (NAFLD), non-alcoholic steatohepatitis (NASH) or liver cancer. It is thus an object of the present invention to provide mRNAs encoding wild type HNF4A and pharmaceutical compositions comprising said mRNA(s) suitable for use in treatment or prophylaxis of liver diseases, such as liver fibrosis, liver cirrhosis, hepatocellular carcinoma (HCC), non-alcoholic fatty liver disease (NAFLD), non-alcoholic steatohepatitis (NASH) or liver cancer.

[0007] Inside cells, the transcription factor HNF4A is a short-lived protein, which upon delivery of mRNA encoding for the wild type protein is barely detected 24 h post-transfection. Consistently, HNF4A transcriptional activity on cellular target genes quickly declines. In addition, multiple cellular pathways exist, which further inhibit HNF4A activity via post-translational modifications (PTMs). Therefore, wild type hepatocyte nuclear factor 4 alpha (HNF4A), either on mRNA or on protein level, has properties that are not optimal for an application in patients. Thus, there is a great need for engineered HNF4A mRNA and/or especially engineered HNF4A protein variants that can be used advantageously in patients, having increased expression, activity and stability over wild type HNF4A mRNA and/or proteins.

[0008] Therefore, in the context of the present invention, it was a further object to provide mRNAs encoding engineered HNF4A protein variants and pharmaceutical compositions comprising said mRNA(s) suitable for use in treatment or prophylaxis of liver diseases, such as liver fibrosis, liver cirrhosis, hepatocellular carcinoma (HCC), non-alcoholic fatty liver disease (NAFLD), non-alcoholic steatohepatitis (NASH) or liver cancer. Therefore, in particular, it is an object to provide mRNAs encoding wild type HNF4A, mRNAs encoding engineered HNF4A protein variants and pharmaceutical compositions for expressing said proteins capable of treating, preventing, attenuating or inhibiting liver diseases as described herein. It is a further object of the invention to provide such an mRNAs encoding wild type HNF4A, mRNAs encoding engineered HNF4A protein variants and pharmaceutical compositions, which allow treatment, prevention, attenuation or inhibition of liver diseases, particularly as defined herein, in a safe and effective manner.

[0009] The objects underlying the present invention are solved by the claimed subject matter.

[0010] The inventors surprisingly found that wild type HNF4A and engineered HNF4A protein variants or respectively the mRNAs encoding said wild type HNF4A or engineered HNF4A protein variants of the invention are capable of treating, preventing, attenuating or inhibiting a liver disease, preferably selected from the group consisting of liver fibrosis, liver cirrhosis, hepatocellular carcinoma (HCC), non-alcoholic fatty liver disease (NAFLD), non-alcoholic steatohepatitis (NASH) or liver cancer in a subject in need. I.e. upon administration of the inventive mRNA(s) to a mammalian subject, a liver disease as described herein, can be treated successfully. Sufficiently high expression HNF4A levels can surprisingly be obtained by using the mRNAs of the invention, being superior in comparison with the expression levels obtained by using a reference construct known in the art encoding the respective peptide or protein. Advantageously, the HNF4A encoded by the mRNA can thus exert its effects, which are preferably exploited in treatment or prophylaxis of a liver disease, in particular in the liver of a mammalian subject, preferably without or with acceptable side-effects. In preferred embodiments, the expression level of the encoded peptide or protein is sufficiently high in liver in order to exert its effect in liver and lower in other organs, in order to reduce side-effects. The inventive effect was proven in different liver fibrosis or respectively liver cirrhosis models (toxin CCl₄ model, cholestasis-induced fibrosis through feeding and a genetic model based on a surrogate mouse model of progressive familial intrahepatic cholestasis), which underline the robustness of the experimental data.

[0011] In more detail, as described herein further below, the inventors found that mRNA encoding an engineered HNF4A protein variant designated “combo 11” comprising 17 distinct amino acid exchanges (S87A K106R K108R K126R K127R S142A S143A S148A T166A S167A S313A S378A T429A T432A S436A K458R S461E), was more potent than mRNA encoding the HNF4A wild type protein with regard to the treatment, prevention, attenuation or inhibition of liver cirrhosis or respectively liver fibrosis, as measured by positive effects on hydroxyproline, sirus red staining, desmin staining, and Acta2 RNA levels and Col1a1 RNA level, even at RNA doses of 0.3 mg/kg (Acta2 and Col1a1 being fibrogenic marker genes).

[0012] The present application is filed together with a sequence listing in electronic format. The information contained in the electronic format of the sequence listing filed together with this application is part of the description of the present application and is incorporated herein by reference in its entirety. Where reference is made herein to a “SEQ ID NO:”, the corresponding nucleic acid sequence or amino acid sequence in the sequence listing having the respective identifier is referred to, unless specified otherwise.

### Definitions

[0013] For the sake of clarity and readability the following definitions are provided. Any technical feature mentioned for these definitions may be read on each and every embodiment of the invention. Additional definitions and explanations may be specifically provided in the context of these embodiments.

[0014] Artificial nucleic acid molecule and mRNA: An artificial nucleic acid molecule may typically be understood to be a nucleic acid molecule, e.g. a DNA, an RNA or mRNA that does not occur naturally. In other words, an artificial nucleic acid molecule may be understood as a non-natural nucleic acid molecule. Such nucleic acid molecule may be non-natural due to its individual sequence (which does not occur naturally) and/or due to other modifications, e.g. structural modifications of nucleotides, which do not occur naturally. An artificial nucleic acid molecule may be a DNA molecule, an RNA molecule, an mRNA molecule or a hybrid-molecule comprising DNA and RNA or mRNA portions. Typically, artificial nucleic acid molecules may be designed and/or generated by genetic engineering methods to correspond to a desired artificial sequence of nucleotides (heterologous sequence). In this context, an artificial sequence is usually a sequence that may not occur naturally, i.e. it differs from the wild type sequence by at least one nucleotide. The term “wild type” may be understood as a sequence occurring in nature or non-codon optimized. Further, the term “artificial nucleic acid molecule” is not restricted to mean “one single molecule” but is, typically, understood to comprise an ensemble of identical molecules. Accordingly, it may relate to a plurality of identical molecules contained in an aliquot. Thus, in preferred embodiments, the mRNA of the invention is an isolated mRNA or an artificial nucleic acid molecule.

[0015] Bicistronic RNA, multicistronic RNA: A bicistronic or multicistronic RNA is typically an RNA, preferably an mRNA, that typically may have two (bicistronic) or more (multicistronic) open reading frames (ORF). An open reading frame in this context is a sequence of codons that is translatable into a peptide or protein.

[0016] Carrier/polymeric carrier: A carrier in the context of the invention may typically be a compound that facilitates transport and/or complexation of another compound (cargo). A polymeric carrier is typically a carrier that is formed of a polymer. A carrier may be associated with its cargo by covalent or non-covalent interaction. A carrier may transport nucleic acids, e.g. RNA or DNA, to the target cells. The carrier may—for some embodiments—be a cationic component.

[0017] Cationic component: The term “cationic component” typically refers to a charged molecule, which is positively charged (cation) at a pH value typically from 1 to 9, preferably at a pH value of or below 9 (e.g. from 5 to 9), of or below 8 (e.g. from 5 to 8), of or below 7 (e.g. from 5 to 7), most preferably at a physiological pH, e.g. from 7.3 to 7.4. Accordingly, a cationic component may be any positively charged compound or polymer, preferably a cationic peptide or protein, which is positively charged under physiological conditions, particularly under physiological conditions in vivo. A “cationic peptide or protein” may contain at least one positively charged amino acid, or more than one positively charged amino acid, e.g. selected from Arg, His, Lys or Orn. Accordingly, “polycationic” components are also within the scope exhibiting more than one positive charge under the conditions given.

[0018] 5′-cap: A 5′-cap is an entity, typically a modified nucleotide entity, which generally “caps” the 5′-end of a mature mRNA. A 5′-cap may typically be formed by a modified nucleotide, particularly by a derivative of a guanine nucleotide. Preferably, the 5′-cap is linked to the 5′-terminus via a 5′-5′-triphosphate linkage. A 5′-cap may be methylated, e.g. m7GpppN, wherein N is the terminal 5′ nucleotide of the nucleic acid carrying the 5′-cap, typically the 5′-end of an RNA. Further examples of 5′-cap structures include glyceryl, inverted deoxy abasic residue (moiety), 4′,5′ methylene nucleotide, 1-(beta-D-erythrofuranosyl) nucleotide, 4′-thio nucleotide, carbocyclic nucleotide, 1,5-anhydrohexitol nucleotide, L-nucleotides, alpha-nucleotide, modified base nucleotide, threo-pentofuranosyi nucleotide, acyclic 3′,4′-seco nucleotide, acyclic 3,4-dihydroxybutyl nucleotide, acyclic 3,5 dihydroxypentyl nucleotide, 3′-3′-inverted nucleotide moiety, 3′-3′-inverted abasic moiety, 3′-2′-inverted nucleotide moiety, 3′-2′-inverted abasic moiety, 1,4-butanediol phosphate, 3′-phosphoramidate, hexylphosphate, aminohexyl phosphate, 3′-phosphate, 3′phosphorothioate, phosphorodithioate, or bridging or non-bridging methylphosphonate moiety. Preferred 5′-ends when using mCap or e.g., CleanCap GG, are “GGGAGA” or, e.g. when using CleanCap AG “AGGAGA”.

[0019] DNA: DNA is the usual abbreviation for deoxyribonucleic acid. It is a nucleic acid molecule, i.e. a polymer consisting of nucleotides. These nucleotides are usually deoxy-adenosine-monophosphate, deoxy-thymidine-monophosphate, deoxy-guanosine-monophosphate and deoxy-cytidine-monophosphate monomers which are—by themselves—composed of a sugar moiety (deoxyribose), a base moiety and a phosphate moiety, and polymerise by a characteristic backbone structure. The backbone structure is, typically, formed by phosphodiester bonds between the sugar moiety of the nucleotide, i.e. deoxyribose, of a first and a phosphate moiety of a second, adjacent monomer. The specific order of the monomers, i.e. the order of the bases linked to the sugar/phosphate-backbone, is called the DNA sequence. DNA may be single stranded or double stranded. In the double stranded form, the nucleotides of the first strand typically hybridize with the nucleotides of the second strand, e.g. by A/T-base-pairing and G/C-base-pairing.

[0020] Fragment of a sequence: A fragment of a sequence may typically be a shorter portion of a full-length sequence of e.g. a nucleic acid molecule or an amino acid sequence. Accordingly, a fragment, typically, consists of a sequence that is identical to the corresponding stretch within the full-length sequence. A preferred fragment of a sequence in the context of the present invention, consists of a continuous stretch of entities, such as nucleotides or amino acids corresponding to a continuous stretch of entities in the molecule the fragment is derived from, which represents at least 20%, preferably at least 30%, more preferably at least 40%, more preferably at least 50%, even more preferably at least 60%, even more preferably at least 70%, and most preferably at least 80% of the total (i.e. full-length) molecule, from which the fragment is derived.

[0021] G/C modified: A G/C-modified nucleic acid may typically be a nucleic acid, preferably an artificial nucleic acid molecule as defined herein, based on a modified wild type sequence comprising a preferably increased number of guanosine and/or cytosine nucleotides as compared to the wild type sequence. Such an increased number may be generated by substitution of codons containing adenosine or thymidine nucleotides by codons containing guanosine or cytosine nucleotides. If the enriched G/C content occurs in a coding region of DNA or RNA, it makes use of the degeneracy of the genetic code. Accordingly, the codon substitutions preferably do not alter the encoded amino acid residues, but exclusively increase the G/C content of the nucleic acid molecule. As used herein, the term “G/C modification” comprises, in particular, the modifications of the number of guanosine and/or cytosine nucleotides in the mRNA according to the invention, such as GC optimization of sequences, adaptation of sequences to human codon usage, codon optimization, or C-optimization of sequences.

[0022] Gene therapy: Gene therapy may typically be understood to mean a treatment of a patient's body or isolated elements of a patient's body, for example isolated tissues/cells, by nucleic acids encoding a peptide or protein. It typically may comprise at least one of the steps of a) administration of a nucleic acid, preferably an RNA as defined herein, directly to the patient—by whatever administration route—or in vitro to isolated cells/tissues of the patient, which results in transfection of the patient's cells either in vivo/ex vivo or in vitro; b) transcription and/or translation of the introduced nucleic acid molecule; and optionally c) re-administration of isolated, transfected cells to the patient, if the nucleic acid has not been administered directly to the patient. The term “gene therapy” as used herein typically comprises treatment as well as prevention or prophylaxis of a disease, preferably a liver disease.

[0023] Heterologous sequence: Two sequences are typically understood to be “heterologous” if they are not derivable from the same gene. I.e., although heterologous sequences may be derivable from the same organism, they naturally (in nature) do not occur in the same nucleic acid molecule, such as in the same mRNA.

[0024] Cloning site: A cloning site is typically understood to be a segment of a nucleic acid molecule, which is suitable for insertion of a nucleic acid sequence, e.g., a nucleic acid sequence comprising an open reading frame. Insertion may be performed by any molecular biological method known to the one skilled in the art, e.g. by restriction and ligation. A cloning site typically comprises one or more restriction enzyme recognition sites (restriction sites). These one or more restrictions sites may be recognized by restriction enzymes which cleave the DNA at these sites. A cloning site which comprises more than one restriction site may also be termed a multiple cloning site (MCS) or a polylinker.

[0025] miRNA (microRNA) (miR) binding site(s): miRNAs (miR(s) or microRNA) are small single-stranded, 19-25 nucleotide long, non-coding RNA molecules found in plants, animals and some viruses, that functions in mRNA silencing and post-transcriptional regulation of gene expression. They function via Watson-Crick base-pairing with complementary sequences within the 5′ and/or 3′-untranslated regions (3′-UTR) of target mRNA molecules. As result, these mRNA molecules are silenced. Hereby, a “seed sequence” of 2-8 nucleotides, must be perfectly complementary. Functional seeds may be located in the 5′ and/or 3′-UTRs of mRNAs; multiple binding sites for the same miRNA in 5′ and/or 3′-UTRs can strongly enhance the degree of regulation. MiRNAs are derived from longer, primary transcripts termed “pri-miRNAs”. The pri-miRNAs, which can be more than 1000 nt in length, contain an RNA hairpin in which one of the two strands includes the mature miRNA (Lee et al 2002). When two mature miRNAs originate from opposite arms of the same pri-miRNA and are found in roughly similar amounts, they are denoted with a -3p or -5p suffix.

[0026] The term “miRNA (microRNA) (miR) binding site” as used herein, refers to a miRNA (miR) target site or a miRNA (miR) recognition site, or any nucleotide sequence to which a miRNA (miR) binds or associates. In some embodiments, a miRNA (miR) binding site represents a nucleotide location or region of a polynucleotide (e.g., an mRNA) to which at least the “seed” region of a miRNA (miR) binds. It should be understood that “binding” may follow traditional Watson-Crick hybridization rules or may reflect any stable association of the miRNA with the target sequence at or adjacent to the miRNA site. When referring to a miRNA (miR) binding site, a miRNA (miR) sequence is to be understood as having complementarity (e.g., partial, substantial, or complete (or full) complementarity) with the miRNA that binds to the miRNA binding site. A miRNA (miR) binding site can be partially complementary to a miRNA (miR), e.g., to an endogenous miRNA (miR), as is the case when the miRNA (miR) may exert translational control and/or transcript stability control of its corresponding mRNA. Alternatively, a miRNA (miR) binding site can be fully complementary (complete complementarity) to a miRNA (miR), e.g., to an endogenous miRNA (miR), as is the case when the miRNA (miR) may exert post-transcriptional and/or translational control of its corresponding mRNA. In preferred aspects of the disclosure, a miRNA (miR) binding site is fully complementary to a miRNA (miR), e.g., to an endogenous miRNA (miR), and may cause cleavage of the mRNA comprising said miRNA (miR) in cells and/or tissues in vivo, where the corresponding miR is expressed, e.g., endogenously expressed.

[0027] Nucleic acid molecule: A nucleic acid molecule is a molecule comprising, preferably consisting of nucleic acid components. The term “nucleic acid molecule” preferably refers to DNA, RNA or mRNA molecules. It is preferably used synonymous with the term “polynucleotide”. Preferably, a nucleic acid molecule is a polymer comprising or consisting of nucleotide monomers, which are covalently linked to each other by phosphodiester-bonds of a sugar/phosphate-backbone. The term “nucleic acid molecule” also encompasses modified nucleic acid molecules, such as base-modified, sugar-modified or backbone-modified etc. DNA, RNA or mRNA molecules.

[0028] Open reading frame: An open reading frame (ORF) in the context of the invention may typically be a sequence of several nucleotide triplets, which may be translated into a peptide or protein. An open reading frame preferably contains a start codon, i.e. a combination of three subsequent nucleotides coding usually for the amino acid methionine (ATG), at its 5′-end and a subsequent region, which usually exhibits a length which is a multiple of 3 nucleotides. An ORF is preferably terminated by a stop-codon (e.g., TAA, TAG, TGA). Typically, this is the only stop-codon of the open reading frame. Thus, an open reading frame in the context of the present invention is preferably a nucleotide sequence, consisting of a number of nucleotides that may be divided by three, which starts with a start codon (e.g. ATG) and which preferably terminates with a stop codon (e.g., TAA, TGA, or TAG). The open reading frame may be isolated or it may be incorporated in a longer nucleic acid sequence, for example in a vector or an mRNA. An open reading frame may also be termed “(protein) coding region” or, preferably, “coding sequence” or CDS.

[0029] Peptide: A peptide or polypeptide is typically a polymer of amino acid monomers, linked by peptide bonds. It typically contains less than 50 monomer units. Nevertheless, the term “peptide” is not a disclaimer for molecules having more than 50 monomer units. Long peptides are also called polypeptides, typically having between 50 and 600 monomeric units.

[0030] Pharmaceutically effective amount: A pharmaceutically effective amount in the context of the invention is typically understood to be an amount that is sufficient to induce a pharmaceutical effect, such as an immune response, altering a pathological level of an expressed peptide or protein, or substituting a lacking gene product, e.g., in case of a pathological situation.

[0031] Protein: A protein typically comprises one or more peptides or polypeptides. A protein is typically folded into 3-dimensional form, which may be required for the protein to exert its biological function.

[0032] Polyadenylation: Polyadenylation is typically understood to be the addition of a poly(A) sequence to a nucleic acid molecule, such as an RNA or mRNA molecule, e.g. to a premature mRNA. Enzymatic polyadenylation may be induced by a so-called polyadenylation signal. This signal is preferably located within a stretch of nucleotides at the 3′-end of a nucleic acid molecule, such as an RNA or mRNA molecule, to be polyadenylated. A polyadenylation signal for enzymatic polyadenylation typically comprises a hexamer consisting of adenine and uracil/thymine nucleotides, preferably the hexamer sequence AAUAAA. Other sequences, preferably hexamer sequences, are also conceivable. Polyadenylation typically occurs during processing of a pre-mRNA (also called premature-mRNA). Typically, RNA maturation (from pre-mRNA to mature mRNA) comprises the step of polyadenylation.

[0033] Poly(A) sequence: A poly(A) sequence, also called poly(A)tail or 3′-poly(A)tail, is typically understood to be a sequence of adenosine nucleotides, e.g., of up to about 400 adenosine nucleotides, e.g. from about 20 to about 400, preferably from about 50 to about 400, more preferably from about 50 to about 300, even more preferably from about 50 to about 250, most preferably from about 60 to about 250 adenosine nucleotides. As used herein, a poly(A) sequence may also comprise about 10 to 200 adenosine nucleotides, preferably about 10 to 100 adenosine nucleotides, more preferably about 40 to 80 adenosine nucleotides or even more preferably about 50 to 70 adenosine nucleotides. A poly(A) sequence is typically located at the 3′-end of an mRNA. In the context of the present invention, a poly(A) sequence may be located within an mRNA or any other nucleic acid molecule, such as, e.g., in a vector, for example, in a vector serving as template for the generation of an RNA, preferably an mRNA, e.g., by transcription of the vector.

[0034] Restriction site: A restriction site, also termed restriction enzyme recognition site, is a nucleotide sequence recognized by a restriction enzyme. A restriction site is typically a short, preferably palindromic nucleotide sequence, e.g. a sequence comprising 4 to 8 nucleotides. A restriction site is preferably specifically recognized by a restriction enzyme. The restriction enzyme typically cleaves a nucleotide sequence comprising a restriction site at this site. In a double-stranded nucleotide sequence, such as a double-stranded DNA sequence, the restriction enzyme typically cuts both strands of the nucleotide sequence.

[0035] RNA, mRNA: RNA is the usual abbreviation for ribonucleic-acid. It is a nucleic acid molecule, i.e. a polymer consisting of nucleotides. These nucleotides are usually adenosine-monophosphate, uridine-monophosphate, guanosine-monophosphate and cytidine-monophosphate monomers which are connected to each other along a so-called backbone. The backbone is formed by phosphodiester bonds between the sugar, i.e. ribose, of a first and a phosphate moiety of a second, adjacent monomer. The specific succession of the monomers is called the mRNA-sequence. Usually RNA may be obtainable by transcription of a DNA-sequence, e.g., inside a cell. In eukaryotic cells, transcription is typically performed inside the nucleus or the mitochondria. In vivo, transcription of DNA usually results in the so-called premature RNA which has to be processed into so-called messenger-RNA, usually abbreviated as mRNA. Processing of the premature RNA, e.g. in eukaryotic organisms, comprises a variety of different posttranscriptional-modifications such as splicing, 5′-capping, polyadenylation, export from the nucleus or the mitochondria and the like. The sum of these processes is also called maturation of RNA. The mature messenger RNA usually provides the nucleotide sequence that may be translated into an amino-acid sequence of a particular peptide or protein. Typically, a mature mRNA comprises a 5′-cap, a 5′-UTR, an open reading frame, a 3′-UTR and a poly(A) sequence. Aside from messenger RNA, several non-coding types of RNA exist which may be involved in regulation of transcription and/or translation. The term mRNA is used interchangeably with RNA herein.

[0036] Sequence of a nucleic acid molecule: The sequence of a nucleic acid molecule is typically understood to be the particular and individual order, i.e. the succession of its nucleotides. The sequence of a protein or peptide is typically understood to be the order, i.e. the succession of its amino acids.

[0037] Sequence identity: Two or more sequences are identical if they exhibit the same length and order of nucleotides or amino acids. The percentage of identity typically describes the extent to which two sequences are identical, i.e. it typically describes the percentage of nucleotides that correspond in their sequence position with identical nucleotides of a reference-sequence. For determination of the degree of identity, the sequences to be compared are considered to exhibit the same length, i.e. the length of the longest sequence of the sequences to be compared. This means that a first sequence consisting of 8 nucleotides is 80% identical to a second sequence consisting of 10 nucleotides comprising the first sequence. In other words, in the context of the present invention, identity of sequences preferably relates to the percentage of nucleotides of a sequence which have the same position in two or more sequences having the same length. Gaps are usually regarded as non-identical positions, irrespective of their actual position in an alignment.

[0038] Stabilized nucleic acid molecule: A stabilized nucleic acid molecule is a nucleic acid molecule, preferably a DNA, RNA or mRNA molecule that is modified such, that it is more stable to disintegration or degradation, e.g., by environmental factors or enzymatic digest, such as by an exo- or endonuclease degradation, than the nucleic acid molecule without the modification. Preferably, a stabilized nucleic acid molecule in the context of the present invention is stabilized in a cell, such as a prokaryotic or eukaryotic cell, preferably in a mammalian cell, such as a human cell. The stabilization effect may also be exerted outside of cells, e.g. in a buffer solution etc., for example, in a manufacturing process for a pharmaceutical composition comprising the stabilized nucleic acid molecule.

[0039] Transfection: The term “transfection” refers to the introduction of nucleic acid molecules, such as DNA or RNA (e.g. mRNA) molecules, into cells, preferably into eukaryotic cells. In the context of the present invention, the term “transfection” encompasses any method known to the skilled person for introducing nucleic acid molecules into cells, preferably into eukaryotic cells, such as into mammalian cells. Such methods encompass, for example, electroporation, lipofection, e.g. based on cationic lipids and/or liposomes or LNPs, calcium phosphate precipitation, nanoparticle based transfection, virus based transfection, or transfection based on cationic polymers, such as DEAE-dextran or polyethylenimine etc. Preferably, the introduction is non-viral.

[0040] Vector: The term “vector” refers to a nucleic acid molecule, preferably to an artificial nucleic acid molecule. A vector in the context of the present invention is suitable for incorporating or harboring a desired nucleic acid sequence, such as a nucleic acid sequence comprising an open reading frame. Such vectors may be storage vectors, expression vectors, cloning vectors, transfer vectors etc. A storage vector is a vector, which allows the convenient storage of a nucleic acid molecule, for example, of an mRNA molecule. Thus, the vector may comprise a sequence corresponding, e.g., to a desired mRNA sequence or a part thereof, such as a sequence corresponding to the coding sequence and the 3′-UTR of an mRNA. An expression vector may be used for production of expression products such as RNA, e.g. mRNA, or peptides, polypeptides or proteins. For example, an expression vector may comprise sequences needed for transcription of a sequence stretch of the vector, such as a promoter sequence, e.g. an RNA polymerase promoter sequence. A cloning vector is typically a vector that contains a cloning site, which may be used to incorporate nucleic acid sequences into the vector. A cloning vector may be, e.g., a plasmid vector or a bacteriophage vector. A transfer vector may be a vector, which is suitable for transferring nucleic acid molecules into cells or organisms, for example, viral vectors. A vector in the context of the present invention may be, e.g., an RNA vector or a DNA vector. Preferably, a vector is a DNA molecule. Preferably, a vector in the sense of the present application comprises a cloning site, a selection marker, such as an antibiotic resistance factor, and a sequence suitable for multiplication of the vector, such as an origin of replication. Preferably, a vector in the context of the present application is a plasmid vector.

[0041] Vehicle: A vehicle is typically understood to be a material that is suitable for storing, transporting, and/or administering a compound, such as a pharmaceutically active compound. For example, it may be a physiologically acceptable liquid, which is suitable for storing, transporting, and/or administering a pharmaceutically active compound.

[0042] 5′-Terminal Oligopyrimidine Tract (TOP): The 5′-terminal oligopyrimidine tract (TOP) is typically a stretch of pyrimidine nucleotides located in the 5′-untranslated/terminal region of a nucleic acid molecule, such as the 5′-untranslated region of certain mRNA molecules or the 5′-untranslated region of a functional entity, e.g. the transcribed region, of certain genes. The sequence starts with a cytidine, which usually corresponds to the transcriptional start site, and is followed by a stretch of usually about 3 to 30 pyrimidine nucleotides. For example, the TOP may comprise 3, 4, 5, 6, 7, 8, 9, 10, 11, 12, 13, 14, 15, 16, 17, 18, 19, 20, 21, 22, 23, 24, 25, 26, 27, 28, 29, 30 or even more nucleotides. The pyrimidine stretch and thus the 5′TOP (5′-terminal oligopyrimidine) ends one nucleotide 5′ to the first purine nucleotide located downstream of the TOP. Messenger RNA that contains a 5′-terminal oligopyrimidine tract is often referred to as TOP mRNA. Accordingly, genes that provide such messenger RNAs are referred to as TOP genes. TOP sequences have, for example, been found in genes and mRNAs encoding peptide elongation factors and ribosomal proteins.

[0043] TOP motif: In the context of the present invention, a TOP motif is a nucleic acid sequence which corresponds to a 5′TOP as defined above. Thus, a TOP motif in the context of the present invention is preferably a stretch of pyrimidine nucleotides having a length of 3-30 nucleotides. Preferably, the TOP-motif consists of at least 3 pyrimidine nucleotides, preferably at least 4 pyrimidine nucleotides, preferably at least 5 pyrimidine nucleotides, more preferably at least 6 nucleotides, more preferably at least 7 nucleotides, most preferably at least 8 pyrimidine nucleotides, wherein the stretch of pyrimidine nucleotides preferably starts at its 5′-end with a cytosine nucleotide. In TOP genes and TOP mRNAs, the TOP-motif preferably starts at its 5′-end with the transcriptional start site and ends one nucleotide 5′ to the first purin residue in said gene or mRNA. A TOP motif in the sense of the present invention is preferably located at the 5′-end of a sequence, which represents a 5′-UTR, or at the 5′-end of a sequence, which codes for a 5′-UTR. Thus, preferably, a stretch of 3 or more pyrimidine nucleotides is called “TOP motif” in the sense of the present invention if this stretch is located at the 5′-end of a respective sequence, such as the artificial nucleic acid molecule, the 5′-UTR element of the artificial nucleic acid molecule, or the nucleic acid sequence which is derived from the 5′-UTR of a TOP gene as described herein. In other words, a stretch of 3 or more pyrimidine nucleotides, which is not located at the 5′-end of a 5′-UTR or a 5′-UTR element but anywhere within a 5′-UTR or a 5′-UTR element, is preferably not referred to as “TOP motif”.

[0044] TOP gene: TOP genes are typically characterised by the presence of a 5′-terminal oligopyrimidine tract. Furthermore, most TOP genes are characterized by a growth-associated translational regulation. However, also TOP genes with a tissue specific translational regulation are known. As defined above, the 5′-UTR of a TOP gene corresponds to the sequence of a 5′-UTR of a mature mRNA derived from a TOP gene, which preferably extends from the nucleotide located 3′ to the 5′-cap to the nucleotide located 5′ to the start codon. A 5′-UTR of a TOP gene typically does not comprise any start codons, preferably no upstream AUGs (uAUGs) or upstream open reading frames (uORFs). Therein, upstream AUGs and upstream open reading frames are typically understood to be AUGs and open reading frames that occur 5′ of the start codon (AUG) of the open reading frame that should be translated. The 5′-UTRs of TOP genes are generally rather short. The lengths of 5′-UTRs of TOP genes may vary between 20 nucleotides up to 500 nucleotides, and are typically less than about 200 nucleotides, preferably less than about 150 nucleotides, more preferably less than about 100 nucleotides. Exemplary 5′-UTRs of TOP genes in the sense of the present invention are the nucleic acid sequences extending from the nucleotide at position 5 to the nucleotide located immediately 5′ to the start codon (e.g. the ATG) in the sequences according to SEQ ID NO:1-1363 of patent application WO2013143700, whose disclosure is incorporated herewith by reference. In this context, a particularly preferred fragment of a 5′-UTR of a TOP gene is a 5′-UTR of a TOP gene lacking the 5′TOP motif. The terms “5′-UTR of a TOP gene” or “5′TOP-UTR” preferably refer to the 5′-UTR of a naturally occurring TOP gene.

[0045] 5′-untranslated region (5′-UTR): A 5′-UTR is typically understood to be a particular section of messenger RNA (mRNA). It is located 5′ of the open reading frame of the mRNA. Typically, the 5′-UTR starts with the transcriptional start site and ends one nucleotide before the start codon of the open reading frame. The 5′-UTR may comprise elements for controlling gene expression, also called regulatory elements. Such regulatory elements may be, for example, ribosomal binding sites. The 5′-UTR may be post-transcriptionally modified, for example by addition of a 5′-cap. In the context of the present invention, a 5′-UTR corresponds to the sequence of a mature mRNA, which is located between the 5′-cap and the start codon. Preferably, the 5′-UTR corresponds to the sequence, which extends from a nucleotide located 3′ to the 5′-cap, preferably from the nucleotide located immediately 3′ to the 5′-cap, to a nucleotide located 5′ to the start codon of the protein coding region, preferably to the nucleotide located immediately 5′ to the start codon of the protein coding region. The nucleotide located immediately 3′ to the 5′-cap of a mature mRNA typically corresponds to the transcriptional start site. The term “corresponds to” means that the 5′-UTR sequence may be an RNA sequence, such as in the mRNA sequence used for defining the 5′-UTR sequence, or a DNA sequence, which corresponds to such RNA sequence. In the context of the present invention, the term “a 5′-UTR of a gene” is the sequence, which corresponds to the 5′-UTR of the mature mRNA derived from this gene, i.e. the mRNA obtained by transcription of the gene and maturation of the pre-mature mRNA. The term “5′-UTR of a gene” encompasses the DNA sequence and the mRNA sequence of the 5′-UTR. By the inventive embodiments such a 5′-UTR may be provided 5′-terminal to the coding sequence. Its length is typically less than 500, 400, 300, 250 or less than 200 nucleotides. In other embodiments its length may be in the range of at least 10, 20, 30 or 40, preferably up to 100 or 150, nucleotides.

[0046] 3′-untranslated region (3′-UTR): Generally, the term “3′-UTR” refers to a part of the artificial nucleic acid molecule, which is located 3′ (i.e. “downstream”) of an open reading frame and which is not translated into protein. Typically, a 3′-UTR is the part of an mRNA which is located between the protein coding region (open reading frame (ORF) or coding sequence (CDS)) and the poly(A) sequence of the mRNA. In the context of the invention, the term “3′-UTR” may also comprise elements, which are not encoded in the template, from which an RNA is transcribed, but which are added after transcription during maturation, e.g. a poly(A) sequence. A 3′-UTR of the mRNA is not translated into an amino acid sequence. The 3′-UTR sequence is generally encoded by the gene, which is transcribed into the respective mRNA during the gene expression process. The genomic sequence is first transcribed into pre-mature mRNA, which comprises optional introns. The pre-mature mRNA is then further processed into mature mRNA in a maturation process. This maturation process comprises the steps of 5′-capping, splicing the pre-mature mRNA to excise optional introns and modifications of the 3′-end, such as polyadenylation of the 3′-end of the pre-mature mRNA and optional endo-/or exonuclease cleavages etc. In the context of the present invention, a 3′-UTR corresponds to the sequence of a mature mRNA, which is located between the stop codon of the protein coding region, preferably immediately 3′ to the stop codon of the protein coding region, and the poly(A) sequence of the mRNA. The term “corresponds to” means that the 3′-UTR sequence may be an RNA sequence, such as in the mRNA sequence used for defining the 3′-UTR sequence, or a DNA sequence, which corresponds to such RNA sequence. In the context of the present invention, the term “a 3′-UTR of a gene”, such as “a 3′-UTR of a ribosomal protein gene”, is the sequence, which corresponds to the 3′-UTR of the mature mRNA derived from this gene, i.e. the mRNA obtained by transcription of the gene and maturation of the pre-mature mRNA. The term “3′-UTR of a gene” encompasses the DNA sequence and the mRNA sequence (both sense and antisense strand and both mature and immature) of the 3′-UTR.

[0047] “Isolated”: As used herein, the term “isolated”, in regard to a nucleic acid molecule, preferably an isolated mRNA, or a polypeptide, means that the nucleic acid molecule, preferably isolated mRNA, or polypeptide is in a condition other than its native environment, such as apart from blood and/or animal tissue. In some embodiments, an isolated nucleic acid molecule, preferably isolated mRNA, or polypeptide is substantially free of other nucleic acid molecules or other polypeptides, particularly other nucleic acid molecules or polypeptides of animal origin. In some embodiments, the nucleic acid molecule, preferably isolated mRNA, or polypeptide can be in a highly purified form, i.e., greater than 95% pure or greater than 99% pure. When used in this context, the term “isolated” does not exclude the presence of the same nucleic acid molecule or polypeptide in alternative physical forms, such as dimers or alternatively phosphorylated or derivatized forms. Isolated substances may also have varying levels of purity in reference to the substances from which they have been associated. Isolated substances and/or entities may also be separated from at least about 10%, about 20%, about 30%, about 40%, about 50%, about 60%, about 70%, about 80%, about 90%, or more of the other components with which they were initially associated. In some embodiments, isolated agents are more than about 80%, about 85%, about 90%, about 91%, about 92%, about 93%, about 94%, about 95%, about 96%, about 97%, about 98%, about 99%, or more than about 99% pure. As used herein, a substance is “pure” if it is substantially free of other components. In the context of the present invention, description and claims, the term “mRNA” preferably means an “isolated mRNA” and vice versa.

### DETAILED DESCRIPTION OF THE INVENTION

[0048] The present invention relates to novel mRNAs and to compositions and kits comprising the mRNA. Furthermore, several uses, in particular medical uses, of the mRNA according to the invention and of the pharmaceutical compositions and kits are provided. Said novel mRNAs encode novel engineered hepatocyte nuclear factor 4 alpha (HNF4A) protein variants, which are superior in terms of expression, stability, activity and/or therapeutic effect and which are in sum beneficial when administered to a patient in need.

[0049] In a first aspect, the present invention relates to an isolated mRNA encoding an engineered hepatocyte nuclear factor 4 alpha (HNF4A) protein variant comprising one or more amino acid substitution, deletion, and/or insertion mutation leading to an increased HNF4A transcriptional activity, DNA binding capacity, stability, longer-lasting HNF4A half-life and/or therapeutic effect as compared to the unmodified human wild type HNF4A protein according to SEQ ID NO:100, preferably an engineered HNF4A comprising a S87A mutation and/or a S461E mutation, more preferably an engineered HNF4A comprising a S461E mutation for use in treating, reversing, preventing, attenuating or inhibiting a liver disease, preferably selected from the group consisting of liver fibrosis, liver cirrhosis, hepatocellular carcinoma (HCC), non-alcoholic fatty liver disease (NAFLD), non-alcoholic steatohepatitis (NASH) and liver cancer.

[0050] In another embodiment of the first aspect, an isolated mRNA encoding an engineered HNF4A comprising a S87A mutation and/or a S461E mutation, more preferably an engineered HNF4A comprising a S461E mutation is used for treating, preventing, attenuating or inhibiting liver fibrosis or liver cirrhosis.

[0051] As liver cirrhosis is a late stage of scarring (fibrosis) of the liver caused and often liver cirrhosis has no signs or symptoms until liver damage is extensive. Accordingly, in yet another embodiment of the first aspect, an isolated mRNA encoding an engineered HNF4A comprising a S87A mutation and/or a S461E mutation, more preferably an engineered HNF4A comprising a S461E mutation is used for treating, preventing, attenuating or inhibiting liver cirrhosis.

[0052] In a second aspect, the present invention relates to an isolated mRNA encoding wild type hepatocyte nuclear factor 4 alpha (HNF4A) for use in treating, reversing, preventing, attenuating or inhibiting a liver disease, preferably selected from the group consisting of liver fibrosis, liver cirrhosis, hepatocellular carcinoma (HCC), non-alcoholic fatty liver disease (NAFLD), non-alcoholic steatohepatitis (NASH) and liver cancer.

[0053] In another embodiment of the second aspect, an isolated mRNA encoding wild type hepatocyte nuclear factor 4 alpha (HNF4A) is used for treating, preventing, attenuating or inhibiting liver fibrosis or liver cirrhosis.

[0054] In yet another embodiment of the second aspect, an isolated mRNA encoding wild type hepatocyte nuclear factor 4 alpha (HNF4A) is used for treating, preventing, attenuating or inhibiting liver cirrhosis.

[0055] In a third aspect, the present invention relates to an isolated mRNA encoding wild type hepatocyte nuclear factor 4 alpha (HNF4A) or preferably an isolated mRNA encoding an engineered hepatocyte nuclear factor 4 alpha (HNF4A) protein variant comprising one or more amino acid substitution, deletion, and/or insertion mutation leading to an increased HNF4A transcriptional activity, DNA binding capacity, stability, longer-lasting HNF4A half-life and/or therapeutic effect as compared to the unmodified human wild type HNF4A protein according to SEQ ID NO:100, preferably an engineered HNF4A comprising a S87A mutation and/or a S461E mutation, more preferably an engineered HNF4A comprising a S461E mutation for use in treating or for use in supportive treatment of a disease which results in or leads to liver fibrosis or liver cirrhosis, said disease being selected from the group consisting of acute hepatic porphyria; Alagille syndrome; acute alcoholic hepatitis/alcoholic hepatitis; alcoholic steatohepatitis (ASH); alcoholic (fatty) liver disease (ALD); alcohol-related liver disease (ARLD); alpha-1 antitrypsin deficiency; autoimmune hepatitis (AIH); bile duct cancer (cholangiocarcinoma); biliary atresia; Brucellosis or syphilis; Budd-Chiari syndrome (BCS); chronic heart failure (HF); cystic fibrosis; galactosemia; glycogen storage disease Type 1/glycogen storage diseases; haemochromatosis; hepatitis A (HAV)/hepatitis A infection; hepatitis B (HBV)/chronic hepatitis B infection (CHB); hepatitis C (HCV)/chronic hepatitis C infection (CHC); hepatitis D (HDV)/chronic hepatitis D infection (CHD); hepatocellular carcinoma (HCC); benign liver tumors; lysosomal acid lipase deficiency (LAL-D); non-alcoholic fatty liver disease (NAFLD); non-alcoholic fatty liver (NAFL); non-alcoholic steatohepatitis (NASH); primary biliary cholangitis (PBC); primary biliary cirrhosis; primary sclerosing cholangitis (PSC); progressive familial intrahepatic cholestasis (PFIC); and Wilson disease.

[0056] In other words, the inventive mRNAs according to the invention encoding the inventive engineered hepatocyte nuclear factor 4 alpha (HNF4A) protein variants can be used for example for

[0057] As used herein, the term “hepatocyte nuclear factor-4-alpha” or “HNF4A” relates to an HNF4A mRNA or HNF4A protein having the biological activity of a HNF4A protein (OMIM entry No: 600281; HGNC: 5024, HGNC Approved Gene Symbol: HNF4A, alternative names HNF4-ALPHA, HEPATOCYTE NUCLEAR FACTOR 4, HNF4, TRANSCRIPTION FACTOR 14, HEPATIC NUCLEAR FACTOR or TCF14). Generally, a transcription factor (TF) or 2sequence-specific DNA-binding factor” is a protein controlling the rate of transcription of genetic information from DNA to messenger RNA (mRNA), by binding to a specific DNA sequence to regulate (turn on and off) genes.

[0058] As used herein, the term “HNF4A WT mRNA” or “WT HNF4A mRNA” is intended to describe mRNA encoding the unmodified wild type (human) HNF4A protein, in contrast to mRNA encoding engineered HNF4A protein variants which do not occur in nature.

[0059] The term “increased expression”, “enhanced expression” or “overexpression” as used herein means any form of expression which occurs in addition to the original wild type mRNA expression level.

[0060] As used herein, the terms “transcriptional activity or respectively DNA binding capacity”, “increased transcriptional activity”, “increased DNA binding capacity”, “greater transcriptional activity”, “greater DNA binding capacity”, “enhanced transcriptional activity” or respectively “enhanced DNA binding capacity” all refer to an improved property of the engineered HNF4A protein variants disclosed herein (either on protein level, or mRNA encoded), which can be represented by HNF4A transcriptional activity, HNF4A activity to drive gene expression, HNF4A potency, and/or HNF4A ability to recruit polymerases or additional factors of the transcriptional machinery. In the present specific case related to the transcription factor HNF4A, the terms preferably are intended to describe the “transcriptional activity” or respectively “DNA binding capacity” of the transcription factor HNF4A. The term “engineered” in the context of the present invention relates to not naturally occurring HNF4A protein variants occurring in nature and comprising one or more amino acid substitution, deletion, and/or insertion mutation, but thus being modified by the inventors of the present invention, to exhibit an increased “transcriptional activity” as compared to the human WT HNF4A transcription factor protein. Exemplary methods to determine transcriptional activity or respectively DNA binding capacity of the engineered HNF4A of the present invention are provided in the Examples section. Any property relating to transcriptional activity or respectively DNA binding capacity may be affected. For example, improvements in transcriptional activity or respectively DNA binding capacity can be from about 1.1 fold the transcriptional activity or respectively DNA binding capacity of the corresponding wild type HNF4A, to as much as 2-fold, 5-fold, 10-fold, 20-fold, 25-fold, 50-fold, 75-fold, 100-fold, 150-fold, 200-fold or more transcriptional activity or respectively DNA binding capacity than the naturally occurring HNF4A or another engineered HNF4A from which the HNF4A polypeptides or proteins were derived. An inventive advantage of an “increased transcriptional activity”, “increased DNA binding capacity”, “greater transcriptional activity”, “greater DNA binding capacity”, “enhanced transcriptional activity” or respectively “enhanced DNA binding capacity” of the encoded engineered HNF4A protein(s) is visible through the potential of being able to lower the mRNA dose need for treating, preventing, attenuating or inhibiting a liver disease, preferably selected from the group consisting of liver fibrosis, liver cirrhosis, hepatocellular carcinoma (HCC), non-alcoholic fatty liver disease (NAFLD), non-alcoholic steatohepatitis (NASH) and liver cancer. E.g. in the inventive examples, it was possible to have a positive effect for treating, preventing, attenuating or inhibiting a liver cirrhosis with a low dose of 0.3 mg/kg mRNA encoding an engineered HNF4A protein.

[0061] In another preferred embodiment, the inventive mRNA encoding a WT or an engineered HNF4A protein can be administered at a dose of about 0.5 mg/kg. In another embodiment, the inventive mRNA encoding a WT or an engineered HNF4A protein can be administered at a dose of about 0.4 mg/kg. In another embodiment, the inventive mRNA encoding a WT or an engineered HNF4A protein can be administered at a dose of about 0.3 mg/kg. In another embodiment, the inventive mRNA encoding a WT or an engineered HNF4A protein can be administered at a dose of about 0.2 mg/kg. In another embodiment, the inventive mRNA encoding a WT or an engineered HNF4A protein can be administered at a dose of about 0.1 mg/kg or lower than about 0.1 mg/kg.

[0062] The terms “increased stability”, “greater stability”, “enhanced stability” or “longer-lasting HNF4A half-life” as used herein are used interchangeably in this application, and mean that the engineered HNF4A protein variants shows less degradation, than a WT HNF4A protein, when exposed to similar or identical conditions (either on protein level or mRNA encoded). Degradation can be determined, for example, by the difference in loss of biological activity (i.e. difference in rate and/or extent of biological activity), after a certain time period under similar or identical conditions (e.g. 1 day, 2 days, 3 days, 4 days, 5 days, 6 days, one week, two weeks, three weeks, or 1 month after administration of the mRNA of the invention. An inventive advantage of an “increased stability”, “greater stability”, “enhanced stability” or “longer-lasting HNF4A half-life” for mRNA encoding an engineered HNF4A protein or respectively the engineered HNF4A protein itself is visible through the potential of being able to lower the mRNA dose need for treating, preventing, attenuating or inhibiting a liver disease, preferably selected from the group consisting of liver fibrosis, liver cirrhosis, hepatocellular carcinoma (HCC), non-alcoholic fatty liver disease (NAFLD), non-alcoholic steatohepatitis (NASH) and liver cancer. E.g. in the inventive examples, it was possible to have a positive effect for treating, preventing, attenuating or inhibiting a liver cirrhosis with a low dose of 0.3 mg/kg mRNA encoding an engineered HNF4A protein.

[0063] In the context of the present invention, the terms “WT HNF4A” or “human HNF4A” refer to the human unmodified HNF4A protein (or respectively an mRNA encoding said WT HNF4A).

[0064] The term “preventing” refers to decreasing the probability that an organism contracts or develops an abnormal condition, like e.g. a liver disease.

[0065] The terms “treating”, “reversing”, “attenuating” or “curing” refer to having a therapeutic effect and at least partially alleviating or abrogating an abnormal condition in the organism, like e.g. a liver disease. Reversing, treating, attenuating or curing include inhibition of the liver disease, maintenance of the liver disease, reducing, curing and induction of remission of the liver disease. The terms “inhibits a liver disease” or “inhibiting a liver disease”, “inhibits liver cirrhosis or liver fibrosis”, “curing liver cirrhosis or liver fibrosis”, “reversing liver cirrhosis or liver fibrosis”, “attenuating liver cirrhosis or liver fibrosis” or “inhibiting liver cirrhosis or liver fibrosis” are to be seen in a similar way as “treating” said disease(s); in any case, a patient suffering under a “liver disease” will experience an improvement of said liver disease, upon treatment with the mRNA sequences of the invention. In each of the aforementioned cases, the diseases “liver cirrhosis or liver fibrosis” can be exchanged with any of the herein mentioned liver diseases. Furthermore, in any of the cases in this paragraph, the term “reversing liver fibrosis” or “reversing liver cirrhosis” can be used equivalently. The term “attenuation” (attenuate: weaken, mitigate) of a disease means in principle the reduction, mitigation or lessening of the negative/disadvantageous symptoms, impacts or effects of the liver disease on the patient or subject in need.

[0066] The term “therapeutic effect” or “therapeutic activity” refers to the inhibition of an abnormal condition, like e.g. a liver disease upon administration of an mRNA of the present invention, encoding HNF4A or an engineered HNF4A. A therapeutic effect relieves to some extent one or more of the symptoms of the abnormal condition, like e.g. a liver disease. In reference to the treatment of abnormal conditions, a therapeutic effect can refer to one or more of the following: (a) a decrease in the proliferation, growth, and/or progression of a liver disease; (b) inhibition (i.e., slowing or stopping) of a liver disease in vivo; and (c) relieving to some extent one or more of the symptoms associated with the abnormal condition e.g. the liver disease. The administration of the mRNA of the invention encoding either wild type HNF4A protein or preferably engineered HNF4A protein variants as described herein effectuate the therapeutic effect. The term “therapeutic effect” as used herein, also refers to the effective provision of protection effects to prevent, inhibit, or arrest the symptoms and/or progression of a liver disease as described herein.

[0067] The term “a therapeutically effective amount” as used herein means a sufficient amount of the HNF4A protein of the invention to produce a therapeutic effect, as defined above, in a subject or patient in need of treatment.

[0068] The terms “subject” or “patient” are used herein mean any mammal, including but not limited to human beings, including a human patient or subject to which the pharmaceutical compositions of the invention can be administered. The term mammals include human patients and non-human primates, as well as experimental animals such as rabbits, rats, and mice, and other animals.

[0069] Thus, in some embodiments, the disclosure provides mRNAs encoding wild type HNF4A protein or engineered HNF4A protein variants, which have an amino acid sequence that is at least about 70%, 71%, 72%, 73%, 74%, 75%, 76%, 77%, 78%, 79%, 80%, 81%, 82%, 83%, 84%, 85%, 86%, 87%, 88%, 89%, 90%, 91%, 92%, 93%, 94%, 95%, 96%, 97%, 98%, or 99% identical to the amino acid sequence corresponding to any one of SEQ ID NO:100-148, 149-197, or 198-246, and further comprises any one or more of the amino acid differences, or combinations of differences (e.g. amino acid differences selected from the group consisting of R2V, K5V, K179R, K180R, K234R, K300R, K307R, K309R, K447R, K470R, K458R, K106R, K108R, K126R, K127R, S313A, S313E, S142A, S143A, S142E, S143E, T166A, T166E, S148A, S148E, S183A, S183E, S461A, S461E, S167A, S167E, S378A, T429A, T432A, S436A, S378E, T429E, T432E, S436E, S87A, S87E, S95A, S99A, S138A, and T139A, preferably S87A or S461E, or a combination thereof), found in any of the exemplary engineered HNF4A protein variant amino acid sequences.

[0070] In preferred embodiments, the engineered HNF4A protein variants of the invention comprises a S461A mutation. In other preferred embodiments, the engineered HNF4A protein variants of the invention comprises a S461E mutation. This S461E mutation preferably leads to a HNF4A phospho-mimetic phenotype, by mutating a serine residue to a charged amino acid such as glutamate or asparate. In other preferred embodiments, the engineered HNF4A protein variants of the invention comprises a S87A mutation i.e. preferably leading to a phospho-incompetent HNF4A phenotype via mutation of a serine residue. In further preferred embodiments, the engineered HNF4A protein variants of the invention comprises a S87A and/or a S461E mutation. In even further preferred embodiments, the engineered HNF4A protein variants of the invention comprises a S461E mutation.

[0071] In other preferred embodiments, the engineered HNF4A protein variants of the invention are phospho-incompetent HNF4A mutants or phosphomimetic HNF4A mutants.

[0072] In some embodiments, these recombinant HNF4A polypeptides can have one or more amino acid differences at other residue positions, substitutions, insertions, deletions at other positions, and/or additional amino or carboxy terminal extensions.

[0073] In some embodiments, the HNF4A mRNA or HNF4A polypeptides of the present disclosure exhibit improved properties of increased HNF4A expression, HNF4A transcriptional activity, DNA binding capacity, HNF4A stability, longer-lasting HNF4A half-life and/or increased therapeutic effect as compared to the wild type HNF4A of SEQ ID NO:100.

[0074] In other preferred embodiments, the HNF4A mRNA encoding engineered HNF4A polypeptides of the present disclosure exhibit improved HNF4A transcriptional activity as compared to the wild type HNF4A of SEQ ID NO:100.

[0075] In other preferred embodiments, the HNF4A mRNA encoding engineered HNF4A polypeptides of the present disclosure exhibit improved HNF4A DNA binding capacity as compared to the wild type HNF4A of SEQ ID NO:100.

[0076] In other preferred embodiments, the HNF4A mRNA encoding engineered HNF4A polypeptides of the present disclosure exhibit improved properties of increased HNF4A expression as compared to the wild type HNF4A of SEQ ID NO:100.

[0077] In other preferred embodiments, the HNF4A mRNA encoding engineered HNF4A polypeptides of the present disclosure exhibit improved HNF4A stability as compared to the wild type HNF4A of SEQ ID NO:100.

[0078] In other preferred embodiments, the HNF4A mRNA encoding engineered HNF4A polypeptides of the present disclosure exhibit improved HNF4A half-life as compared to the wild type HNF4A of SEQ ID NO:100.

[0079] In other preferred embodiments, the HNF4A mRNA encoding engineered HNF4A polypeptides of the present disclosure exhibit improved therapeutic effect as compared to the wild type HNF4A of SEQ ID NO:100.

[0080] In some embodiments, the recombinant HNF4A polypeptides exhibit at least 1.2-fold, at least 1.3-fold, at least 1.5-fold, at least 2-fold, at least 3-fold, at least 4-fold, at least 5-fold, at least 10-fold, at least 15-fold, at least 20-fold, or at least 25-fold, or more, increased stability, transcriptional activity and/or respectively DNA binding capacity as compared to a reference HNF4A (e.g., wild type of SEQ ID NO:100) under suitable conditions.

[0081] The mRNA according to the invention is preferably suitable for use in the treatment or prophylaxis of a liver disease or a liver disorder as described herein, preferably selected from liver fibrosis and liver cirrhosis. More preferably, the mRNA according to the present invention is preferably suitable for use in safe and effective treatment or prophylaxis of a liver disease as described herein in mammals, preferably in human.

[0082] As used herein, the term “liver disease” or “liver disorder” typically relates to any condition, which is associated with, or which leads to structural alteration or damage of liver tissue, in particular which leads to fibrosis or cirrhosis of the liver. In particular, a “liver disease’ as used herein, such as liver fibrosis or liver cirrhosis, is a chronic disease characterized by an excess production of hepatic connective tissue, in particular by the accumulation of extracellular matrix (ECM) proteins, which is preferably caused by activated hepatic stellate cells (HSC). The process of excess production of hepatic connective tissue and/or the accumulation of extracellular matrix (ECM) proteins may also be referred to as “fibrosis”. The liver diseases addressed herein may also be termed “fibrotic liver diseases”.

[0083] In the context of the present invention, the term “liver disease” preferably also refers to a disease or disorder, which is capable of causing fibrosis of the liver tissue and which potentially leads to liver fibrosis, such as infectious diseases (e.g. Hepatitis B, Hepatitis C or Hepatitis D), autoimmune diseases (e.g. primary biliary cirrhosis or autoimmune hepatitis), genetic/inherited diseases (hereditary haematochromatosis, Wilson's disease, cystic fibrosis, diabetes), metabolic and/or diet-related diseases (obesity, diabetes, alcohol abuse, alcoholic liver disease, non-alcoholic fatty liver disease (NAFLD) and/or non-alcoholic steatohepatitis (NASH)), cancer or tumor diseases (e.g. hepatocellular carcinoma (HCC)) or other diseases such as gallstones, Budd-Chiari syndrome or primary sclerosing cholangitis. Preferably, the term “liver disease” is to be understood as being selected from the group consisting of liver fibrosis, liver cirrhosis, hepatocellular carcinoma (HCC), non-alcoholic fatty liver disease (NAFLD), non-alcoholic steatohepatitis (NASH) and liver cancer, or combinations thereof. It is to be understood, that fibrogenesis falls within the term “liver fibrosis”, and thus a reduced fibrogenesis is a preferred outcome of the treatment with the mRNA medicines of the present invention. Further, severe forms of cholestasis are frequent causes of liver cirrhosis and thus to be understood as falling under the term “liver disease”.

[0084] In the following, the mRNA according to the invention is described. The disclosure concerning the inventive mRNA as such also applies to the mRNA for (medical) use as described herein as well as to the mRNA in the context of the pharmaceutical composition or the mRNA in the context of the kit (of parts) comprising the mRNA according to the invention. In particular, when referring to an “RNA according to the invention” or “mRNA according to the invention”, the present disclosure also relates to an “RNA for use according to the invention” or “mRNA for use according to the invention” and vice versa.

HNF4A mRNA Sequences

[0085] In preferred embodiments, the present invention relates to an mRNA for use in treating, reversing, preventing, attenuating or inhibiting a liver disease, preferably selected from the group consisting of liver fibrosis, liver cirrhosis, hepatocellular carcinoma (HCC), non-alcoholic fatty liver disease (NAFLD), non-alcoholic steatohepatitis (NASH) and liver cancer, wherein said mRNA comprises an open reading frame (ORF) encoding an engineered HNF4A comprising one or more amino acid substitution, deletion, and/or insertion mutation leading to an increased HNF4A transcriptional activity or respectively DNA binding capacity, stability, longer-lasting HNF4A half-life and/or therapeutic effect as compared to the unmodified human wild type HNF4A protein according to SEQ ID NO:100, preferably an engineered HNF4A comprising an amino acid sequence having at least 80%, 81%, 82%, 83%, 84%, 85%, 86%, 87%, 88%, 89%, 90%, 91%, 92%, 93%, 94%, 95%, 96%, 97%, 98%, 99%, or 100% sequence identity to any one of SEQ ID NO:101-148, 149-197, and 198-246, preferably an engineered HNF4A comprising (i) a S87A mutation, (ii) a S461E mutation, (iii) a S87A and a S461E mutation, (iv) S87A K106R K108R K126R K127R, preferably SEQ ID NO:138, (v) S87A K106R K108R K126R K127R S142A S143A S148A T166A S167A S313A S378A T429A T432A S436A K458R, preferably SEQ ID NO:186 or (vi) S87A K106R K108R K126R K127R S142A S143A S148A T166A S167A S313A S378A T429A T432A S436A K458R S461E mutations, preferably SEQ ID NO:140 or a fragment or variant of said sequences having the biological activity of a HNF4A protein.

[0086] In even further preferred embodiments, the present invention relates to an mRNA for use in treating, reversing, preventing, attenuating or inhibiting a liver disease, preferably selected from the group consisting of liver fibrosis, liver cirrhosis, hepatocellular carcinoma (HCC), non-alcoholic fatty liver disease (NAFLD), non-alcoholic steatohepatitis (NASH) and liver cancer, wherein said mRNA comprises an open reading frame (ORF) encoding an engineered HNF4A comprising one or more amino acid substitution, deletion, and/or insertion mutation leading to an increased HNF4A transcriptional activity or respectively DNA binding capacity, stability, longer-lasting HNF4A half-life and/or therapeutic effect as compared to the unmodified human wild type HNF4A protein according to SEQ ID NO:100, preferably an engineered HNF4A comprising an amino acid sequence having at least 80%, 81%, 82%, 83%, 84%, 85%, 86%, 87%, 88%, 89%, 90%, 91%, 92%, 93%, 94%, 95%, 96%, 97%, 98%, 99%, or 100% sequence identity to any one of SEQ ID NO:101-148, 149-197, and 198-246, preferably an engineered HNF4A comprising (i) a S461E mutation, (ii) a S87A mutation, or (iii) a S87A and a S461E mutation or a fragment or variant of said sequences having the biological activity of a HNF4A protein.

[0087] In preferred embodiments, the present invention relates to an mRNA for use in treating, reversing, preventing, attenuating or inhibiting a liver disease, preferably selected from the group consisting of liver fibrosis, liver cirrhosis, hepatocellular carcinoma (HCC), non-alcoholic fatty liver disease (NAFLD), non-alcoholic steatohepatitis (NASH) and liver cancer, wherein said mRNA comprises an open reading frame (ORF) encoding an engineered HNF4A comprising one or more amino acid substitution, deletion, and/or insertion mutation leading to an increased HNF4A transcriptional activity or respectively DNA binding capacity, stability, longer-lasting HNF4A half-life and/or therapeutic effect as compared to the unmodified human wild type HNF4A protein according to SEQ ID NO:100, preferably an engineered HNF4A comprising (i) a S87A mutation, (ii) a S461E mutation, (iii) a S87A and a S461E mutation, (iv) S87A K106R K108R K126R K127R, preferably SEQ ID NO:138, (v) S87A K106R K108R K126R K127R S142A S143A S148A T166A S167A S313A S378A T429A T432A S436A K458R, preferably SEQ ID NO:186 or (vi) S87A K106R K108R K126R K127R S142A S143A S148A T166A S167A S313A S378A T429A T432A S436A K458R S461E mutations, preferably SEQ ID NO:140,
[0088] more preferably an engineered HNF4A comprising an amino acid sequence having at least 80%, 81%, 82%, 83%, 84%, 85%, 86%, 87%, 88%, 89%, 90%, 91%, 92%, 93%, 94%, 95%, 96%, 97%, 98%, 99%, or 100% sequence identity to any one of SEQ ID NO:101-246, most preferably to SEQ ID NO:140;
[0089] or a fragment or variant of said sequences having the biological activity of a HNF4A protein.

[0090] In even further preferred embodiments, the present invention relates to an mRNA for use in treating, reversing, preventing, attenuating or inhibiting a liver disease, preferably selected from the group consisting of liver fibrosis or liver cirrhosis, wherein said mRNA comprises an open reading frame (ORF) encoding an engineered HNF4A comprising one or more amino acid substitution, deletion, and/or insertion mutation leading to an increased HNF4A transcriptional activity or respectively DNA binding capacity, stability, longer-lasting HNF4A half-life and/or therapeutic effect as compared to the unmodified human wild type HNF4A protein according to SEQ ID NO:100, preferably an engineered HNF4A comprising (i) a S461E mutation, (ii) a S87A mutation, or (iii) a S87A and a S461E mutation,
[0091] more preferably an engineered HNF4A comprising an amino acid sequence having at least 80%, 81%, 82%, 83%, 84%, 85%, 86%, 87%, 88%, 89%, 90%, 91%, 92%, 93%, 94%, 95%, 96%, 97%, 98%, 99%, or 100% sequence identity to any one of SEQ ID NO:101-246, most preferably to SEQ ID NO:140;
[0092] or a fragment or variant of said sequences having the biological activity of a HNF4A protein.

[0093] In most preferred embodiments, the present invention relates to an mRNA for use in treating, reversing, preventing, attenuating or inhibiting a liver disease, preferably selected from the group consisting of liver fibrosis, liver cirrhosis, hepatocellular carcinoma (HCC), non-alcoholic fatty liver disease (NAFLD), non-alcoholic steatohepatitis (NASH) and liver cancer, wherein said mRNA comprises an open reading frame (ORF) encoding an engineered HNF4A comprising one or more amino acid substitution, deletion, and/or insertion mutation leading to an increased HNF4A transcriptional activity or respectively DNA binding capacity, stability, longer-lasting HNF4A half-life and/or therapeutic effect as compared to the unmodified human wild type HNF4A protein according to SEQ ID NO:100, preferably an engineered HNF4A comprising S87A K106R K108R K126R K127R S142A S143A S148A T166A S167A S313A S378A T429A T432A S436A K458R S461E mutations, preferably SEQ ID NO:140 or a fragment or variant of said sequences having the biological activity of a HNF4A protein.

[0094] In further most preferred embodiments, the present invention relates to an mRNA for use in treating, reversing, preventing, attenuating or inhibiting a liver disease, preferably selected from the group consisting of liver fibrosis, liver cirrhosis, hepatocellular carcinoma (HCC), non-alcoholic fatty liver disease (NAFLD), non-alcoholic steatohepatitis (NASH) and liver cancer, wherein said mRNA comprises an open reading frame (ORF) encoding an engineered HNF4A comprising one or more amino acid substitution, deletion, and/or insertion mutation leading to an increased HNF4A transcriptional activity or respectively DNA binding capacity, stability, longer-lasting HNF4A half-life and/or therapeutic effect as compared to the unmodified human wild type HNF4A protein according to SEQ ID NO:100, preferably an engineered HNF4A comprising S87A K106R K108R K126R K127R S142A S143A S148A T166A S167A S313A S378A T429A T432A S436A K458R S461E mutations, preferably SEQ ID NO:140 or a fragment or variant of said sequences having the biological activity of a HNF4A protein.

[0095] In even further most preferred embodiments, the present invention relates to an mRNA for use in treating, reversing, preventing, attenuating or inhibiting liver fibrosis or liver cirrhosis, wherein said mRNA comprises an open reading frame (ORF) encoding an engineered HNF4A comprising one or more amino acid substitution, deletion, and/or insertion mutation leading to an increased HNF4A transcriptional activity or respectively DNA binding capacity, stability, longer-lasting HNF4A half-life and/or therapeutic effect as compared to the unmodified human wild type HNF4A protein according to SEQ ID NO:100, preferably an engineered HNF4A comprising a S461E mutation, preferably SEQ ID NO:129 or a fragment or variant of said sequences having the biological activity of a HNF4A protein.

[0096] In other preferred embodiments, the present invention relates to an mRNA comprising an open reading frame (ORF) encoding an engineered HNF4A comprising one or more amino acid substitution, deletion, and/or insertion mutation leading to an increased HNF4A transcriptional activity or respectively DNA binding capacity, stability, longer-lasting HNF4A half-life and/or therapeutic effect as compared to the unmodified human wild type HNF4A protein according to SEQ ID NO:100 for use in treating, reversing, preventing, attenuating or inhibiting a liver disease, preferably selected from the group consisting of liver fibrosis, liver cirrhosis, hepatocellular carcinoma (HCC), non-alcoholic fatty liver disease (NAFLD), non-alcoholic steatohepatitis (NASH) and liver cancer, wherein said mRNA preferably has at least 80%, 81%, 82%, 83%, 84%, 85%, 86%, 87%, 88%, 89%, 90%, 91%, 92%, 93%, 94%, 95%, 96%, 97%, 98%, 99%, or 100% sequence identity to any one of SEQ ID NO:250-297, 692-740, 1135-1183, preferably an engineered HNF4A comprising (i) a S87A mutation, (ii) a S461E mutation, (iii) a S87A and a S461E mutation, (iv) S87A K106R K108R K126R K127R, preferably SEQ ID NO:138, (v) S87A K106R K108R K126R K127R S142A S143A S148A T166A S167A S313A S378A T429A T432A S436A K458R, preferably SEQ ID NO:186 or (vi) S87A K106R K108R K126R K127R S142A S143A S148A T166A S167A S313A S378A T429A T432A S436A K458R S461E mutations, preferably SEQ ID NO:140 or a fragment or variant of said sequences, wherein the encoded protein has the biological activity of a HNF4A protein.

[0097] In further preferred embodiments, the present invention relates to an mRNA comprising an ORF encoding an engineered HNF4A comprising one or more amino acid substitution, deletion, and/or insertion mutation leading to an increased HNF4A transcriptional activity or respectively DNA binding capacity, stability, longer-lasting HNF4A half-life and/or therapeutic effect as compared to the unmodified human wild type HNF4A protein according to SEQ ID NO:100, preferably an engineered HNF4A comprising an amino acid sequence having at least 80%, 81%, 82%, 83%, 84%, 85%, 86%, 87%, 88%, 89%, 90%, 91%, 92%, 93%, 94%, 95%, 96%, 97%, 98%, 99%, or 100% sequence identity to SEQ ID NO:250-297, 692-740, 1135-1183 for use in treating, reversing, preventing, attenuating or inhibiting a liver disease, preferably selected from the group consisting of liver fibrosis, liver cirrhosis, hepatocellular carcinoma (HCC), non-alcoholic fatty liver disease (NAFLD), non-alcoholic steatohepatitis (NASH) and liver cancer, wherein said engineered HNF4A comprises at least one substitution or substitution set at one or more positions selected from the group consisting of R2V, K5V, K179R, K180R, K234R, K300R, K307R, K309R, K447R, K470R, K458R, K106R, K108R, K126R, K127R, S313A, S313E, S142A, S143A, S142E, S143E, T166A, T166E, S148A, S148E, S183A, 5183E, S461A, S461E, S167A, S167E, S378A, T429A, T432A, S436A, S378E, T429E, T432E, S436E, S87A, S87E, S95A, S99A, S138A, and T139A and/or combinations thereof, and wherein the amino acid positions of said amino acid sequence are numbered with reference to the human wild-type HNF4A protein (SEQ ID NO:100), preferably an engineered HNF4A comprising (i) a S87A mutation, (ii) a S461E mutation, (iii) a S87A and a S461E mutation, (iv) S87A K106R K108R K126R K127R, preferably SEQ ID NO:138, (v) S87A K106R K108R K126R K127R S142A S143A S148A T166A S167A S313A S378A T429A T432A S436A K458R, preferably SEQ ID NO:186 or (vi) S87A K106R K108R K126R K127R S142A S143A S148A T166A S167A S313A S378A T429A T432A S436A K458R S461E mutations, preferably SEQ ID NO:140.

[0098] As used throughout the context of the whole specification, the term “mutation” in for example “S461E mutation” is to be understood as “substitution”, i.e. is to be understood as an, for example, “S461E substitution”, i.e. a substitution of S461 to S461E.

[0099] A “substitution set” in the context of the present invention is considered to be at least one substitution selected from the group consisting of R2V, K5V, K179R, K180R, K234R, K300R, K307R, K309R, K447R, K470R, K458R, K106R, K108R, K126R, K127R, S313A, S313E, S142A, S143A, S142E, S143E, T166A, T166E, S148A, S148E, S183A, S183E, S461A, S461E, S167A, S167E, S378A, T429A, T432A, S436A, S378E, T429E, T432E, S436E, S87A, S87E, S95A, S99A, S138A, and T139A.

[0100] Further preferably, the substitution set comprises at least a S142A and/or S143A substitution and optionally at least one additional substitution selected from the group consisting of R2V, K5V, K179R, K180R, K234R, K300R, K307R, K309R, K447R, K470R, K458R, K106R, K108R, K126R, K127R, S313A, S313E, S142E, S143E, T166A, T166E, S148A, S148E, S183A, S183E, S461A, S461E, S167A, S167E, S378A, T429A, T432A, S436A, S378E, T429E, T432E, S436E, S87A, S87E, S95A, S99A, S138A, and T139A.

[0101] In another preferred embodiment, the substitution set comprises at least a S87A substitution and optionally at least one additional substitution selected from the group consisting of R2V, K5V, K179R, K180R, K234R, K300R, K307R, K309R, K447R, K470R, K458R, K106R, K108R, K126R, K127R, S313A, S313E, S142A, S143A, S142E, S143E, T166A, T166E, S148A, S148E, S183A, S183E, S461A, S461E, S167A, S167E, S378A, T429A, T432A, S436A, S378E, T429E, T432E, S436E, S87E, S95A, S99A, S138A, and T139A.

[0102] In yet another preferred embodiment, the substitution set comprises at least a S461A substitution and optionally at least one additional substitution selected from the group consisting of R2V, K5V, K179R, K180R, K234R, K300R, K307R, K309R, K447R, K470R, K458R, K106R, K108R, K126R, K127R, S313A, S313E, S142A, S143A, S142E, S143E, T166A, T166E, S148A, S148E, S183A, S183E, S461A, S461E, S167A, S167E, S378A, T429A, T432A, S436A, S378E, T429E, T432E, S436E, S87A, S87E, S95A, S99A, S138A, and T139A.

[0103] In yet another preferred embodiment, the substitution set comprises at least a S461E substitution and optionally at least one additional substitution selected from the group consisting of R2V, K5V, K179R, K180R, K234R, K300R, K307R, K309R, K447R, K470R, K458R, K106R, K108R, K126R, K127R, S313A, S313E, S142A, S143A, S142E, S143E, T166A, T166E, S148A, S148E, S183A, S183E, S461A, S461E, S167A, S167E, S378A, T429A, T432A, S436A, S378E, T429E, T432E, S436E, S87A, S87E, S95A, S99A, S138A, and T139A.

[0104] In yet another preferred embodiment, the substitution set comprises at least a S87A K106R K108R K126R K127R substitution and optionally at least one additional substitution selected from the group consisting of R2V, KSV, K179R, K180R, K234R, K300R, K307R, K309R, K447R, K470R, K458R, K106R, K108R, K126R, K127R, S313A, S313E, S142A, S143A, S142E, S143E, T166A, T166E, S148A, S148E, S183A, S183E, S461A, S461E, S167A, S167E, S378A, T429A, T432A, S436A, S378E, T429E, T432E, S436E, S87A, S87E, S95A, S99A, S138A, and T139A.

[0105] In yet another preferred embodiment, the substitution set comprises at least a K106 K108 K126 K127 substitution and optionally at least one additional substitution selected from the group consisting of R2V, K5V, K179R, K180R, K234R, K300R, K307R, K309R, K447R, K470R, K458R, K106R, K108R, K126R, K127R, S313A, S313E, S142A, S143A, S142E, S143E, T166A, T166E, S148A, S148E, S183A, S183E, S461A, S461E, S167A, S167E, S378A, T429A, T432A, S436A, S378E, T429E, T432E, S436E, S87A, S87E, S95A, S99A, S138A, and T139A.

[0106] In yet another preferred embodiment, the substitution set comprises at least a S378A T429A T432A S436A substitution and optionally at least one additional substitution selected from the group consisting of R2V, K5V, K179R, K180R, K234R, K300R, K307R, K309R, K447R, K470R, K458R, K106R, K108R, K126R, K127R, S313A, S313E, S142A, S143A, S142E, S143E, T166A, T166E, S148A, S148E, S183A, S183E, S461A, S461E, S167A, S167E, S378A, T429A, T432A, S436A, S378E, T429E, T432E, S436E, S87A, S87E, S95A, S99A, S138A, and T139A.

[0107] In yet another preferred embodiment, the substitution set comprises at least a S87A K106R K108R K126R K127R S142A S143A S148A T166A S167A S313A S378A T429A T432A S436A K458R substitution and optionally at least one additional substitution selected from the group consisting of R2V, K5V, K179R, K180R, K234R, K300R, K307R, K309R, K447R, K470R, K458R, K106R, K108R, K126R, K127R, S313A, S313E, S142A, S143A, S142E, S143E, T166A, T166E, S148A, S148E, S183A, S183E, S461A, S461E, S167A, S167E, S378A, T429A, T432A, S436A, S378E, T429E, T432E, S436E, S87A, S87E, S95A, S99A, S138A, and T139A.

[0108] In yet another preferred embodiment, the substitution set comprises at least a S87A K106R K108R K126R K127R S142A S143A S148A T166A S167A S313A S378A T429A T432A S436A K458R S461E substitution and optionally at least one additional substitution selected from the group consisting of R2V, K5V, K179R, K180R, K234R, K300R, K307R, K309R, K447R, K470R, K458R, K106R, K108R, K126R, K127R, S313A, S313E, S142A, S143A, S142E, S143E, T166A, T166E, S148A, S148E, S183A, S183E, S461A, S461E, S167A, S167E, S378A, T429A, T432A, S436A, S378E, T429E, T432E, S436E, S87A, S87E, S95A, S99A, S138A, and T139A.

[0109] In a further preferred embodiment, the substitution set comprises at least S87A K106R K108R K126R K127R S142A S143A S148A T166A S167A S313A S378A T429A T432A S436A K458R S461E and optionally at least one additional substitution, e.g. based on an exemplary conservative amino acid substitution as shown in Table (i).

[0110] More preferably, the substitution set comprises at least a S461E substitution and optionally at least one additional substitution selected from the group consisting of R2V, K5V, K179R, K180R, K234R, K300R, K307R, K309R, K447R, K470R, K458R, K106R, K108R, K126R, K127R, S313A, S313E, S142A, S143A, S142E, S143E, T166A, T166E, S148A, S148E, S183A, S183E, S461A, S167A, S167E, S378A, T429A, T432A, S436A, S378E, T429E, T432E, S436E, S87A, S87E, S95A, S99A, S138A, and T139A.

[0111] In particularly preferred embodiments, a HNF4A substitution set of the invention for engineering HNF4A is selected from the group consisting of
[0112] (i) “S142A S143A” (i.e. present in combo 1 to 8 and 10 to 19);
[0113] (ii) “5×SP/TP to AP” (S167A S378A T429A T432A S436A, i.e. present in combo 3 to 8, 10 to 11 and 13 to 19; (iii) “5×SP/TP to EP” (S167E S378E T429E T432E S436E; i.e. present in combo 12);
[0114] (iv) “4×K to R” (K106R K108R K126R K127R; present in combo 5, 8 and 9 to 19);
[0115] (v) “S142E S143E”; and
[0116] (vi) any of the substitution sets which are shown in FIG. 1 or FIG. 2 and not mentioned herein in this list (e.g. K179R K180R or K447R K470R).

[0117] In further preferred embodiments, the present invention relates to an mRNA encoding an unmodified human wild type hepatocyte nuclear factor 4 alpha (HNF4A) according to SEQ ID NO:100, preferably wherein said mRNA has at least 80%, 81%, 82%, 83%, 84%, 85%, 86%, 87%, 88%, 89%, 90%, 91%, 92%, 93%, 94%, 95%, 96%, 97%, 98%, 99%, or 100% sequence identity to any one of SEQ ID NO:249, 298, 347, 396, 445, 494, 543, 592, 641, 1576, 1577, 1578, 1627, 1676, 1725, 1774, 1823, 1872, 1921, 1970, 2905, 2906, 2907, 2956, 3005, 3054, 3103, 3152, 3201, 3250, 3299, 4234, 4235, 4236, 4285, 4334, 4383, 4432, 4481, 4530, 4579, 4628, 5719, 5722, 5725, 5728, 5731, or 5734 or a fragment or variant of said sequences, wherein the encoded protein has the biological activity of a HNF4A protein, further, wherein the mRNA further comprises an UTR combination selected from the group consisting of (i) a 5′-UTR derived from a mouse solute carrier family 7 (cationic amino acid transporter, y+ system) (SLC7A3) and a 3′-UTR derived from PSMB3; (ii) a 5′-UTR derived from mouse ribosomal protein L31 (RPL31) and a 3′-UTR derived from a human ribosomal protein S9 (RPS9); (iii) a 5′-UTR derived from ubiquilin 2 (Ubqln2) and a 3′-UTR derived from Guanine nucleotide-binding protein G(s) subunit alpha isoforms short (Gnas); and (iv) a 5′-UTR derived from a hydroxysteroid (17-beta) dehydrogenase 4 gene (HSD17B4) and a 3′-UTR derived from a proteasome subunit beta type-3 (PSMB3) UTR.

[0118] In other embodiments, the
[0119] (i) G/C content of the HNF4A coding sequence is increased compared to the coding sequence of the corresponding wild type HNF4A coding sequence of SEQ ID NO:247 or 248;
[0120] (ii) C content of the HNF4A coding sequence is increased compared to the coding sequence of the corresponding wild type HNF4A coding sequence of SEQ ID NO:247 or 248; and/or
[0121] (iii) at least one codon of the HNF4A coding sequence is adapted to human codon usage, wherein the codon adaptation index (CAI) is preferably increased or maximised in the corresponding HNF4A coding sequence compared to the coding sequence of the corresponding wild type HNF4A coding sequence of SEQ ID NO:247 or 248.

[0122] In even further embodiments, the mRNA of the invention comprises a 5′-cap structure, a poly(A) sequence comprising at least 70 A nucleotides, preferably about 100 A nucleotides, a poly(C) sequence, preferably comprising 10 to 200, 10 to 100, 20 to 70, 20 to 60 or 10 to 40 cytosine nucleotides, and/or at least one histone stem-loop, preferably, wherein the mRNA comprises a 3′-terminal A nucleotide.

[0123] In other embodiments, the mRNA of the invention comprises, preferably in 5′ to 3′ direction, the following elements:
[0124] a) a 5′-cap1 structure;
[0125] b) a 5′-UTR element comprising a nucleic acid sequence, preferably derived from a 5′-UTR of a HSD17B4 gene, comprising the nucleic acid sequence according to SEQ ID NO:1 or 2, or a homolog, a fragment or a variant thereof;
[0126] c) at least one coding sequence as defined herein above or below;
[0127] d) a 3′-UTR element comprising a nucleic acid sequence, preferably derived from a 3′-UTR of a PSMB3 gene, comprising the nucleic acid sequence according to SEQ ID NO:33 or 34, or a homolog, a fragment or a variant thereof;
[0128] e) a poly(A) sequence comprising about 100 adenosine nucleotides, preferably, wherein the mRNA comprises a 3′-terminal A nucleotide;
[0129] f) an optional poly(C) tail, preferably comprising 10 to 40 cytosine nucleotides; and/or
[0130] g) an optional histone stem-loop, preferably comprising the nucleic acid sequence according to SEQ ID NO:63 or 64.

[0131] In more preferred embodiments, the nucleic acid of the invention comprises a coding sequence that comprises at least one of the nucleic acid sequences being identical or at least 70%, 80%, 85%, 86%, 87%, 88%, 89%, 90%, 91%, 92%, 93%, 94%, 95%, 96%, 97%, 98%, or 99% identical to the sequences according to any one of SEQ ID NO:249-297, 692-740, 1135-1183, 298-346, 741-789, 1184-1232, 347-395, 790-838, 1233-1281, 396-444, 839-887, 1282-1330, 445-493, 888-936, 1331-1379, 494-542, 937-985, 1380-1428, 543-591, 986-1034, 1429-1477, 592-640, 1035-1083, 1478-1526, 641-689, 1084-1132, 1527-1575, 1576, 1577, 2019, 2020, 2462, 2463, 1578-1626, 2021-2069, 2464-2512, 1627-1675, 2070-2118, 2513-2561, 1676-1724, 2119-2167, 2562-2610, 1725-1773, 2168-2216, 2611-2659, 1774-1822, 2217-2265, 2660-2708, 1823-1871, 2266-2314, 2709-2757, 1872-1920, 2315-2363, 2758-2806, 1921-1969, 2364-2412, 2807-2855, 1970-2018, 2413-2461, 2856-2904, 2905, 2906, 3348, 3349, 3791, 3792, 2907-2955, 3350-3398, 3793-3841, 2956-3004, 3399-3447, 3842-3890, 3005-3053, 3448-3496, 3891-3939, 3054-3102, 3497-3545, 3940-3988, 3103-3151, 3546-3594, 3989-4037, 3152-3200, 3595-3643, 4038-4086, 3201-3249, 3644-3692, 4087-4135, 3250-3298, 3693-3741, 4136-4184, 3299-3347, 3742-3790, 4185-4233, 4234, 4235, 4677, 4678, 5120, 5121, 4236-4284, 4679-4727, 5122-5170, 4285-4333, 4728-4776, 5171-5219, 4334-4382, 4777-4825, 5220-5268, 4383-4431, 4826-4874, 5269-5317, 4432-4480, 4875-4923, 5318-5366, 4481-4529, 4924-4972, 5367-5415, 4530-4578, 4973-5021, 5416-5464, 4579-4627, 5022-5070, 5465-5513, 4628-4676, 5071-5119, 5514-5562, and 5719-5736 [if only engineered sequences are meant to appear in this list of sequences, sequences related to WT HNF4A are herewith excluded from the aforementioned list] or a fragment or variant of any of these sequences, encoding wild type or engineered HNF4A protein variants as provided in Table A and Table B (reference to Table B is intended to be understood herein as being to Table B-I and/or Table B-II and/or Table B-III), and under <223> identifier of the ST25 sequence listing of respective sequence SEQ ID NOs [here, and throughout the whole specification, it has to be noted that the priority application was filed with a sequence listing in accordance with the WIPO Standard ST.25, which then was converted into a sequence listing according to WIPO Standard ST.26—information which was comprised within line <223> in ST.25 now was added to the respective SEQ ID NO: as a note under “feature key”, i.e. “misc_feature” (for nucleic acids) or “REGION” (for proteins)]. A further preferred nucleic acid sequence is any sequence selected from the group consisting of SEQ ID NO:249-5562, and SEQ ID NO:5719-5736.

[0132] Preferred nucleic acid sequences, preferably mRNA sequences of the invention are provided in Table A. Therein, each row represents a specific suitable HNF4A construct of the invention (for column designation: see above), wherein the description of the HNF4A construct is indicated in column A of Table A and the SEQ ID NOs of the amino acid sequence of the respective HNF4A construct is provided in column B. The corresponding SEQ ID NOs of the coding sequences encoding the respective HNF4A constructs are provided in Table A. Further detailed information on the specific sequences is provided under <223> identifier of the respective SEQ ID NOs in the sequence listing [here, and throughout the whole specification, it has to be noted that the priority application was filed with a sequence listing in accordance with the WIPO Standard ST.25, which then was converted into a sequence listing according to WIPO Standard ST.26—information which was comprised within line <223> in ST.25 now was added to the respective SEQ ID NO: as a note under “feature key”, i.e. “misc_feature” (for nucleic acids) or “REGION” (for proteins)].

[0133] Table A: preferred mRNA sequences and constructs of the invention. The first column (“SEQ ID NO: Protein”) describes each HNF protein of the invention. The second column (“SEQ ID NO: CDS wt”) describes different SET CDS encoding HNF4A. The following columns (“CDS opt1” to “CDS opt29”) describe different inventive mRNA constructs (i.e. “i-3”, “a-1”) having different CDS optimization (i.e. “CDS opt1” to “CDS opt29”), each encoding HNF4A WT or engineered HNF4A variants. More information on the sequences is disclosed in the ST.25 sequence listing under <223> Other Information [here, and throughout the whole specification, it has to be noted that the priority application was filed with a sequence listing in accordance with the WIPO Standard ST.25, which then was converted into a sequence listing according to WIPO Standard ST.26—information which was comprised within line <223> in ST.25 now was added to the respective SEQ ID NO: as a note under “feature key”, i.e. “misc_feature” (for nucleic acids) or “REGION” (for proteins)]. Each sequence or construct as shown in Table A or the sequence listing resembles a preferred construct of the invention.

TABLE A
preferred mRNA sequences and constructs of the invention

| | SEQ ID | SEQ ID | | | | | | | | |
|---|---|---|---|---|---|---|---|---|---|---|
| | NO: | NO: | CDS | CDS | CDS | CDS | CDS | CDS | CDS | CDS |
| | Protein | CDS wt | opt1 | opt2 | opt3 | opt4 | opt5 | opt11 | opt28 | opt29 |
| Sum of | 100- | 247, | 249- | 347- | 396- | 445- | 494- | 543- | 592- | 641- |
| All | 246 | 248, | 346, | 395, | 444, | 493, | 542, | 591, | 640, | 689, |
| HNF4A | | 690, | 692- | 790- | 839- | 888- | 937- | 986- | 1035- | 1084- |
| | | 691, | 789, | 838, | 887, | 936, | 985, | 1034, | 1083, | 1132, |
| | | 1133, | 1135- | 1233- | 1282- | 1331- | 1380- | 1429- | 1478- | 1527- |
| | | 1134 | 1232 | 1281 | 1330 | 1379 | 1428 | 1477 | 1526 | 1575 |
| Sum of | 100- | 247, | 249- | 347- | 396- | 445- | 494- | 543- | 592- | 641- |
| HNF4A | 148 | 248 | 346 | 395 | 444 | 493 | 542 | 591 | 640 | 689 |
| 1-474 | | | | | | | | | | |
| Sum of | 149- | 690, | 692- | 790- | 839- | 888- | 937- | 986- | 1035- | 1084 |
| HNF4A | 197 | 691 | 789 | 838 | 887 | 936 | 985 | 1034 | 1083 | 1132 |
| 1-375 | | | | | | | | | | |
| Sum of | 198- | 1133, | 1135- | 1233- | 1282- | 1331- | 1380- | 1429- | 1478- | 1527- |
| HNF4A | 246 | 1134 | 1232 | 1281 | 1330 | 1379 | 1428 | 1477 | 1526 | 1575 |
| 39-474 | | | | | | | | | | |
| HNF1A | 5672 | 5673, | 5675 | 5676 | 5677 | 5678 | 5679 | 5680 | 5681 | 5682 |
| 1-631 | | 5674 | | | | | | | | |
| Sum of | 100- | 247, | 249- | 347- | 396- | 445- | 494- | 543- | 592- | 641- |
| All | 246, | 248, | 346, | 395, | 444, | 493 | 542, | 591, | 640, | 689, |
| HNF4A + | 5672 | 690, | 692- | 790- | 839- | 888- | 937- | 986- | 1035- | 1084- |
| HNF1A | | 691, | 789, | 838, | 887, | 936, | 985, | 1034, | 1083, | 1132, |
| | | 1133, | 1135- | 1233- | 1282- | 1331- | 1380- | 1429- | 1478- | 1527- |
| | | 1134, | 1232, | 1281, | 1330, | 1379, | 1428, | 1477, | 1526, | 1575, |
| | | 5673, | 5675 | 5676 | 5677 | 5678 | 5679 | 5680 | 5681 | 5682 |
| | | 5674 | | | | | | | | |

| | | mRNA | mRNA | mRNA | mRNA | mRNA | mRNA | mRNA | mRNA |
|---|---|---|---|---|---|---|---|---|---|
| | mRNA | i-3 | i-3 | i-3 | i-3 | i-3 | i-3 | i-3 | i-3 |
| | i-3 wt | opt1 | opt2 | opt3 | opt4 | opt5 | opt11 | opt28 | opt29 |
| Sum of | 1576, | 1578- | 1676- | 1725- | 1774- | 1823- | 1872- | 1921- | 1970- |
| All | 1577, | 1675, | 1724, | 1773, | 1822, | 1871, | 1920, | 1969, | 2018, |
| HNF4A | 2019, | 2021- | 2119- | 2168- | 2217- | 2266- | 2315- | 2364- | 2413- |
| | 2020, | 2118, | 2167, | 2216, | 2265, | 2314, | 2363, | 2412, | 2461, |
| | 2462, | 2464- | 2562- | 2611- | 2660- | 2709- | 2758- | 2807- | 2856- |
| | 2463 | 2561 | 2610 | 2659 | 2708 | 2757 | 2806 | 2855 | 2904 |
| Sum of | 1576, | 1578- | 1676- | 1725- | 1774- | 1823- | 1872- | 1921- | 1970- |
| HNF4A | 1577 | 1675 | 1724 | 1773 | 1822 | 1871 | 1920 | 1969 | 2018 |
| 1-474 | | | | | | | | | |
| Sum of | 2019, | 2021- | 2119- | 2168- | 2217- | 2266- | 2315- | 2364- | 2413- |
| HNF4A | 2020 | 2118 | 2167 | 2216 | 2265 | 2314 | 2363 | 2412 | 2461 |
| 1-375 | | | | | | | | | |
| Sum of | 2462, | 2464- | 2562- | 2611- | 2660- | 2709- | 2758- | 2807- | 2856- |
| HNF4A | 2463 | 2561 | 2610 | 2659 | 2708 | 2757 | 2806 | 2855 | 2904 |
| 39-474 | | | | | | | | | |
| HNF1A | 5683, | 5685 | 5686 | 5687 | 5688 | 5689 | 5690 | 5691 | 5692 |
| 1-631 | 5684 | | | | | | | | |
| Sum of | 1576, | 1578- | 1676- | 1725- | 1774- | 1823- | 1872- | 1921- | 1970- |
| All | 1577, | 1675, | 1724, | 1773, | 1822, | 1871, | 1920, | 1969, | 2018, |
| HNF4A + | 2019, | 2021- | 2119- | 2168- | 2217- | 2266- | 2315- | 2364- | 2413- |
| HNF1A | 2020, | 2118, | 2167, | 2216, | 2265, | 2314, | 2363, | 2412, | 2461, |
| | 2462, | 2464- | 2562- | 2611- | 2660- | 2709- | 2758- | 2807- | 2856- |
| | 2463, | 2561, | 2610, | 2659, | 2708, | 2757, | 2806, | 2855, | 2904, |
| | 5683, | 5685 | 5686 | 5687 | 5688 | 5689 | 5690 | 5691 | 5692 |
| | 5684 | | | | | | | | |
| | mRNA | mRNA | mRNA | mRNA | mRNA | mRNA | mRNA | mRNA | mRNA |
| | a-1 | a-1 | a-1 | a-1 | a-1 | a-1 | a-1 | a-1 | a-1 |
| | hSL- | hSL- | hSL- | hSL- | hSL- | hSL- | hSL- | hSL- | hSL- |
| | A100 | A100 | A100 | A100 | A100 | A100 | A100 | A100 | A100 |
| | wt | opt1 | opt2 | opt3 | opt4 | opt5 | opt11 | opt28 | opt29 |
| Sum of | 2905, | 2907- | 3005- | 3054- | 3103- | 3152- | 3201- | 3250- | 3299- |
| All | 2906, | 3004, | 3053, | 3102, | 3151, | 3200, | 3249, | 3298, | 3347, |
| HNF4A | 3348, | 3350- | 3448- | 3497- | 3546- | 3595- | 3644- | 3693- | 3742- |
| | 3349, | 3447, | 3496, | 3545, | 3594, | 3643, | 3692, | 3741, | 3790, |
| | 3791, | 3793- | 3891- | 3940- | 3989- | 4038- | 4087- | 4136- | 4185- |
| | 3792 | 3890, | 3939 | 3988 | 4037 | 4086 | 4135 | 4184 | 4233, |
| | | 5719- | | | | | | | 5728- |
| | | 5727 | | | | | | | 5736 |
| Sum of | 2905, | 2907- | 3005- | 3054- | 3103- | 3152- | 3201- | 3250- | 3299- |
| HNF4A | 2906 | 3004, | 3053 | 3102 | 3151 | 3200 | 3249 | 3298 | 3347, |
| 1-474 | | 5719- | | | | | | | 5728- |
| | | 5727 | | | | | | | 5736 |
| Sum of | 3348, | 3350- | 3448- | 3497- | 3546- | 3595 | 3644- | 3693- | 3742- |
| HNF4A | 3349 | 3447 | 3496 | 3545 | 3594 | 3643 | 3692 | 3741 | 3790 |
| 1-375 | | | | | | | | | |
| Sum of | 3791, | 3793- | 3891- | 3940- | 3989 | 4038- | 4087- | 4136- | 4185- |
| HNF4A | 3792 | 3890 | 3939 | 3988 | 4037 | 4086 | 4135 | 4184 | 4233 |
| 39-474 | | | | | | | | | |
| HNF1A | 5693, | 5695, | 5696 | 5697 | 5698 | 5699 | 5700 | 5701 | 5702 |
| 1-631 | 5694 | 5716- | | | | | | | |
| | | 5718 | | | | | | | |
| Sum of | 2905, | 2907- | 3005- | 3054- | 3103- | 3152- | 3201- | 3250- | 3299- |
| All | 2906, | 3004, | 3053, | 3102, | 3151, | 3200, | 3249, | 3298, | 3347, |
| HNF4A + | 3348, | 3350- | 3448- | 3497- | 3546- | 3595- | 3644- | 3693- | 3742- |
| HNF1A | 3349, | 3447, | 3496, | 3545, | 3594, | 3643, | 3692, | 3741, | 3790, |
| | 3791, | 3793- | 3891- | 3940- | 3989- | 4038- | 4087- | 4136- | 4185- |
| | 3792, | 3890, | 3939, | 3988, | 4037, | 4086, | 4135, | 4184, | 4233, |
| | 5693, | 5695, | 5696 | 5697 | 5698 | 5699 | 5700 | 5701 | 5702, |
| | 5694 | 5716- | | | | | | | 5728- |
| | | 5727 | | | | | | | 5736 |
| | mRNA | mRNA | mRNA | mRNA | mRNA | mRNA | mRNA | mRNA | mRNA |
| | a-1 | a-1 | a-1 | a-1 | a-1 | a-1 | a-1 | a-1 | a-1 |
| | A100 | A100 | A100 | A100 | A100 | A100 | A100 | A100 | A100 |
| | wt | opt1 | opt2 | opt3 | opt4 | opt5 | opt11 | opt28 | opt29 |
| Sum of | 4234, | 4236- | 4334- | 4383- | 4432- | 4481- | 4530- | 4579- | 4628- |
| All | 4235, | 4333, | 4382, | 4431, | 4480, | 4529, | 4578, | 4627, | 4676, |
| HNF4A | 4677, | 4679- | 4777- | 4826- | 4875- | 4924- | 4973- | 5022- | 5071- |
| | 4678, | 4776, | 4825, | 4874, | 4923, | 4972, | 5021, | 5070, | 5119, |
| | 5120, | 5122- | 5220- | 5269- | 5318- | 5367- | 5416- | 5465- | 5514- |
| | 5121 | 5219 | 5268 | 5317 | 5366 | 5415 | 5464 | 5513 | 5562 |
| Sum of | 4234, | 4236- | 4334- | 4383- | 4432- | 4481- | 4530- | 4579- | 4628- |
| HNF4A | 4235 | 4333 | 4382 | 4431 | 4480 | 4529 | 4578 | 4627 | 4676 |
| 1-474 | | | | | | | | | |
| Sum of | 4677, | 4679- | 4777- | 4826- | 4875- | 4924- | 4973- | 5022- | 5071- |
| HNF4A | 4678 | 4776 | 4825 | 4874 | 4923 | 4972 | 5021 | 5070 | 5119 |
| 1-375 | | | | | | | | | |
| Sum of | 5120, | 5122- | 5220- | 5269- | 5318- | 5367- | 5416- | 5465- | 5514- |
| HNF4A | 5121 | 5219 | 5268 | 5317 | 5366 | 5415 | 5464 | 5513 | 5562 |
| 39-474 | | | | | | | | | |
| HNF1A | 5703, | 5705 | 5706 | 5707 | 5708 | 5709 | 5710 | 5711 | 5712 |
| 1-631 | 5704 | | | | | | | | |
| Sum of | 4234, | 4236- | 4334- | 4383- | 4432- | 4481- | 4530- | 4579- | 4628- |
| All | 4235, | 4333, | 4382, | 4431, | 4480, | 4529, | 4578, | 4627, | 4676, |
| HNF4A + | 4677, | 4679- | 4777- | 4826- | 4875- | 4924- | 4973- | 5022- | 5071- |
| HNF1A | 4678, | 4776, | 4825, | 4874, | 4923, | 4972, | 5021, | 5070, | 5119, |
| | 5120, | 5122- | 5220- | 5269- | 5318- | 5367- | 5416- | 5465- | 5514- |
| | 5121 | 5219 | 5268 | 5317 | 5366 | 5415 | 5464 | 5513 | 5562 |
| | 5703, | 5705 | 5706 | 5707 | 5708 | 5709 | 5710 | 5711 | 5712 |
| | 5704 | | | | | | | | |

[0134] Thus, SEQ ID NO:1 to SEQ ID NO:5736 are preferred sequences useful in the context of the present invention. Detailed information related to the preferred sequences of the present invention is disclosed in the ST.25 sequence listing under <223> Other Information [here, and throughout the whole specification, it has to be noted that the priority application was filed with a sequence listing in accordance with the WIPO Standard ST.25, which then was converted into a sequence listing according to WIPO Standard ST.26—information which was comprised within line <223> in ST.25 now was added to the respective SEQ ID NO: as a note under “feature key”, i.e. “misc_feature” (for nucleic acids) or “REGION” (for proteins)], which is easily accessible for a skilled artisan. Generally, regarding lists of sequences, if only engineered HNF4A sequences are meant to appear in a certain list of sequences, sequences related to WT HNF4A which erroneously were included are herewith excluded from said list. The same is true vice versa for lists which should comprise only WT HNF4A sequences.

[0135] In further preferred embodiments, by engineering of the protein sequence the intracellular stability was improved and/or the transcriptional activity of HNF4A—both specific features, which make use of the specific mRNA medicine feature of being active intracellularly, in contrast to classic protein replacement therapies which would not be sufficient to treat intracellular defects.

[0136] It has to be understood that, on nucleic acid level, any sequence (DNA or RNA sequence) which encodes an amino acid sequences being identical or at least 70%, 80%, 85%, 86%, 87%, 88%, 89%, 90%, 91%, 92%, 93%, 94%, 95%, 96%, 97%, 98%, or 99% identical to any one of SEQ ID NO:249-297, 692-740, 1135-1183, 298-346, 741-789, 1184-1232, 347-395, 790-838, 1233-1281, 396-444, 839-887, 1282-1330, 445-493, 888-936, 1331-1379, 494-542, 937-985, 1380-1428, 543-591, 986-1034, 1429-1477, 592-640, 1035-1083, 1478-1526, 641-689, 1084-1132, 1527-1575, 1576, 1577, 2019, 2020, 2462, 2463, 1578-1626, 2021-2069, 2464-2512, 1627-1675, 2070-2118, 2513-2561, 1676-1724, 2119-2167, 2562-2610, 1725-1773, 2168-2216, 2611-2659, 1774-1822, 2217-2265, 2660-2708, 1823-1871, 2266-2314, 2709-2757, 1872-1920, 2315-2363, 2758-2806, 1921-1969, 2364-2412, 2807-2855, 1970-2018, 2413-2461, 2856-2904, 2905, 2906, 3348, 3349, 3791, 3792, 2907-2955, 3350-3398, 3793-3841, 2956-3004, 3399-3447, 3842-3890, 3005-3053, 3448-3496, 3891-3939, 3054-3102, 3497-3545, 3940-3988, 3103-3151, 3546-3594, 3989-4037, 3152-3200, 3595-3643, 4038-4086, 3201-3249, 3644-3692, 4087-4135, 3250-3298, 3693-3741, 4136-4184, 3299-3347, 3742-3790, 4185-4233, 4234, 4235, 4677, 4678, 5120, 5121, 4236-4284, 4679-4727, 5122-5170, 4285-4333, 4728-4776, 5171-5219, 4334-4382, 4777-4825, 5220-5268, 4383-4431, 4826-4874, 5269-5317, 4432-4480, 4875-4923, 5318-5366, 4481-4529, 4924-4972, 5367-5415, 4530-4578, 4973-5021, 5416-5464, 4579-4627, 5022-5070, 5465-5513, 4628-4676, 5071-5119, 5514-5562, and 5719-5736 or fragments or variants thereof, may be selected and may accordingly be understood as suitable coding sequence of the invention. Further information regarding said amino acid sequences is also provided in Table A and Table B-I/B-II, and under <223> identifier of the ST25 sequence listing of respective sequence SEQ ID NOs [here, and throughout the whole specification, it has to be noted that the priority application was filed with a sequence listing in accordance with the WIPO Standard ST.25, which then was converted into a sequence listing according to WIPO Standard ST.26—information which was comprised within line <223> in ST.25 now was added to the respective SEQ ID NO: as a note under “feature key”, i.e. “misc_feature” (for nucleic acids) or “REGION” (for proteins)].

[0137] According to preferred embodiments, the nucleic acid of the invention comprises at least one coding sequence encoding at least one HNF4A protein or engineered protein variant, preferably as defined above or below, or fragments and variants thereof. In that context, any coding sequence encoding at least one protein or engineered protein variant as defined herein, or fragments and variants thereof may be understood as suitable coding sequence and may therefore be comprised in the nucleic acid of the invention.

### HNF4A Protein Sequences (WT Protein and Engineered HNF4A Protein Variants)

[0138] Details regarding engineered HNF4A protein variants and constructs being superior in terms of expression, activity and/or therapeutic effect and which are in sum beneficial when administered to a patient in need (any one of SEQ ID NO:100-148, 149-197, or 198-246, preferably SEQ ID NO:138, more preferably SEQ ID NO:186, even more preferably SEQ ID NO:140) are provided herein below in Table B-I/B-II. Amino acid positions provided in Table B-I/B-II and also throughout the whole specification, are made with reference to SEQ ID NO:100. The column designations of the following tables are as follows (reference is made again to the <223> identifier of the ST25 sequence listing of respective sequence SEQ ID NOs, which provides more detailed information on the sequences [here, and throughout the whole specification, it has to be noted that the priority application was filed with a sequence listing in accordance with the WIPO Standard ST.25, which then was converted into a sequence listing according to WIPO Standard ST.26—information which was comprised within line <223> in ST.25 now was added to the respective SEQ ID NO: as a note under “feature key”, i.e. “misc_feature” (for nucleic acids) or “REGION” (for proteins)]):
[0139] Column A provides a short description of suitable HNF4A variant(s) or construct(s);
[0140] Column B provides protein (amino acid) SEQ ID NOs of respective HNF4A variant(s) or construct(s);
[0141] Column C provides SEQ ID NO of the corresponding wild type nucleic acid coding sequence(s);
[0142] Column D provides SEQ ID NO of the corresponding G/C optimized nucleic acid coding sequence(s) (opt1, gc);
[0143] Column E provides SEQ ID NO of the corresponding human codon usage adapted nucleic acid coding sequence(s) (opt3, human); and
[0144] Column F provides SEQ ID NO of other corresponding codon or sequence optimized nucleic acid coding sequence(s).

[0145] For example, to prevent inhibitory ubiquitination and acetylation of HNF4A, arginine mutants were inserted. As the impact of phosphorylation on HNF4A activity is unclear, complementary phospho-incompetent (alanine) and phospho-mimetic (glutamate) mutants were generated.

[0146] Notably, the description of the invention explicitly includes the information provided under <223> identifier of the ST.25 sequence listing of the present application [here, and throughout the whole specification, it has to be noted that the priority application was filed with a sequence listing in accordance with the WIPO Standard ST.25, which then was converted into a sequence listing according to WIPO Standard ST.26—information which was comprised within line <223> in ST.25 now was added to the respective SEQ ID NO: as a note under “feature key”, i.e. “misc_feature” (for nucleic acids) or “REGION” (for proteins)]. Preferred nucleic acid constructs comprising coding sequences of Table B-I/B-II, e.g. mRNA sequences comprising the coding sequences of Table B-I/B-II are provided in Table C1/2.

TABLE B-I
Exemplary suitable HNF4A protein designs including mRNAs encoding said proteins
(see also Table B-II for description of the specific related SEQ ID NO).

| | Set- | | Mutated amino acid positions made |
|---|---|---|---|
| Row | Number | Alternative name | with reference to SEQ ID NO: 100. |
| 1 | Set A-1 | — | Δ376-474 |
| 2 | Set A-2 | — | Δ1-38 |
| 3 | Set A-3 | — | E285Q |
| 4 | Set A-4 | — | R2V |
| 5 | Set A-5 | — | R2V K5V |
| 6 | Set A-6 | — | K179R K180R |
| 7 | Set A-7 | — | K234R |
| 8 | Set A-8 | — | K300R |
| 9 | Set A-9 | — | K300R K307R K309R |
| 10 | Set A-10 | — | K447R K470R |
| 11 | Set A-11 | — | K458R |
| 12 | Set A-12 | 4x K to R | K106R K108R K126R K127R |
| 13 | Set B-1 | — | S313A |
| 14 | Set B-2 | — | S313E |
| 15 | Set B-3 | — | S142A S143A |
| 16 | Set B-4 | — | S142E S143E |
| 17 | Set B-5 | — | S143A |
| 18 | Set B-6 | — | T166A |
| 19 | Set B-7 | — | T166E |
| 20 | Set B-8 | — | S148A |
| 21 | Set B-9 | — | S148E |
| 22 | Set B-10 | — | S183A |
| 23 | Set B-11 | — | S183E |
| 24 | Set B-12 | — | S461A |
| 25 | Set B-13 | — | S461E |
| 26 | Set B-14 | — | S167A |
| 27 | Set B-15 | — | S167E |
| 28 | Set B-16 | — | S167A S378A T429A T432A S436A |
| 29 | Set B-17 | — | S167E S378E T429E T432E S436E |
| 30 | Set B-18 | — | S87A |
| 31 | Set B-19 | — | S87E |
| 32 | Set C-1 | combo 1 | S142A S143A S313A |
| 33 | Set C-2 | combo 2 | S142A S143A S313A K458R |
| 34 | Set C-3 | combo 3 | S142A S143A S167A S313A S378A T429A T432A |
| | | | S436A K458R |
| 35 | Set C-4 | combo 4 | S142A S143A S148A S167A S313A S378A T429A |
| | | | T432A S436A K458R |
| 36 | Set C-5 | combo 5 | K106R K108R K126R K127R S142A S143A S148A |
| | | | S167A S313A S378A T429A T432A S436A K458R |
| 37 | Set C-6 | combo 6 | S142A S143A S148A T166A S167A S313A S378A |
| | | | T429A T432A S436A K458R |
| 38 | Set C-7 | combo 7 | S87A S142A S143A S148A T166A S167A S313A |
| | | | S378A T429A T432A S436A K458R |
| 39 | Set C-8 | combo 8 | S87A K106R K108R K126R K127R S142A S143A |
| | | | S148A T166A S167A S313A S378A T429A T432A |
| | | | S436A K458R |
| 39.1 | Set D-0.1 | 5x SP/TP to AP | S167A S378A T429A T432A S436A |
| 40 | Set D-1 | combo 9 (=S87A 4x K to R) | S87A K106R K108R K126R K127R |
| 41 | Set D-2 | combo 10 (=combo 8 + | S87A K106R K108R K126R K127R S142A S143A |
| | | S461A) | S148A T166A S167A S313A S378A T429A T432A |
| | | | S436A K458R S461A |
| 42 | Set D-3 | combo 11 (=combo 8 + | S87A K106R K108R K126R K127R S142A S143A |
| | | S461E) | S148A T166A S167A S313A S378A T429A T432A |
| | | | S436A K458R S461E |
| 43 | Set D-4 | combo 12 | S87A K106R K108R K126R K127R S142A S143A |
| | | | S148E T166A S167E S313A S378E T429E T432E |
| | | | S436E K458R S461E |
| 44 | Set D-5 | combo 13 | S87A K106R K108R K126R K127R S142A S143A |
| | | | S148A T166A S167A K179R K180R S313A S378A |
| | | | T429A T432A S436A K458R S461E |
| 45 | Set D-6 | combo 14 | S87A K106R K108R K126R K127R S142A S143A |
| | | | S148A T166A S167A K300R K307R K309R S313A |
| | | | S378A T429A T432A S436A K458R S461E |
| 46 | Set D-7 | combo 15 | S87A K106R K108R K126R K127R S142A S143A |
| | | | S148A T166A S167A S313A S378A T429A T432A |
| | | | S436A K447R K458R S461E K470R |
| 47 | Set D-8 | combo 16 | S87A K106R K108R K126R K127R S142A S143A |
| | | | S148A T166A S167A K179R K180R K234R K300R |
| | | | K307R K309R S313A S378A T429A T432A S436A |
| | | | K447R K458R S461E K470R |
| 48 | Set D-9 | combo 17 | S87A S95A S99A K106R K108R K126R K127R S142A |
| | | | S143A S148A T166A S167A S313A S378A T429A |
| | | | T432A S436A K458R S461E |
| 49 | Set D-10 | combo 18 | S87A K106R K108R K126R K127R S138A T139A |
| | | | S142A S143A S148A T166A S167A S313A S378A |
| | | | T429A T432A S436A K458R S461E |
| 50 | Set D-11 | combo 19 | S87A S95A S99A K106R K108R K126R K127R S138A |
| | | | T139A S142A S143A S148A T166A S167A S313A |
| | | | S378A T429A T432A S436A K458R S461E |

More information on the sequences is disclosed in the ST.25 sequence listing under <223> Other Information [here, and throughout the whole specification, it has to be noted that the priority application was filed with a sequence listing in accordance with the WIPO Standard ST.25, which then was converted into a sequence listing according to WIPO Standard ST.26—information which was comprised within line <223> in ST.25 now was added to the respective SEQ ID NO: as a note under “feature key”, i.e. “misc_feature” (for nucleic acids) or “REGION” (for proteins)]. Each construct as shown in the sequence listing resembles a preferred construct of the invention.

### Regarding the Different Sets of Mutations

[0147] the beneficial mutation set “S142A S143A” is present in combo 1 to 8 and 10 to 19;
[0148] the beneficial mutation set “5×SP/TP to AP” (S167A S378A T429A T432A S436A) is present in combo 3-8, 10-11, 13-19
[0149] the beneficial mutation set “5×SP/TP to EP” (S167E S378E T429E T432E S436E) is present in combo 12;
[0150] the beneficial mutation set “4×K to R” (K106R K108R K126R K127R) is present in combo 5, 8 and 9 to 19.

TABLE B-II
Exemplary suitable HNF4A protein designs including mRNAs encoding the respective proteins including
SEQ ID NO-references (see also Table B-I for description of the specific HNF4A mutations).

| A (Set-Number) | B | C | D | E | F |
|---|---|---|---|---|---|
| WT and Set A-1, Set A-2, Set A-3, Set A- | 100-148, | 247, | 249-297, | 396-444, | 347-395, 790-838, |
| 4, Set A-5, Set A-6, Set A-7, Set A-8, Set | 149-197, | 248, | 692-740, | 839-887, | 1233-1281, 396-444, |
| A-9, Set A-10, Set A-11, Set A-12, Set B- | 198-246 | 690, | 1135-1183, | 1282-1330 | 839-887, 1282-1330, |
| 1, Set B-2, Set B-3, Set B-4, Set B-5, Set | | 691, | 298-346, | | 445-493, 888-936, |
| B-6, Set B-7, Set B-8, Set B-9, Set B-10, | | 1133, | 741-789, | | 1331-1379, 494-542, |
| Set B-11, Set B-12, Set B-13, Set B-14, | | 1134 | 1184-1232 | | 937-985, 1380-1428, |
| Set B-15, Set B-16, Set B-17, Set B-18, | | | | | 543-591, 986-1034, |
| Set B-19, Set C-1 − combo 1, Set C-2 − | | | | | 1429-1477, 592-640, |
| combo 2, Set C-3 − combo 3, Set C-4 − | | | | | 1035-1083, 1478-1526, |
| combo 4, Set C-5 − combo 5, Set C-6 − | | | | | 641-689, 1084-1132, |
| combo 6, Set C-7 − combo 7, Set C-8 − | | | | | 1527-1575 |
| combo 8, combo 9 (Set D-1 − S87A 4x K | | | | | |
| to R), combo 10 (Set D-2 − combo 8 + | | | | | |
| S461A), combo 11 (Set D-3), Set D-4 − | | | | | |
| combo 12, Set D-5 − combo 13, Set D-6 − | | | | | |
| combo 14, Set D-7 − combo 15, Set D-8 − | | | | | |
| combo 16, Set D-9 − combo 17, Set D-10 − | | | | | |
| combo 18, Set D-11 − combo 19 | | | | | |

More information on the sequences is disclosed in the ST.25 sequence listing under <223> Other Information [here, and throughout the whole specification, it has to be noted that the priority application was filed with a sequence listing in accordance with the WIPO Standard ST.25, which then was converted into a sequence listing according to WIPO Standard ST.26—information which was comprised within line <223> in ST.25 now was added to the respective SEQ ID NO: as a note under “feature key”, i.e. “misc_feature” (for nucleic acids) or “REGION” (for proteins)]. Each sequence or construct as shown in Table A or the sequence listing resembles a preferred construct of the invention.
[0151] Column A provides a short description of suitable HNF4A variant(s) or construct(s), wherein
   [0152] SEQ ID NO:100, 247, 248, 249, 298, 347, 396, 445, 494, 543, 592, 641, 1576, 1577, 1578, 1627, 1676, 1725, 1774, 1823, 1872, 1921, 1970, 2905, 2906, 2907, 2956, 3005, 3054, 3103, 3152, 3201, 3250, 3299, 4234, 4235, 4236, 4285, 4334, 4383, 4432, 4481, 4530, 4579, 4628, 5719, 5722, 5725, 5728, 5731, and 5734 are related to WT sequences (HNF4A protein and encoding mRNA);
   [0153] SEQ ID NO:149, 690, 691, 692, 741, 790, 839, 888, 937, 986, 1035, 1084, 2019, 2020, 2021, 2070, 2119, 2168, 2217, 2266, 2315, 2364, 2413, 3348, 3349, 3350, 3399, 3448, 3497, 3546, 3595, 3644, 3693, 3742, 4677, 4678, 4679, 4728, 4777, 4826, 4875, 4924, 4973, 5022, 5071 are related to WT sequences (HNF4A protein and encoding mRNA); and
   [0154] SEQ ID NO:198, 1133, 1134, 1135, 1184, 1233, 1282, 1331, 1380, 1429, 1478, 1527, 2462, 2463, 2464, 2513, 2562, 2611, 2660, 2709, 2758, 2807, 2856, 3791, 3792, 3793, 3842, 3891, 3940, 3989, 4038, 4087, 4136, 4185, 5120, 5121, 5122, 5171, 5220, 5269, 5318, 5367, 5416, 5465, 5514 are related to WT sequences (HNF4A protein and encoding mRNA)
[0155] Column B provides protein (amino acid) SEQ ID NOs of respective HNF4A variant(s) or construct(s);
[0156] Column C provides SEQ ID NO of the corresponding wild type nucleic acid coding sequence(s);
[0157] Column D provides SEQ ID NO of the corresponding G/C optimized nucleic acid coding sequence(s) (opt1, gc);
[0158] Column E provides SEQ ID NO of the corresponding human codon usage adapted nucleic acid coding sequence(s) (opt3, human); and
[0159] Column F provides SEQ ID NO of other corresponding codon or sequence optimized nucleic acid coding sequence(s).

[0160] In particularly preferred aspects and embodiments of the invention, the protein of the invention comprises or consists of at least one of the amino acid sequences having at least 80%, 81%, 82%, 83%, 84%, 85%, 86%, 87%, 88% h, 89%, 90%, 91%, 92%, 93%, 94%, 95%, 96%, 97%, 98%, 99%, or 100% sequence identity to any one of SEQ ID NO:100-148, 149-197, or 198-246, or a fragment or variant of said sequences having the biological activity of a HNF4A hepatocyte nuclear factor 4 alpha (HNF4A) protein.

[0161] In preferred embodiments, the engineered HNF4A protein variant with increased HNF4A transcriptional activity, DNA binding capacity, stability, longer-lasting HNF4A half-life and/or therapeutic effect is selected from Table B-III. In preferred embodiments, any of these sequences is encoded by an mRNA of the invention, as described herein or in the sequence listing.

TABLE B-III
Preferred exemplary suitable HNF4A protein designs of the invention (see
also Table B-I or II for description of the specific related SEQ ID NO)

| SEQ ID NO: | engineered HNF4A protein sequence |
|---|---|
| 101 | HNF4A(1-474)(S313A) |
| 102 | HNF4A(1-474)(S313E) |
| 103 | HNF4A(1-474)(S142A S143A) |
| 104 | HNF4A(1-474)(S142E S143E) |
| 105 | HNF4A(1-474)(S143A) |
| 106 | HNF4A(1-474)(T166A) |
| 107 | HNF4A(1-474)(S167E) |
| 108 | HNF4A(1-474)(S167A) |
| 109 | HNF4A(1-474)(S167A S378A T429A T432A S436A) |
| 110 | HNF4A(1-474)(S167E S378E T429E T432E S436E) |
| 111 | HNF4A(1-474)(S87A) |
| 112 | HNF4A(1-474)(S87E) |
| 113 | HNF4A(1-474)(R2V) |
| 114 | HNF4A(1-474)(R2V K5V) |
| 115 | HNF4A(1-474)(K179R K180R) |
| 116 | HNF4A(1-474)(K234R) |
| 117 | HNF4A(1-474)(K300R) |
| 118 | HNF4A(1-474)(K300R K307R K309R) |
| 119 | HNF4A(1-474)(K447R K470R) |
| 120 | HNF4A(1-474)(K458R) |
| 121 | HNF4A(1-474)(K106R K108R K126R K127R) |
| 122 | HNF4A(1-474)(E285Q) |
| 123 | HNF4A(1-474)(T166E) |
| 124 | HNF4A(1-474)(S148A) |
| 125 | HNF4A(1-474)(S148E) |
| 126 | HNF4A(1-474)(S183A) |
| 127 | HNF4A(1-474)(S183E) |
| 128 | HNF4A(1-474)(S461A) |
| 129 | HNF4A(1-474)(S461E) |
| 130 | HNF4A(1-474)(S142A S143A S313A) |
| 131 | HNF4A(1-474)(S142A S143A S313A K458R) |
| 132 | HNF4A(1-474)(S142A S143A S167A S313A S378A T429A T432A S436A K458R) |
| 133 | HNF4A(1-474)(S142A S143A S148A S167A S313A S378A T429A T432A S436A K458R) |
| 134 | HNF4A(1-474)(K106R K108R K126R K127R S142A S143A S148A S167A S313A S378A T429A |
| | T432A S436A K458R) |
| 135 | HNF4A(1-474)(S142A S143A S148A T166A S167A S313A S378A T429A T432A S436A K458R) |
| 136 | HNF4A(1-474)(S87A S142A S143A S148A T166A S167A S313A S378A T429A T432A S436A |
| | K458R) |
| 137 | HNF4A(1-474)(S87A K106R K108R K126R K127R S142A S143A S148A T166A S167A S313A |
| | S378A T429A T432A S436A K458R) |
| 138 | HNF4A(1-474)(S87A K106R K108R K126R K127R) |
| 139 | HNF4A(1-474)(S87A K106R K108R K126R K127R S142A S143A S148A T166A S167A S313A |
| | S378A T429A T432A S436A K458R S461A) |
| 140 | HNF4A(1-474)(S87A K106R K108R K126R K127R S142A S143A S148A T166A S167A S313A |
| | S378A T429A T432A S436A K458R S461E) |
| 141 | HNF4A(1-474)(S87A K106R K108R K126R K127R S142A S143A S148E T166A S167E S313A |
| | S378E T429E T432E S436E K458R S461E) |
| 142 | HNF4A(1-474)(S87A K106R K108R K126R K127R S142A S143A S148A T166A S167A K179R |
| | K180R S313A S378A T429A T432A S436A K458R S461E) |
| 143 | HNF4A(1-474)(S87A K106R K108R K126R K127R S142A S143A S148A T166A S167A K300R |
| | K307R K309R S313A S378A T429A T432A S436A K458R S461E) |
| 144 | HNF4A(1-474)(S87A K106R K108R K126R K127R S142A S143A S148A T166A S167A S313A |
| | S378A T429A T432A S436A K447R K458R S461E K470R) |
| 145 | HNF4A(1-474)(S87A K106R K108R K126R K127R S142A S143A S148A T166A S167A K179R |
| | K180R K234R K300R K307R K309R S313A S378A T429A T432A S436A K447R K458R S461E |
| | K470R) |
| 146 | HNF4A(1-474)(S87A S95A S99A K106R K108R K126R K127R S142A S143A S148A T166A |
| | S167A S313A S378A T429A T432A S436A K458R S461E) |
| 147 | HNF4A(1-474)(S87A K106R K108R K126R K127R S138A T139A S142A S143A S148A T166A |
| | S167A S313A S378A T429A T432A S436A K458R S461E) |
| 148 | HNF4A(1-474)(S87A S95A S99A K106R K108R K126R K127R S138A T139A S142A S143A |
| | S148A T166A S167A S313A S378A T429A T432A S436A K458R S461E) |
| 149 | HNF4A(1-375) |
| 150 | HNF4A(1-375)(S313A) |
| 151 | HNF4A(1-375)(S313E) |
| 152 | HNF4A(1-375)(S142A S143A) |
| 153 | HNF4A(1-375)(S142E S143E) |
| 154 | HNF4A(1-375)(S143A) |
| 155 | HNF4A(1-375)(T166A) |
| 156 | HNF4A(1-375)(S167E) |
| 157 | HNF4A(1-375)(S167A) |
| 158 | HNF4A(1-375)(S167A S378A T429A T432A S436A) |
| 159 | HNF4A(1-375)(S167E S378E T429E T432E S436E) |
| 160 | HNF4A(1-375)(S87A) |
| 161 | HNF4A(1-375)(S87E) |
| 162 | HNF4A(1-375)(R2V) |
| 163 | HNF4A(1-375)(R2V K5V) |
| 164 | HNF4A(1-375)(K179R K180R) |
| 165 | HNF4A(1-375)(K234R) |
| 166 | HNF4A(1-375)(K300R) |
| 167 | HNF4A(1-375)(K300R K307R K309R) |
| 168 | HNF4A(1-375)(K447R K470R) |
| 169 | HNF4A(1-375)(K458R) |
| 170 | HNF4A(1-375)(K106R K108R K126R K127R) |
| 171 | HNF4A(1-375)(E285Q) |
| 172 | HNF4A(1-375)(T166E) |
| 173 | HNF4A(1-375)(S148A) |
| 174 | HNF4A(1-375)(S148E) |
| 175 | HNF4A(1-375)(S183A) |
| 176 | HNF4A(1-375)(S183E) |
| 177 | HNF4A(1-375)(S461A) |
| 178 | HNF4A(1-375)(S461E) |
| 179 | HNF4A(1-375)(S142A S143A S313A) |
| 180 | HNF4A(1-375)(S142A S143A S313A K458R) |
| 181 | HNF4A(1-375)(S142A S143A S167A S313A S378A T429A T432A S436A K458R) |
| 182 | HNF4A(1-375)(S142A S143A S148A S167A S313A S378A T429A T432A S436A K458R) |
| 183 | HNF4A(1-375)(K106R K108R K126R K127R S142A S143A S148A S167A S313A S378A T429A |
| | T432A S436A K458R) |
| 184 | HNF4A(1-375)(S142A S143A S148A T166A S167A S313A S378A T429A T432A S436A K458R) |
| 185 | HNF4A(1-375)(S87A S142A S143A S148A T166A S167A S313A S378A T429A T432A S436A |
| | K458R) |
| 186 | HNF4A(1-375)(S87A K106R K108R K126R K127R S142A S143A S148A T166A S167A S313A |
| | S378A T429A T432A S436A K458R) |
| 187 | HNF4A(1-375)(S87A K106R K108R K126R K127R) |
| 188 | HNF4A(1-375)(S87A K106R K108R K126R K127R S142A S143A S148A T166A S167A S313A |
| | S378A T429A T432A S436A K458R S461A) |
| 189 | HNF4A(1-375)(S87A K106R K108R K126R K127R S142A S143A S148A T166A S167A S313A |
| | S378A T429A T432A S436A K458R S461E) |
| 190 | HNF4A(1-375)(S87A K106R K108R K126R K127R S142A S143A S148E T166A S167E S313A |
| | S378E T429E T432E S436E K458R S461E) |
| 191 | HNF4A(1-375)(S87A K106R K108R K126R K127R S142A S143A S148A T166A S167A K179R |
| | K180R S313A S378A T429A T432A S436A K458R S461E) |
| 192 | HNF4A(1-375)(S87A K106R K108R K126R K127R S142A S143A S148A T166A S167A K300R |
| | K307R K309R S313A S378A T429A T432A S436A K458R S461E) |
| 193 | HNF4A(1-375)(S87A K106R K108R K126R K127R S142A S143A S148A T166A S167A S313A |
| | S378A T429A T432A S436A K447R K458R S461E K470R) |
| 194 | HNF4A(1-375)(S87A K106R K108R K126R K127R S142A S143A S148A T166A S167A K179R |
| | K180R K234R K300R K307R K309R S313A S378A T429A T432A S436A K447R K458R S461E |
| | K470R) |
| 195 | HNF4A(1-375)(S87A S95A S99A K106R K108R K126R K127R S142A S143A S148A T166A |
| | S167A S313A S378A T429A T432A S436A K458R S461E) |
| 196 | HNF4A(1-375)(S87A K106R K108R K126R K127R S138A T139A S142A S143A S148A T166A |
| | S167A S313A S378A T429A T432A S436A K458R S461E) |
| 197 | HNF4A(1-375)(S87A S95A S99A K106R K108R K126R K127R S138A T139A S142A S143A |
| | S148A T166A S167A S313A S378A T429A T432A S436A K458R S461E) |
| 198 | HNF4A(39-474) |
| 199 | HNF4A(39-474)(S313A) |
| 200 | HNF4A(39-474)(S313E) |
| 201 | HNF4A(39-474)(S142A S143A) |
| 202 | HNF4A(39-474)(S142E S143E) |
| 203 | HNF4A(39-474)(S143A) |
| 204 | HNF4A(39-474)(T166A) |
| 205 | HNF4A(39-474)(S167E) |
| 206 | HNF4A(39-474)(S167A) |
| 207 | HNF4A(39-474)(S167A S378A T429A T432A S436A) |
| 208 | HNF4A(39-474)(S167E S378E T429E T432E S436E) |
| 209 | HNF4A(39-474)(S87A) |
| 210 | HNF4A(39-474)(S87E) |
| 211 | HNF4A(39-474)(R2V) |
| 212 | HNF4A(39-474)(R2V K5V) |
| 213 | HNF4A(39-474)(K179R K180R) |
| 214 | HNF4A(39-474)(K234R) |
| 215 | HNF4A(39-474)(K300R) |
| 216 | HNF4A(39-474)(K300R K307R K309R) |
| 217 | HNF4A(39-474)(K447R K470R) |
| 218 | HNF4A(39-474)(K458R) |
| 219 | HNF4A(39-474)(K106R K108R K126R K127R) |
| 220 | HNF4A(39-474)(E285Q) |
| 221 | HNF4A(39-474)(T166E) |
| 222 | HNF4A(39-474)(S148A) |
| 223 | HNF4A(39-474)(S148E) |
| 224 | HNF4A(39-474)(S183A) |
| 225 | HNF4A(39-474)(S183E) |
| 226 | HNF4A(39-474)(S461A) |
| 227 | HNF4A(39-474)(S461E) |
| 228 | HNF4A(39-474)(S142A S143A S313A) |
| 229 | HNF4A(39-474)(S142A S143A S313A K458R) |
| 230 | HNF4A(39-474)(S142A S143A S167A S313A S378A T429A T432A S436A K458R) |
| 231 | HNF4A(39-474)(S142A S143A S148A S167A S313A S378A T429A T432A S436A K458R) |
| 232 | HNF4A(39-474)(K106R K108R K126R K127R S142A S143A S148A S167A S313A S378A T429A |
| | T432A S436A K458R) |
| 233 | HNF4A(39-474)(S142A S143A S148A T166A S167A S313A S378A T429A T432A S436A K458R) |
| 234 | HNF4A(39-474)(S87A S142A S143A S148A T166A S167A S313A S378A T429A T432A S436A |
| | K458R) |
| 235 | HNF4A(39-474)(S87A K106R K108R K126R K127R S142A S143A S148A T166A S167A S313A |
| | S378A T429A T432A S436A K458R) |
| 236 | HNF4A(39-474)(S87A K106R K108R K126R K127R) |
| 237 | HNF4A(39-474)(S87A K106R K108R K126R K127R S142A S143A S148A T166A S167A S313A |
| | S378A T429A T432A S436A K458R S461A) |
| 238 | HNF4A(39-474)(S87A K106R K108R K126R K127R S142A S143A S148A T166A S167A S313A |
| | S378A T429A T432A S436A K458R S461E) |
| 239 | HNF4A(39-474)(S87A K106R K108R K126R K127R S142A S143A S148E T166A S167E S313A |
| | S378E T429E T432E S436E K458R S461E) |
| 240 | HNF4A(39-474)(S87A K106R K108R K126R K127R S142A S143A S148A T166A S167A K179R |
| | K180R S313A S378A T429A T432A S436A K458R S461E) |
| 241 | HNF4A(39-474)(S87A K106R K108R K126R K127R S142A S143A S148A T166A S167A K300R |
| | K307R K309R S313A S378A T429A T432A S436A K458R S461E) |
| 242 | HNF4A(39-474)(S87A K106R K108R K126R K127R S142A S143A S148A T166A S167A S313A |
| | S378A T429A T432A S436A K447R K458R S461E K470R) |
| 243 | HNF4A(39-474)(S87A K106R K108R K126R K127R S142A S143A S148A T166A S167A K179R |
| | K180R K234R K300R K307R K309R S313A S378A T429A T432A S436A K447R K458R S461E |
| | K470R) |
| 244 | HNF4A(39-474)(S87A S95A S99A K106R K108R K126R K127R S142A S143A S148A T166A |
| | S167A S313A S378A T429A T432A S436A K458R S461E) |
| 245 | HNF4A(39-474)(S87A K106R K108R K126R K127R S138A T139A S142A S143A S148A T166A |
| | S167A S313A S378A T429A T432A S436A K458R S461E) |
| 246 | HNF4A(39-474)(S87A S95A S99A K106R K108R K126R K127R S138A T139A S142A S143A |
| | S148A T166A S167A S313A S378A T429A T432A S436A K458R S461E) |

[0162] In more preferred embodiments, the engineered HNF4A protein variant with increased HNF4A transcriptional activity, DNA binding capacity, stability, longer-lasting HNF4A half-life and/or therapeutic effect is
[0163] (i) engineered HNF4A protein variant S87A K106R K108R K126R K127R, also designated as combo 9 (preferably SEQ ID NO:138);
[0164] (ii) engineered HNF4A protein variant with S87A K106R K108R K126R K127R S142A S143A S148A T166A S167A S313A S378A T429A T432A S436A K458R, also designated as “Set C-3”=combo 8, (preferably SEQ ID NO: 186); and most preferred the
[0165] (iii) engineered HNF4A protein variant with S87A K106R K108R K126R K127R S142A S143A S148A T166A S167A S313A S378A T429A T432A S436A K458R S461E mutations, also designated as combo 11, “Set D-3” or “combo 8+S461E” herein (preferably SEQ ID NO: 140).

[0166] In further embodiments, mRNA encoding engineered HNF4A protein variant with increased HNF4A transcriptional activity, DNA binding capacity, stability, longer-lasting HNF4A half-life and/or therapeutic effect preferably encodes an engineered HNF4A protein variant comprising a S87A substitution and/or a S461E substitution.

[0167] In further embodiments, mRNA encoding engineered HNF4A protein variant with increased HNF4A transcriptional activity, DNA binding capacity, stability, longer-lasting HNF4A half-life and/or therapeutic effect
[0168] (i) preferably encodes engineered HNF4A protein variant S87A K106R K108R K126R K127R, also designated as combo 9 (preferably SEQ ID NO:138);
[0169] (ii) more preferably encodes engineered HNF4A protein variant with S87A K106R K108R K126R K127R S142A S143A S148A T166A S167A S313A S378A T429A T432A S436A K458R, also designated as “Set C-3”=combo 8, (preferably SEQ ID NO:186); and most preferred the
[0170] (iii) most preferably encodes engineered HNF4A protein variant with S87A K106R K108R K126R K127R S142A S143A S148A T166A S167A S313A S378A T429A T432A S436A K458R S461E mutations, also designated as combo 11, “Set D-3” or “combo 8+S461E” herein (preferably SEQ ID NO:140).

[0171] Surprisingly, the combinations of different amino acid substitutions not only led to an additive effect, which would already be a surprising result as mutating a HNF4A protein without destroying the transcriptional activity or DNA binding capacity would be a surprising result alone, but combinations of mutations partly even led to synergistic effects.

[0172] As used herein, “wild type” and “naturally-occurring” refer to the form found in nature. For example, a wild type polypeptide or polynucleotide sequence is a sequence present in an organism that can be isolated from a source in nature and which has not been intentionally modified by human manipulation.

[0173] As used herein, “recombinant, “engineered, “variant” and “non-naturally occurring” when used with reference to a cell, nucleic acid, polypeptide or protein, refers to a material, or a material corresponding to the natural or native form of the material, that has been modified in a manner that would not otherwise exist in nature. In some embodiments, the cell, nucleic acid, polypeptide or protein is identical a naturally occurring cell, nucleic acid, polypeptide or protein, but is produced or derived from synthetic materials and/or by manipulation using recombinant techniques. Non-limiting examples include, among others, recombinant cells expressing genes that are not found within the native (non recombinant) form of the cell or express native genes that are otherwise expressed at a different level.

[0174] The terms “the same biological activity”, “essentially the same biological activity”, “similar biological activity” or “increased biological activity” in connection with an engineered HNF4A protein variant all refer to a HNF4A protein having (essentially) the same, similar or increased structural, regulatory, biochemical functions or biological activity as compared to a wild type HNF4A having WT HNF4A biological activity. Accordingly, the term “biological activity” in connection with HNF4A as used herein means the biological properties characteristic for a HNF4A protein. Further, a polynucleotide comprising a fragment of any of the aforementioned nucleic acid sequences is also encompassed as a polynucleotide of the present invention. The fragment shall encode a polypeptide which still has a biological activity as specified herein.

[0175] In the context of the present invention, the at least one coding sequence of the mRNA according to the invention preferably comprises a nucleic acid sequence encoding a peptide or protein comprising or consisting of a peptide or protein as defined herein. In some embodiments, a peptide or protein substantially comprises the entire amino acid sequence of the reference peptide or protein, such as the naturally occurring peptide or protein (e.g. HNF4A). Alternatively, the at least one coding sequence of the mRNA according to the invention may also comprise a nucleic acid sequence encoding a peptide or protein comprising or consisting of a fragment of a peptide or protein or a fragment of a variant of a peptide or protein as defined herein.

[0176] In the context of the present invention, a “fragment” of a peptide or protein or of a variant thereof may comprise a sequence of a peptide or protein or of a variant thereof as defined above, which is, with regard to its amino acid sequence (or its encoded nucleic acid sequence), N-terminally, C-terminally and/or intrasequentially truncated compared to the reference amino acid sequence, such as the amino acid sequence of the naturally occurring protein or a variant thereof (or its encoded nucleic acid sequence). Such truncation may occur either on the amino acid level or on the nucleic acid level, respectively. A sequence identity with respect to such a fragment as defined herein therefore preferably refers to the entire peptide or protein or a variant thereof as defined herein or to the entire (coding) nucleic acid sequence of such a peptide or protein or of a variant thereof.

[0177] According to some embodiments of the invention, the mRNA comprises at least one coding sequence encoding a peptide or protein comprising or consisting of a variant of a peptide or protein as defined herein, or a fragment of a variant of a peptide or protein.

[0178] In certain embodiments of the present invention, a “variant” of a peptide or protein or a fragment thereof as defined herein may be encoded by the mRNA comprising at least one coding sequence as defined herein, wherein the amino acid sequence encoded by the at least one coding sequence differs in at least one amino acid residue from the reference amino acid sequence, such as a naturally occurring amino acid sequence. In this context, the “change” in at least one amino acid residue may consist, for example, in a mutation of an amino acid residue to another amino acid, a deletion or an insertion. More preferably, the term “variant” as used in the context of the amino acid sequence encoded by the at least one coding sequence of the mRNA according to the invention comprises any homolog, isoform or transcript variant of a peptide or protein or a fragment thereof as defined herein, wherein the homolog, isoform or transcript variant is preferably characterized by a degree of identity or homology, respectively, as defined herein.

[0179] Naturally, it is to be understood, that HNF4A isoforms, e.g. produced by alternative promoter usage or alternative splicing, are comprised within the scope of the current invention. I.e. known isoforms like Isoform HNF4-Alpha-1 (Uniprot identifier: P41235-1), Isoform HNF4-Alpha-2 (Uniprot identifier: P41235-2), Isoform HNF4-Alpha-3 (Uniprot identifier: P41235-3), Isoform HNF4-Alpha-4 (Uniprot identifier: P41235-4), Isoform HNF4-Alpha-7 (Uniprot identifier: P41235-5), Isoform HNF4-Alpha-8 (Uniprot identifier: P41235-6), or Isoform HNF4-Alpha-9 (Uniprot identifier: P41235-7) are considered to be valid alternatives for the HNF4A which was used as a basis for the present invention.

[0180] In the context of the present invention, a “fragment” or a “variant” of a protein or peptide may have at least 50%, 51%, 52%, 53%, 54%, 55%, 56%, 57%, 58%, 59%, 60%, 61%, 62%, 63%, 64%, 65%, 66%, 67%, 68%, 69%, 70%, 71%, 72%, 73%, 74%, 75%, 76%, 77%, 78%, 79%, 80%, 81%, 82%, 83%, 84%, 85%, 86%, 87%, 88%, 89%, 90%, 91%, 92%, 93%, 94%, 95%, 96%, 97%, 98%, or 99% amino acid identity over a stretch of at least 10, at least 20, at least 30, at least 50, at least 75 or at least 100 amino acids of such protein or peptide. More preferably, a “fragment” or a “variant” of a protein or peptide as used herein is at least 40%, preferably at least 50%, more preferably at least 60%, more preferably at least 70%, even more preferably at least 80%, even more preferably at least 90%, most preferably at least 95% identical to the protein or peptide, from which the variant is derived.

[0181] Preferably, a variant of a peptide or protein or a fragment thereof may be encoded by the mRNA comprising at least one coding sequence as defined herein, or may be provided simply by provision of the peptide or protein sequence per se, wherein at least one amino acid residue of the amino acid sequence encoded by the at least one coding sequence is substituted. Substitutions, wherein amino acids, which originate from the same class, are exchanged for one another, are called conservative substitutions or respectively conservative amino acid substitutions. In particular, these are amino acids having aliphatic side chains, positively or negatively charged side chains, aromatic groups in the side chains or amino acids, the side chains of which can form hydrogen bridges, e.g. side chains which have a hydroxyl function. By conservative constitution, e.g. an amino acid having a polar side chain may be replaced by another amino acid having a corresponding polar side chain, or, for example, an amino acid characterized by a hydrophobic side chain may be substituted by another amino acid having a corresponding hydrophobic side chain (e.g. serine (threonine) by threonine (serine) or leucine (isoleucine) by isoleucine (leucine)). In a preferred embodiment, a variant of a peptide or protein or a fragment thereof may be encoded by the mRNA according to the invention, wherein at least one amino acid residue of the amino acid sequence encoded by the at least one coding sequence comprises at least one conservative substitution compared to a reference sequence, such as the respective naturally occurring sequence. These amino acid sequences as well as their encoding nucleic acid sequences in particular are comprised by the term “variant” as defined herein.

[0182] Further, as used herein, the phrase “conservative amino acid substitutions” refers to the interchangeability of residues having similar side chains, and thus typically involves substitution of the amino acid in the polypeptide with amino acids within the same or similar defined class of amino acids. By way of example and not limitation, in some embodiments, an amino acid with an aliphatic side chain is substituted with another aliphatic amino acid (e.g., alanine, valine, leucine, and isoleucine); an amino acid with a hydroxyl side chain is substituted with another amino acid with a hydroxyl side chain (e.g., serine and threonine); an amino acid having an aromatic side chain is substituted with another amino acid having an aromatic side chain (e.g., phenylalanine, tyrosine, tryptophan, and histidine); an amino acid with a basic side chain is substituted with another amino acid with a basic side chain (e.g., lysine and arginine); an amino acid with an acidic side chain is substituted with another amino acid with an acidic side chain (e.g., aspartic acid or glutamic acid); and/or a hydrophobic or hydrophilic amino acid is replaced with another hydrophobic or hydrophilic amino acid, respectively. Exemplary conservative substitutions are provided in Table (i).

TABLE i
Exemplary conservative amino acid substitutions

| Residue | Possible Conservative Substitutions |
|---|---|
| A, L, V, I | Other aliphatic (A, L, V, I) |
| | Other non-polar (A, L, V, I, G, M) |
| G, M | Other non-polar (A, L, V, I, G, M) |
| D, E | Other acidic (D, E) |
| K, R | Other basic (K, R) |
| N, Q, S, T | Other polar (R, K, D, E, N, Q) |
| H, Y, W, F | Other aromatic (H, Y, W, F) |
| C, P | Non-polar (A, V, L, G, I, M, W, F, P) |

[0183] Insertions, deletions and/or non-conservative substitutions are also possible, in particular, at those sequence positions, which preferably do not cause a substantial modification of the three-dimensional structure. Modifications to a three-dimensional structure by insertion(s) or deletion(s) can easily be determined e.g. using CD spectra (circular dichroism spectra) (Urry, 1985, Absorption, Circular Dichroism and ORD of Polypeptides, in: Modern Physical Methods in Biochemistry, Neuberger et al. (ed.), Elsevier, Amsterdam).

[0184] Preferred embodiments also are related to e.g. an amino acid substitution S87A or S461E and other alternatives which a skilled person would naturally chose to change this position. Other preferred alternatives are phospho-mimetics and phospho-incompetent exchanges, preferably but not limited to S87A or S87G, the latter also being a preferred phospho-incompetent mutant, as well as other phospho-incompetent mutants on this basis, which are easily derivable for a person skilled in the art. A further preferred alternative related to phospho-mimetics is S461E or S461D, which are examples for a phospho-mimetic mutation. Phospho-mimetic mutations naturally are not limited to S461E or S461D and a person skilled in the art naturally would conceive other alternative phospho-mimetic mutations. The same is true for ubiquitination and acetylation-incompetent mutations of HNF4A, where a skilled person naturally would conceive alternatives which are equally active.

[0185] In order to determine the percentage, to which two sequences (nucleic acid sequences, e.g. RNA or mRNA sequences as defined herein, or amino acid sequences, preferably the amino acid sequence encoded by the mRNA according to the invention) are identical, the sequences can be aligned in order to be subsequently compared to one another. For this purpose, e.g. gaps can be inserted into the sequence of the first sequence and the component at the corresponding position of the second sequence can be compared. If a position in the first sequence is occupied by the same component as is the case at a corresponding position in the second sequence, the two sequences are identical at this position. The percentage, to which two sequences are identical, is a function of the number of identical positions divided by the total number of positions. The percentage, to which two sequences are identical, can be determined using a mathematical algorithm. A preferred, but not limiting, example of a mathematical algorithm, which can be used is the algorithm of Karlin et al. (1993), PNAS USA, 90:5873-5877 or Altschul et al. (1997), Nucleic Acids Res., 25:3389-3402. Such an algorithm is integrated, for example, in the BLAST program. Sequences, which are identical to the sequences of the present invention to a certain extent, can be identified by this program.

[0186] In the context of the present invention, a fragment of a peptide or protein or a variant thereof encoded by the at least one coding sequence of the mRNA according to the invention may typically comprise an amino acid sequence having a sequence identity of at least 5%, 10%, 20%, 30%, 40%, 50%, 60%, 70%, 80%, 85%, 86%, 87%, 88%, 89%, 90%, 91%, 92%, 93%, 94%, 95%, 96%, 97%, 98%, or 99%, preferably of at least 70%, more preferably of at least 80%, even more preferably at least 85%, even more preferably of at least 90% and most preferably of at least 95% or even 97%, with a reference amino acid sequence, preferably with the amino acid sequence of the respective naturally occurring full-length peptide or protein or a variant thereof.

[0187] Preferably, the at least one coding sequence of the mRNA, which encodes the at least one peptide or protein as defined herein, comprises or consists of a nucleic acid sequence selected from any single element from the group consisting of SEQ ID NO:249-297, 692-740, 1135-1183, 298-346, 741-789, 1184-1232, 347-395, 790-838, 1233-1281, 396-444, 839-887, 1282-1330, 445-493, 888-936, 1331-1379, 494-542, 937-985, 1380-1428, 543-591, 986-1034, 1429-1477, 592-640, 1035-1083, 1478-1526, 641-689, 1084-1132, 1527-1575, 1576, 1577, 2019, 2020, 2462, 2463, 1578-1626, 2021-2069, 2464-2512, 1627-1675, 2070-2118, 2513-2561, 1676-1724, 2119-2167, 2562-2610, 1725-1773, 2168-2216, 2611-2659, 1774-1822, 2217-2265, 2660-2708, 1823-1871, 2266-2314, 2709-2757, 1872-1920, 2315-2363, 2758-2806, 1921-1969, 2364-2412, 2807-2855, 1970-2018, 2413-2461, 2856-2904, 2905, 2906, 3348, 3349, 3791, 3792, 2907-2955, 3350-3398, 3793-3841, 2956-3004, 3399-3447, 3842-3890, 3005-3053, 3448-3496, 3891-3939, 3054-3102, 3497-3545, 3940-3988, 3103-3151, 3546-3594, 3989-4037, 3152-3200, 3595-3643, 4038-4086, 3201-3249, 3644-3692, 4087-4135, 3250-3298, 3693-3741, 4136-4184, 3299-3347, 3742-3790, 4185-4233, 4234, 4235, 4677, 4678, 5120, 5121, 4236-4284, 4679-4727, 5122-5170, 4285-4333, 4728-4776, 5171-5219, 4334-4382, 4777-4825, 5220-5268, 4383-4431, 4826-4874, 5269-5317, 4432-4480, 4875-4923, 5318-5366, 4481-4529, 4924-4972, 5367-5415, 4530-4578, 4973-5021, 5416-5464, 4579-4627, 5022-5070, 5465-5513, 4628-4676, 5071-5119, 5514-5562, and 5719-5736 [if only engineered sequences are meant to appear in this list of sequences, sequences related to WT HNF4A are herewith excluded from the aforementioned list], or a fragment or variant of any one of these nucleic acid sequences. As used herein, a nucleic acid sequence comprising or consisting of a nucleic acid sequence selected from any single element from the group consisting of SEQ ID NO:249-297, 692-740, 1135-1183, 298-346, 741-789, 1184-1232, 347-395, 790-838, 1233-1281, 396-444, 839-887, 1282-1330, 445-493, 888-936, 1331-1379, 494-542, 937-985, 1380-1428, 543-591, 986-1034, 1429-1477, 592-640, 1035-1083, 1478-1526, 641-689, 1084-1132, 1527-1575, 1576, 1577, 2019, 2020, 2462, 2463, 1578-1626, 2021-2069, 2464-2512, 1627-1675, 2070-2118, 2513-2561, 1676-1724, 2119-2167, 2562-2610, 1725-1773, 2168-2216, 2611-2659, 1774-1822, 2217-2265, 2660-2708, 1823-1871, 2266-2314, 2709-2757, 1872-1920, 2315-2363, 2758-2806, 1921-1969, 2364-2412, 2807-2855, 1970-2018, 2413-2461, 2856-2904, 2905, 2906, 3348, 3349, 3791, 3792, 2907-2955, 3350-3398, 3793-3841, 2956-3004, 3399-3447, 3842-3890, 3005-3053, 3448-3496, 3891-3939, 3054-3102, 3497-3545, 3940-3988, 3103-3151, 3546-3594, 3989-4037, 3152-3200, 3595-3643, 4038-4086, 3201-3249, 3644-3692, 4087-4135, 3250-3298, 3693-3741, 4136-4184, 3299-3347, 3742-3790, 4185-4233, 4234, 4235, 4677, 4678, 5120, 5121, 4236-4284, 4679-4727, 5122-5170, 4285-4333, 4728-4776, 5171-5219, 4334-4382, 4777-4825, 5220-5268, 4383-4431, 4826-4874, 5269-5317, 4432-4480, 4875-4923, 5318-5366, 4481-4529, 4924-4972, 5367-5415, 4530-4578, 4973-5021, 5416-5464, 4579-4627, 5022-5070, 5465-5513, 4628-4676, 5071-5119, 5514-5562, and 5719-5736 [if only engineered sequences are meant to appear in this list of sequences, sequences related to WT HNF4A are herewith excluded from the aforementioned list] may also be referred to as “full-length nucleic acid (sequence)”. In this regard and throughout the specification, the term “element”, naturally, is deemed to indicate a single SEQ ID NO from the aforementioned list of SEQ ID NO.

[0188] In certain embodiments, the mRNA according to the invention, preferably the at least one coding sequence of the mRNA according to the invention, may comprise or consist of a fragment of a nucleic acid sequence encoding a peptide or protein or a fragment or variant thereof as defined herein. Preferably, the at least one coding sequence of the mRNA according to the invention comprises or consists of a fragment, preferably as defined herein, of any one of the nucleic acid sequences according to any single element from the group consisting of SEQ ID NO:249-297, 692-740, 1135-1183, 298-346, 741-789, 1184-1232, 347-395, 790-838, 1233-1281, 396-444, 839-887, 1282-1330, 445-493, 888-936, 1331-1379, 494-542, 937-985, 1380-1428, 543-591, 986-1034, 1429-1477, 592-640, 1035-1083, 1478-1526, 641-689, 1084-1132, 1527-1575, 1576, 1577, 2019, 2020, 2462, 2463, 1578-1626, 2021-2069, 2464-2512, 1627-1675, 2070-2118, 2513-2561, 1676-1724, 2119-2167, 2562-2610, 1725-1773, 2168-2216, 2611-2659, 1774-1822, 2217-2265, 2660-2708, 1823-1871, 2266-2314, 2709-2757, 1872-1920, 2315-2363, 2758-2806, 1921-1969, 2364-2412, 2807-2855, 1970-2018, 2413-2461, 2856-2904, 2905, 2906, 3348, 3349, 3791, 3792, 2907-2955, 3350-3398, 3793-3841, 2956-3004, 3399-3447, 3842-3890, 3005-3053, 3448-3496, 3891-3939, 3054-3102, 3497-3545, 3940-3988, 3103-3151, 3546-3594, 3989-4037, 3152-3200, 3595-3643, 4038-4086, 3201-3249, 3644-3692, 4087-4135, 3250-3298, 3693-3741, 4136-4184, 3299-3347, 3742-3790, 4185-4233, 4234, 4235, 4677, 4678, 5120, 5121, 4236-4284, 4679-4727, 5122-5170, 4285-4333, 4728-4776, 5171-5219, 4334-4382, 4777-4825, 5220-5268, 4383-4431, 4826-4874, 5269-5317, 4432-4480, 4875-4923, 5318-5366, 4481-4529, 4924-4972, 5367-5415, 4530-4578, 4973-5021, 5416-5464, 4579-4627, 5022-5070, 5465-5513, 4628-4676, 5071-5119, 5514-5562, and 5719-5736 [if only engineered sequences are meant to appear in this list of sequences, sequences related to WT HNF4A are herewith excluded from the aforementioned list], or a variant of any one of these sequences.

[0189] In this context, a “fragment of a nucleic acid (sequence)” is preferably a nucleic acid sequence encoding a fragment of a peptide or protein or of a variant thereof as described herein. More preferably, the expression “fragment of a nucleic acid sequence” refers to a nucleic acid sequence having a sequence identity of at least 5%, 10%, 20%, 30%, 40%, 50%, 60%, 70%, 80%, 85%, 86%, 87%, 88%, 89%, 90%, 91%, 92%, 93%, 94%, 95%, 96%, 97%, 98%, or 99%, preferably of at least 70%, more preferably of at least 80%, even more preferably at least 85%, even more preferably of at least 90% and most preferably of at least 95% or even 97%, with a respective full-length nucleic acid sequence, preferably with a nucleic acid sequence selected from any single element from the group consisting of SEQ ID NO:249-297, 692-740, 1135-1183, 298-346, 741-789, 1184-1232, 347-395, 790-838, 1233-1281, 396-444, 839-887, 1282-1330, 445-493, 888-936, 1331-1379, 494-542, 937-985, 1380-1428, 543-591, 986-1034, 1429-1477, 592-640, 1035-1083, 1478-1526, 641-689, 1084-1132, 1527-1575, 1576, 1577, 2019, 2020, 2462, 2463, 1578-1626, 2021-2069, 2464-2512, 1627-1675, 2070-2118, 2513-2561, 1676-1724, 2119-2167, 2562-2610, 1725-1773, 2168-2216, 2611-2659, 1774-1822, 2217-2265, 2660-2708, 1823-1871, 2266-2314, 2709-2757, 1872-1920, 2315-2363, 2758-2806, 1921-1969, 2364-2412, 2807-2855, 1970-2018, 2413-2461, 2856-2904, 2905, 2906, 3348, 3349, 3791, 3792, 2907-2955, 3350-3398, 3793-3841, 2956-3004, 3399-3447, 3842-3890, 3005-3053, 3448-3496, 3891-3939, 3054-3102, 3497-3545, 3940-3988, 3103-3151, 3546-3594, 3989-4037, 3152-3200, 3595-3643, 4038-4086, 3201-3249, 3644-3692, 4087-4135, 3250-3298, 3693-3741, 4136-4184, 3299-3347, 3742-3790, 4185-4233, 4234, 4235, 4677, 4678, 5120, 5121, 4236-4284, 4679-4727, 5122-5170, 4285-4333, 4728-4776, 5171-5219, 4334-4382, 4777-4825, 5220-5268, 4383-4431, 4826-4874, 5269-5317, 4432-4480, 4875-4923, 5318-5366, 4481-4529, 4924-4972, 5367-5415, 4530-4578, 4973-5021, 5416-5464, 4579-4627, 5022-5070, 5465-5513, 4628-4676, 5071-5119, 5514-5562, and 5719-5736 [if only engineered sequences are meant to appear in this list of sequences, sequences related to WT HNF4A are herewith excluded from the aforementioned list], or a variant of any of these nucleic acid sequences.

[0190] In another preferred embodiment, the mRNA according to the invention, preferably the at least one coding sequence of the mRNA according to the invention, may comprise or consist of a variant of a nucleic acid sequence as defined herein, preferably of a nucleic acid sequence encoding a peptide or protein or a fragment thereof as defined herein.

[0191] The expression “variant of a nucleic acid sequence” as used herein in the context of a nucleic acid sequence encoding a peptide or protein as described herein or a fragment thereof, typically refers to a nucleic acid sequence, which differs by at least one nucleic acid residue from the respective reference nucleic acid sequence, for example from the respective naturally occurring nucleic acid sequence or from a full-length nucleic acid sequence as defined herein, or from a fragment thereof. More preferably, the expression “variant of a nucleic acid sequence” as used in the context of the present invention refers to a nucleic acid sequence having a sequence identity of at least 5%, 10%, 20%, 30%, 40%, 50%, 60%, 70%, 80%, 85%, 86%, 87%, 88%, 89%, 90%, 91%, 92%, 93%, 94%, 95%, 96%, 97%, 98%, or 99%, preferably of at least 70%, more preferably of at least 80%, even more preferably at least 85%, even more preferably of at least 90% and most preferably of at least 95% or even 97%, with a nucleic acid sequence, from which it is derived.

[0192] Preferably, the mRNA according to the invention, more preferably the at least one coding sequence of the mRNA according to the invention, encodes a variant of a peptide or protein or a fragment thereof, preferably as defined herein.

[0193] In a preferred embodiment, the mRNA according to the invention, more preferably the at least one coding sequence of the mRNA according to the invention, comprises or consists of a variant of a nucleic acid sequence encoding a peptide or protein or a fragment thereof as defined herein, wherein the variant of the nucleic acid sequence encodes an amino acid sequence comprising at least one conservative substitution of an amino acid residue.

[0194] In another embodiment, the mRNA according to the invention, more preferably the at least one coding sequence of the mRNA according to the invention, comprises or consists of a variant of a nucleic acid sequence encoding a peptide or protein or a fragment thereof as defined herein, wherein the nucleic acid sequence of the variant differs from a reference nucleic acid sequence, preferably from the respective naturally occurring nucleic acid sequence in at least one nucleic acid residue, more preferably without resulting—due to the degenerated genetic code—in an alteration of the encoded amino acid sequence, i.e. the amino acid sequence encoded by the variant or at least part thereof may preferably not differ from the naturally occurring amino acid sequence in one or more mutation(s) within the above meaning.

[0195] Furthermore, a “variant” of a nucleic acid sequence encoding a peptide or protein or a “fragment or variant” thereof as defined herein, may also comprise mRNA or DNA sequences, which correspond to RNA or mRNA sequences as defined herein and may also comprise further RNA or mRNA sequences, which correspond to DNA sequences as defined herein. Those skilled in the art are familiar with the translation of an RNA or mRNA sequence into a DNA sequence (or vice versa) or with the creation of the complementary strand sequence (i.e. by substitution of U residues with T residues and/or by constructing the complementary strand with respect to a given sequence).

[0196] A “fragment” refers to a portion of the mRNA or nucleotide sequence encoding an HNF4A protein or a portion of the amino acid sequence of the HNF4A protein of the invention. A fragment of an HNF4A mRNA or nucleotide sequence of the invention may encode a biologically active portion of an HNF4A protein, or it may be a fragment that can be used as a hybridization probe or PCR primer using methods known to skilled persons in the art. A fragment of an HNF4A polypeptide may encompass a biologically active fragment of the HNF4A protein.

[0197] The term “biologically active fragments or variants” refers to fragments or variants of the exemplified nucleic acid molecules and polypeptides that comprise or encode HNF4A activity.

[0198] MRNAs or nucleic acid molecules that are “variants” of the mRNAs or nucleotide sequences disclosed herein are also encompassed by the present invention. “Variants” of the HNF4A nucleotide sequences of the invention include those sequences that encode the HNF4A proteins disclosed herein but that differ conservatively because of the degeneracy of the genetic code. These naturally occurring allelic variants can be identified with the use of well-known molecular biology techniques, such as polymerase chain reaction (PCR) and hybridization techniques as outlined below. Variant nucleotide sequences also include synthetically derived nucleotide sequences that have been generated, for example, by using site-directed mutagenesis but which still encode the HNF4A protein disclosed in the present invention as discussed herein above or below. Generally, nucleotide sequence variants of the invention will have at least about 75%, 80%, 85%, 90%, 91%, 92%, 93%, 94%, 95%, 96%, 97%, 98%, or 99% identity to a particular nucleotide sequence disclosed herein. A variant HNF4A mRNA or nucleotide sequence will encode a HNF4A protein, respectively, that has an amino acid sequence having at least about 75%, 80%, 85%, 90%, 91%, 92%, 93%, 94%, 95%, 96%, 97%, 98%, or 99% identity to the amino acid sequence of a HNF4A protein disclosed herein.

[0199] In another embodiment, the present invention concerns an mRNA comprising at least one coding sequence, wherein the at least one coding sequence encodes at least one HNF4A protein, or a fragment or variant of any of these peptides or proteins, having the biological activity of a wild type HNF4A protein. Moreover, an mRNA comprising at least one coding sequence, wherein the at least one coding sequence encodes at least one HNF4A protein, or a fragment or variant of any of these peptides or proteins, is provided for use in the treatment or prophylaxis of a liver disease, wherein the liver disease is preferably selected from liver fibrosis, liver cirrhosis, hepatocellular carcinoma (HCC), non-alcoholic fatty liver disease (NAFLD), non-alcoholic steatohepatitis (NASH) and liver cancer, more preferably wherein the disease is liver fibrosis or liver cirrhosis.

[0200] According to certain embodiments, the mRNA according to the invention is mono-, bi-, or multicistronic, preferably as defined herein. The coding sequences in a bi- or multicistronic RNA preferably encode a distinct peptide or protein as defined herein or a fragment or variant thereof. Preferably, the coding sequences encoding two or more peptides or proteins may be separated in the bi- or multicistronic RNA by at least one IRES (internal ribosomal entry site) sequence, as defined below. Thus, the term “encoding two or more peptides or proteins” may mean, without being limited thereto, that the bi- or even multicistronic RNA, may encode e.g. at least two, three, four, five, six or more (preferably different) peptides or proteins as described herein or their fragments or variants within the definitions provided herein. More preferably, without being limited thereto, the bi- or even multicistronic mRNA, may encode, for example, at least two, three, four, five, six or more (preferably different) peptides or proteins as defined herein or their fragments or variants as defined herein. In this context, a so-called IRES (internal ribosomal entry site) sequence as defined above can function as a sole ribosome binding site, but it can also serve to provide a bi- or even multicistronic mRNA as defined above, which encodes several peptides or proteins, which are to be translated by the ribosomes independently of one another. Examples of IRES sequences, which can be used according to the invention, are those from picornaviruses (e.g. FMDV), pestiviruses (CFFV), polioviruses (PV), encephalomyocarditis viruses (ECMV), foot and mouth disease viruses (FMDV), hepatitis C viruses (HCV), classical swine fever viruses (CSFV), mouse leukoma virus (MLV), simian immunodeficiency viruses (SIV) or cricket paralysis viruses (CrPV).

[0201] According to a further embodiment the at least one coding sequence of the mRNA according to the invention may encode at least two, three, four, five, six, seven, eight, nine and more peptides or proteins (or fragments or variants thereof) as defined herein linked with or without an amino acid linker sequence, wherein said linker sequence can comprise rigid linkers, flexible linkers, cleavable linkers (e.g., self-cleaving peptides) or a combination thereof. Therein, the peptides or proteins (or fragments or variants thereof) may be identical or different or a combination thereof.

[0202] Preferably, the at least one coding sequence of the mRNA according to the invention comprises at least two, three, four, five, six, seven, eight, nine or more nucleic acid sequences identical to or having a sequence identity of at least 5%, 10%, 20%, 30%, 40%, 50%, 60%, 70%, 80%, 85%, 86%, 87%, 88%, 89%, 90%, 91%, 92%, 93%, 94%, 95%, 96%, 97%, 98%, or 99%, preferably of at least 70%, more preferably of at least 80%, even more preferably at least 85%, even more preferably of at least 90% and most preferably of at least 95% or even 97%, with a nucleic acid sequence selected from any single element from the group consisting of SEQ ID NO:249-297, 692-740, 1135-1183, 298-346, 741-789, 1184-1232, 347-395, 790-838, 1233-1281, 396-444, 839-887, 1282-1330, 445-493, 888-936, 1331-1379, 494-542, 937-985, 1380-1428, 543-591, 986-1034, 1429-1477, 592-640, 1035-1083, 1478-1526, 641-689, 1084-1132, 1527-1575, 1576, 1577, 2019, 2020, 2462, 2463, 1578-1626, 2021-2069, 2464-2512, 1627-1675, 2070-2118, 2513-2561, 1676-1724, 2119-2167, 2562-2610, 1725-1773, 2168-2216, 2611-2659, 1774-1822, 2217-2265, 2660-2708, 1823-1871, 2266-2314, 2709-2757, 1872-1920, 2315-2363, 2758-2806, 1921-1969, 2364-2412, 2807-2855, 1970-2018, 2413-2461, 2856-2904, 2905, 2906, 3348, 3349, 3791, 3792, 2907-2955, 3350-3398, 3793-3841, 2956-3004, 3399-3447, 3842-3890, 3005-3053, 3448-3496, 3891-3939, 3054-3102, 3497-3545, 3940-3988, 3103-3151, 3546-3594, 3989-4037, 3152-3200, 3595-3643, 4038-4086, 3201-3249, 3644-3692, 4087-4135, 3250-3298, 3693-3741, 4136-4184, 3299-3347, 3742-3790, 4185-4233, 4234, 4235, 4677, 4678, 5120, 5121, 4236-4284, 4679-4727, 5122-5170, 4285-4333, 4728-4776, 5171-5219, 4334-4382, 4777-4825, 5220-5268, 4383-4431, 4826-4874, 5269-5317, 4432-4480, 4875-4923, 5318-5366, 4481-4529, 4924-4972, 5367-5415, 4530-4578, 4973-5021, 5416-5464, 4579-4627, 5022-5070, 5465-5513, 4628-4676, 5071-5119, 5514-5562, and 5719-5736 [if only engineered sequences are meant to appear in this list of sequences, sequences related to WT HNF4A are herewith excluded from the aforementioned list], or a fragment or variant of any one of these nucleic acid sequences, wherein each mRNA may encode a different HNF4A protein or engineered HNF4A protein variant, i.e. a cocktail of different HNF4A proteins.

[0203] Preferably, the mRNA comprising at least one coding sequence as defined herein typically comprises a length of about 50 to about 20000, or 100 to about 20000 nucleotides, preferably of about 250 to about 20000 nucleotides, more preferably of about 500 to about 10000, even more preferably of about 500 to about 5000.

[0204] The mRNA according to the invention may further be single stranded or double stranded. When provided as a double stranded RNA, the mRNA according to the invention preferably comprises a sense and a corresponding antisense strand.

[0205] In a preferred embodiment, the mRNA comprising at least one coding sequence as defined herein is an mRNA, a viral RNA or a replicon RNA. Preferably, the mRNA is an artificial nucleic acid, more preferably as described herein.

[0206] According to a further embodiment, the RNA, preferably an mRNA, according to the invention is a modified RNA, preferably a modified RNA as described herein. A modified RNA as used herein does preferably not comprise a chemically modified sugar, a chemically modified backbone or a chemically modified nucleobase. More preferably, a modified RNA as used herein does not comprise a chemically modified nucleoside or a chemically modified nucleotide. It is further preferred that a modified RNA as used herein does not comprise a chemical modification as described in international patent application WO 2014158795.

[0207] In the context of the present invention, a modification as defined herein preferably leads to a stabilization of the mRNA according to the invention. More preferably, the invention thus provides a stabilized RNA comprising at least one coding sequence as defined herein.

[0208] According to one embodiment, the mRNA of the present invention may thus be provided as a “stabilized mRNA”, that is to say as an RNA that is essentially resistant to in vivo degradation (e.g. by an exo- or endo-nuclease).

[0209] Stabilization of an RNA can be achieved, for example, by a modified phosphate backbone of the mRNA of the present invention. A backbone modification in connection with the present invention is a modification, in which phosphates of the backbone of the nucleotides contained in the mRNA are chemically modified. Nucleotides that may be preferably used in this connection contain e.g. a phosphorothioate-modified phosphate backbone, preferably at least one of the phosphate oxygens contained in the phosphate backbone being replaced by a sulfur atom. Stabilized RNAs may further include, for example: non-ionic phosphate analogues, such as, for example, alkyl and aryl phosphonates, in which the charged phosphonate oxygen is replaced by an alkyl or aryl group, or phosphodiesters and alkylphosphotriesters, in which the charged oxygen residue is present in alkylated form. Such backbone modifications typically include, without implying any limitation, modifications from the group consisting of methylphosphonates, phosphoramidates and phosphorothioates (e.g. cytidine-5′-O-(1-thiophosphate)).

[0210] In the following, specific modifications are described, which are preferably capable of “stabilizing” the mRNA as defined herein.

### RNA Constructs

[0211] The mRNA according to the invention, which comprises at least one coding sequence as defined herein, may preferably comprise a 5′-UTR and/or a 3′-UTR preferably containing at least one histone stem-loop. Where, in addition to the peptide or protein as defined herein or a fragment or variant thereof, a further peptide or protein is encoded by the at least one coding sequence of the mRNA according to the invention, the encoded peptide or protein is preferably no histone protein, no reporter protein and/or no marker or selection protein, as defined herein. The 3′-UTR of the mRNA according to the invention preferably comprises also a poly(A) and/or a poly(C) sequence as defined herein. The single elements of the 3′-UTR may occur therein in any order from 5′ to 3′ along the sequence of the mRNA of the present invention. In addition, further elements as described herein, may also be contained, such as a stabilizing sequence as defined herein (e.g. derived from the UTR of a globin gene), IRES sequences, etc. Each of the elements may also be repeated in the mRNA according to the invention at least once (particularly in di- or multicistronic constructs), preferably twice or more. As an example, the single elements may be present in the mRNA according to the invention in the following order (wherein the mRNA may optionally comprise a 5′-UTR element as described herein 5′ of the coding region/CDS and/or a 3′-UTR element as described herein 3′ of the coding region/CDS):
[0212] 5′-coding region-histone stem-loop-poly(A)/(C) sequence-3′; or
[0213] 5′-coding region-poly(A)/(C) sequence-histone stem-loop-3′; or
[0214] 5′-coding region-histone stem-loop-polyadenylation signal-3′; or
[0215] 5′-coding region-polyadenylation signal-histone stem-loop-3′; or
[0216] 5′-coding region-histone stem-loop-histone stem-loop-poly(A)/(C) sequence-3′; or
[0217] 5′-coding region-histone stem-loop-histone stem-loop-polyadenylation signal-3′; or
[0218] 5′-coding region-poly(A)/(C) sequence-histone stem-loop-3′; or
[0219] 5′-coding region-poly(A)/(C) sequence-poly(A)/(C) sequence-histone stem-loop-3′; or
[0220] 5′-coding region-poly(A)/(C) sequence-histone stem-loop-3′ etc.

[0221] According to a further embodiment, the mRNA of the present invention preferably comprises at least one of the following structural elements: a 5′- and/or 3′-untranslated region element (UTR element), particularly a 5′-UTR element, which preferably comprises or consists of a nucleic acid sequence which is derived from the 5′-UTR of a TOP gene or from a fragment, homolog or a variant thereof, or a 5′- and/or 3′-UTR element which may preferably be derivable from a gene that provides a stable mRNA or from a homolog, fragment or variant thereof; a histone-stem-loop structure, preferably a histone-stem-loop in its 3′-untranslated region; a 5′-cap structure; a poly(A) tail; or a poly(C) sequence. Preferably, the mRNA of the invention comprises a 3′-terminal A nucleotide.

[0222] According to some embodiments, it is particularly preferred that—if, in addition to a peptide or protein as defined herein or a fragment or variant thereof, a further peptide or protein is encoded by the at least one coding sequence as defined herein—the encoded peptide or protein is preferably no histone protein, no reporter protein (e.g. Luciferase, GFP, EGFP, β-Galactosidase, particularly EGFP) and/or no marker or selection protein (e.g. alpha-Globin, Galactokinase and Xanthine:Guanine phosphoribosyl transferase (GPT)). In a preferred embodiment, the mRNA according to the invention does not comprise a reporter gene or a marker gene. Preferably, the mRNA according to the invention does not encode, for instance, luciferase; green fluorescent protein (GFP) and its variants (such as EGFP, RFP or BFP); α-globin; hypoxanthine-guanine phosphoribosyltransferase (HGPRT); β-galactosidase; galactokinase; alkaline phosphatase; secreted embryonic alkaline phosphatase (SEAP)) or a resistance gene (such as a resistance gene against neomycin, puromycin, hygromycin and zeocin). In a preferred embodiment, the mRNA according to the invention does not encode luciferase. In another embodiment, the mRNA according to the invention does not encode GFP or a variant thereof.

[0223] In another embodiment, the mRNA according to the present invention comprises, preferably in 5′ to 3′ direction, the following elements:
[0224] a) a 5′-cap structure, preferably m7GpppN,
[0225] b) a 5′-UTR element, which comprises or consists of a nucleic acid sequence, which is derived from the 5′-UTR of a TOP gene, preferably comprising a nucleic acid sequence according to SEQ ID NO:1 or 2 (HSD17B4), or a homolog, a fragment or a variant thereof or a 5′-UTR element, which comprises or consists of a nucleic acid sequence according to SEQ ID NO:27 or 28 (Slc7a3) or SEQ ID NO:23 or 24 (Rpl31), or a homolog, a fragment or a variant thereof,
[0226] c) at least one coding sequence as defined herein,
[0227] d) a 3′-UTR element comprising a nucleic acid sequence, which is derived from a PSMB3 gene, preferably comprising a nucleic acid sequence according to SEQ ID NO:33 or 34, or a homolog, a fragment or a variant thereof; and/or a 3′-UTR element comprising a nucleic acid sequence, which is derived from an albumin gene, preferably comprising a nucleic acid sequence according to SEQ ID NO:37 or 38, or a homolog, a fragment or a variant thereof,
[0228] e) a poly(A) tail, about 10 to about 200, about 10 to about 100, about 40 to about 80 or about 50 to about 70 adenosine nucleotides, more preferably about 100 adenosine nucleotides, preferably, wherein the mRNA comprises a 3′-terminal A nucleotide,
[0229] f) a poly(C) tail, preferably consisting of 10 to 200, 10 to 100, 20 to 70, 20 to 60 or 10 to 40 cytidine nucleotides, and
[0230] g) a histone stem-loop, preferably comprising a nucleic acid sequence according to SEQ ID NO:63 or 64.

[0231] In a further embodiment, the mRNA according to the present invention comprises, preferably in 5′ to 3′ direction, the following elements:
[0232] a) a 5′-cap structure, preferably m7GpppN,
[0233] b) a 5′-UTR element, which comprises or consists of a nucleic acid sequence, which is derived from the 5′-UTR of the HSD17B4 gene, preferably comprising a nucleic acid sequence according to SEQ ID NO:1 or 2, or a homolog, a fragment or a variant thereof,
[0234] c) at least one coding sequence as defined herein,
[0235] d) a 3′-UTR element comprising a nucleic acid sequence, which is derived from an PSMB3 gene, preferably comprising a nucleic acid sequence according to SEQ ID NO:33 or 34, or a homolog, a fragment or a variant thereof;
[0236] e) optionally, a histone stem-loop selected from SEQ ID NO:63 or 64; and/or
[0237] f) a poly(A) tail, preferably consisting of about 10 to about 200, about 10 to about 100, about 40 to about 80 or about 50 to about 70 adenosine nucleotides, more preferably about 100 adenosine nucleotides.

[0238] The mRNA according to the present invention may be prepared using any method known in the art, including synthetic methods such as e.g. solid phase RNA synthesis, as well as in vitro methods, such as RNA in vitro transcription reactions.

[0239] Preferred sequences are shown herein below in Table C1/C2.

TABLE C1
Preferred sequences of the present invention:

| Sequence | SEQ ID NO: # |
|---|---|
| All CDS | 247-1575, 5673-5682 |
| All CDS optimized (opt1-5, opt11, opt28, opt29) | 249-689, 692-1132, 1135-1575, 5675-5682 |
| All CDS wt | 247, 248, 690, 691, 1133, 1134, 5673, 5674 |
| All CDS opt1/GC | 249-346, 692-789, 1135-1232, 5675 |
| All CDS opt2/c-rich | 347-395, 790-838, 1233-1281, 5676 |
| All CDS opt3/human | 396-444, 839-887, 1282-1330, 5677 |
| All CDS opt4/main_codon | 445-493, 888-936, 1331-1379, 5678 |
| All CDS opt5 | 494-542, 937-985, 1380-1428, 5679 |
| All CDS opt11 | 543-591, 986-1034, 1429-1477, 5680 |
| All CDS opt28 | 592-640, 1035-1083, 1478-1526, 5681 |
| All CDS opt29 | 641-689, 1084-1132, 1527-1575, 5682 |
| All mRNAs | 1576-5615, 5683-5712, 5716-5736 |
| All mRNAs i-3 —/muag (A64-N5-C30-hSL-N5) | 1576-2904, 5683-5692 |
| All mRNAs a-1 HSD17B4/PSMB3 | 2905-5615, 5693-5712, 5716-5736 |
| All mRNAs a-1 HSD17B4/PSMB3 (hSL-A100) | 2905-4233, 5563-5615, 5693-5702, 5716-5736 |
| All mRNAs a-1 HSD17B4/PSMB3 (A100) | 4234-5562, 5703-5712 |

as apparent, different construct designs were applied. More information on the sequences is disclosed in the ST.25 sequence listing under <223> Other Information [here, and throughout the whole specification, it has to be noted that the priority application was filed with a sequence listing in accordance with the WIPO Standard ST.25, which then was converted into a sequence listing according to WIPO Standard ST.26—information which was comprised within line <223> in ST.25 now was added to the respective SEQ ID NO: as a note under “feature key”, i.e. “misc_feature” (for nucleic acids) or “REGION” (for proteins)]. Each construct as shown in the sequence listing resembles a preferred construct of the invention.

[0240] In another embodiment, the nucleic acid of the present invention are DNA sequences, comprises a coding sequence that comprises at least one of the nucleic acid sequences being identical or at least 70%, 80%, 85%, 86%, 87%, 88%, 89%, 90%, 91%, 92%, 93%, 94%, 95%, 96%, 97%, 98%, or 99% identical to any of the sequences selected from the group consisting of SEQ ID NO:1576-5615, 5683-5712, and 5716-5736 or SEQ ID NO:2906, 2956, 3005, 3250, 3299, 5728, 5731, 5734, 5563, 5564, 5565, 5566, 5567, 5568, 5569, 5570, 5571, 5572, 5573, 5574, 5575, 5576, 5577, 5578, 5579, 5580, 5581, 5582, 5583, 5584, 5585, 5586, 5587, 5588, 5589, 5590, 5591, 5592, 5593, 5594, 5595, 5596, 5597, 5598, 5599, 5600, 5601, 5602, 5603, 5604, 5605, 5606, 5607, 5608, 5609, 5610, 5611, 5612, 5613, 5614, and 5615 or to any one of the sequences as disclosed in the Table C2 (“Constructs of the invention”) herein below, wherein all Uracils (U) in the respective sequences are substituted by Thymidines (T), or a fragment or variant of any of these sequences.

TABLE C2
“Constructs of the invention”

| | | | | 5′-UTR/ | | SEQ ID NO: | SEQ ID NO: |
|---|---|---|---|---|---|---|---|
| SEQ ID NO: | RNA | | CDS | 3′-UTR; | 3′- | Protein w/o | CDS w/o |
| RNA | ID | Name | opt. | UTR Design | end | HA-tag | HA-tag |
| 1576-5615 | see respective information under <223> in the sequence listing of the invention [here, and throughout | | | | | | |
| | the whole specification, it has to be noted that the priority application was filed with a sequence listing | | | | | | |
| | in accordance with the WIPO Standard ST.25, which then was converted into a sequence listing | | | | | | |
| | according to WIPO Standard ST.26 - information which was comprised within line <223> in ST.25 now | | | | | | |
| | was added to the respective SEQ ID NO: as a note under “feature key”, i.e. “misc_feature” (for nucleic | | | | | | |
| | acids) or “REGION” (for proteins)] | | | | | | |
| 5683-5712 | see respective information under <223> in the sequence listing of the invention [here, and throughout | | | | | | |
| | the whole specification, it has to be noted that the priority application was filed with a sequence listing | | | | | | |
| | in accordance with the WIPO Standard ST.25, which then was converted into a sequence listing | | | | | | |
| | according to WIPO Standard ST.26 - information which was comprised within line <223> in ST.25 now | | | | | | |
| | was added to the respective SEQ ID NO: as a note under “feature key”, i.e. “misc_feature” (for nucleic | | | | | | |
| | acids) or “REGION” (for proteins)] | | | | | | |
| 2906 | R9821 | HNF4A(1-474) | wt | HSD17B4/ | hSL- | 100 | 248 |
| | | | | PSMB3; a-1 | A100 | | |
| 2956 | R9823, | HNF4A(1-474) | opt1 | HSD17B4/ | hSL- | 100 | 298 |
| | R10103 | | | PSMB3; a-1 | A100 | | |
| 3005 | R9824 | HNF4A(1-474) | opt2 | HSD17B4/ | hSL- | 100 | 347 |
| | | | | PSMB3; a-1 | A100 | | |
| 3250 | R9828 | HNF4A(1-474) | opt28 | HSD17B4/ | hSL- | 100 | 592 |
| | | | | PSMB3; a-1 | A100 | | |
| 3299 | R9822, | HNF4A(1-474) | opt29 | HSD17B4/ | hSL- | 100 | 641 |
| | R10595 | | | PSMB3; a-1 | A100 | | |
| 5563 | R9455 | HNF4A(1-474) HA-tag | wt | HSD17B4/ | hSL- | 100 | 248 |
| | | | | PSMB3; a-1 | A100 | | |
| 5564 | R9456 | HNF4A(1-474) HA-tag | opt1 | HSD17B4/ | hSL- | 100 | 249 |
| | | | | PSMB3; a-1 | A100 | | |
| 5565 | R9457 | HNF4A(1-474)(S313A) HA-tag | opt1 | HSD17B4/ | hSL- | 101 | 250 |
| | | | | PSMB3; a-1 | A100 | | |
| 5566 | R9458 | HNF4A(1-474)(S313E) HA-tag | opt1 | HSD17B4/ | hSL- | 102 | 251 |
| | | | | PSMB3; a-1 | A100 | | |
| 5567 | R9459 | HNF4A(1-474)(S142A S143A) | opt1 | HSD17B4/ | hSL- | 103 | 252 |
| | | HA-tag | | PSMB3; a-1 | A100 | | |
| 5568 | R9460 | HNF4A(1-474)(S142E S143E) | opt1 | HSD17B4/ | hSL- | 104 | 253 |
| | | HA-tag | | PSMB3; a-1 | A100 | | |
| 5569 | R9461 | HNF4A(1-474)(S143A) HA-tag | opt1 | HSD17B4/ | hSL- | 105 | 254 |
| | | | | PSMB3; a-1 | A100 | | |
| 5570 | R9462 | HNF4A(1-474)(T166A) HA-tag | opt1 | HSD17B4/ | hSL- | 106 | 255 |
| | | | | PSMB3; a-1 | A100 | | |
| 5571 | R9463 | HNF4A(1-474)(S167E) HA-tag | opt1 | HSD17B4/ | hSL- | 107 | 256 |
| | | | | PSMB3; a-1 | A100 | | |
| 5572 | R9464 | HNF4A(1-474)(S167A) HA-tag | opt1 | HSD17B4/ | hSL- | 108 | 257 |
| | | | | PSMB3; a-1 | A100 | | |
| 5573 | R9465 | HNF4A(1-474)(S167A S378A | opt1 | HSD17B4/ | hSL- | 109 | 258 |
| | | T429A T432A S436A) HA-tag | | PSMB3; a-1 | A100 | | |
| 5574 | R9466 | HNF4A(1-474)(S167E S378E | opti | HSD17B4/ | hSL- | 110 | 259 |
| | | T429E T432E S436E) HA-tag | | PSMB3; a-1 | A100 | | |
| 5575 | R9467 | HNF4A(1-474)(S87A) HA-tag | opt1 | HSD17B4/ | hSL- | 111 | 260 |
| | | | | PSMB3; a-1 | A100 | | |
| 5576 | R9468 | HNF4A(1-474)(S87E) HA-tag | opt1 | HSD17B4/ | hSL- | 112 | 261 |
| | | | | PSMB3; a-1 | A100 | | |
| 5577 | R9469 | HNF4A(1-474)(R2V) HA-tag | opt1 | HSD17B4/ | hSL- | 113 | 262 |
| | | | | PSMB3; a-1 | A100 | | |
| 5578 | R9470 | HNF4A(1-474)(R2V K5V) | opt1 | HSD17B4/ | hSL- | 114 | 263 |
| | | HA-tag | | PSMB3; a-1 | A100 | | |
| 5579 | R9471 | HNF4A(1-474)(K179R K180R) | opt1 | HSD17B4/ | hSL- | 115 | 264 |
| | | HA-tag | | PSMB3; a-1 | A100 | | |
| 5580 | R9472 | HNF4A(1-474)(K234R) HA-tag | opt1 | HSD17B4/ | hSL- | 116 | 265 |
| | | | | PSMB3; a-1 | A100 | | |
| 5581 | R9473 | HNF4A(1-474)(K300R) HA-tag | opt1 | HSD17B4/ | hSL- | 117 | 266 |
| | | | | PSMB3; a-1 | A100 | | |
| 5582 | R9474 | HNF4A(1-474)(K300R K307R | opt1 | HSD17B4/ | hSL- | 118 | 267 |
| | | K309R) HA-tag | | PSMB3; a-1 | A100 | | |
| 5583 | R9475 | HNF4A(1-474)(K447R K470R) | opt1 | HSD17B4/ | hSL- | 119 | 268 |
| | | HA-tag | | PSMB3; a-1 | A100 | | |
| 5584 | R9476 | HNF4A(1-474)(K458R) HA-tag | opt1 | HSD17B4/ | hSL- | 120 | 269 |
| | | | | PSMB3; a-1 | A100 | | |
| 5585 | R9477 | HNF4A(1-474)(K106R K108R | opt1 | HSD17B4/ | hSL- | 121 | 270 |
| | | K126R K127R) HA-tag | | PSMB3; a-1 | A100 | | |
| 5586 | R9480 | HNF4A(1-474)(E285Q) HA-tag | opt1 | HSD17B4/ | hSL- | 122 | 271 |
| | | | | PSMB3; a-1 | A100 | | |
| 5587 | R9481 | HNF4A(1-474)(T166E) HA-tag | opt1 | HSD17B4/ | hSL- | 123 | 272 |
| | | | | PSMB3; a-1 | A100 | | |
| 5588 | R9532 | HNF4A(1-474)(S148A) HA-tag | opt1 | HSD17B4/ | hSL- | 124 | 273 |
| | | | | PSMB3; a-1 | A100 | | |
| 5589 | R9533 | HNF4A(1-474)(S148E) HA-tag | opt1 | HSD17B4/ | hSL- | 125 | 274 |
| | | | | PSMB3; a-1 | A100 | | |
| 5590 | R9534 | HNF4A(1-474)(S183A) HA-tag | opt1 | HSD17B4/ | hSL- | 126 | 275 |
| | | | | PSMB3; a-1 | A100 | | |
| 5591 | R9535 | HNF4A(1-474)(S183E) HA-tag | opt1 | HSD17B4/ | hSL- | 127 | 276 |
| | | | | PSMB3; a-1 | A100 | | |
| 5592 | R9536 | HNF4A(1-474)(S461A) HA-tag | opt1 | HSD17B4/ | hSL- | 128 | 277 |
| | | | | PSMB3; a-1 | A100 | | |
| 5593 | R9537 | HNF4A(1-474)(S461E) HA-tag | opt1 | HSD17B4/ | hSL- | 129 | 278 |
| | | | | PSMB3; a-1 | A100 | | |
| 5594 | R9849 | HNF4A(1-474)(S142A S143A | opt1 | HSD17B4/ | hSL- | 130 | 279 |
| | | S313A) HA-tag | | PSMB3; a-1 | A100 | | |
| 5595 | R9850 | HNF4A(1-474)(S142A S143A | opt1 | HSD17B4/ | hSL- | 131 | 280 |
| | | S313A K458R) HA-tag | | PSMB3; a-1 | A100 | | |
| 5596 | R9851 | HNF4A(1-474)(S142A S143A | opt1 | HSD17B4/ | hSL- | 132 | 281 |
| | | S167A S313A S378A T429A | | PSMB3; a-1 | A100 | | |
| | | T432A S436A K458R) HA-tag | | | | | |
| 5597 | R9852 | HNF4A(1-474)(S142A S143A | opt1 | HSD17B4/ | hSL- | 133 | 282 |
| | | S148A S167A S313A S378A | | PSMB3; a-1 | A100 | | |
| | | T429A T432A S436A K458R) | | | | | |
| | | HA-tag | | | | | |
| 5598 | R9853 | HNF4A(1-474)(K106R K108R | opt1 | HSD17B4/ | hSL- | 134 | 283 |
| | | K126R K127R S142A S143A | | PSMB3; a-1 | A100 | | |
| | | S148A S167A S313A S378A | | | | | |
| | | T429A T432A S436A K458R) | | | | | |
| | | HA-tag | | | | | |
| 5599 | R9873 | HNF4A(1-474)(S142A S143A | opt1 | HSD17B4/ | hSL- | 135 | 284 |
| | | S148A T166A S167A S313A | | PSMB3; a-1 | A100 | | |
| | | S378A T429A T432A S436A | | | | | |
| | | K458R) HA-tag | | | | | |
| 5600 | R9874 | HNF4A(1-474)(S87A S142A | opt1 | HSD17B4/ | hSL- | 136 | 285 |
| | | S143A S148A T166A S167A | | PSMB3; a-1 | A100 | | |
| | | S313A S378A T429A T432A | | | | | |
| | | S436A K458R) HA-tag | | | | | |
| 5601 | R9875 | HNF4A(1-474)(S87A K106R | opt1 | HSD17B4/ | hSL- | 137 | 286 |
| | | K108R K126R K127R S142A | | PSMB3; a-1 | A100 | | |
| | | S143A S148A T166A S167A | | | | | |
| | | S313A S378A T429A T432A | | | | | |
| | | S436A K458R) HA-tag | | | | | |
| 5602 | R10313 | HNF4A(1-474)(S87A K106R | opt1 | HSD17B4/ | hSL- | 138 | 287 |
| | | K108R K126R K127R) HA-tag | | PSMB3; a-1 | A100 | | |
| 5603 | R10314 | HNF4A(1-474)(S87A K106R | opt1 | HSD17B4/ | hSL- | 139 | 288 |
| | | K108R K126R K127R S142A | | PSMB3; a-1 | A100 | | |
| | | S143A S148A T166A S167A | | | | | |
| | | S313A S378A T429A T432A | | | | | |
| | | S436A K458R S461A) HA-tag | | | | | |
| 5604 | R10315 | HNF4A(1-474)(S87A K106R | opt1 | HSD17B4/ | hSL- | 140 | 289 |
| | | K108R K126R K127R S142A | | PSMB3; a-1 | A100 | | |
| | | S143A S148A T166A S167A | | | | | |
| | | S313A S378A T429A T432A | | | | | |
| | | S436A K458R S461E) HA-tag | | | | | |
| 5605 | R10316 | HNF4A(1-474)(S87A K106R | opt1 | HSD17B4/ | hSL- | 141 | 290 |
| | | K108R K126R K127R S142A | | PSMB3; a-1 | A100 | | |
| | | S143A S148E T166A S167E | | | | | |
| | | S313A S378E T429E T432E | | | | | |
| | | S436E K458R S461E) HA-tag | | | | | |
| 5606 | R10317 | HNF4A(1-474)(S87A K106R | opt1 | HSD17B4/ | hSL- | 142 | 291 |
| | | K108R K126R K127R S142A | | PSMB3; a-1 | A100 | | |
| | | S143A S148A T166A S167A | | | | | |
| | | K179R K180R S313A S378A | | | | | |
| | | T429A T432A S436A K458R | | | | | |
| | | S461E) HA-tag | | | | | |
| 5607 | R10318 | HNF4A(1-474)(S87A K106R | opt1 | HSD17B4/ | hSL- | 143 | 292 |
| | | K108R K126R K127R S142A | | PSMB3; a-1 | A100 | | |
| | | S143A S148A T166A S167A | | | | | |
| | | K300R K307R K309R S313A | | | | | |
| | | S378A T429A T432A S436A | | | | | |
| | | K458R S461E) HA-tag | | | | | |
| 5608 | R10319 | HNF4A(1-474)(S87A K106R | opt1 | HSD17B4/ | hSL- | 144 | 293 |
| | | K108R K126R K127R S142A | | PSMB3; a-1 | A100 | | |
| | | S143A S148A T166A S167A | | | | | |
| | | S313A S378A T429A T432A | | | | | |
| | | S436A K447R K458R S461E | | | | | |
| | | K470R) HA-tag | | | | | |
| 5609 | R10320 | HNF4A(1-474)(S87A K106R | opt1 | HSD17B4/ | hSL- | 145 | 294 |
| | | K108R K126R K127R S142A | | PSMB3; a-1 | A100 | | |
| | | S143A S148A T166A S167A | | | | | |
| | | K179R K180R K234R K300R | | | | | |
| | | K307R K309R S313A S378A | | | | | |
| | | T429A T432A S436A K447R | | | | | |
| | | K458R S461E K470R) HA-tag | | | | | |
| 5610 | R10321 | HNF4A(1-474)(S87A S95A | opt1 | HSD17B4/ | hSL- | 146 | 295 |
| | | S99A K106R K108R K126R | | PSMB3; a-1 | A100 | | |
| | | K127R S142A S143A S148A | | | | | |
| | | T166A S167A S313A S378A | | | | | |
| | | T429A T432A S436A K458R | | | | | |
| | | S461E) HA-tag | | | | | |
| 5611 | R10322 | HNF4A(1-474)(S87A K106R | opt1 | HSD17B4/ | hSL- | 147 | 296 |
| | | K108R K126R K127R S138A | | PSMB3; a-1 | A100 | | |
| | | T139A S142A S143A S148A | | | | | |
| | | T166A S167A S313A S378A | | | | | |
| | | T429A T432A S436A K458R | | | | | |
| | | S461E) HA-tag | | | | | |
| 5612 | R10323 | HNF4A(1-474)(S87A S95A | opt1 | HSD17B4/ | hSL- | 148 | 297 |
| | | S99A K106R K108R K126R | | PSMB3; a-1 | A100 | | |
| | | K127R S138A T139A S142A | | | | | |
| | | S143A S148A T166A S167A | | | | | |
| | | S313A S378A T429A T432A | | | | | |
| | | S436A K458R S461E) HA-tag | | | | | |
| 5613 | R9478 | HNF4A(1-375) HA-tag | opt1 | HSD17B4/ | hSL- | 149 | 692 |
| | | | | PSMB3; a-1 | A100 | | |
| 5614 | R9479 | HNF4A(39-474) HA-tag | opt1 | HSD17B4/ | hSL- | 198 | 1135 |
| | | | | PSMB3; a-1 | A100 | | |
| 5615 | R9697 | HNF4A(1-474) HA-tag | opt29 | HSD17B4/ | hSL- | 100 | 641 |
| | | | | PSMB3; a-1 | A100 | | |
| 5713 | R9011 | EGFP-3xHA | | HSD17B4/ | hSL- | | |
| | | | | PSMB3; a-1 | A100 | | |
| 5714 | R7797 | ZsGreen | | HSD17B4/ | A64- | | |
| | | | | PSMB3; a-1 | N5 | | |
| 5715 | R7805 | HNF4A(1-474) | opt29 | HSD17B4/ | A64- | 100 | 641 |
| | | | | PSMB3; a-1 | N5 | | |
| 2907 | R10692 | HNF4A(1-474) | opt1 | HSD17B4/ | hSL- | 100 | 249 |
| | | | | PSMB3; a-1 | A100 | | |
| 2936, | R11470 | HNF4A(1-474)(S461E) | opt1 | HSD17B4/ | hSL- | 129 | 278, 327 |
| 2985 | | | | PSMB3; a-1 | A100 | | |
| 2944 | R10596 | HNF4A(1-474) | opt1 | HSD17B4/ | hSL- | 137 | 286 |
| | | (S87A_K106R_K108R_K126R_{—} | | PSMB3; a-1 | A100 | | |
| | | K127R_S142A_S143A_S148A_{—} | | | | | |
| | | T166A_S167A_S313A_S378A_{—} | | | | | |
| | | T429A_T432A_S436A_K458R) | | | | | |
| 2945 | R10664 | HNF4A(1-474) | opt1 | HSD17B4/ | hSL- | 138 | 287 |
| | | (S87A_K106R_K108R_K126R_{—} | | PSMB3; a-1 | A100 | | |
| | | K127R) | | | | | |
| 2947 | R10665 | HNF4A(1-474) | opt1 | HSD17B4/ | hSL- | 140 | 289 |
| | | (S87A_K106R_K108R_K126R_{—} | | PSMB3; a-1 | A100 | | |
| | | K127R_S142A_S143A_S148A_{—} | | | | | |
| | | T166A_S167A_S313A_S378A_{—} | | | | | |
| | | T429A_T432A_S436A_K458R_{—} | | | | | |
| | | S461E) | | | | | |
| 5719 | R11540 | HNF4A(1-474) | opt1 | HSD17B4/ | hSL- | 100 | 249 |
| | | | | PSMB3; a-1 | A100 | | |
| 5720 | R11542 | HNF4A(1-474)(S461E) | opt1 | HSD17B4/ | hSL- | 129 | 278, 327 |
| | | | | PSMB3; a-1 | A100 | | |
| 5721 | R11541 | HNF4A(1-474) | opt1 | HSD17B4/ | hSL- | 140 | 289 |
| | | (S87A_K106R_K108R_K126R_{—} | | PSMB3; a-1 | A100 | | |
| | | K127R_S142A_S143A_S148A_{—} | | | | | |
| | | T166A_S167A_S313A_S378A_{—} | | | | | |
| | | T429A_T432A_S436A_K458R_{—} | | | | | |
| | | S461E) | | | | | |
| 5722 | R11554 | HNF4A(1-474) | opt1 | HSD17B4/ | hSL- | 100 | 249 |
| | * | | | PSMB3; a-1 | A100 | | |
| 5723 | R11556 | HNF4A(1-474)(S461E) | opt1 | HSD17B4/ | hSL- | 129 | 278, 327 |
| | * | | | PSMB3; a-1 | A100 | | |
| 5724 | R11555 | HNF4A(1-474) | opt1 | HSD17B4/ | hSL- | 140 | 289 |
| | * | (S87A_K106R_K108R_K126R_{—} | | PSMB3; a-1 | A100 | | |
| | | K127R_S142A_S143A_S148A_{—} | | | | | |
| | | T166A_S167A_S313A_S378A_{—} | | | | | |
| | | T429A_T432A_S436A_K458R_{—} | | | | | |
| | | S461E) | | | | | |
| 5695 | R11128 | HNF1A(1-631) | opt1 | HSD17B4/ | hSL- | 5672 | 5675 |
| | | | | PSMB3; a-1 | A100 | | |

* mRNA with N1-methylpseudouridine (N1MPU, m1f)

[0241] Constructs as shown in Table C2 “Constructs of the invention” which comprised a HA-tag for antibody detection in the experimental section naturally will not comprise a HA-tag when they are used in a therapeutic mRNA applicable for humans. Thus, those sequences without HA-tag are understood to be preferably comprised within the disclosure of the current invention.

[0242] In another embodiment, the constructs as described above may comprise the CDS as disclosed in patent application WO2018104538 under SEQ ID NO:44, 45, 85, 113, 141, 169, 197, 225, 253, 281, 309, 2011, 337, 365, 393, 420, 421, 458, 483, 511, 536, 561, 586, 611, 636, 661, 686, 711, 2025, 2067, 2089, 2090, 2127, 2152, 2177, 2202, 2227, 2252, 2277, 2302, 2327, 2352, 2377, or 2402; WO2018104538 which is herein incorporated by reference in its entirety, also especially SEQ ID NO:44, 45, 85, 113, 141, 169, 197, 225, 253, 281, 309, 2011, 337, 365, 393, 420, 421, 458, 483, 511, 536, 561, 586, 611, 636, 661, 686, 711, 2025, 2067, 2089, 2090, 2127, 2152, 2177, 2202, 2227, 2252, 2277, 2302, 2327, 2352, 2377, or 2402.

[0243] Further preferred constructs of the invention are disclosed herein in Table C3. As apparent, each line as shown in Table C3 resembles specific preferred mRNA(s) encoding a specific preferred HNF4A protein(s).

TABLE C3
“Further preferred constructs of the invention”: designation of combinations of amino acid substitutions
or deletions (for further information Table B-I shows further exemplary suitable HNF4A protein designs
including mRNAs encoding said proteins including their SEQ ID NOs) - “*” indicates an mRNA
with N1-methylpseudouridine (N1MPU, mlf), “**” indicates an mRNA with pseudouridine (psi-uridine, p)

| | | | Exemplary | Exemplary |
|---|---|---|---|---|
| | | | preferred | preferred |
| | amino acid substitutions or deletions in | PRT SEQ | CDS SEQ | mRNA SEQ |
| Designation | comparison to HNF4A WT protein | ID NO: | ID NO: | ID NO: |
| WT | — | 100 | 249 | 2907, 5719, |
| | | | | 5722*, 5725** |
| S87A | S87A | 111 | 260 | 2918 |
| S461E | S461E | 129 | 278 | 2936, 5720, |
| | | | | 5723*, 5726** |
| combo 1 | S142A S143A S313A | 130 | 279 | 2937 |
| combo 2 | S142A S143A S313A K458R | 131 | 280 | 2938 |
| combo 3 | S142A S143A S167A S313A S378A T429A | 132 | 281 | 2939 |
| | T432A S436A K458R | | | |
| combo 4 | S142A S143A S148A S167A S313A S378A | 133 | 282 | 2940 |
| | T429A T432A S436A K458R | | | |
| combo 5 | K106R K108R K126R K127R S142A S143A | 134 | 283 | 2941 |
| | S148A S167A S313A S378A T429A T432A | | | |
| | S436A K458R | | | |
| combo 6 | S142A S143A S148A T166A S167A S313A | 135 | 284 | 2942 |
| | S378A T429A T432A S436A K458R | | | |
| combo 7 | S87A S142A S143A S148A T166A S167A S313A | 136 | 285 | 2943 |
| | S378A T429A T432A S436A K458R | | | |
| combo 8 | S87A K106R K108R K126R K127R S142A S143A | 137 | 286 | 2944 |
| | S148A T166A S167A S313A S378A T429A | | | |
| | T432A S436A K458R | | | |
| combo 9 (S87A | S87A K106R K108R K126R K127R | 138 | 287 | 2945 |
| 4x K to R) | | | | |
| combo 10 (combo | S87A K106R K108R K126R K127R S142A S143A | 139 | 288 | 2946 |
| 8 + S461A) | S148A T166A S167A S313A S378A T429A | | | |
| | T432A S436A K458R S461A | | | |
| combo 11 (combo | S87A K106R K108R K126R K127R S142A S143A | 140 | 289 | 2947, 5721, |
| 8 + S461E) | S148A T166A S167A S313A S378A T429A | | | 5724*, 5727** |
| | T432A S436A K458R S461E | | | |
| combo 12 | S87A K106R K108R K126R K127R S142A S143A | 141 | 290 | 2948 |
| | S148E T166A S167E S313A S378E T429E T432E | | | |
| | S436E K458R S461E | | | |
| combo 13 | S87A K106R K108R K126R K127R S142A S143A | 142 | 291 | 2949 |
| | S148A T166A S167A K179R K180R S313A | | | |
| | S378A T429A T432A S436A K458R S461E | | | |
| combo 14 | S87A K106R K108R K126R K127R S142A S143A | 143 | 292 | 2950 |
| | S148A T166A S167A K300R K307R K309R | | | |
| | S313A S378A T429A T432A S436A K458R | | | |
| | S461E | | | |
| combo 15 | S87A K106R K108R K126R K127R S142A S143A | 144 | 293 | 2951 |
| | S148A T166A S167A S313A S378A T429A | | | |
| | T432A S436A K447R K458R S461E K470R | | | |
| combo 16 | S87A K106R K108R K126R K127R S142A S143A | 145 | 294 | 2952 |
| | S148A T166A S167A K179R K180R K234R | | | |
| | K300R K307R K309R S313A S378A T429A | | | |
| | T432A S436A K447R K458R S461E K470R | | | |
| combo 17 | S87A S95A S99A K106R K108R K126R K127R | 146 | 295 | 2953 |
| | S142A S143A S148A T166A S167A S313A | | | |
| | S378A T429A T432A S436A K458R S461E | | | |
| combo 18 | S87A K106R K108R K126R K127R S138A T139A | 147 | 296 | 2954 |
| | S142A S143A S148A T166A S167A S313A | | | |
| | S378A T429A T432A S436A K458R S461E | | | |
| combo 19 | S87A S95A S99A K106R K108R K126R K127R | 148 | 297 | 2955 |
| | S138A T139A S142A S143A S148A T166A | | | |
| | S167A S313A S378A T429A T432A S436A | | | |
| | K458R S461E | | | |

[0244] Accordingly, a preferred mRNA of the invention is SEQ ID NO:2907 (WNT HNF4A protein). Another preferred mRNA of the invention is SEQ ID NO:5719 (WT HNF4A protein). Another preferred mRNA of the invention is SEQ ID NO:5722 (WT HNF4A protein). Another preferred mRNA of the invention is SEQ ID NO:5725 (WT HNF4A protein).

[0245] In a preferred embodiment, the mRNA encoding “combo 11” is SEQ ID NO:2947. In another preferred embodiment, the mRNA encoding “combo 11” is SEQ ID NO:5721. In another preferred embodiment, the mRNA encoding “combo 11” is SEQ ID NO:5724. In another preferred embodiment, the mRNA encoding “combo 11” is SEQ ID NO:5727.

[0246] In another preferred embodiment, the mRNA encoding “S461E” is SEQ ID NO:2936. In another preferred embodiment, the mRNA encoding “S461E” is SEQ ID NO:5720. In another preferred embodiment, the mRNA encoding “S461E” is SEQ ID NO:5723. In another preferred embodiment, the mRNA encoding “S461E” is SEQ ID NO:5726.

### Modifications

### Chemical Modifications

[0247] The term “RNA modification” as used herein may refer to chemical modifications comprising backbone modifications as well as sugar modifications or base modifications.

[0248] In this context, a modified RNA as defined herein may contain nucleotide analogues/modifications, e.g. backbone modifications, sugar modifications or base modifications. A backbone modification in connection with the present invention is a modification, in which phosphates of the backbone of the nucleotides contained in an RNA as defined herein are chemically modified. A sugar modification in connection with the present invention is a chemical modification of the sugar of the nucleotides of the mRNA as defined herein. Furthermore, a base modification in connection with the present invention is a chemical modification of the base moiety of the nucleotides of the mRNA. In this context, nucleotide analogues or modifications are preferably selected from nucleotide analogues, which are applicable for transcription and/or translation.

### Base Modifications

[0249] In certain embodiments, the open reading frame of the mRNA of the invention does not comprise any chemically modified uracil or cytosine nucleotides.

[0250] In other embodiments, the mRNA of the invention is chemically modified, preferably wherein the mRNA comprises pseudouridine (psi-uridine), N1-methylpseudouridine (N1MPU), 2-aminoadenosine, 2-thiothymidine, inosine, pyrrolo-pyrimidine, 3-methyl adenosine, 5-methylcytidine, C-5 propynyl-cytidine, C-5 propynyl-uridine, 2-aminoadenosine, C5-bromouridine, C5-fluorouridine, C5-iodouridine, C5-propynyl-uridine, C5-propynyl-cytidine, C5-methylcytidine, 2-aminoadenosine, 7-deazaadenosme, 7-deazaguanosine, 8-oxoadenosine, 8-oxoguanosine, O(6)-methylguanine, and/or 2-thiocytidine, more preferably wherein all uridine bases of the mRNA are fully chemically modified, even more preferably wherein all uridine bases of the mRNA are pseudouridine or N1-methylpseudouridine (N1MPU) bases, most preferably wherein all uridine bases of the mRNA are N1-methylpseudouridine (N1MPU) bases.

[0251] In some embodiments of the invention, essentially all, e.g. essentially 100% of the uracil in the coding sequence (or the full nucleic acid sequence) have a chemical modification, preferably a chemical modification in the 5-position of the uracil. Incorporating modified nucleotides such as e.g. pseudouridine (ψ) or N1-methylpseudouridine (m1ψ or N1MPU) into the coding sequence (or the full nucleic acid sequence) may be advantageous as unwanted innate immune responses (upon administration of the RNA) may be adjusted or reduced (if required). In other preferred embodiments of the invention, essentially all uracil in the coding sequence or the full nucleic acid sequence are exchanged with pseudouridine (ψ). In some preferred embodiments of the invention, essentially all, e.g. essentially 100% of the uracil in the coding sequence or the full nucleic acid sequence are exchanged with N1-methylpseudourdine (m1P).

[0252] In other preferred embodiments, the artificial nucleic add, preferably the RNA, does not comprise chemically modified nucleotides. Notably, a 5′-cap structure as defined below is typically not considered to be a chemically modified nucleotide. Accordingly, the artificial nucleic add, preferably the RNA, comprises a sequence that consists only of G, C, A and U nucleotides and therefore does not comprise modified nucleotides, and optionally comprises a 5′-cap structure. In further preferred embodiments, the artificial nucleic acid, preferably the RNA of the invention does not comprise N1-methylpseudouridine (m1ψ) substituted positions or pseudouridine (ψ) substituted positions.

[0253] In some preferred embodiments, the nucleotide mixture comprises at least one modified nucleotide and/or at least one nucleotide analogue or nucleotide derivative. The modified nucleosides and nucleotides, which may be incorporated into a modified RNA as described herein can further be modified in the nucleobase moiety. Examples of nucleobases found in RNA include, but are not limited to, adenine, guanine, cytosine and uracil. For example, the nucleosides and nucleotides described herein can be chemically modified on the major groove face. In some embodiments, the major groove chemical modifications can include an amino group, a thiol group, an alkyl group, or a halo group. In preferred embodiments the nucleotide mixture comprises least one modified nucleotide and/or at least one nucleotide analogues is selected from a backbone modified nucleotide, a sugar modified nucleotide and/or a base modified nucleotide, or any combination thereof.

[0254] In particularly preferred embodiments of the present invention, the nucleotide analogues/modifications are selected from base modifications, which are preferably selected from 2-amino-6-chloropurineriboside-5′-triphosphate, 2-Aminopurine-riboside-5′-triphosphate; 2-aminoadenosine-5′-triphosphate, 2′-Amino-2′-deoxycytidine-triphosphate, 2-thiocytidine-5′-triphosphate, 2-thiouridine-5′-triphosphate, 2′-Fluorothymidine-5′-triphosphate, 2′-O-Methyl-inosine-5′-triphosphate 4-thiouridine-5′-triphosphate, 5-aminoallylcytidine-5′-triphosphate, 5-aminoallyluridine-5′-triphosphate, 5-bromocytidine-5′-triphosphate, 5-bromouridine-5′-triphosphate, 5-Bromo-2′-deoxycytidine-5′-triphosphate, 5-Bromo-2′-deoxyuridine-5′-triphosphate, 5-iodocytidine-5′-triphosphate, 5-Iodo-2′-deoxycytidine-5′-triphosphate, 5-iodouridine-5′-triphosphate, 5-Iodo-2′-deoxyuridine-5′-triphosphate, 5-methylcytidine-5′-triphosphate, 5-methyluridine-5′-triphosphate, 5-Propynyl-2′-deoxycytidine-5′-triphosphate, 5-Propynyl-2′-deoxyuridine-5′-triphosphate, 6-azacytidine-5′-triphosphate, 6-azauridine-5′-triphosphate, 6-chloropurineriboside-5′-triphosphate, 7-deazaadenosine-5′-triphosphate, 7-deazaguanosine-5′-triphosphate, 8-azaadenosine-5′-triphosphate, 8-azidoadenosine-5′-triphosphate, benzimidazole-riboside-5′-triphosphate, N1-methyladenosine-5′-triphosphate, N1-methylguanosine-5′-triphosphate, N6-methyladenosine-5′-triphosphate, O6-methylguanosine-5′-triphosphate, pseudouridine-5′-triphosphate, or puromycin-5′-triphosphate, xanthosine-5′-triphosphate. Particular preference is given to nucleotides for base modifications selected from the group of base-modified nucleotides consisting of 5-methylcytidine-5′-triphosphate, 7-deazaguanosine-5′-triphosphate, 5-bromocytidine-5′-triphosphate, and pseudouridine-5′-triphosphate.

[0255] In some embodiments, modified nucleosides include pyridin-4-one ribonucleoside, 5-aza-uridine, 2-thio-5-aza-uridine, 2-thiouridine, 4-thio-pseudouridine, 2-thio-pseudouridine, 5-hydroxyuridine, 3-methyluridine, 5-carboxymethyl-uridine, 1-carboxymethyl-pseudouridine, 5-propynyl-uridine, 1-propynyl-pseudouridine, 5-taurinomethyluridine, 1-taurinomethyl-pseudouridine, 5-taurinomethyl-2-thio-uridine, 1-taurinomethyl-4-thio-uridine, 5-methyl-uridine, 1-methyl-pseudouridine, 4-thio-1-methyl-pseudouridine, 2-thio-1-methyl-pseudouridine, 1-methyl-1-deaza-pseudouridine, 2-thio-1-methyl-1-deaza-pseudouridine, dihydrouridine, dihydropseudouridine, 2-thio-dihydrouridine, 2-thio-dihydropseudouridine, 2-methoxyuridine, 2-methoxy-4-thio-uridine, 4-methoxy-pseudouridine, and 4-methoxy-2-thio-pseudouridine.

[0256] In some embodiments, modified nucleosides include 5-aza-cytidine, pseudoisocytidine, 3-methyl-cytidine, N4-acetylcytidine, 5-formylcytidine, N4-methylcytidine, 5-hydroxymethylcytidine, 1-methyl-pseudoisocytidine, pyrrolo-cytidine, pyrrolo-pseudoisocytidine, 2-thio-cytidine, 2-thio-5-methyl-cytidine, 4-thio-pseudoisocytidine, 4-thio-1-methyl-pseudoisocytidine, 4-thio-1-methyl-1-deaza-pseudoisocytidine, 1-methyl-1-deaza-pseudoisocytidine, zebularine, 5-aza-zebularine, 5-methyl-zebularine, 5-aza-2-thio-zebularine, 2-thio-zebularine, 2-methoxy-cytidine, 2-methoxy-5-methyl-cytidine, 4-methoxy-pseudoisocytidine, and 4-methoxy-1-methyl-pseudoisocytidine.

[0257] In other embodiments, modified nucleosides include 2-aminopurine, 2, 6-diaminopurine, 7-deaza-adenine, 7-deaza-8-aza-adenine, 7-deaza-2-aminopurine, 7-deaza-8-aza-2-aminopurine, 7-deaza-2,6-diaminopurine, 7-deaza-8-aza-2,6-diaminopurine, 1-methyladenosine, N6-methyladenosine, N6-isopentenyladenosine, N6-(cis-hydroxyisopentenyl)adenosine, 2-methylthio-N6-(cis-hydroxyisopentenyl) adenosine, N6-glycinylcarbamoyladenosine, N6-threonylcarbamoyladenosine, 2-methylthio-N6-threonyl carbamoyladenosine, N6,N6-dimethyladenosine, 7-methyladenine, 2-methylthio-adenine, and 2-methoxy-adenine.

[0258] In other embodiments, modified nucleosides include inosine, 1-methyl-inosine, wyosine, wybutosine, 7-deaza-guanosine, 7-deaza-8-aza-guanosine, 6-thio-guanosine, 6-thio-7-deaza-guanosine, 6-thio-7-deaza-8-aza-guanosine, 7-methyl-guanosine, 6-thio-7-methyl-guanosine, 7-methylinosine, 6-methoxy-guanosine, 1-methylguanosine, N2-methylguanosine, N2,N2-dimethylguanosine, 8-oxo-guanosine, 7-methyl-8-oxo-guanosine, 1-methyl-6-thio-guanosine, N2-methyl-6-thio-guanosine, and N2,N2-dimethyl-6-thio-guanosine.

[0259] In some embodiments, the nucleotide can be modified on the major groove face and can include replacing hydrogen on C-5 of uracil with a methyl group or a halo group. In specific embodiments, a modified nucleoside is 5′-O-(1-thiophosphate)-adenosine, 5′-O-(1-thiophosphate)-cytidine, 5′-O-(1-thiophosphate)-guanosine, 5′-O-(1-thiophosphate)-uridine or 5′-O-(1-thiophosphate)-pseudouridine.

[0260] In further specific embodiments, a modified RNA may comprise nucleoside modifications selected from N1-methyl-pseudouridine (N1MPU), 6-aza-cytidine, 2-thio-cytidine, α-thio-cytidine, Pseudo-iso-cytidine, 5-aminoallyl-uridine, 5-iodo-uridine, 5,6-dihydrouridine, α-thio-uridine, 4-thio-uridine, 6-aza-uridine, 5-hydroxy-uridine, deoxy-thymidine, 5-methyl-uridine, Pyrrolo-cytidine, inosine, α-thio-guanosine, 6-methyl-guanosine, 5-methyl-cytidine, 8-oxo-guanosine, 7-deaza-guanosine, N1-methyl-adenosine, 2-amino-6-Chloro-purine, N6-methyl-2-amino-purine, Pseudo-iso-cytidine, 6-Chloro-purine, N6-methyl-adenosine, α-thio-adenosine, 8-azido-adenosine, 7-deaza-adenosine.

[0261] In other preferred embodiments, the open reading frame from any mRNA of the invention does not comprise any chemically modified nucleotides, more preferably does not comprise any chemically modified uracil or cytosine nucleotides.

### Sugar Modifications:

[0262] The modified nucleosides and nucleotides, which may be incorporated into a modified RNA as described herein, can be modified in the sugar moiety. For example, the 2′ hydroxyl group (OH) can be modified or replaced with a number of different “oxy” or “deoxy” substituents. Examples of “oxy”-2′ hydroxyl group modifications include, but are not limited to, alkoxy or aryloxy (—OR, e.g., R=H, alkyl, cycloalkyl, aryl, aralkyl, heteroaryl or sugar); polyethyleneglycols (PEG), —O(CH₂CH₂O)ₙCH₂CH₂OR; “locked” nucleic acids (LNA) in which the 2′ hydroxyl is connected, e.g., by a methylene bridge, to the 4′ carbon of the same ribose sugar; and amino groups (—O-amino, wherein the amino group, e.g., NRR, can be alkylamino, dialkylamino, heterocyclyl, arylamino, diarylamino, heteroarylamino, or diheteroaryl amino, ethylene diamine, polyamino) or aminoalkoxy.

[0263] “Deoxy” modifications include hydrogen, amino (e.g. NH₂; alkylamino, dialkylamino, heterocyclyl, arylamino, diaryl amino, heteroaryl amino, diheteroaryl amino, or amino acid); or the amino group can be attached to the sugar through a linker, wherein the linker comprises one or more of the atoms C, N, and O.

[0264] The sugar group can also contain one or more carbons that possess the opposite stereochemical configuration than that of the corresponding carbon in ribose. Thus, a modified RNA can include nucleotides containing, for instance, arabinose as the sugar.

### Backbone Modifications:

[0265] The phosphate backbone may further be modified in the modified nucleosides and nucleotides, which may be incorporated into a modified RNA as described herein. The phosphate groups of the backbone can be modified by replacing one or more of the oxygen atoms with a different substituent. Further, the modified nucleosides and nucleotides can include the full replacement of an unmodified phosphate moiety with a modified phosphate as described herein. Examples of modified phosphate groups include, but are not limited to, phosphorothioate, phosphoroselenates, borano phosphates, borano phosphate esters, hydrogen phosphonates, phosphoroamidates, alkyl or aryl phosphonates and phosphotriesters. Phosphorodithioates have both non-linking oxygens replaced by sulfur. The phosphate linker can also be modified by the replacement of a linking oxygen with nitrogen (bridged phosphoroamidates), sulfur (bridged phosphorothioates) and carbon (bridged methylene-phosphonates).

### Lipid Modification

[0266] According to a further embodiment, a modified RNA as defined herein can contain a lipid modification. Such a lipid-modified RNA typically comprises an RNA as defined herein. Such a lipid-modified RNA as defined herein typically further comprises at least one linker covalently linked with that RNA, and at least one lipid covalently linked with the respective linker. Alternatively, the lipid-modified RNA comprises at least one RNA as defined herein and at least one (bifunctional) lipid covalently linked (without a linker) with that RNA. According to a third alternative, the lipid-modified RNA comprises an RNA molecule as defined herein, at least one linker covalently linked with that RNA, and at least one lipid covalently linked with the respective linker, and also at least one (bifunctional) lipid covalently linked (without a linker) with that RNA. In this context, it is particularly preferred that the lipid modification is present at the terminal ends of a linear RNA sequence.

### G/C Content Modification

[0267] According to another embodiment, the mRNA of the present invention, may be modified, and thus stabilized, by modifying the guanosine/cytosine (G/C) content of the mRNA, preferably of the at least one coding sequence of the mRNA of the present invention.

[0268] In a particularly preferred embodiment of the present invention, the G/C content of the coding sequence (coding region or CDS) of the mRNA of the present invention is modified, particularly increased, compared to the G/C content of the coding region of the respective wild type RNA, i.e. the unmodified RNA. The amino acid sequence encoded by the mRNA is preferably not modified as compared to the amino acid sequence encoded by the respective wild type RNA. This modification of the mRNA of the present invention is based on the fact that the sequence of any RNA region to be translated is important for efficient translation of that RNA. Thus, the pharmaceutical composition of the mRNA and the sequence of various nucleotides are important. In particular, sequences having an increased G (guanosine)/C (cytosine) content are more stable than sequences having an increased A (adenosine)/U (uracil) content. According to the invention, the codons of the mRNA are therefore varied compared to the respective wild type RNA, while retaining the translated amino acid sequence, such that they include an increased amount of G/C nucleotides. In respect to the fact that several codons code for one and the same amino acid (so-called degeneration of the genetic code), the most favourable codons for the stability can be determined (so-called alternative codon usage). Depending on the amino acid to be encoded by the mRNA, there are various possibilities for modification of the mRNA sequence, compared to its wild type sequence. In the case of amino acids, which are encoded by codons, which contain exclusively G or C nucleotides, no modification of the codon is necessary. Thus, the codons for Pro (CCC or CCG), Arg (CGC or CGG), Ala (GCC or GCG) and Gly (GGC or GGG) require no modification, since no A or U is present. In contrast, codons which contain A and/or U nucleotides can be modified by substitution of other codons, which code for the same amino acids but contain no A and/or U. Examples of these are: the codons for Pro can be modified from CCU or CCA to CCC or CCG; the codons for Arg can be modified from CGU or CGA or AGA or AGG to CGC or CGG; the codons for Ala can be modified from GCU or GCA to GCC or GCG; the codons for Gly can be modified from GGU or GGA to GGC or GGG. In other cases, although A or U nucleotides cannot be eliminated from the codons, it is however possible to decrease the A and U content by using codons which contain a lower content of A and/or U nucleotides. Examples of these are: the codons for Phe can be modified from UUU to UUC; the codons for Leu can be modified from UUA, UUG, CUU or CUA to CUC or CUG; the codons for Ser can be modified from UCU or UCA or AGU to UCC, UCG or AGC; the codon for Tyr can be modified from UAU to UAC; the codon for Cys can be modified from UGU to UGC; the codon for His can be modified from CAU to CAC; the codon for GIn can be modified from CAA to CAG; the codons for Ile can be modified from AUU or AUA to AUC; the codons for Thr can be modified from ACU or ACA to ACC or ACG; the codon for Asn can be modified from AAU to AAC; the codon for Lys can be modified from AAA to AAG; the codons for Val can be modified from GUU or GUA to GUC or GUG; the codon for Asp can be modified from GAU to GAC; the codon for Glu can be modified from GAA to GAG; the stop codon UAA can be modified to UAG or UGA. In the case of the codons for Met (AUG) and Trp (UGG), on the other hand, there is no possibility of sequence modification. The substitutions listed above can be used either individually or in all possible combinations to increase the G/C content of the at least one mRNA of the pharmaceutical composition of the present invention compared to its particular wild type mRNA (i.e. the original sequence). Thus, for example, all codons for Thr occurring in the wild type sequence can be modified to ACC (or ACG). Preferably, however, for example, combinations of the above substitution possibilities are used:
[0269] substitution of all codons coding for Thr in the original sequence (wild type mRNA) to ACC (or ACG) and/or
[0270] substitution of all codons originally coding for Ser to UCC (or UCG or AGC); and/or
[0271] substitution of all codons coding for Ile in the original sequence to AUC; and/or
[0272] substitution of all codons originally coding for Lys to AAG and/or
[0273] substitution of all codons originally coding for Tyr to UAC; and/or
[0274] substitution of all codons coding for Val in the original sequence to GUC (or GUG) and/or
[0275] substitution of all codons originally coding for Glu to GAG and/or
[0276] substitution of all codons originally coding for Ala to GCC (or GCG) and/or
[0277] substitution of all codons originally coding for Arg to CGC (or CGG); and/or
[0278] substitution of all codons coding for Val in the original sequence to GUC (or GUG) and/or
[0279] substitution of all codons originally coding for Glu to GAG and/or
[0280] substitution of all codons originally coding for Ala to GCC (or GCG); and/or
[0281] substitution of all codons originally coding for Gly to GGC (or GGG); and/or
[0282] substitution of all codons originally coding for Asn to AAC; and/or
[0283] substitution of all codons coding for Val in the original sequence to GUC (or GUG) and/or
[0284] substitution of all codons originally coding for Phe to UUC and/or
[0285] substitution of all codons originally coding for Cys to UGC and/or
[0286] substitution of all codons originally coding for Leu to CUG (or CUC) and/or
[0287] substitution of all codons originally coding for Gin to CAG and/or
[0288] substitution of all codons originally coding for Pro to CCC (or CCG); etc.

[0289] Preferably, the G/C content of the coding region of the mRNA of the present invention is increased by at least 7%, more preferably by at least 15%, particularly preferably by at least 20%, compared to the G/C content of the coding region of the wild type RNA, which codes for a peptide or protein as defined herein or a fragment or variant thereof. According to a specific embodiment at least 5%, 10%, 20%, 30%, 40%, 50%, 60%, more preferably at least 70%, even more preferably at least 80% and most preferably at least 90%, 95% or even 100% of the substitutable codons in the region coding for a peptide or protein as defined herein or a fragment or variant thereof or the whole sequence of the wild type RNA sequence are substituted, thereby increasing the GC/content of said sequence. In this context, it is particularly preferable to increase the G/C content of the mRNA of the present invention, preferably of the at least one coding region of the mRNA according to the invention, to the maximum (i.e. 100% of the substitutable codons) as compared to the wild type sequence. According to the invention, a further preferred modification of the mRNA of the present invention is based on the finding that the translation efficiency is also determined by a different frequency in the occurrence of tRNAs in cells. Thus, if so-called “rare codons” are present in the mRNA of the present invention to an increased extent, the corresponding modified RNA sequence is translated to a significantly poorer degree than in the case where codons coding for relatively “frequent” tRNAs are present. According to the invention, in the modified RNA of the present invention, the region which codes for a peptide or protein as defined herein or a fragment or variant thereof is modified compared to the corresponding region of the wild type RNA such that at least one codon of the wild type sequence, which codes for a tRNA which is relatively rare in the cell, is exchanged for a codon, which codes for a tRNA which is relatively frequent in the cell and carries the same amino acid as the relatively rare tRNA. By this modification, the sequences of the mRNA of the present invention is modified such that codons for which frequently occurring tRNAs are available are inserted. In other words, according to the invention, by this modification all codons of the wild type sequence, which code for a tRNA which is relatively rare in the cell, can in each case be exchanged for a codon, which codes for a tRNA which is relatively frequent in the cell and which, in each case, carries the same amino acid as the relatively rare tRNA. Which tRNAs occur relatively frequently in the cell and which, in contrast, occur relatively rarely is known to a person skilled in the art; cf. e.g. Akashi, Curr. Opin. Genet. Dev. 2001, 11(6): 660-666. The codons, which use for the particular amino acid the tRNA which occurs the most frequently, e.g. the Gly codon, which uses the tRNA, which occurs the most frequently in the (human) cell, are particularly preferred. According to the invention, it is particularly preferable to link the sequential G/C content which is increased, in particular maximized, in the modified RNA of the present invention, with the “frequent” codons without modifying the amino acid sequence of the peptide or protein encoded by the coding region of the mRNA. This preferred embodiment allows provision of a particularly efficiently translated and stabilized (modified) RNA of the present invention. The determination of a modified RNA of the present invention as described above (increased G/C content; exchange of tRNAs) can be carried out using the computer program explained in WO2002098443—the disclosure content of which is included in its full scope in the present invention. Using this computer program, the nucleotide sequence of any desired RNA can be modified with the aid of the genetic code or the degenerative nature thereof such that a maximum G/C content results, in combination with the use of codons which code for tRNAs occurring as frequently as possible in the cell, the amino acid sequence coded by the modified RNA preferably not being modified compared to the non-modified sequence. Alternatively, it is also possible to modify only the G/C content or only the codon usage compared to the original sequence. The source code in Visual Basic 6.0 (development environment used: Microsoft Visual Studio Enterprise 6.0 with Servicepack 3) is also described in WO2002098443. In a further preferred embodiment of the present invention, the A/U content in the environment of the ribosome binding site of the mRNA of the present invention is increased compared to the A/U content in the environment of the ribosome binding site of its respective wild type mRNA. This modification (an increased A/U content around the ribosome binding site) increases the efficiency of ribosome binding to the mRNA. An effective binding of the ribosomes to the ribosome binding site (Kozak sequence=ACC; the AUG forms the start codon) in turn has the effect of an efficient translation of the mRNA. Accordingly, in one embodiment, the coding RNA comprises a ribosome binding site, also referred to as “Kozak sequence” identical to or at least 80%, 85%, 90%, 95% identical to SEQ ID NO:59, SEQ ID NO:60 or the sequence “ACC”. According to a further embodiment of the present invention, the mRNA of the present invention may be modified with respect to potentially destabilizing sequence elements. Particularly, the coding region and/or the 5′- and/or 3′-untranslated region of this RNA may be modified compared to the respective wild type RNA such that it contains no destabilizing sequence elements, the encoded amino acid sequence of the modified RNA preferably not being modified compared to its respective wild type RNA. It is known that, for example in sequences of eukaryotic RNAs, destabilizing sequence elements (DSE) occur, to which signal proteins bind and regulate enzymatic degradation of RNA in vivo. For further stabilization of the modified RNA, optionally in the region which encodes a peptide or protein as defined herein or a fragment or variant thereof, one or more such modifications compared to the corresponding region of the wild type RNA can therefore be carried out, so that no or substantially no destabilizing sequence elements are contained there. According to the invention, DSE present in the untranslated regions (3′- and/or 5′-UTR) can also be eliminated from the mRNA of the present invention by such modifications. Such destabilizing sequences are e.g. AU-rich sequences (AURES), which occur in 3′-UTR sections of numerous unstable RNAs (Caput et al., Proc. Natl. Acad. Sci. USA 1986, 83: 1670 to 1674). The mRNA of the present invention is therefore preferably modified compared to the respective wild type RNA such that the mRNA of the present invention contains no such destabilizing sequences. This also applies to those sequence motifs which are recognized by possible endonucleases, e.g. the sequence GAACAAG, which is contained in the 3′-UTR segment of the gene encoding the transferrin receptor (Binder et al., EMBO J. 1994, 13: 1969-1980). These sequence motifs are also preferably removed in the mRNA of the present invention.

[0290] In preferred embodiments, the nucleic acid may be modified, wherein the G/C content of the at least one coding sequence may be optimized compared to the G/C content of the corresponding wild type or reference coding sequence (herein referred to as “G/C content optimized coding sequence”). “Optimized” in that context refers to a coding sequence wherein the G/C content is preferably increased to the essentially highest possible G/C content. The amino acid sequence encoded by the G/C content optimized coding sequence of the nucleic acid is preferably not modified as compared to the amino acid sequence encoded by the respective wild type or reference coding sequence. The generation of a G/C content optimized nucleic acid sequence (RNA or DNA) may be carried out using a method according to WO2002098443. In this context, the disclosure of WO2002/098443 is included in its full scope in the present invention. Throughout the description, including the <223> identifier of the sequence listing, G/C optimized coding sequences are indicated by the abbreviations “opt1” or “gc” [here, and throughout the whole specification, it has to be noted that the priority application was filed with a sequence listing in accordance with the WIPO Standard ST.25, which then was converted into a sequence listing according to WIPO Standard ST.26—information which was comprised within line <223> in ST.25 now was added to the respective SEQ ID NO: as a note under “feature key”, i.e. “misc_feature” (for nucleic acids) or “REGION” (for proteins)].

### Sequences Adapted to Human Codon Usage

[0291] According to the invention, a further preferred modification of the mRNA of the present invention is based on the finding that codons encoding the same amino acid typically occur at different frequencies. According to the invention, in the modified RNA of the present invention, the coding sequence (coding region) as defined herein is preferably modified compared to the corresponding region of the respective wild type RNA such that the frequency of the codons encoding the same amino acid corresponds to the naturally occurring frequency of that codon according to the human codon usage as e.g. shown in Table D.

[0292] For example, in the case of the amino acid alanine (Ala) present in an amino acid sequence encoded by the at least one coding sequence of the mRNA according to the invention, the wild type coding sequence is preferably adapted in a way that the codon “GCC” is used with a frequency of 0.40, the codon “GCT” is used with a frequency of 0.28, the codon “GCA” is used with a frequency of 0.22 and the codon “GCG” is used with a frequency of 0.10 etc. (see Table D).

TABLE D
Human codon usage table

| Amino acid | codon | fraction | /1000 |
|---|---|---|---|
| Ala | GCG | 0.10 | 7.4 |
| Ala | GCA | 0.22 | 15.8 |
| Ala | GCT | 0.28 | 18.5 |
| Ala | GCC* | 0.40 | 27.7 |
| Cys | TGT | 0.42 | 10.6 |
| Cys | TGC* | 0.58 | 12.6 |
| Asp | GAT | 0.44 | 21.8 |
| Asp | GAC* | 0.56 | 25.1 |
| Glu | GAG* | 0.59 | 39.6 |
| Glu | GAA | 0.41 | 29.0 |
| Phe | TTT | 0.43 | 17.6 |
| Phe | TTC* | 0.57 | 20.3 |
| Gly | GGG | 0.23 | 16.5 |
| Gly | GGA | 0.26 | 16.5 |
| Gly | GGT | 0.18 | 10.8 |
| Gly | GGC* | 0.33 | 22.2 |
| His | CAT | 0.41 | 10.9 |
| His | CAC* | 0.59 | 15.1 |
| Ile | ATA | 0.14 | 7.5 |
| Ile | ATT | 0.35 | 16.0 |
| Ile | ATC* | 0.52 | 20.8 |
| Lys | AAG* | 0.60 | 31.9 |
| Lys | AAA | 0.40 | 24.4 |
| Leu | TTG | 0.12 | 12.9 |
| Leu | TTA | 0.06 | 7.7 |
| Leu | CTG* | 0.43 | 39.6 |
| Leu | CTA | 0.07 | 7.2 |
| Leu | CTT | 0.12 | 13.2 |
| Leu | CTC | 0.20 | 19.6 |
| Met | ATG* | 1 | 22.0 |
| Asn | AAT | 0.44 | 17.0 |
| Asn | AAC* | 0.56 | 19.1 |
| Pro | CCG | 0.11 | 6.9 |
| Pro | CCA | 0.27 | 16.9 |
| Pro | CCT | 0.29 | 17.5 |
| Pro | CCC* | 0.33 | 19.8 |
| Gln | CAG* | 0.73 | 34.2 |
| Gln | CAA | 0.27 | 12.3 |
| Arg | AGG | 0.22 | 12.0 |
| Arg | AGA* | 0.21 | 12.1 |
| Arg | CGG | 0.19 | 11.4 |
| Arg | CGA | 0.10 | 6.2 |
| Arg | CGT | 0.09 | 4.5 |
| Arg | CGC | 0.19 | 10.4 |
| Ser | AGT | 0.14 | 12.1 |
| Ser | AGC* | 0.25 | 19.5 |
| Ser | TCG | 0.06 | 4.4 |
| Ser | TCA | 0.15 | 12.2 |
| Ser | TCT | 0.18 | 15.2 |
| Ser | TCC | 0.23 | 17.7 |
| Thr | ACG | 0.12 | 6.1 |
| Thr | ACA | 0.27 | 15.1 |
| Thr | ACT | 0.23 | 13.1 |
| Thr | ACC* | 0.38 | 18.9 |
| Val | GTG* | 0.48 | 28.1 |
| Val | GTA | 0.10 | 7.1 |
| Val | GTT | 0.17 | 11.0 |
| Val | GTC | 0.25 | 14.5 |
| Trp | TGG* | 1 | 13.2 |
| Tyr | TAT | 0.42 | 12.2 |
| Tyr | TAC* | 0.58 | 15.3 |
| Stop | TGA* | 0.61 | 1.6 |
| Stop | TAG | 0.17 | 0.8 |
| Stop | TAA | 0.22 | 1.0 |

*: most frequent codon

[0293] In preferred embodiments, the nucleic acid may be modified, wherein the codons in the at least one coding sequence may be adapted to human codon usage (herein referred to as “human codon usage adapted coding sequence”). Codons encoding the same amino acid occur at different frequencies in humans. Accordingly, the coding sequence of the nucleic acid is preferably modified such that the frequency of the codons encoding the same amino acid corresponds to the naturally occurring frequency of that codon according to the human codon usage. For example, in the case of the amino acid Ala, the wild type or reference coding sequence is preferably adapted in a way that the codon “GCC” is used with a frequency of 0.40, the codon “GCT” is used with a frequency of 0.28, the codon “GCA” is used with a frequency of 0.22 and the codon “GCG” is used with a frequency of 0.10 etc. (see Table D). Accordingly, such a procedure (as exemplified for Ala) is applied for each amino acid encoded by the coding sequence of the nucleic acid to obtain sequences adapted to human codon usage. Throughout the description, including the <223> identifier of the sequence listing, human codon usage adapted coding sequences are indicated by the abbreviation “opt3” or “human” [here, and throughout the whole specification, it has to be noted that the priority application was filed with a sequence listing in accordance with the WIPO Standard ST.25, which then was converted into a sequence listing according to WIPO Standard ST.26—information which was comprised within line <223> in ST.25 now was added to the respective SEQ ID NO: as a note under “feature key”, i.e. “misc_feature” (for nucleic acids) or “REGION” (for proteins)].

### Codon-Optimized Sequences

[0294] As described above it is preferred according to the invention, that all codons of the wild type sequence which code for a tRNA, which is relatively rare in the cell, are exchanged for a codon which codes for a tRNA, which is relatively frequent in the cell and which, in each case, carries the same amino acid as the relatively rare tRNA. Therefore it is particularly preferred that the most frequent codons are used for each encoded amino acid (see Table D, most frequent codons are marked with asterisks). Such an optimization procedure increases the codon adaptation index (CAI) and ultimately maximises the CAI. In the context of the invention, sequences with increased or maximized CAI are typically referred to as “codon-optimized” sequences and/or CAI increased and/or maximized sequences. According to a preferred embodiment, the mRNA of the present invention comprises at least one coding sequence, wherein the coding sequence is codon-optimized as described herein. More preferably, the codon adaptation index (CAI) of the at least one coding sequence is at least 0.5, at least 0.8, at least 0.9 or at least 0.95. Most preferably, the codon adaptation index (CAI) of the at least one coding sequence is 1.

[0295] For example, in the case of the amino acid alanine (Ala) present in the amino acid sequence encoded by the at least one coding sequence of the mRNA according to the invention, the wild type coding sequence is adapted in a way that the most frequent human codon “GCC” is always used for said amino acid, or for the amino acid Cysteine (Cys), the wild type sequence is adapted in a way that the most frequent human codon “TGC” is always used for said amino acid etc.

### C-Optimized Sequences

[0296] According to another embodiment, the mRNA of the present invention may be modified by modifying, preferably increasing, the cytosine (C) content of the mRNA, preferably of the coding region of the mRNA.

[0297] In a particularly preferred embodiment of the present invention, the C content of the coding region of the mRNA of the present invention is modified, preferably increased, compared to the C content of the coding region of the respective wild type RNA, i.e. the unmodified RNA. The amino acid sequence encoded by the at least one coding sequence of the mRNA of the present invention is preferably not modified as compared to the amino acid sequence encoded by the respective wild type mRNA.

[0298] In a preferred embodiment of the present invention, the modified RNA is modified such that at least 10%, 20%, 30%, 40%, 50%, 60%, 70% or 80%, or at least 90% of the theoretically possible maximum cytosine-content or even a maximum cytosine-content is achieved.

[0299] In further preferred embodiments, at least 10%, 20%, 30%, 40%, 50%, 60%, 70%, 80%, 90% or even 100% of the codons of the target RNA wild type sequence, which are “cytosine content optimizable” are replaced by codons having a higher cytosine-content than the ones present in the wild type sequence.

[0300] In a further preferred embodiment, some of the codons of the wild type coding sequence may additionally be modified such that a codon for a relatively rare tRNA in the cell is exchanged by a codon for a relatively frequent tRNA in the cell, provided that the substituted codon for a relatively frequent tRNA carries the same amino acid as the relatively rare tRNA of the original wild type codon. Preferably, all of the codons for a relatively rare tRNA are replaced by a codon for a relatively frequent tRNA in the cell, except codons encoding amino acids, which are exclusively encoded by codons not containing any cytosine, or except for glutamine (Gln), which is encoded by two codons each containing the same number of cytosines.

[0301] In a further preferred embodiment of the present invention, the modified target RNA is modified such that at least 80%, or at least 90% of the theoretically possible maximum cytosine-content or even a maximum cytosine-content is achieved by means of codons, which code for relatively frequent tRNAs in the cell, wherein the amino acid sequence remains unchanged.

[0302] Due to the naturally occurring degeneracy of the genetic code, more than one codon may encode a particular amino acid. Accordingly, 18 out of 20 naturally occurring amino acids are encoded by more than one codon (with Tryp and Met being an exception), e.g. by 2 codons (e.g. Cys, Asp, Glu), by three codons (e.g. Ile), by 4 codons (e.g. Al, Gly, Pro) or by 6 codons (e.g. Leu, Arg, Ser). However, not all codons encoding the same amino acid are utilized with the same frequency under in vivo conditions. Depending on each single organism, a typical codon usage profile is established.

[0303] The term “cytosine content-optimizable codon” as used within the context of the present invention refers to codons, which exhibit a lower content of cytosines than other codons encoding the same amino acid. Accordingly, any wild type codon, which may be replaced by another codon encoding the same amino acid and exhibiting a higher number of cytosines within that codon, is considered to be cytosine-optimizable (C-optimizable). Any such substitution of a C-optimizable wild type codon by the specific C-optimized codon within a wild type coding region increases its overall C-content and reflects a C-enriched modified mRNA sequence. According to a preferred embodiment, the mRNA of the present invention, preferably the at least one coding sequence of the mRNA of the present invention, comprises or consists of a C-maximized RNA sequence containing C-optimized codons for all potentially C-optimizable codons. Accordingly, 100% or all of the theoretically replaceable C-optimizable codons are preferably replaced by C-optimized codons over the entire length of the coding region.

[0304] In this context, cytosine-content optimizable codons are codons, which contain a lower number of cytosines than other codons coding for the same amino acid.

[0305] Any of the codons GCG, GCA, GCU codes for the amino acid Ala, which may be exchanged by the codon GCC encoding the same amino acid, and/or
[0306] the codon UGU that codes for Cys may be exchanged by the codon UGC encoding the same amino acid, and/or
[0307] the codon GAU which codes for Asp may be exchanged by the codon GAC encoding the same amino acid, and/or
[0308] the codon that UUU that codes for Phe may be exchanged for the codon UUC encoding the same amino acid, and/or
[0309] any of the codons GGG, GGA, GGU that code Gly may be exchanged by the codon GGC encoding the same amino acid, and/or
[0310] the codon CAU that codes for His may be exchanged by the codon CAC encoding the same amino acid, and/or
[0311] any of the codons AUA, AUU that code for Ile may be exchanged by the codon AUC, and/or
[0312] any of the codons UUG, UUA, CUG, CUA, CUU coding for Leu may be exchanged by the codon CUC encoding the same amino acid, and/or
[0313] the codon AAU that codes for Asn may be exchanged by the codon AAC encoding the same amino acid, and/or
[0314] any of the codons CCG, CCA, CCU coding for Pro may be exchanged by the codon CCC encoding the same amino acid, and/or
[0315] any of the codons AGG, AGA, CGG, CGA, CGU coding for Arg may be exchanged by the codon CGC encoding the same amino acid, and/or
[0316] any of the codons AGU, AGC, UCG, UCA, UCU coding for Ser may be exchanged by the codon UCC encoding the same amino acid, and/or
[0317] any of the codons ACG, ACA, ACU coding for Thr may be exchanged by the codon ACC encoding the same amino acid, and/or
[0318] any of the codons GUG, GUA, GUU coding for Val may be exchanged by the codon GUC encoding the same amino acid, and/or
[0319] the codon UAU coding for Tyr may be exchanged by the codon UAC encoding the same amino acid.

[0320] In any of the above instances, the number of cytosines is increased by 1 per exchanged codon. Exchange of all non C-optimized codons (corresponding to C-optimizable codons) of the coding region results in a C-maximized coding sequence. In the context of the invention, at least 70%, preferably at least 80%, more preferably at least 90%, of the non C-optimized codons within the at least one coding region of the mRNA according to the invention are replaced by C-optimized codons.

[0321] It may be preferred that for some amino acids the percentage of C-optimizable codons replaced by C-optimized codons is less than 70%, while for other amino acids the percentage of replaced codons is higher than 70% to meet the overall percentage of C-optimization of at least 70% of all C-optimizable wild type codons of the coding region.

[0322] Preferably, in a C-optimized RNA of the invention, at least 50% of the C-optimizable wild type codons for any given amino acid are replaced by C-optimized codons, e.g. any modified C-enriched RNA preferably contains at least 50% C-optimized codons at C-optimizable wild type codon positions encoding any one of the above mentioned amino acids Ala, Cys, Asp, Phe, Gly, His, Ile, Leu, Asn, Pro, Arg, Ser, Thr, Val and Tyr, preferably at least 60%.

[0323] In this context codons encoding amino acids, which are not cytosine content-optimizable and which are, however, encoded by at least two codons, may be used without any further selection process. However, the codon of the wild type sequence that codes for a relatively rare tRNA in the cell, e.g. a human cell, may be exchanged for a codon that codes for a relatively frequent tRNA in the cell, wherein both code for the same amino acid. Accordingly, the relatively rare codon GAA coding for Glu may be exchanged by the relative frequent codon GAG coding for the same amino acid, and/or
[0324] the relatively rare codon AAA coding for Lys may be exchanged by the relative frequent codon AAG coding for the same amino acid, and/or
[0325] the relatively rare codon CAA coding for Gln may be exchanged for the relative frequent codon CAG encoding the same amino acid.

[0326] In this context, the amino acids Met (AUG) and Trp (UGG), which are encoded by only one codon each, remain unchanged. Stop codons are not cytosine-content optimized, however, the relatively rare stop codons amber, ochre (UAA, UAG) may be exchanged by the relatively frequent stop codon opal (UGA).

[0327] The single substitutions listed above may be used individually as well as in all possible combinations in order to optimize the cytosine-content of the modified RNA compared to the wild type mRNA sequence.

[0328] Accordingly, the at least one coding sequence as defined herein may be changed compared to the coding region of the respective wild type RNA in such a way that an amino acid encoded by at least two or more codons, of which one comprises one additional cytosine, such a codon may be exchanged by the C-optimized codon comprising one additional cytosine, wherein the amino acid is preferably unaltered compared to the wild type sequence.

[0329] According to a particularly preferred embodiment, the invention provides an mRNA, comprising at least one coding sequence as defined herein, wherein the G/C content of the at least one coding sequence of the mRNA is increased compared to the G/C content of the corresponding coding sequence of the corresponding wild type RNA, and/or wherein the C content of the at least one coding sequence of the mRNA is increased compared to the C content of the corresponding coding sequence of the corresponding wild type RNA, and/or
[0330] wherein the codons in the at least one coding sequence of the mRNA are adapted to human codon usage, wherein the codon adaptation index (CAI) is preferably increased or maximised in the at least one coding sequence of the mRNA,
[0331] and wherein the amino acid sequence encoded by the mRNA is preferably not being modified compared to the amino acid sequence encoded by the corresponding wild type RNA.

### 5′-Cap

[0332] According to another preferred embodiment of the invention, a modified RNA as defined herein, can be modified by the addition of a so-called “5′-cap” structure, which preferably stabilizes the mRNA as described herein. A 5′-cap is an entity, typically a modified nucleotide entity, which generally “caps” the 5′-end of a mature mRNA. A 5′-cap may typically be formed by a modified nucleotide, particularly by a derivative of a guanine nucleotide. Preferably, the 5′-cap is linked to the 5′-terminus via a 5′-5′-triphosphate linkage. A 5′-cap may be methylated, e.g. m7GpppN, wherein N is the terminal 5′ nucleotide of the nucleic acid carrying the 5′-cap, typically the 5′-end of an mRNA. m7GpppN is the 5′-cap structure, which naturally occurs in mRNA transcribed by polymerase II and is therefore preferably not considered as modification comprised in a modified mRNA in this context. Accordingly, a modified RNA of the present invention may comprise a m7GpppN as 5′-cap, but additionally the modified RNA typically comprises at least one further modification as defined herein.

[0333] Further examples of 5′-cap structures include glyceryl, inverted deoxy abasic residue (moiety), 4′,5′ methylene nucleotide, 1-(beta-D-erythrofuranosyl) nucleotide, 4′-thio nucleotide, carbocyclic nucleotide, 1,5-anhydrohexitol nucleotide, L-nucleotides, alpha-nucleotide, modified base nucleotide, threo-pentofuranosyl nucleotide, acyclic 3′,4′-seco nucleotide, acyclic 3,4-dihydroxybutyl nucleotide, acyclic 3,5 dihydroxypentyl nucleotide, 3′-3′-inverted nucleotide moiety, 3′-3′-inverted abasic moiety, 3′-2′-inverted nucleotide moiety, 3′-2′-inverted abasic moiety, 1,4-butanediol phosphate, 3′-phosphoramidate, hexylphosphate, aminohexyl phosphate, 3′-phosphate, 3′phosphorothioate, phosphorodithioate, or bridging or non-bridging methylphosphonate moiety. These modified 5′-cap structures are regarded as at least one modification in this context.

[0334] Particularly preferred modified 5′-cap structures are cap1 (methylation of the ribose of the adjacent nucleotide of m7G), cap2 (additional methylation of the ribose of the 2nd nucleotide downstream of the m7G), cap3 (additional methylation of the ribose of the 3rd nucleotide downstream of the m7G), cap4 (methylation of the ribose of the 4th nucleotide downstream of the m7G), ARCA (anti-reverse cap analogue, modified ARCA (e.g. phosphothioate modified ARCA), inosine, N1-methyl-guanosine, 2′-fluoro-guanosine, 7-deaza-guanosine, 8-oxo-guanosine, 2-amino-guanosine, LNA-guanosine, and 2-azido-guanosine. Accordingly, the mRNA according to the invention preferably comprises a 5′-cap structure.

[0335] In a preferred embodiment, the mRNA according to the invention comprises at least one 5′- or 3′-UTR element. In this context, an UTR element comprises or consists of a nucleic acid sequence, which is derived from the 5′- or 3′-UTR of any naturally occurring gene or which is derived from a fragment, a homolog or a variant of the 5′- or 3′-UTR of a gene. Preferably, the 5′- or 3′-UTR element used according to the present invention is heterologous to the at least one coding sequence of the mRNA of the invention. Even if 5′- or 3′-UTR elements derived from naturally occurring genes are preferred, also synthetically engineered UTR elements may be used in the context of the present invention.

[0336] The term “3′-UTR element” typically refers to a nucleic acid sequence, which comprises or consists of a nucleic acid sequence that is derived from a 3′-UTR or from a variant of a 3′-UTR. A 3′-UTR element in the sense of the present invention may represent the 3′-UTR of an RNA, preferably an mRNA. Thus, in the sense of the present invention, preferably, a 3′-UTR element may be the 3′-UTR of an RNA, preferably of an mRNA, or it may be the transcription template for a 3′-UTR of an RNA. Thus, a 3′-UTR element preferably is a nucleic acid sequence which corresponds to the 3′-UTR of an RNA, preferably to the 3′-UTR of an mRNA, such as an mRNA obtained by transcription of a genetically engineered vector construct. Preferably, the 3′-UTR element fulfils the function of a 3′-UTR or encodes a sequence which fulfils the function of a 3′-UTR.

[0337] According to a preferred embodiment, CleanCap© Reagent AG from TriLink is used as co-transcriptional capping reagent for in vitro transcription of 5′-capped mRNA resulting in a cap1 structure. CleanCap AG requires an AG initiator and use yields in a naturally occurring cap1 structure.

[0338] In preferred embodiments, the artificial nucleic acid, preferably the RNA, comprises a 5′-cap structure.

[0339] Such a 5′-cap structure suitably stabilizes the nucleic acid and/or enhances expression of the encoded transcription factor inhibitor and/or reduces the stimulation of the innate immune system after administration.

[0340] Accordingly, in preferred embodiments, the artificial nucleic acid, preferably the RNA, comprises a 5′-cap structure, preferably m7G, cap0, cap1, cap2, a modified cap0 or a modified cap1 structure.

[0341] The term “5′-cap structure” as used herein will be recognized and understood by the person of ordinary skill in the art, and is e.g. intended to refer to a 5′ modified nucleotide, particularly a guanine nucleotide, positioned at the 5′-end of an RNA, e.g. an mRNA. Preferably, the 5′-cap structure is connected via a 5′-5′-triphosphate linkage to the RNA.

[0342] 5′-cap structures which may be suitable in the context of the present invention are cap0 (methylation of the first nucleobase, e.g. m7GpppN), cap1 (additional methylation of the ribose of the adjacent nucleotide of m7GpppN), cap2 (additional methylation of the ribose of the 2nd nucleotide downstream of the m7GpppN), cap3 (additional methylation of the ribose of the 3rd nucleotide downstream of the m7GpppN), cap4 (additional methylation of the ribose of the 4th nucleotide downstream of the m7GpppN), ARCA (anti-reverse cap analogue), modified ARCA (e.g. phosphothioate modified ARCA), inosine, N1-methyl-guanosine, 2′-fluoro-guanosine, 7-deaza-guanosine, 8-oxo-guanosine, 2-amino-guanosine, LNA-guanosine, and 2-azido-guanosine.

[0343] Suitably, a 5′-cap (cap0 or cap1) structure may be formed in chemical RNA synthesis or in RNA in vitro transcription (co-transcriptional capping) using cap analogues.

[0344] The term “cap analogue” as used herein will be recognized and understood by the person of ordinary skill in the art, and is e.g. intended to refer to a non-polymerizable di-nucleotide or tri-nucleotide that has cap functionality in that it facilitates translation or localization, and/or prevents degradation of an RNA molecule when incorporated at the 5′-end of the nucleic acid molecule. Non-polymerizable means that the cap analogue will be incorporated only at the 5′-terminus because it does not have a 5′ triphosphate and therefore cannot be extended in the 3′-direction by a template-dependent polymerase, particularly, by template-dependent RNA polymerase. Examples of cap analogues include, but are not limited to, a chemical structure selected from the group consisting of m7GpppG, m7GpppA, m7GpppC; unmethylated cap analogues (e.g. GpppG); dimethylated cap analogue (e.g. m2,7GpppG), trimethylated cap analogue (e.g. m2,2,7GpppG), dimethylated symmetrical cap analogues (e.g. m7Gpppm7G), or anti reverse cap analogues (e.g. ARCA; m7,2′OmeGpppG; m7,2′dGpppG; m7,3′OmeGpppG; m7,3′dGpppG and their tetraphosphate derivatives). Further suitable cap analogues are described in WO2008016473, WO2008157688, WO2009149253, WO2011015347, WO2013059475, WO2017066793, WO2017066781, WO2017066791, WO2017066789, WO2017053297, WO2017066782, WO2018075827 and WO2017066797, the disclosures referring to cap analogues herewith incorporated by reference.

[0345] In embodiments, a cap1 structure is generated using tri-nucleotide cap analogue as disclosed in WO2017053297, WO2017066793, WO2017066781, WO2017066791, WO2017066789, WO2017066782, WO2018075827 and WO2017066797. Preferably, cap structures derivable from the structure disclosed in claim 1-5 of WO2017053297 may be suitably used to co-transcriptionally generate a cap1 structure. Further, any cap structures derivable from the structure defined in claim 1 or claim 21 of WO2018075827 may be suitably used to generate a cap1 structure.

[0346] In preferred embodiments, the 5′-cap structure may suitably be added co-transcriptionally using tri-nucleotide cap analogue as defined herein, preferably in an RNA in vitro transcription reaction as defined herein.

[0347] In particularly preferred embodiments, the artificial nucleic acid, preferably the RNA of the invention comprises a cap1 structure or a modified cap1 structure.

[0348] In preferred embodiments, the cap1 structure is formed via co-transcriptional capping using tri-nucleotide cap analogues m7G(5)ppp(5′)(2′OMeA)pG or m7G(5′ppp(5′)(2′OMeG)pG. A particularly preferred cap1 analog in that context is m7G(5)ppp(5)(2′OMeA)pG.

[0349] In other preferred embodiments, the cap1 structure is a modified cap1 structure and is formed using co-transcriptional capping using tri-nucleotide cap analogue 3′OMe-m7G(5)ppp(5′)(2′OMeA)pG.

[0350] In other embodiments, the 5′-cap structure is formed via enzymatic capping using capping enzymes (e.g. vaccinia virus capping enzymes and/or cap-dependent 2′-O methyltransferases) to generate cap0 or cap1 or cap2 structures. In that context, the 5′-cap structure (cap0 or cap1) may be added using immobilized capping enzymes and/or cap-dependent 2′-O methyltransferases using methods and means disclosed in published PCT patent application WO2016/193226.

[0351] In preferred embodiments, about 70%, 75%, 80%, 85%, 90%, 95% of the RNA (species) comprises a cap structure, preferably a cap1 structure as determined by a capping assay.

[0352] For determining the presence or absence of a cap structure, capping assays as described in published PCT application WO2015101416, in particular, as described in claims 27 to 46 of published PCT application WO2015101416 can be used. Other capping assays that may be used to determine the presence or absence of a cap structure of an RNA are described in published PCT application WO2020127959.

[0353] According to a preferred embodiment, the mRNA according to the invention comprises a 5′-cap structure and/or at least one 3′-untranslated region element (3′-UTR element), preferably as defined herein. More preferably, the mRNA further comprises a 5′-UTR element as defined herein.

### UTRs

[0354] In a preferred embodiment, the pharmaceutical composition comprises an mRNA compound comprising at least one 5′- or 3′-UTR element. In this context, an UTR element comprises or consists of a nucleic acid sequence, which is derived from the 5′- or 3′-UTR of any naturally occurring gene or which is derived from a fragment, a homolog or a variant of the 5′- or 3′-UTR of a gene. Preferably, the 5′- or 3′-UTR element used according to the present invention is heterologous to the at least one coding region of the mRNA sequence of the invention. Even if 5′- or 3′-UTR elements derived from naturally occurring genes are preferred, also synthetically engineered UTR elements may be used in the context of the present invention.

[0355] The term “3′-UTR element” typically refers to a nucleic acid sequence, which comprises or consists of a nucleic acid sequence that is derived from a 3′-UTR or from a variant of a 3′-UTR. A 3′-UTR element in the sense of the present invention may represent the 3′-UTR of an RNA, preferably an mRNA. Thus, in the sense of the present invention, preferably, a 3′-UTR element may be the 3′-UTR of an RNA, preferably of an mRNA, or it may be the transcription template for a 3′-UTR of an RNA. Thus, a 3′-UTR element preferably is a nucleic acid sequence which corresponds to the 3′-UTR of an RNA, preferably to the 3′-UTR of an mRNA, such as an mRNA obtained by transcription of a genetically engineered vector construct. Preferably, the 3′-UTR element fulfils the function of a 3′-UTR or encodes a sequence which fulfils the function of a 3′-UTR.

[0356] Preferably, the at least one 3′-UTR element comprises or consists of a nucleic acid sequence derived from the 3′-UTR of a chordate gene, preferably a vertebrate gene, more preferably a mammalian gene, most preferably a human gene, or from a variant of the 3′-UTR of a chordate gene, preferably a vertebrate gene, more preferably a mammalian gene, most preferably a human gene.

[0357] Preferably, the pharmaceutical composition comprises an mRNA compound that comprises a 3′-UTR element, which may be derivable from a gene that relates to an mRNA with an enhanced half-life (that provides a stable mRNA), for example a 3′-UTR element as defined and described below. Preferably, the 3′-UTR element comprises or consists of a nucleic acid sequence derived from a 3′-UTR of a gene, which preferably encodes a stable mRNA, or from a homolog, a fragment or a variant of said gene.

[0358] In one preferred embodiment, the UTR-combinations which are disclosed in Table 1, claims 1 and claim 4, claims 6-8 and claim 9 of WO2019077001 are preferred UTR-combinations for mRNA compounds of the present invention. Further, preferably, the UTR-combinations as disclosed on page 24, second full paragraph after Table 1 and page 24, last paragraph to page 29, second paragraph of WO2019077001 are preferred UTR-combinations for mRNA compounds of the present invention. WO2019077001 is incorporated herein by reference in its entirety.

[0359] In a further preferred embodiment, that 3′-UTR element comprises or consists of a nucleic acid sequence which is derived from a 3′-UTR of a gene selected from the group consisting of a 3′-UTR of a gene selected from PSMB3 (see Table 1-5′-UTRs and 3′-UTRs herein below), ALB/albumin (see Table 1-5′-UTRs and 3′-UTRs herein below), alpha-globin (referred to as “muag” i.e. a mutated alpha-globin 3′-UTR; see Table 1-5′-UTRs and 3′-UTRs herein below), CASP1 (see Table 1-5′-UTRs and 3′-UTRs herein below), COX6B1 (see Table 1-5′-UTRs and 3′-UTRs herein below), GNAS (see Table 1-5′-UTRs and 3′-UTRs herein below), NDUFA1 (see Table 1-5′-UTRs and 3′-UTRs herein below) and RPS9 (see Table 1-5′-UTRs and 3′-UTRs herein below), or from a homolog, a fragment or a variant of any one of these genes (for example, human albumin/alb 3′-UTR as disclosed in SEQ ID NO:1369 of WO2013143700, which is incorporated herein by reference), or from a homolog, a fragment or a variant thereof. In a further preferred embodiment, the 3′-UTR element comprises the nucleic acid sequence derived from a fragment of the human albumin gene according to SEQ ID NO:1376 of WO2013143700 (albumin/alb 3′-UTR). In a further preferred embodiment, the 3′-UTR element comprises or consists of a nucleic acid sequence which is derived from a 3′-UTR of an albumin gene, preferably a vertebrate albumin gene, more preferably a mammalian albumin gene, most preferably a human albumin gene such as from the 3′-UTR of the human albumin gene according to GenBank Accession number NM_000477.5, or a fragment or variant thereof. In another preferred embodiment, the 3′-UTR element comprises or consists of the center, α-complex-binding portion of the 3′-UTR of an α-globin gene, such as of a human α-globin gene, or an α-complex-binding portion of the 3′-UTR of an α-globin gene (also named herein as “muag”), corresponding to SEQ ID NO:1393 of patent application WO2013143700.

TABLE 1
5′-UTRs and 3′-UTRs

| UTR | Name | Type | SEQ ID NO: | Type | SEQ ID NO: | Type | SEQ ID NO: |
|---|---|---|---|---|---|---|---|
| 5′-UTR | HSD17B4 | DNA | 1 | RNA | 2 | DNA, RNA | 1, 2 |
| 5′-UTR | RPL32_(32L4, 32L3) | DNA | 3 | RNA | 4 | DNA, RNA | 3, 4 |
| 5′-UTR | AIG1 | DNA | 5 | RNA | 6 | DNA, RNA | 5, 6 |
| 5′-UTR | ASAH1 | DNA | 7 | RNA | 8 | DNA, RNA | 7, 8 |
| 5′-UTR | ATP5A1 | DNA | 9 | RNA | 10 | DNA, RNA | 9, 10 |
| 5′-UTR | COX6C | DNA | 11 | RNA | 12 | DNA, RNA | 11, 12 |
| 5′-UTR | Dpysl2 | DNA | 13 | RNA | 14 | DNA, RNA | 13, 14 |
| 5′-UTR | MDR (ABCB7) | DNA | 15 | RNA | 16 | DNA, RNA | 15, 16 |
| 5′-UTR | Mp68_(2010107E04Rik) | DNA | 17 | RNA | 18 | DNA, RNA | 17, 18 |
| 5′-UTR | Ndufa4 | DNA | 19 | RNA | 20 | DNA, RNA | 19, 20 |
| 5′-UTR | Nosip | DNA | 21 | RNA | 22 | DNA, RNA | 21, 22 |
| 5′-UTR | Rpl31 | DNA | 23 | RNA | 24 | DNA, RNA | 23, 24 |
| 5′-UTR | RPL35A | DNA | 25 | RNA | 26 | DNA, RNA | 25, 26 |
| 5′-UTR | Slc7a3 | DNA | 27 | RNA | 28 | DNA, RNA | 27, 28 |
| 5′-UTR | TUBB4B | DNA | 29 | RNA | 30 | DNA, RNA | 29, 30 |
| 5′-UTR | Ubqln2 | DNA | 31 | RNA | 32 | DNA, RNA | 31, 32 |
| 3′-UTR | PSMB3 | DNA | 33 | RNA | 34 | DNA, RNA | 33, 34 |
| 3′-UTR | muag | DNA | 35 | RNA | 36 | DNA, RNA | 35, 36 |
| 3′-UTR | ALB7 | DNA | 37 | RNA | 38 | DNA, RNA | 37, 38 |
| 3′-UTR | ANXA4 | DNA | 39 | RNA | 40 | DNA, RNA | 39, 40 |
| 3′-UTR | CASP1 | DNA | 41 | RNA | 42 | DNA, RNA | 41, 42 |
| 3′-UTR | COX6B1 | DNA | 43 | RNA | 44 | DNA, RNA | 43, 44 |
| 3′-UTR | FIG4 | DNA | 45 | RNA | 46 | DNA, RNA | 45, 46 |
| 3′-UTR | Gnas | DNA | 47 | RNA | 48 | DNA, RNA | 47, 48 |
| 3′-UTR | Ndufa1 | DNA | 49 | RNA | 50 | DNA, RNA | 49, 50 |
| 3′-UTR | RPS9 | DNA | 51 | RNA | 52 | DNA, RNA | 51, 52 |
| 3′-UTR | Slc7a3 | DNA | 53 | RNA | 54 | DNA, RNA | 53, 54 |
| 3′-UTR | TUBB4B | DNA | 55 | RNA | 56 | DNA, RNA | 55, 56 |

[0360] In this context it is very preferred that the 3′-UTR element of the mRNA sequence according to the invention comprises or consists of a corresponding RNA sequence of the nucleic acid sequence according to SEQ ID NO:33 or 34, or a homolog, a fragment or variant thereof.

[0361] UTR-combination SLC7A3 (5′-UTR of mouse solute carrier family 7 (cationic amino acid transporter, y+ system), member 3)/PSMB3: in another preferred embodiment, the mRNA compound comprises a 5′-UTR element, which comprises or consists of a nucleic acid sequence which is derived from a cationic amino acid transporter 3 (solute carrier family 7 member 3, SLC7A3) gene, wherein said 5′-UTR element comprises or consists of a DNA sequence according to SEQ ID NO:15 as disclosed in WO2019077001 or respectively a RNA sequence according to SEQ ID 10 NO:16 as disclosed in WO2019077001. In another preferred embodiment, the mRNA compound comprises a 3′-UTR element, which comprises or consists of a nucleic acid sequence which is derived from a proteasome subunit beta type-3 (PSMB3) gene, wherein said 3′-UTR element comprises or consists of a DNA sequence according to SEQ ID NO:23 as disclosed in WO2019077001 or respectively a RNA sequence according to SEQ ID NO:24 as disclosed in WO2019077001. In further preferred embodiments, the mRNA compound comprises an UTR-combination as disclosed in WO2019077001, i.e. both a 5′-UTR element, which comprises or consists of a nucleic acid sequence which is derived from a SLC7A3 gene and a 3′-UTR element, which comprises or consists of a nucleic acid sequence which is derived from a PSMB3 gene. For direct reference to the sequence listing of the present invention, see Table 1-5′-UTRs and 3′-UTRs.

[0362] UTR-combination RPL31 (5′-UTR of mouse ribosomal protein L31)/RPS9 (3-UTR of human ribosomal protein S9 (RPS9): In another preferred embodiment, the mRNA compound comprises a 5′-UTR element, which comprises or consists of a nucleic acid sequence which is derived from a 60S ribosomal protein L31 (RPL31) gene, wherein said 5′-UTR element comprises or consists of a DNA sequence according to SEQ ID NO:13 as disclosed in WO2019077001 or respectively a RNA sequence according to SEQ ID NO:14 as disclosed in WO2019077001. In another preferred embodiment, the mRNA compound comprises a 3′-UTR element, which comprises or consists of a nucleic acid sequence which is derived from a 40S ribosomal protein S9 (RPS9) gene, wherein said 3′-UTR element comprises or consists of a DNA sequence according to SEQ ID NO:33 as disclosed in WO2019077001 or respectively a RNA sequence according to SEQ ID NO:34 as disclosed in WO2019077001. In further preferred embodiments, the mRNA compound comprises an UTR-combination as disclosed in WO2019077001, i.e. both a 5′-UTR element, which comprises or consists of a nucleic acid sequence which is derived from a RPL31 gene and a 3′-UTR element, which comprises or consists of a nucleic acid sequence which is derived from a RPS9 gene (preferably SEQ ID NO:51/52). For direct reference to the sequence listing of the present invention, see Table 1-5′-UTRs and 3′-UTRs.

[0363] In another preferred embodiment, the UTR-combination 5′-UTR Ubqln2 (ubiquilin 2, see Table 1-5′-UTRs and 3′-UTRs) and 3′-UTR Gnas (Guanine nucleotide-binding protein G(s) subunit alpha isoforms short, see Table 1-5′-UTRs and 3′-UTRs) is used.

[0364] In a very preferred embodiment, the 5′-UTR element of the mRNA sequence according to the invention comprises or consists of a corresponding RNA sequence of the nucleic acid sequence according to SEQ ID NO:1 or SEQ ID NO:2, i.e. HSD17B4. Also, in a very preferred embodiment, the 3′-UTR element of the mRNA sequence according to the invention comprises or consists of a corresponding RNA sequence of the nucleic acid sequence according to SEQ ID NO:33 or SEQ ID NO:34, i.e. PSMB3. In also a very preferred embodiment, the 5′-UTR element of the mRNA sequence and the 3′-UTR-element according to the invention comprises or consists of a combination of aforementioned HSD17B4 and PSMB3-UTRs.

[0365] The term “a nucleic acid sequence which is derived from a variant of the 3′-UTR of a [ . . . ] gene” preferably refers to a nucleic acid sequence, which is based on a variant of the 3′-UTR sequence of a gene, such as on a variant of the 3′-UTR of an albumin gene, an α-globin gene, a β-globin gene, a tyrosine hydroxylase gene, a lipoxygenase gene, or a collagen alpha gene, such as a collagen alpha 1(I) gene, or on a part thereof as described above. This term includes sequences corresponding to the entire sequence of the variant of the 3′-UTR of a gene, i.e. the full length variant 3′-UTR sequence of a gene, and sequences corresponding to a fragment of the variant 3′-UTR sequence of a gene. A fragment in this context preferably consists of a continuous stretch of nucleotides corresponding to a continuous stretch of nucleotides in the full-length variant 3′-UTR, which represents at least 20%, preferably at least 30%, more preferably at least 40%, more preferably at least 50%, even more preferably at least 60%, even more preferably at least 70%, even more preferably at least 80%, and most preferably at least 90% of the full-length variant 3′-UTR. Such a fragment of a variant, in the sense of the present invention, is preferably a functional fragment of a variant as described herein.

[0366] According to a preferred embodiment, the mRNA compound comprising an mRNA sequence according to the invention comprises a 5′-cap structure and/or at least one 3′-untranslated region element (3′-UTR element), preferably as defined herein. More preferably, the RNA further comprises a 5′-UTR element as defined herein.

[0367] In a further preferred embodiment, the pharmaceutical composition comprises an mRNA compound comprising at least one 5′-untranslated region element (5′-UTR element). Preferably, the at least one 5′-UTR element comprises or consists of a nucleic acid sequence, which is derived from the 5′-UTR of a TOP gene or which is derived from a fragment, homolog or variant of the 5′-UTR of a TOP gene. It is preferred that the 5′-UTR element does not comprise a TOP motif or a 5′-TOP, as defined above.

[0368] In some embodiments, the nucleic acid sequence of the 5′-UTR element, which is derived from a 5′-UTR of a TOP gene, terminates at its 3′-end with a nucleotide located at position 1, 2, 3, 4, 5, 6, 7, 8, 9 or 10 upstream of the start codon (e.g. A(U/T)G) of the gene or mRNA it is derived from. Thus, the 5′-UTR element does not comprise any part of the protein coding region. Thus, preferably, the only protein coding part of the at least one mRNA sequence is provided by the coding region.

[0369] The nucleic acid sequence derived from the 5′-UTR of a TOP gene is preferably derived from a eukaryotic TOP gene, preferably a plant or animal TOP gene, more preferably a chordate TOP gene, even more preferably a vertebrate TOP gene, most preferably a mammalian TOP gene, such as a human TOP gene.

[0370] For example, the 5′-UTR element may be selected from 5′-UTR elements comprising or consisting of a nucleic acid sequence, which is derived from a nucleic acid sequence selected from the group consisting of SEQ ID NO:1-1363, SEQ ID NO:1395, SEQ ID NO:1421 and SEQ ID NO:1422 of patent application WO2013143700, whose disclosure is incorporated herein by reference, from the homologs of SEQ ID NO:1-1363, SEQ ID NO:1395, SEQ ID NO:1421 and SEQ ID NO:1422 of patent application WO2013143700, from a variant thereof, or preferably from a corresponding RNA sequence. The term “homologs of SEQ ID NO:1-1363, SEQ ID NO:1395, SEQ ID NO:1421 and SEQ ID NO:1422 of patent application WO2013143700” refers to sequences of other species than Homo sapiens, which are homologous to the sequences according to SEQ ID NO:1-1363, SEQ ID NO:1395, SEQ ID NO:1421 and SEQ ID NO:1422 of patent application WO2013143700. For direct reference to the sequence listing of the present invention, see Table 1-5′-UTRs and 3′-UTRs.

[0371] In a preferred embodiment, the 5′-UTR element of the mRNA compound comprises or consists of a nucleic acid sequence, which is derived from a nucleic acid sequence extending from nucleotide position 5 (i.e. the nucleotide that is located at position 5 in the sequence) to the nucleotide position immediately 5′ to the start codon (located at the 3′-end of the sequences), e.g. the nucleotide position immediately 5′ to the ATG sequence, of a nucleic acid sequence selected from SEQ ID NO:1-1363, SEQ ID NO:1395, SEQ ID NO:1421 and SEQ ID NO:1422 of patent application WO2013143700, from the homologs of SEQ ID NO:1-1363, SEQ ID NO:1395, SEQ ID NO:1421 and SEQ ID NO:1422 of patent application WO2013143700 from a variant thereof, or a corresponding RNA sequence. It is particularly preferred that the 5′-UTR element is derived from a nucleic acid sequence extending from the nucleotide position immediately 3′ to the 5′-TOP to the nucleotide position immediately 5′ to the start codon (located at the 3′-end of the sequences), e.g. the nucleotide position immediately 5′ to the ATG sequence, of a nucleic acid sequence selected from SEQ ID NO:1-1363, SEQ ID NO:1395, SEQ ID NO:1421 and SEQ ID NO:1422 of patent application WO2013143700, from the homologs of SEQ ID NO:1-1363, SEQ ID NO:1395, SEQ ID NO:1421 and SEQ ID NO:1422 of patent application WO2013143700, from a variant thereof, or a corresponding RNA sequence. For direct reference to the sequence listing of the present invention, see Table 1-5′-UTRs and 3′-UTRs.

[0372] In a further preferred embodiment, the 5′-UTR element comprises or consists of a nucleic acid sequence, which is derived from a 5′-UTR of a TOP gene encoding a ribosomal protein or from a variant of a 5′-UTR of a TOP gene encoding a ribosomal protein. For example, the 5′-UTR element comprises or consists of a nucleic acid sequence, which is derived from a 5′-UTR of a nucleic acid sequence according to any of SEQ ID NO:67, 170, 193, 244, 259, 554, 650, 675, 700, 721, 913, 1016, 1063, 1120, 1138, and 1284-1360 of patent application WO2013143700, a corresponding RNA sequence, a homolog thereof, or a variant thereof as described herein, preferably lacking the 5′-TOP motif. As described above, the sequence extending from position 5 to the nucleotide immediately 5′ to the ATG (which is located at the 3′-end of the sequences) corresponds to the 5′-UTR of said sequences. For direct reference to the sequence listing of the present invention, see Table 1-5′-UTRs and 3′-UTRs.

[0373] In further preferred embodiments, the preferred 5′-UTR or 3′-UTR element comprises or consists of a nucleic acid sequence, which is disclosed in Table 1-5′-UTRs and 3′-UTRs.

[0374] Accordingly, in a preferred embodiment, the 5′-UTR element comprises or consists of a nucleic acid sequence, which has an identity of at least about 40%, preferably of at least about 50%, preferably of at least about 60%, preferably of at least about 70%, more preferably of at least about 80%, more preferably of at least about 90%, even more preferably of at least about 95%, even more preferably of at least about 99% to the nucleic acid sequence according to SEQ ID NO:1368, or SEQ ID NO:1412-1420 of patent application WO2013143700, or a corresponding RNA sequence, or wherein the at least one 5′-UTR element comprises or consists of a fragment of a nucleic acid sequence which has an identity of at least about 40%, preferably of at least about 50%, preferably of at least about 60%, preferably of at least about 70%, more preferably of at least about 80%, more preferably of at least about 90%, even more preferably of at least about 95%, even more preferably of at least about 99% to the nucleic acid sequence according to SEQ ID NO:1368, or SEQ ID NO:1412-1420 of patent application WO2013143700, wherein, preferably, the fragment is as described above, i.e. being a continuous stretch of nucleotides representing at least 20% etc. of the full-length 5′-UTR. Preferably, the fragment exhibits a length of at least about 20 nucleotides or more, preferably of at least about 30 nucleotides or more, more preferably of at least about 40 nucleotides or more. Preferably, the fragment is a functional fragment as described herein.

[0375] Preferably, the at least one 5′-UTR element and the at least one 3′-UTR element act synergistically to increase protein production from the at least one mRNA sequence as described above.

[0376] According to a preferred embodiment, the pharmaceutical composition of the invention comprises an mRNA compound that comprises, preferably in 5′- to 3′-direction:
[0377] a) a 5′-cap structure, preferably m7GpppN, more preferably cap1 or m7G(5′)ppp(5)(2′OMeA)pG;
[0378] b) optionally, a 5′-UTR element which preferably comprises or consists of a nucleic acid sequence which is optionally derived from the 5′-UTR of a TOP gene, more preferably comprising or consisting of the corresponding RNA sequence of a nucleic acid sequence according to any of the 5′-UTRs as disclosed in Table 1-5′-UTRs and 3′-UTRs, a homolog, a fragment or a variant thereof, most preferably according to SEQ ID NO:1 or 2 (HSD17B4), or a 5′-UTR element which preferably comprises or consists of a nucleic acid sequence which is derived from a solute carrier family 7 cationic amino acid transporter, y+ system), member 3 (SEQ ID NO:15 as disclosed in WO2019077001 or respectively a RNA sequence according to SEQ ID NO:16 as disclosed in WO2019077001) or a 60S ribosomal protein L31 (RPL31) gene (SEQ ID NO:13 as disclosed in WO2019077001 or respectively a RNA sequence according to SEQ ID NO:14 as disclosed in WO2019077001);
[0379] c) (i) at least one coding region encoding at least one engineered hepatocyte nuclear factor 4 alpha (HNF4A) protein variant comprising one or more amino acid substitution, deletion, and/or insertion mutation leading to an increased HNF4A transcriptional activity, DNA binding capacity, stability, longer-lasting HNF4A half-life and/or therapeutic effect as compared to the unmodified human wild type HNF4A protein according to SEQ ID NO:100 as described herein above or below or as disclosed in the sequence listing of the present invention or (ii) at least one coding region encoding a wild type hepatocyte nuclear factor 4 alpha (HNF4A) or a fragment or variant thereof, preferably an engineered HNF4A comprising (i) a S87A mutation, (ii) a S461E mutation, (iii) a S87A and a S461E mutation, (iv) S87A K106R K108R K126R K127R, preferably SEQ ID NO:138, (v) S87A K106R K108R K126R K127R S142A S143A S148A T166A S167A S313A S378A T429A T432A S436A K458R, preferably SEQ ID NO:186 or (vi) S87A K106R K108R K126R K127R S142A S143A S148A T166A S167A S313A S378A T429A T432A S436A K458R S461E mutations, preferably SEQ ID NO:140;
[0380] d) optionally, a 3′-UTR element which preferably comprises or consists of a nucleic acid sequence which is derived from a gene providing a stable mRNA, preferably comprising or consisting of the corresponding RNA sequence of a nucleic acid sequence according to any of the 3′-UTRs as disclosed in Table 1-5′-UTRs and 3′-UTRs, most preferably according to SEQ ID NO:33 or 34 (PSMB3) or a 3′-UTR element which preferably comprises or consists of a nucleic acid sequence which is derived from a 40S ribosomal protein S9 (RPS9) gene (SEQ ID NO:33 as disclosed in WO2019077001 or respectively a RNA sequence according to SEQ ID NO:34 as disclosed in WO2019077001);
[0381] e) optionally, a histone stem-loop selected from SEQ ID NO:63 or 64; and/or
[0382] f) optionally, a poly(A) sequence preferably comprising 64 adenosines or 100 adenosines; and
[0383] g) optionally, a poly(C) sequence, preferably comprising 30 cytosines;
[0384] h) optionally, a histone stem-loop selected from SEQ ID NO:63 or 64; and/or
[0385] i) optionally, a 3′-terminal sequence element selected from SEQ ID NO:65-99.

[0386] According to one embodiment, the mRNA compound comprises an miRNA binding site located in the 5′ or 3′ UTR. A miRNA (microRNA) is typically a small, non-coding single stranded RNA molecules of about 20 to 25 nucleotides in length which may function in gene regulation, for example, but not limited to, by mRNA degradation or translation inhibition or repression. miRNAs are typically produced from hairpin precursor RNAs (pre-miRNAs), and they may form functional complexes with proteins. Furthermore, miRNAs may bind to 5′ and/or 3′-UTR regions of target mRNAs. Preferably, the microRNA binding site is for a microRNA selected from the group consisting of miR-126, miR-142, miR-144, miR-146, miR-150, miR-155, miR-16, miR-21, miR-223, miR-24, miR-27, miR-26a binding site, preferably a miR-122 or miR-142 binding site, or any combination of the aforementioned miRNA binding sites.

[0387] In one embodiment, the miRNA binding site is a naturally occurring miRNA binding site. In another embodiment, the miRNA binding site may be a mimetic, or a modification of a naturally-occurring miRNA binding site.

[0388] According to one preferred embodiment, the mRNA compound comprising an mRNA sequence according to the invention may further comprise, as defined herein:
[0389] a) a 5′-cap structure, preferably m7GpppN, more preferably cap1 or m7G(5)ppp(5′)(2′OMeA)pG;
[0390] b) at least one miRNA binding site, preferably wherein the microRNA binding site is selected from the group consisting of a miR-126, miR-142, miR-144, miR-146, miR-150, miR-155, miR-16, miR-21, miR-223, miR-24, miR-27, miR-26a binding site, preferably a miR-122 or miR-142 binding site, or any combination of the aforementioned miRNA binding sites;
[0391] c) at least one 5′-UTR element;
[0392] d) at least one 3′-UTR element;
[0393] e) at least one poly(A) sequence;
[0394] f) optionally at least one poly(C) sequence;
[0395] g) optionally, a histone stem-loop selected from SEQ ID NO:63 or 64;
[0396] h) optionally, a 3′-terminal sequence element selected from SEQ ID NO:65-99; or any combinations of these.

[0397] In some embodiments, the artificial nucleic acid molecule according to the invention may comprise UTR elements according to a-2 (NDUFA4/PSMB3); a-5 (MP68/PSMB3); c-1 (NDUFA4/RPS9); a-1 (HSD17B4/PSMB3); e-3 (MP68/RPS9); e-4 (NOSIP/RPS9); a-4 (NOSIP/PSMB3); e-2 (RPL31/RPS9); e-5 (ATP5A1/RPS9); d-4 (HSD17B4/NUDFA1); b-5 (NOSIP/COX6B1); a-3 (SLC7A3/PSMB3); b-1 (UBQLN2/RPS9); b-2 (ASAH1/RPS9); b-4 (HSD17B4/CASP1); e-6 (ATPSA1/COX6B1); b-3 (HSD17B4/RPS9); g-5 (RPL31/CASP1); h-1 (RPL31/COX6B1); and/or c-5 (ATP5A1/PSMB3) in accordance with the disclosure of WO2019077001, the aforementioned UTR combinations and the subject-matter of claim 4 and subject-matter related thereto in WO2019077001 is incorporated herein by reference.

### UTR-Combination HSD17B4/PSMB3:

[0398] In a very preferred embodiment, the 5′-UTR element of the mRNA sequence according to the invention comprises or consists of a corresponding RNA sequence of the nucleic acid sequence according to SEQ ID NO:1 or SEQ ID NO:2, i.e. HSD17B4. Also, in a very preferred embodiment, the 3′-UTR element of the mRNA sequence according to the invention comprises or consists of a corresponding RNA sequence of the nucleic acid sequence according to SEQ ID NO:33 or SEQ ID NO:34), i.e. PSMB3. In also a very preferred embodiment, the 5′-UTR element of the mRNA sequence and the 3′-UTR-element according to the invention comprises or consists of a combination of aforementioned HSD17B4 and PSMB3-UTRs.

### UTR-Combination Rpl31/RPS9:

[0399] In another preferred embodiment, the mRNA compound of the present invention comprises a 5′-UTR element, which comprises or consists of a nucleic acid sequence which is derived from a 60S ribosomal protein L31 (RPL31) gene, wherein said 5′-UTR element comprises or consists of a DNA sequence according to SEQ ID NO:13 as disclosed in WO2019077001A1 or respectively a RNA sequence according to SEQ ID NO:14 as disclosed in WO2019077001A1. In another preferred embodiment, the mRNA compound comprises a 3′-UTR element, which comprises or consists of a nucleic acid sequence which is derived from a 40S ribosomal protein S9 (RPS9) gene, wherein said 3′-UTR element comprises or consists of a DNA sequence according to SEQ ID NO:33 as disclosed in WO2019077001A1 or respectively a RNA sequence according to SEQ ID NO:34 as disclosed in WO2019077001A1. In further preferred embodiments, the mRNA compound comprises an UTR-combination as disclosed in WO2019077001A1, i.e. both a 5′-UTR element, which comprises or consists of a nucleic acid sequence which is derived from a RPL31 gene and a 3′-UTR element, which comprises or consists of a nucleic acid sequence which is derived from a RPS9 gene.

### UTR-Combination Slc7a3/PSMB3:

[0400] In another preferred embodiment, the mRNA compound of the present invention comprises a 5′-UTR element, which comprises or consists of a nucleic acid sequence which is derived from a cationic amino acid transporter 3 (solute carrier family 7 member 3, SLC7A3) gene, wherein said 5′-UTR element comprises or consists of a DNA sequence according to SEQ ID NO:15 as disclosed in WO2019077001A1 or respectively a RNA sequence according to SEQ ID NO:16 as disclosed in WO2019077001A1. In another preferred embodiment, the mRNA compound comprises a 3′-UTR element, which comprises or consists of a nucleic acid sequence which is derived from a proteasome subunit beta type-3 (PSMB3) gene, wherein said 3′-UTR element comprises or consists of a DNA sequence according to SEQ ID NO:23 as disclosed in WO2019077001A1 or respectively a RNA sequence according to SEQ ID NO:24 as disclosed in WO2019077001A1. In further preferred embodiments, the mRNA compound comprises an UTR-combination as disclosed in WO2019077001A1, i.e. both a 5′-UTR element, which comprises or consists of a nucleic acid sequence which is derived from a SLc7a3 gene and a 3′-UTR element, which comprises or consists of a nucleic acid sequence which is derived from a PSMB3 gene.

### Poly(A) Tail

[0401] According to a further preferred embodiment, the mRNA of the present invention may contain a poly(A) tail on the 3′-terminus of typically about 10 to 200 adenosine nucleotides, preferably about 10 to 100 adenosine nucleotides, more preferably about 40 to 80 adenosine nucleotides or even more preferably about 50 to 70 adenosine nucleotides, more preferably about 100 adenosine nucleotides. Preferably, the mRNA of the invention comprises a 3′-terminal A nucleotide.

[0402] Preferably, the poly(A) sequence in the mRNA of the present invention is derived from a DNA template by RNA in vitro transcription. Alternatively, the poly(A) sequence may also be obtained in vitro by common methods of chemical-synthesis without being necessarily transcribed from a DNA-progenitor. Moreover, poly(A) sequences, or poly(A) tails may be generated by enzymatic polyadenylation of the mRNA according to the present invention using commercially available polyadenylation kits and corresponding protocols known in the art.

[0403] Alternatively, the mRNA as described herein optionally comprises a polyadenylation signal for enzymatic polyadenylation, which is defined herein as a signal, which conveys polyadenylation to a (transcribed) RNA by specific protein factors (e.g. cleavage and polyadenylation specificity factor (CPSF), cleavage stimulation factor (CstF), cleavage factors I and II (CF I and CF II), poly(A) polymerase (PAP)). In this context, a consensus polyadenylation signal for enzymatic polyadenylation is preferred comprising the NN(U/T)ANA consensus sequence. In a particularly preferred aspect, the polyadenylation signal comprises one of the following sequences: AA(U/T)AAA or A(U/T)(U/T)AAA (wherein uridine is usually present in RNA and thymidine is usually present in DNA). It is clear for a skilled artisan, that said consensus sequence is not mandatory for enzymatic or non-enzymatic polyadenylation.

### Poly(C) Tail

[0404] According to a further preferred embodiment, the mRNA of the present invention may contain a poly(C) tail on the 3′-terminus of typically about 10 to 200 cytidine nucleotides, preferably about 10 to 100 cytidine nucleotides, more preferably about 20 to 70 cytidine nucleotides or even more preferably about 20 to 60 or even 10 to 40 cytidine nucleotides.

### Histone Stem-Loop

[0405] In a further preferred embodiment, the pharmaceutical composition comprises an mRNA compound comprising a histone stem-loop sequence/structure (HSL, hSL, histoneSL, preferably according to SEQ ID NO:3 or SEQ ID NO:4). In said embodiment, the mRNA sequence may comprise at least one (or more) histone stem loop sequence or structure. Such histone stem-loop sequences are preferably selected from histone stem-loop sequences as disclosed in WO2012019780, the disclosure of which is incorporated herewith by reference. A histone stem-loop sequence that may be used within the present invention may preferably be derived from formulae (I) or (II) of WO2012019780. According to a further preferred embodiment the coding RNA may comprise at least one histone stem-loop sequence derived from at least one of the specific formulae (Ia) or (IIa) of patent application WO2012019780. According to a further preferred embodiment the coding RNA may comprise at least one histone stem-loop sequence derived from a Histone stem-loop as disclosed in patent application WO2018104538 under formula (I), formula (II), formula (Ia) or on pages 49-52 under section “Histone stem-loop” and WO2018104538—SEQ ID NO:1451-1452 as disclosed in WO2018104538; WO2018104538A1 which is herein incorporated by reference in its entirety, also especially SEQ ID NO:1451-1452 (herein SEQ ID NO:63 or 64).

[0406] In particularly preferred embodiment, the RNA of the invention comprises at least one histone stem-loop sequence, wherein said histone stem-loop sequence comprises a nucleic acid sequence being identical or at least 70%, 80%, 90%, 91%, 92%, 93%, 94%, 95%, 96%, 97%, 98%, or 99% identical to SEQ ID NO:63 or 64, or fragments or variants thereof.

### Signal Peptide

[0407] According to another particularly preferred embodiment, the mRNA according to the invention may additionally or alternatively encode a secretory signal peptide. Such signal peptides are sequences, which typically exhibit a length of about 15 to 30 amino acids and are preferably located at the N-terminus of the encoded peptide, without being limited thereto. Signal peptides as defined herein preferably allow the transport of the peptide or protein as encoded by the at least one mRNA of the pharmaceutical composition into a defined cellular compartment, preferably the cell surface, the endoplasmic reticulum (ER) or the endosomal-lysosomal compartment. Examples of secretory signal peptide sequences as defined herein include, without being limited thereto, signal sequences of classical or non-classical MHC-molecules (e.g. signal sequences of MHC I and II molecules, e.g. of the MHC class I molecule HLA-A*0201), signal sequences of cytokines or immunoglobulins as defined herein, signal sequences of the invariant chain of immunoglobulins or antibodies as defined herein, signal sequences of Lamp1, Tapasin, Erp57, Calretikulin, Calnexin, and further membrane associated proteins or of proteins associated with the endoplasmic reticulum (ER) or the endosomal-lysosomal compartment. Most preferably, signal sequences of MHC class I molecule HLA-A*0201 may be used according to the present invention. For example, a signal peptide derived from HLA-A is preferably used in order to promote secretion of the encoded peptide or protein as defined herein or a fragment or variant thereof. More preferably, an HLA-A signal peptide is fused to an encoded peptide or protein as defined herein or to a fragment or variant thereof:

[0408] Any of the above modifications may be applied to the mRNA of the present invention, and further to any RNA as used in the context of the present invention and may be, if suitable or necessary, be combined with each other in any combination, provided, these combinations of modifications do not interfere with each other in the respective at least one mRNA. A person skilled in the art will be able to take his choice accordingly.

### Lipid-Based Carriers

[0409] In particularly preferred embodiments, the at least one artificial nucleic acid, preferably the at least one RNA of the pharmaceutical composition is formulated in lipid-based carriers.

[0410] In the context of the invention, the term “lipid-based carriers” encompass lipid-based delivery systems for nucleic acid (e.g. RNA) that comprise a lipid component. A lipid-based carrier may additionally comprise other components suitable for encapsulating/incorporating/complexing a nucleic acid (e.g. RNA) including a cationic or polycationic polymer, a cationic or polycationic polysaccharide, a cationic or polycationic protein, a cationic or polycationic peptide, or any combinations thereof.

[0411] In the context of the invention, a typical “lipid-based carrier” is selected from liposomes, lipid nanoparticles (LNPs), lipoplexes, solid lipid nanoparticles, and/or nanoliposomes. The nucleic acid, preferably the RNA of the pharmaceutical composition may completely or partially incorporated or encapsulated in a lipid-based carrier, wherein the nucleic acid (e.g. RNA) may be located in the interior space of the lipid-based carrier, within the lipid layer/membrane of the lipid-based carrier, or associated with the exterior surface of the lipid-based carrier. The incorporation of nucleic acid, preferably the RNA into lipid-based carriers may be referred to as “encapsulation”. A “lipid-based carrier” is not restricted to any particular morphology, and include any morphology generated when e.g. an aggregation reducing lipid and at least one further lipid are combined, e.g. in an aqueous environment in the presence of nucleic acid (e.g. RNA). For example, an LNP, a liposome, a lipid complex, a lipoplex and the like are within the scope of the term “lipid-based carrier”. Lipid-based carriers can be of different sizes such as, but not limited to, a multilamellar vesicle (MLV) which may be hundreds of nanometers in diameter and may contain a series of concentric bilayers separated by narrow aqueous compartments, a small unicellular vesicle (SUV) which may be smaller than 50 nm in diameter, and a large unilamellar vesicle (LUV) which may be between 50 nm and 500 nm in diameter. Liposomes, a specific type of lipid-based carrier, are characterized as microscopic vesicles having an interior aqua space sequestered from an outer medium by a membrane of one or more bilayers. In a liposome, the at least one nucleic acid (e.g. RNA) is typically located in the interior aqueous space enveloped by some or the entire lipid portion of the liposome. Bilayer membranes of liposomes are typically formed by amphiphilic molecules, such as lipids of synthetic or natural origin that comprise spatially separated hydrophilic and hydrophobic domains. Lipid nanoparticles (LNPs), a specific type of lipid-based carrier, are characterized as microscopic lipid particles having a solid core or partially solid core. Typically, an LNP does not comprise an interior aqua space sequestered from an outer medium by a bilayer. In an LNP, the at least one nucleic acid (e.g. RNA) may be encapsulated or incorporated in the lipid portion of the LNP enveloped by some or the entire lipid portion of the LNP. An LNP may comprise any lipid capable of forming a particle to which the nucleic acid (e.g. RNA) may be attached, or in which the nucleic acid may be encapsulated. Preferably, said lipid-based carriers are particularly suitable for ocular administration.

[0412] In preferred embodiments, the lipid-based carriers of the pharmaceutical composition are selected from liposomes, lipid nanoparticles, lipoplexes, solid lipid nanoparticles, lipo-polylexes, and/or nanoliposomes.

[0413] In preferred embodiments, the lipid-based carriers of the pharmaceutical composition are lipid nanoparticles (LNPs). In particularly preferred embodiments, the lipid nanoparticles of the pharmaceutical composition encapsulate the at least one nucleic acid, preferably the at least one RNA of the invention.

[0414] The term “encapsulated”, e.g. incorporated, complexed, encapsulated, partially encapsulated, associated, partially associated, refers to the essentially stable combination of nucleic acid, preferably RNA with one or more lipids into lipid-based carriers (e.g. larger complexes or assemblies) preferably without covalent binding of the nucleic acid. The lipid-based carriers—encapsulated nucleic acid (e.g. RNA) may be completely or partially located in the interior of the lipid-based carrier (e.g. the lipid portion and/or an interior space) and/or within the lipid layer/membrane of the lipid-based carriers. The encapsulation of an nucleic acid (e.g. RNA) into lipid-based carriers is also referred to herein as “incorporation” as the nucleic acid (e.g. RNA) is preferably contained within the interior of the lipid-based carriers. Without wishing to be bound to theory, the purpose of incorporating or encapsulating nucleic acid into lipid-based carriers may be to protect the nucleic acid from an environment which may contain enzymes, chemicals, or conditions that degrade the nucleic acid (e.g. RNA). Moreover, incorporating nucleic acid into lipid-based carriers may promote the uptake of the nucleic acid and their release from the endosomal compartment, and hence, may enhance the therapeutic effect of the nucleic acid (e.g. RNA) when administered to a cell or a subject.

[0415] In preferred embodiments, the lipid-based carriers of the pharmaceutical composition comprise at least one or more lipids selected from at least one aggregation-reducing lipid, at least one cationic lipid, at least one neutral lipid or phospholipid, or at least one steroid or steroid analog, or any combinations thereof.

[0416] In preferred embodiments, the lipid-based carriers of the pharmaceutical composition comprise (i) an aggregation-reducing lipid, (ii) a cationic lipid or ionizable lipid, and (iii) a neutral lipid/phospholipid or a steroid/steroid analog.

[0417] In particularly preferred embodiments, the lipid-based carriers of the pharmaceutical composition comprise an (i) aggregation-reducing lipid, (ii) a cationic lipid or ionizable lipid, (iii) a neutral lipid or phospholipid, (iv) and a steroid or steroid analog.

### Lipid Nanoparticles (LNPs)

[0418] Lipid nanoparticles as used herein preferably have the structure of a liposome. A liposome is a structure having lipid-containing membranes enclosing an aqueous interior. Liposomes preferably have one or more lipid membranes. Liposomes are preferably single-layered, referred to as unilamellar, or multi-layered, referred to as multilamellar. When complexed with nucleic acids, lipid particles may also be lipoplexes, which are composed of cationic lipid bilayers sandwiched between DNA layers. Liposomes can further be of different sizes such as, but not limited to, a multilamellar vesicle (MLV) which may be hundreds of nanometers in diameter and may contain a series of concentric bilayers separated by narrow aqueous compartments, a small unicellular vesicle (SUV) which may be smaller than 50 nm in diameter, and a large unilamellar vesicle (LUV) which may be between 50 nm and 500 nm in diameter. Liposome design preferably includes, but is not limited to, opsonins or ligands in order to improve the attachment of liposomes to unhealthy tissue or to activate events such as, but not limited to, endocytosis. Liposomes may contain a low or a high pH in order to improve the delivery of the pharmaceutical formulations.

[0419] As a non-limiting example, liposomes such as synthetic membrane vesicles may be prepared by the methods, apparatus and devices described in US Patent Publication No. US20130177638, US20130177637, US20130177636, US20130177635, US20130177634, US20130177633, US20130183375, US20130183373 and US20130183372, the contents of each of which are herein incorporated by reference in its entirety. The nucleic acid may be encapsulated by the liposome and/or it may be contained in an aqueous core which may then be encapsulated by the liposome (see International Pub. Nos. WO2012031046, WO2012031043, WO2012030901 and WO2012006378 and US Patent Publication No. US20130189351, US20130195969 and US20130202684; the contents of each of which are herein incorporated by reference in their entirety).

[0420] In another embodiment, the mRNA is preferably formulated in a cationic oil-in-water emulsion where the emulsion particle comprises an oil core and a cationic lipid which can interact with the polynucleotide anchoring the molecule to the emulsion particle (see International Pub. No. WO2012006380; herein incorporated by reference in its entirety). In one embodiment, the mRNA may be formulated in a water-in-oil emulsion comprising a continuous hydrophobic phase in which the hydrophilic phase is dispersed.

[0421] In one embodiment, the mRNA pharmaceutical compositions is formulated in liposomes such as, but not limited to, DiLa2 liposomes (Marina Biotech, Bothell, WA), SMARTICLES® (Marina Biotech, Bothell, WA), neutral DOPC (1,2-dioleoyl-sn-glycero-3-phosphocholine) based liposomes (e.g., siRNA delivery for ovarian cancer (Landen et al. Cancer Biology & Therapy 2006 5(12)1708-1713); herein incorporated by reference in its entirety) and hyaluronan-coated liposomes (Quiet Therapeutics, Israel).

[0422] In another embodiment, the lipid nanoparticles have a median diameter size of from about 50 nm to about 300 nm, such as from about 50 nm to about 250 nm, for example, from about 50 nm to about 200 nm.

[0423] In some embodiments, the mRNA is delivered using smaller LNPs. Such particles may comprise a diameter from below 0.1 μm up to 100 nm such as, but not limited to, less than 0.1 μm, less than 1.0 μm, less than 5 μm, less than 10 μm, less than 15 μm, less than 20 μm, less than 25 μm, less than 30 μm, less than 35 μm, less than 40 μm, less than 50 μm, less than 55 μm, less than 60 μm, less than 65 μm, less than 70 μm, less than 75 μm, less than 80 μm, less than 85 μm, less than 90 μm, less than 95 μm, less than 100 μm, less than 125 μm, less than 150 μm, less than 175 μm, less than 200 μm, less than 225 μm, less than 250 μm, less than 275 μm, less than 300 μm, less than 325 μm, less than 350 μm, less than 375 μm, less than 400 μm, less than 425 μm, less than 450 μm, less than 475 μm, less than 500 μm, less than 525 μm, less than 550 μm, less than 575 μm, less than 600 μm, less than 625 μm, less than 650 μm, less than 675 μm, less than 700 μm, less than 725 μm, less than 750 μm, less than 775 μm, less than 800 μm, less than 825 μm, less than 850 μm, less than 875 μm, less than 900 μm, less than 925 μm, less than 950 μm, less than 975 μm, In another embodiment, RNA is delivered using smaller LNPs which may comprise a diameter from about 1 nm to about 100 nm, from about 1 nm to about 10 nm, about 1 nm to about 20 nm, from about 1 nm to about 30 nm, from about 1 nm to about 40 nm, from about 1 nm to about 50 nm, from about 1 nm to about 60 nm, from about 1 nm to about 70 nm, from about 1 nm to about 80 nm, from about 1 nm to about 90 nm, from about 5 nm to about from 100 nm, from about 5 nm to about 10 nm, about 5 nm to about 20 nm, from about 5 nm to about 30 nm, from about 5 nm to about 40 nm, from about 5 nm to about 50 nm, from about 5 nm to about 60 nm, from about 5 nm to about 70 nm, from about 5 nm to about 80 nm, from about 5 nm to about 90 nm, about 10 nm to about 50 nm, from about 20 nm to about 50 nm, from about 30 nm to about 50 nm, from about 40 nm to about 50 nm, from about 20 nm to about 60 nm, from about 30 nm to about 60 nm, from about 40 nm to about 60 nm, from about 20 nm to about 70 nm, from about 30 nm to about 70 nm, from about 40 nm to about 70 nm, from about 50 nm to about 70 nm, from about 60 nm to about 70 nm, from about 20 nm to about 80 nm, from about 30 nm to about 80 nm, from about 40 nm to about 80 nm, from about 50 nm to about 80 nm, from about 60 nm to about 80 nm, from about 20 nm to about 90 nm, from about 30 nm to about 90 nm, from about 40 nm to about 90 nm, from about 50 nm to about 90 nm, from about 60 nm to about 90 nm and/or from about 70 nm to about 90 nm.

[0424] In one embodiment, the lipid nanoparticle has a diameter greater than 100 nm, greater than 150 nm, greater than 200 nm, greater than 250 nm, greater than 300 nm, greater than 350 nm, greater than 400 nm, greater than 450 nm, greater than 500 nm, greater than 550 nm, greater than 600 nm, greater than 650 nm, greater than 700 nm, greater than 750 nm, greater than 800 nm, greater than 850 nm, greater than 900 nm, greater than 950 nm or greater than 1000 nm.

[0425] In yet another embodiment, the lipid nanoparticles in the formulation of the present invention have a single mode particle size distribution (i.e., they are not bi- or poly-modal).

[0426] The lipid nanoparticles preferably further comprise one or more lipids and/or other components in addition to those mentioned above. Other lipids may be included in the liposome compositions for a variety of purposes, such as to prevent lipid oxidation or to attach ligands onto the liposome surface. Any of a number of lipids may be present in lipid particles, including amphipathic, neutral, cationic, and anionic lipids. Such lipids can be used alone or in combination.

[0427] Additional components that may be present in a lipid particle include bilayer stabilizing components such as polyamide oligomers (see, e.g., U.S. Pat. No. 6,320,017, which is incorporated by reference in its entirety), peptides, proteins, and detergents.

[0428] Different lipid nanoparticles having varying molar ratios of cationic lipid, non-cationic (or neutral) lipid, sterol (e.g., cholesterol), and aggregation reducing agent (such as a PEG-modified lipid) on a molar basis (based upon the total moles of lipid in the lipid nanoparticles) are provided in Table D herein below.

TABLE D
Exemplary lipid nanoparticle compositions

| | Molar Ratio of Lipids | | | |
|---|---|---|---|---|
| | (Based upon 100% total moles of lipid in the lipid nanoparticle) | | | |
| | | Non-Cationic | | |
| Formulation | Cationic | (or neutral) | | Aggregation Reducing Agent (e.g., |
| No. | Lipid | lipid | Sterol | conjugated lipid) |
| 1 | from about 35 | from about 3 to | from about 15 | from about 0.1 to about 10% (preferably |
| | to about 65% | about 12 or 15% | to about 45% | from about 0.5 to about 2 or 3%) |
| 2 | from about 20 | from about 5 | from about 20 | from about 0.1 to about 10% (preferably |
| | to about 70% | to about 45% | to about 55% | from about 0.5 to about 2 or 3%) |
| 3 | from about 45 | from about 5 | from about 25 | from about 0.1 to about 3% |
| | to about 65% | to about 10% | to about 40% | |
| 4 | from about 20 | from about 5 | from about 25 | from about 0.1 to about 5% (preferably |
| | to about 60% | to about 25% | to about 55% | from about 0.1 to about 3%) |
| 5 | about 40% | about 10% | about 40% | about 10% |
| 6 | about 35% | about 15% | about 40% | about 10% |
| 7 | about 52% | about 13% | about 30% | about 5% |
| 8 | about 50% | about 10% | about 38.5% | about 1.5% |

[0429] In one embodiment, the weight ratio of lipid to RNA is at least about 0.5:1, at least about 1:1, at least about 2:1, at least about 3:1, at least about 4:1, at least about 5:1, at least about 6:1, at least about 7:1, at least about 11:1, at least about 20:1, at least about 25:1, at least about 27:1, at least about 30:1, or at least about 33:1. In one embodiment, the weight ratio of lipid to RNA is from about 1:1 to about 35:1, about 3:1 to about 15:1, about 4:1 to about 15:1, or about 5:1 to about 13:1 or about 25:1 to about 33:1. In one embodiment, the weight ratio of lipid to RNA is from about 0.5:1 to about 12:1.

[0430] In one embodiment, the mRNA of the present invention may be encapsulated in a therapeutic nanoparticle, referred to herein as “therapeutic nanoparticle nucleic acids”. Therapeutic nanoparticles may be formulated by methods described herein and known in the art such as, but not limited to, International Pub Nos. WO2010/005740, WO2010030763, WO2010005721, WO2010005723, WO2012054923, US Pub. Nos. US20110262491, US20100104645, US20100087337, US20100068285, US20110274759, US20100068286, US20120288541, US20130123351 and US20130230567 and U.S. Pat. Nos. 8,206,747, 8,293,276, 8,318,208 and 8,318,211; the contents of each of which are herein incorporated by reference in their entirety. In another embodiment, therapeutic polymer nanoparticles may be identified by the methods described in US Pub No. US20120140790, the contents of which is herein incorporated by reference in its entirety.

[0431] In one embodiment, the mRNA according to the invention may be encapsulated in, linked to and/or associated with synthetic nanocarriers. Synthetic nanocarriers include, but are not limited to, those described in International Pub. Nos. WO2010005740, WO2010030763, WO2012135010, WO2012149252, WO2012149255, WO2012149259, WO2012149265, WO2012149268, WO2012149282, WO2012149301, WO2012149393, WO2012149405, WO2012149411, WO2012149454 and WO2013019669, and US Pub. Nos. US20110262491, US20100104645, US20100087337 and US2012244222, each of which is herein incorporated by reference in their entirety. The synthetic nanocarriers may be formulated using methods known in the art and/or described herein. As a non-limiting example, the synthetic nanocarriers may be formulated by the methods described in International Pub Nos. WO2010005740, and WO2010030763 and WO2012135010 and US Pub. Nos. US20110262491, US20100104645, US20100087337 and US2012244222, each of which is herein incorporated by reference in their entirety. In another embodiment, the synthetic nanocarrier formulations may be lyophilized by methods described in International Pub. No. WO2011072218 and U.S. Pat. No. 8,211,473; the content of each of which is herein incorporated by reference in their entirety. In yet another embodiment, formulations of the present invention, including, but not limited to, synthetic nanocarriers, may be lyophilized or reconstituted by the methods described in US Patent Publication No. US20130230568, the contents of which are herein incorporated by reference in its entirety.

[0432] In one embodiment, the mRNA of the invention is formulated for delivery using the drug encapsulating microspheres described in International Patent Publication No. WO2013063468 or U.S. Pat. No. 8,440,614, each of which is herein incorporated by reference in its entirety.

[0433] According to preferred embodiments, the mRNA according to the invention may be formulated in order to target a specific tissue or organ. In particular, the mRNA according to the invention or a pharmaceutical carrier formulated together with the mRNA preferably forms a conjugate with a targeting group. Said targeting group preferably targets the conjugate, preferably the conjugate comprising the mRNA, to a specific tissue or organ. In other words, by conjugating the mRNA according to the invention with a target group (either directly by forming an RNA-target group conjugate or indirectly by forming a conjugate of a target group of a pharmaceutical carrier that is present in a complex with the mRNA according to the invention), the mRNA is delivered to a specific tissue or organ due to the targeting of said target group to that specific tissue or organ. Most preferably, the targeting group provides for delivery to liver tissue, preferably to liver macrophages, hepatocytes and or liver sinusoidal endothelial cells (LSEC). In this context, a targeting group is preferably selected from the group consisting of folate, GalNAc, galactose, mannose, mannose-6P, aptamers, integrin receptor ligands, chemokine receptor ligands, transferrin, biotin, serotonin receptor ligands, PSMA, endothelin, GCPII, somatostatin, LDL ligands and HDL ligands. Suitable approaches for targeted delivery to the liver, which may be applied to the mRNA of the invention, are also described in Bartneck et al. (Bartneck et al.: Therapeutic targeting of liver inflammation and fibrosis by nanomedicine. Hepatobiliary Surgery and Nutrition 2014; 3(6):364-376), the disclosure of which is incorporated herein in its entirety.

[0434] In another embodiment, liposomes or LNPs may be formulated for targeted delivery. Preferably, the liposome or LNP is formulated for targeted delivery of the mRNA according to the invention to the liver, preferably to liver macrophages, hepatocytes and/or liver sinusoidal endothelial cells (LSEC). The liposome or LNP used for targeted delivery may include, but is not limited to, the liposomes or LNPs described herein.

[0435] The mRNA of the invention preferably forms conjugates, such as RNA covalently linked to a carrier or targeting group, preferably as described herein, in order to provide for targeted delivery. Alternatively, the mRNA according to the invention may encode a fusion protein, e.g. bearing a targeting group fused to the peptide or protein as described herein, which is then targeted to a specific tissue or organ, preferably to the liver.

[0436] The conjugates preferably include targeting groups, e.g., a cell or tissue targeting agent, e.g., a lectin, glycoprotein, lipid or protein, e.g., an antibody, that binds to a specified cell type such as a liver cell. A targeting group can be a thyrotropin, melanotropin, lectin, glycoprotein, surfactant protein A, Mucin carbohydrate, multivalent lactose, multivalent galactose, N-acetyl-galactosamine, N-acetyl-gulucosamine multivalent mannose, multivalent fucose, glycosylated polyaminoacids, multivalent galactose, transferrin, bisphosphonate, polyglutamate, polyaspartate, a lipid, cholesterol, a steroid, bile acid, folate, vitamin B12, biotin, an RGD peptide, an RGD peptide mimetic or an aptamer.

[0437] Targeting groups may further be proteins, e.g., glycoproteins, or peptides, e.g., molecules having a specific affinity for a co-ligand, or antibodies e.g., an antibody, that binds to a specified cell type such as a liver cell. Targeting groups may also include hormones and hormone receptors. They can also include non-peptidic species, such as lipids, lectins, carbohydrates, vitamins, cofactors, multivalent lactose, multivalent galactose, N-acetyl-galactosamine, N-acetyl-gulucosamine multivalent mannose, multivalent fucose, or aptamers. The ligand can be, for example, a lipopolysaccharide, or an activator of p38 MAP kinase.

[0438] The targeting group is preferably a ligand that is capable of targeting a specific receptor. Examples include, without limitation, folate, GalNAc, galactose, mannose, mannose-6P, apatamers, integrin receptor ligands, chemokine receptor ligands, transferrin, biotin, serotonin receptor ligands, PSMA, endothelin, GCPII, somatostatin, LDL, and HDL ligands. In particular embodiments, the targeting group is an aptamer. Preferably, the aptamer is unmodified or has any combination of modifications disclosed herein.

[0439] In a preferred embodiment, the pharmaceutical composition according to the invention comprises the mRNA according to the invention that is formulated together with a cationic or polycationic compound and/or with a polymeric carrier. Accordingly, in a further embodiment of the invention, it is preferred that the mRNA as defined herein or any other nucleic acid comprised in the inventive pharmaceutical composition is associated with or complexed with a cationic or polycationic compound or a polymeric carrier, optionally in a weight ratio selected from a range of about 6:1 (w/w) to about 0.25:1 (w/w), more preferably from about 5:1 (w/w) to about 0.5:1 (w/w), even more preferably of about 4:1 (w/w) to about 1:1 (w/w) or of about 3:1 (w/w) to about 1:1 (w/w), and most preferably a ratio of about 3:1 (w/w) to about 2:1 (w/w) of mRNA or nucleic acid to cationic or polycationic compound and/or with a polymeric carrier; or optionally in a nitrogen/phosphate (N/P) ratio of mRNA or nucleic acid to cationic or polycationic compound and/or polymeric carrier in the range of about 0.1-10, preferably in a range of about 0.3-4 or 0.3-1, and most preferably in a range of about 0.5-1 or 0.7-1, and even most preferably in a range of about 0.3-0.9 or 0.5-0.9. More preferably, the N/P ratio of the mRNA to the one or more polycations is in the range of about 0.1 to 10, including a range of about 0.3 to 4, of about 0.5 to 2, of about 0.7 to 2 and of about 0.7 to 1.5.

[0440] Therein, the mRNA as defined herein or any other nucleic acid comprised in the pharmaceutical composition according to the invention can also be associated with a vehicle, transfection or complexation agent for increasing the transfection efficiency and/or the expression of the mRNA according to the invention or of optionally comprised further included nucleic acids.

[0441] Cationic or polycationic compounds, being particularly preferred agents in this context include protamine, nucleoline, spermine or spermidine, or other cationic peptides or proteins, such as poly-L-lysine (PLL), poly-arginine, basic polypeptides, cell penetrating peptides (CPPs), including HIV-binding peptides, HIV-1 Tat (HIV), Tat-derived peptides, Penetratin, VP22 derived or analog peptides, HSV VP22 (Herpes simplex), MAP, KALA or protein transduction domains (PTDs), PpT620, prolin-rich peptides, arginine-rich peptides, lysine-rich peptides, MPG-peptide(s), Pep-1, L-oligomers, Calcitonin peptide(s), Antennapedia-derived peptides (particularly from Drosophila antennapedia), pAntp, pIsl, FGF, Lactoferrin, Transportan, Buforin-2, Bac715-24, SynB, SynB(1), pVEC, hCT-derived peptides, SAP, or histones. More preferably, the mRNA according to the invention is complexed with one or more polycations, preferably with protamine or oligofectamine, most preferably with protamine. In this context protamine is particularly preferred.

[0442] Additionally, preferred cationic or polycationic proteins or peptides may be selected from the following proteins or peptides having the following total formula (III):

(Arg)ₗ;(Lys)ₘ;(His)ₙ;(Orn)ₒ;(Xaa)ₓ(Gly)_{y}, (formula (III))

[0443] wherein l+m+n+o+x=8-15, and l, m, n, o, or y independently of each other may be any number selected from 0, 1, 2, 3, 4, 5, 6, 7, 8, 9, 10, 11, 12, 13, 14 or 15, provided that the overall content of Arg, Lys, His and Orn represents at least 50% of all amino acids of the oligopeptide; and Xaa may be any amino acid selected from native (=naturally occurring) or non-native amino acids except of Arg, Lys, His or Orn; and x may be any number selected from 0, 1, 2, 3 or 4, provided, that the overall content of Xaa does not exceed 50% of all amino acids of the oligopeptide. Particularly preferred cationic peptides in this context are e.g. Arg₇, Arg₈, Arg₉, H₃R₉, R₉H₃, H₃R₉H₃, YSSR₉SSY, (RKH)₄, Y(RKH)₂R, etc. In this context the disclosure of WO 2009/030481 is incorporated herewith by reference. According to another embodiment, the pharmaceutical composition of the present invention comprises the mRNA as defined herein and a polymeric carrier. A polymeric carrier used according to the invention might be a polymeric carrier formed by disulfide-crosslinked cationic components. The disulfide-crosslinked cationic components may be the same or different from each other. The polymeric carrier can also contain further components. It is also particularly preferred that the polymeric carrier used according to the present invention comprises mixtures of cationic peptides, proteins or polymers and optionally further components as defined herein, which are crosslinked by disulfide bonds as described herein. In this context, the disclosure of WO2012/013326 is incorporated herewith by reference. Also in this context, the disclosure of WO2011/026641 is incorporated herewith by reference.

[0444] Further preferred cationic or polycationic compounds, which can be used as transfection or complexation agent may include cationic polysaccharides, for example chitosan, polybrene, cationic polymers, e.g. polyethyleneimine (PEI), cationic lipids, e.g. DOTMA: [1-(2,3-sioleyloxy)propyl)]-N,N,N-trimethylammonium chloride, DMRIE, di-C14-amidine, DOTIM, SAINT, DC-Chol, BGTC, CTAP, DOPC, DODAP, DOPE: Dioleyl phosphatidylethanol-amine, DOSPA, DODAB, DOIC, DMEPC, DOGS: Dioctadecylamidoglicylspermin, DIMRI: Dimyristo-oxypropyl dimethyl hydroxyethyl ammonium bromide, DOTAP: dioleoyloxy-3-(trimethylammonio)propane, DC-6-14: O,O-ditetradecanoyl-N-(α-trimethylammonioacetyl)diethanolamine chloride, CLIP1: rac-[(2,3-dioctadecyloxypropyl)(2-hydroxyethyl)]-dimethylammonium chloride, CLIP6: rac-[2(2,3-dihexadecyloxypropyl-oxymethyloxy)ethyl]trimethylammonium, CLIP9: rac-[2(2,3-dihexadecyloxypropyl-oxysuccinyloxy)ethyl]-trimethylammonium, oligofectamine, or cationic or polycationic polymers, e.g. modified polyaminoacids, such as β-aminoacid-polymers or reversed polyamides, etc., modified polyethylenes, such as PVP (poly(N-ethyl-4-vinylpyridinium bromide)), etc., modified acrylates, such as pDMAEMA (poly(dimethylaminoethyl methylacrylate)), etc., modified amidoamines such as pAMAM (poly(amidoamine)), etc., modified polybetaaminoester (PBAE), such as diamine end modified 1,4 butanediol diacrylate-co-5-amino-1-pentanol polymers, etc., dendrimers, such as polypropylamine dendrimers or pAMAM based dendrimers, etc., polyimine(s), such as PEI: poly(ethyleneimine), poly(propyleneimine), etc., polyallylamine, sugar backbone based polymers, such as cyclodextrin based polymers, dextran based polymers, chitosan, etc., silan backbone based polymers, such as PMOXA-PDMS copolymers, etc., blockpolymers consisting of a combination of one or more cationic blocks (e.g. selected from a cationic polymer as mentioned above) and of one or more hydrophilic or hydrophobic blocks (e.g. polyethyleneglycole); etc.

[0445] Preferably, the inventive composition comprises at least one RNA as defined herein, which is complexed with one or more polycations, and at least one free RNA, wherein the at least one complexed RNA is preferably identical to the at least one free RNA. In this context, it is particularly preferred that the pharmaceutical composition of the present invention comprises the mRNA according to the invention that is complexed at least partially with a cationic or polycationic compound and/or a polymeric carrier, preferably cationic proteins or peptides. In this context, the disclosure of WO2010037539 and WO2012113513 is incorporated herewith by reference. Partially means that only a part of the mRNA as defined herein is complexed in the pharmaceutical composition according to the invention with a cationic compound and that the rest of the mRNA as defined herein is (comprised in the inventive pharmaceutical composition) in uncomplexed form (“free”). Preferably, the molar ratio of the complexed RNA to the free RNA is selected from a molar ratio of about 0.001:1 to about 1:0.001, including a ratio of about 1:1. More preferably the ratio of complexed RNA to free RNA (in the pharmaceutical composition of the present invention) is selected from a range of about 5:1 (w/w) to about 1:10 (w/w), more preferably from a range of about 4:1 (w/w) to about 1:8 (w/w), even more preferably from a range of about 3:1 (w/w) to about 1:5 (w/w) or 1:3 (w/w), and most preferably the ratio of complexed mRNA to free mRNA in the inventive pharmaceutical composition is selected from a ratio of about 1:1 (w/w).

[0446] The complexed RNA in the pharmaceutical composition according to the present invention, is preferably prepared according to a first step by complexing the mRNA according to the invention with a cationic or polycationic compound and/or with a polymeric carrier, preferably as defined herein, in a specific ratio to form a stable complex. In this context, it is highly preferable, that no free cationic or polycationic compound or polymeric carrier or only a negligibly small amount thereof remains in the component of the complexed RNA after complexing the mRNA. Accordingly, the ratio of the mRNA and the cationic or polycationic compound and/or the polymeric carrier in the component of the complexed RNA is typically selected in a range so that the mRNA is entirely complexed and no free cationic or polycationic compound or polymeric carrier or only a negligibly small amount thereof remains in the pharmaceutical composition.

[0447] Preferably the ratio of the mRNA as defined herein to the cationic or polycationic compound and/or the polymeric carrier, preferably as defined herein, is selected from a range of about 6:1 (w/w) to about 0.25:1 (w/w), more preferably from about 5:1 (w/w) to about 0.5:1 (w/w), even more preferably of about 4:1 (w/w) to about 1:1 (w/w) or of about 3:1 (w/w) to about 1:1 (w/w), and most preferably a ratio of about 3:1 (w/w) to about 2:1 (w/w). Alternatively, the ratio of the mRNA as defined herein to the cationic or polycationic compound and/or the polymeric carrier, preferably as defined herein, in the component of the complexed mRNA, may also be calculated on the basis of the nitrogen/phosphate ratio (N/P-ratio) of the entire complex. In the context of the present invention, an N/P-ratio is preferably in the range of about 0.1 to 10, preferably in a range of about 0.3 to 4 and most preferably in a range of about 0.5 to 2 or 0.7 to 2 regarding the ratio of RNA:cationic or polycationic compound and/or polymeric carrier, preferably as defined herein, in the complex, and most preferably in a range of about 0.7 to 1.5, 0.5 to 1 or 0.7 to 1, and even most preferably in a range of about 0.3 to 0.9 or 0.5 to 0.9, preferably provided that the cationic or polycationic compound in the complex is a cationic or polycationic cationic or polycationic protein or peptide and/or the polymeric carrier as defined above.

[0448] In other embodiments, the pharmaceutical composition according to the invention comprising the mRNA as defined herein may be administered naked without being associated with any further vehicle, transfection or complexation agent.

[0449] It has to be understood and recognized, that according to the present invention, the inventive composition may comprise at least one mRNA, and/or at least one formulated/complexed mRNA as defined herein, wherein every formulation and/or complexation as disclosed above may be used.

[0450] In embodiments, wherein the pharmaceutical composition comprises more than one RNA species, these RNA species may be provided such that, for example, two, three, four, five, six, seven, eight, nine or more separate compositions, which may contain at least one RNA species each (e.g. three distinct mRNA species), each encoding a distinct peptide or protein as defined herein or a fragment or variant thereof, are provided, which may or may not be combined. Also, the pharmaceutical composition may be a combination of at least two distinct compositions, each composition comprising at least one mRNA encoding at least one of the peptides or proteins defined herein. Alternatively, the pharmaceutical composition may be provided as a combination of at least one mRNA, preferably at least two, three, four, five, six, seven, eight, nine or more mRNAs, each encoding one of the peptides or proteins defined herein. The pharmaceutical composition may be combined to provide one single composition prior to its use or it may be used such that more than one administration is required to administer the distinct mRNA species encoding a certain combination of the proteins as defined herein. If the pharmaceutical composition contains at least one mRNA molecule, typically at least two mRNA molecules, encoding of a combination of peptides or proteins as defined herein, it may e.g. be administered by one single administration (combining all mRNA species), by at least two separate administrations. Accordingly, any combination of mono-, bi- or multicistronic mRNAs encoding a peptide or protein or any combination of peptides or proteins as defined herein (and optionally further proteins), provided as separate entities (containing one mRNA species) or as combined entity (containing more than one mRNA species), is understood as a pharmaceutical composition according to the present invention. According to a particularly preferred embodiment of the pharmaceutical composition, the at least one peptide or protein, preferably a combination of at least two, three, four, five, six, seven, eight, nine or more peptides or proteins encoded by the pharmaceutical composition as a whole, is provided as an individual (monocistronic) mRNA, which is administered separately.

[0451] The pharmaceutical composition according to the present invention may be provided in liquid and or in dry (e.g. lyophilized) form.

[0452] The pharmaceutical composition typically comprises a safe and effective amount of the mRNA according to the invention as defined herein, encoding a peptide or protein as defined herein or a fragment or variant thereof or a combination of peptides or proteins, preferably as defined herein. As used herein, “safe and effective amount” means an amount of the mRNA that is sufficient to significantly induce a positive modification of a disease or disorder as defined herein. At the same time, however, a “safe and effective amount” is small enough to avoid serious side-effects, that is to say to permit a sensible relationship between advantage and risk. The determination of these limits typically lies within the scope of sensible medical judgment. In relation to the pharmaceutical composition of the present invention, the expression “safe and effective amount” preferably means an amount of the mRNA (and thus of the encoded peptide or protein) that is suitable for obtaining an appropriate expression level of the encoded protein(s). Such a “safe and effective amount” of the mRNA of the pharmaceutical composition as defined herein may furthermore be selected in dependence of the type of RNA, e.g. monocistronic, bi- or even multicistronic RNA, since a bi- or even multicistronic RNA may lead to a significantly higher expression of the encoded protein(s) than the use of an equal amount of a monocistronic RNA. A “safe and effective amount” of the mRNA of the pharmaceutical composition as defined above may furthermore vary in connection with the particular condition to be treated and also with the age and physical condition of the patient to be treated, the severity of the condition, the duration of the treatment, the nature of the accompanying therapy, of the particular pharmaceutically acceptable carrier used, and similar factors, within the knowledge and experience of the accompanying doctor. The pharmaceutical composition according to the invention can be used according to the invention for human and also for veterinary medical purposes.

[0453] In a preferred embodiment, the mRNA of the pharmaceutical composition or kit of parts according to the invention is provided in lyophilized form. Preferably, the lyophilized RNA is reconstituted in a suitable buffer, advantageously based on an aqueous carrier, prior to administration, e.g. Ringer-Lactate solution, which is preferred, Ringer solution, a phosphate buffer solution. In a preferred embodiment, the pharmaceutical composition or the kit of parts according to the invention contains at least two, three, four, five, six, seven, eight, nine or more RNAs, preferably mRNAs, which are provided separately in lyophilized form (optionally together with at least one further additive) and which are preferably reconstituted separately in a suitable buffer (such as Ringer-Lactate solution) prior to their use so as to allow individual administration of each of the (monocistronic) RNAs.

[0454] The pharmaceutical composition according to the invention may typically contain a pharmaceutically acceptable carrier. The expression “pharmaceutically acceptable carrier” as used herein preferably includes the liquid or non-liquid basis of the pharmaceutical composition. If the pharmaceutical composition is provided in liquid form, the carrier will be water, typically pyrogen-free water; isotonic saline or buffered (aqueous) solutions, e.g phosphate, citrate etc. buffered solutions. Particularly for injection of the pharmaceutical composition, water or preferably a buffer, more preferably an aqueous buffer, may be used, containing a sodium salt, preferably at least 50 mM of a sodium salt, a calcium salt, preferably at least 0.01 mM of a calcium salt, and optionally a potassium salt, preferably at least 3 mM of a potassium salt. According to a preferred embodiment, the sodium, calcium and, optionally, potassium salts may occur in the form of their halogenides, e.g. chlorides, iodides, or bromides, in the form of their hydroxides, carbonates, hydrogen carbonates, or sulfates, etc. Without being limited thereto, examples of sodium salts include e.g. NaCl, NaI, NaBr, Na₂CO₃, NaHCO₃, Na₂SO₄, examples of the optional potassium salts include e.g. KCl, KI, KBr, K₂CO₃, KHCO₃, K₂SO₄, and examples of calcium salts include e.g. CaCl₂, Cal₂, CaBr₂, CaCO₃, CaSO₄, Ca(OH)₂. Furthermore, organic anions of the aforementioned cations may be contained in the buffer. According to a more preferred embodiment, the buffer suitable for injection purposes as defined above, may contain salts selected from sodium chloride (NaCl), calcium chloride (CaCl₂) and optionally potassium chloride (KCl), wherein further anions may be present additional to the chlorides. CaCl₂ can also be replaced by another salt like KCl. Typically, the salts in the injection buffer are present in a concentration of at least 50 mM sodium chloride (NaCl), at least 3 mM potassium chloride (KCl) and at least 0.01 mM calcium chloride (CaCl₂). The injection buffer may be hypertonic, isotonic or hypotonic with reference to the specific reference medium, i.e. the buffer may have a higher, identical or lower salt content with reference to the specific reference medium, wherein preferably such concentrations of the afore mentioned salts may be used, which do not lead to damage of cells due to osmosis or other concentration effects. Reference media are e.g. in “in vivo” methods occurring liquids such as blood, lymph, cytosolic liquids, or other body liquids, or e.g. liquids, which may be used as reference media in “in vitro” methods, such as common buffers or liquids. Such common buffers or liquids are known to a skilled person. Ringer-Lactate solution is particularly preferred as a liquid basis.

[0455] However, one or more compatible solid or liquid fillers or diluents or encapsulating compounds may be used as well, which are suitable for administration to a person. The term “compatible” as used herein means that the constituents of the pharmaceutical composition according to the invention are capable of being mixed with the mRNA according to the invention as defined herein, in such a manner that no interaction occurs, which would substantially reduce the pharmaceutical effectiveness of the pharmaceutical composition according to the invention under typical use conditions. Pharmaceutically acceptable carriers, fillers and diluents must, of course, have sufficiently high purity and sufficiently low toxicity to make them suitable for administration to a person to be treated. Some examples of compounds which can be used as pharmaceutically acceptable carriers, fillers or constituents thereof are sugars, such as, for example, lactose, glucose, trehalose and sucrose; starches, such as, for example, corn starch or potato starch; dextrose; cellulose and its derivatives, such as, for example, sodium carboxymethylcellulose, ethylcellulose, cellulose acetate; powdered tragacanth; malt; gelatin; tallow; solid glidants, such as, for example, stearic acid, magnesium stearate; calcium sulfate; vegetable oils, such as, for example, groundnut oil, cottonseed oil, sesame oil, olive oil, corn oil and oil from Theobroma; polyols, such as, for example, polypropylene glycol, glycerol, sorbitol, mannitol and polyethylene glycol; alginic acid.

[0456] The choice of a pharmaceutically acceptable carrier is determined, in principle, by the manner, in which the pharmaceutical composition according to the invention is administered. The pharmaceutical composition can be administered, for example, systemically or locally. Routes for systemic administration in general include, for example, transdermal, oral, parenteral routes, including subcutaneous, intravenous, intramuscular, intraarterial, intradermal and intraperitoneal injections and/or intranasal administration routes. Routes for local administration in general include, for example, topical administration routes but also intradermal, transdermal, subcutaneous, or intramuscular injections or intralesional, intracranial, intrapulmonal, intracardial, and sublingual injections. More preferably, the pharmaceutical composition according to the present invention may be administered by an intradermal, subcutaneous, or intramuscular route, preferably by injection, which may be needle-free and/or needle injection. The pharmaceutical composition is therefore preferably formulated in liquid or solid form. The suitable amount of the pharmaceutical composition according to the invention to be administered can be determined by routine experiments, e.g. by using animal models. Such models include, without implying any limitation, rabbit, sheep, mouse, rat, dog and non-human primate models. Preferred unit dose forms for injection include sterile solutions of water, physiological saline or mixtures thereof. The pH of such solutions should be adjusted to about 7.4. Suitable carriers for injection include hydrogels, devices for controlled or delayed release, polylactic acid and collagen matrices. Suitable pharmaceutically acceptable carriers for topical application include those which are suitable for use in lotions, creams, gels and the like. If the pharmaceutical composition is to be administered perorally, tablets, capsules and the like are the preferred unit dose form. The pharmaceutically acceptable carriers for the preparation of unit dose forms which can be used for oral administration are well known in the prior art. The choice thereof will depend on secondary considerations such as taste, costs and storability, which are not critical for the purposes of the present invention, and can be made without difficulty by a person skilled in the art.

[0457] Further additives which may be included in the pharmaceutical composition are emulsifiers, such as, for example, Tween; wetting agents, such as, for example, sodium lauryl sulfate; colouring agents; taste-imparting agents, pharmaceutical carriers; tablet-forming agents; stabilizers; antioxidants; preservatives.

[0458] In preferred embodiments, the pharmaceutical composition according to the invention comprises a further pharmaceutically active ingredient in addition to the mRNA according to the invention. Preferably, the further pharmaceutically active ingredient is selected from compounds suitable for use in the treatment or prophylaxis of a liver disease or disorder as defined herein.

[0459] The pharmaceutical composition as defined herein may also be administered orally in any orally acceptable dosage form including, but not limited to, capsules, tablets, aqueous suspensions or solutions.

[0460] The pharmaceutical composition may also be administered topically. Suitable topical formulations are readily prepared for each of these areas or organs. For topical applications, the pharmaceutical composition may be formulated in a suitable ointment, containing the mRNA according to the invention suspended or dissolved in one or more carriers.

[0461] According to a preferred embodiment of this aspect of the invention, the pharmaceutical composition according to the invention is administered via a parenteral route, preferably by injection. Preferably, the inventive composition is administered by intradermal, subcutaneous, intramuscular or intravenous injection, most preferably by intravenous injection. Any suitable injection technique known in the art may be employed, for example conventional needle injection or needle-less injection techniques, such as jet-injection, or intravenous infusion or respectively intravenous therapy (IV therapy).

[0462] In one embodiment, the pharmaceutical composition comprises at least two, three, four, five, six, seven, eight, nine or more RNAs as defined herein, each of which is preferably injected separately, preferably by needle-less injection. Alternatively, the pharmaceutical composition comprises at least two, three, four, five, six, seven, eight, nine or more RNAs, wherein the at least two, three, four, five, six, seven, eight, nine or more RNAs are administered, preferably by injection as defined herein, as a mixture.

[0463] Administration of the mRNA as defined herein or the pharmaceutical composition according to the invention may be carried out in a time staggered treatment. A time staggered treatment may be e.g. administration of the mRNA or the pharmaceutical composition prior, concurrent and/or subsequent to a conventional therapy of a disease or disorder, preferably as described herein, e.g. by administration of the mRNA or the pharmaceutical composition prior, concurrent and/or subsequent to a therapy or an administration of a therapeutic agent suitable for the treatment or prophylaxis of a disease or disorder as described herein, preferably a liver disease. Such time staggered treatment may be carried out using e.g. a kit, preferably a kit of parts as defined herein. The term disease and disorder are used interchangeably herein.

[0464] Time staggered treatment may additionally or alternatively also comprise an administration of the mRNA as defined herein or the pharmaceutical composition according to the invention in a form, wherein the mRNA encoding a peptide or protein as defined herein or a fragment or variant thereof, preferably forming part of the pharmaceutical composition, is administered parallel, prior or subsequent to another RNA encoding a peptide or protein as defined above, preferably forming part of the same inventive composition. Preferably, the administration (of all RNAs) occurs within an hour, more preferably within 30 minutes, even more preferably within 15, 10, 5, 4, 3, or 2 minutes or even within 1 minute. Such time staggered treatment may be carried out using e.g. a kit, preferably a kit of parts as defined herein.

[0465] According to a further aspect, the present invention also provides kits, particularly kits of parts for use in treating, reversing, preventing, attenuating or inhibiting a liver disease, preferably selected from the group consisting of liver fibrosis, liver cirrhosis, hepatocellular carcinoma (HCC), non-alcoholic fatty liver disease (NAFLD), non-alcoholic steatohepatitis (NASH) and liver cancer, more preferably treating, preventing, attenuating or inhibiting liver fibrosis or liver cirrhosis. Such kits, particularly kits of parts, typically comprise as components alone or in combination with further components as defined herein at least one inventive RNA species as defined herein, or the inventive pharmaceutical composition comprising the mRNA according to the invention. The at least one RNA as defined herein, is optionally in combination with further components as defined herein, whereby the at least one RNA is provided separately (first part of the kit) from at least one other part of the kit comprising one or more other components. The pharmaceutical composition may occur in one or different parts of the kit. As an example, e.g. at least one part of the kit may comprise at least one RNA as defined herein, and at least one further part of the kit at least one other component as defined herein, e.g. at least one other part of the kit may comprise at least one pharmaceutical composition or a part thereof, e.g. at least one part of the kit may comprise the mRNA as defined herein, at least one further part of the kit at least one other component as defined herein, at least one further part of the kit at least one component of the pharmaceutical composition or the pharmaceutical composition as a whole, and at least one further part of the kit e.g. at least one pharmaceutical carrier or vehicle, etc. In case the kit or kit of parts comprises a plurality of RNAs as described herein, one component of the kit can comprise only one, several or all RNAs comprised in the kit. In an alternative embodiment every/each RNA species may be comprised in a different/separate component of the kit such that each component forms a part of the kit. Also, more than one RNA as defined herein may be comprised in a first component as part of the kit, whereas one or more other (second, third etc.) components (providing one or more other parts of the kit) may either contain one or more than one RNA as defined herein, which may be identical or partially identical or different from the first component. The kit or kit of parts may furthermore contain technical instructions with information on the administration and dosage of the mRNA according to the invention, the pharmaceutical composition of the invention or of any of its components or parts, e.g. if the kit is prepared as a kit of parts.

[0466] In a further aspect, the present invention furthermore provides several applications and uses of the mRNA, of the pharmaceutical composition or the kit of parts according to the invention. In particular, the present invention provides medical uses of the mRNA according to the invention. Moreover, the use of the mRNA according to the invention, of the pharmaceutical composition or the kit of parts according to the invention is envisaged in gene therapy.

[0467] In a preferred embodiment of the present invention, the mRNA, the pharmaceutical composition or the kit or kit of parts as described herein is provided for use in the treatment or prophylaxis of a liver disease. Accordingly, the present invention concerns an mRNA comprising at least one coding sequence, wherein the coding sequence encodes at least one peptide or protein as described herein, preferably comprising or consisting of a HNF4A protein, or a fragment or a variant of any of these peptides or proteins having the biological activity of a wild type HNF4A protein, or a pharmaceutical composition or kit or kit of parts comprising the mRNA according to the invention, for use in the treatment or prophylaxis of a liver disease. In other preferred embodiments of the present invention, the mRNA, the pharmaceutical composition or the kit or kit of parts as described herein is provided for use in treating, reversing, preventing, attenuating or inhibiting a liver disease, preferably selected from the group consisting of liver fibrosis, liver cirrhosis, hepatocellular carcinoma (HCC), non-alcoholic fatty liver disease (NAFLD), non-alcoholic steatohepatitis (NASH) and liver cancer, more preferably treating, preventing, attenuating or inhibiting liver fibrosis or liver cirrhosis.

[0468] In a preferred embodiment, the mRNA according to the invention is provided for use in the treatment or prophylaxis of a liver disease, which is preferably selected from the group consisting of liver fibrosis, liver cirrhosis, hepatocellular carcinoma (HCC), non-alcoholic fatty liver disease (NAFLD), non-alcoholic steatohepatitis (NASH) and liver cancer. In a preferred embodiment, the mRNA according to the invention is provided for use in the treatment or prophylaxis of hepatocellular carcinoma (HCC). Most preferably, the mRNA according to the invention is provided for use in the treatment or prophylaxis of liver fibrosis or liver cirrhosis.

[0469] In a preferred embodiment, the mRNA as described herein or the pharmaceutical composition is provided for treatment or prophylaxis of a liver disease, which comprises targeted delivery of the mRNA. Preferably, the mRNA is targeted to the liver upon administration to a mammalian subject. Targeted delivery of the mRNA according to the invention is preferably achieved by formulating the mRNA in a suitable manner (e.g. as a liposome or lipid nanoparticle as described herein) and/or by administering the mRNA or the pharmaceutical composition, respectively, according to the invention via a suitable route.

[0470] Preferably, the treatment or prophylaxis of a liver disease as described herein comprises administration of the mRNA or the pharmaceutical composition according to the invention in any suitable manner, preferably as described herein with respect to the pharmaceutical composition. The description of the pharmaceutical composition, where appropriate, also applies to the medical use of the mRNA according to the invention.

[0471] In preferred embodiments, the treatment or prophylaxis comprises administration of a further pharmaceutically active ingredient in combination with the mRNA according to the invention or the pharmaceutical composition according to the invention. Preferably, the further pharmaceutically active ingredient is selected from compounds suitable for use in the treatment or prophylaxis of a liver disease or disorder as defined herein.

[0472] Also comprised by the present invention are methods of treating or preventing a disease or disorder, preferably a liver disease or disorder as defined herein, by administering to a subject in need thereof a pharmaceutically effective amount of the mRNA or the pharmaceutical composition according to the invention. Such a method typically comprises an optional first step of preparing the mRNA or the pharmaceutical composition of the present invention, and a second step, comprising administering (a pharmaceutically effective amount of) said composition to a patient/subject in need thereof. A subject in need thereof will typically be a mammal. In the context of the present invention, the mammal is preferably selected from the group comprising, without being limited thereto, e.g. goat, cattle, swine, dog, cat, donkey, monkey, ape, a rodent such as a mouse, hamster, rabbit and, particularly, human, wherein the mammal typically suffers from a disease or disorder, preferably from a liver disease or disorder as defined herein.

[0473] According to a further aspect, the present invention also provides a method for increasing the expression of a peptide or protein as described herein comprising the steps, e.g. a) providing the mRNA as defined herein or the pharmaceutical composition as defined herein, b) applying or administering the mRNA or the pharmaceutical composition to an expression system, e.g. to a cell-free expression system, a cell (e.g. an expression host cell or a somatic cell), a tissue or an organism. The method may be applied for laboratory, for research, for diagnostic, for commercial production of peptides or proteins and/or for therapeutic purposes. In this context, typically after preparing the mRNA or the pharmaceutical composition, it is typically applied or administered to a cell-free expression system, a cell (e.g. an expression host cell or a somatic cell), a tissue or an organism, e.g. in naked or complexed form or as a pharmaceutical composition as described herein, preferably via transfection or by using any of the administration modes as described herein. The method may be carried out in vitro, in vivo or ex vivo. The method may furthermore be carried out in the context of the treatment of a specific disease, preferably as defined herein.

[0474] In this context in vitro is defined herein as transfection or transduction of the mRNA or the pharmaceutical composition according to the invention into cells in culture outside of an organism; in vivo is defined herein as transfection or transduction of the mRNA or the pharmaceutical composition according to the invention into cells by application of the mRNA or the pharmaceutical composition to the whole organism or individual and ex vivo is defined herein as transfection or transduction of the mRNA or the pharmaceutical composition according to the invention into cells outside of an organism or individual and subsequent application of the transfected cells to the organism or individual.

[0475] Likewise, according to another aspect, the present invention also provides the use of the mRNA or the pharmaceutical composition according to the invention, preferably for diagnostic or therapeutic purposes, for increasing the expression of a peptide or protein as described herein, particularly in gene therapy e.g. by applying or administering the mRNA or the pharmaceutical composition, e.g. to a cell-free expression system, a cell (e.g. an expression host cell or a somatic cell), a tissue or an organism. The use may be applied for laboratory, for research, for diagnostic for commercial production of peptides or proteins and/or for therapeutic purposes, preferably for gene therapy. In this context, typically after preparing the mRNA or the pharmaceutical composition according to the invention, it is typically applied or administered to a cell-free expression system, a cell (e.g. an expression host cell or a somatic cell), a tissue or an organism, preferably in naked form or complexed form, or as a pharmaceutical composition as described herein, preferably via transfection or by using any of the administration modes as described herein. The use may be carried out in vitro, in vivo or ex vivo. The use may furthermore be carried out in the context of the treatment of a specific disease, preferably a liver disease or disorder as defined herein.

[0476] In yet another aspect the present invention also relates to an inventive expression system comprising the mRNA according to the invention or an expression vector or plasmid comprising a corresponding nucleic acid sequence according to the first aspect of the present invention. In this context the expression system may be a cell-free expression system (e.g. an in vitro transcription/translation system), a cellular expression system (e.g. mammalian cells like CHO cells, insect cells, yeast cells, bacterial cells like E. coli) or organisms used for expression of peptides or proteins (e.g. plants or animals like cows).

[0477] In a third aspect, the present invention relates to a lipid nanoparticle (LNP), comprising the mRNA of the invention, wherein the LNP comprises an ionizable or cationic lipid, a phospholipid, a structural lipid, and a polymer conjugated lipid.

[0478] In a preferred embodiment, the lipids comprised in the LNP of the invention have a molar ratio of about 20-60% cationic or ionizable lipid, about 5-25% non-cationic lipid, about 25-55% sterol and about 0.5-15% polymer conjugated lipid.

[0479] In other embodiments, the LNP of the invention does not comprise polyethylene glycol (PEG) or a PEG-modified lipid.

[0480] In another aspect, the present invention relates to a pharmaceutical composition, comprising the mRNA of the invention or the LNP of the invention.

[0481] In yet another aspect, the present invention related to a kit, preferably kit of parts, comprising at least one mRNA of the invention, the LNP of the invention, or the pharmaceutical composition of the invention, and optionally a liquid vehicle for solubilising and optionally technical instructions with information on the administration and dosage of the pharmaceutical composition.

[0482] Accordingly, in a third aspect, the present invention the present invention provides the mRNA as described herein for use in the treatment, prevention, attenuation, inhibition, or prophylaxis of a the liver disease. Moreover, the mRNA as described herein is preferably provided for gene therapy.

### Cationic Lipids

[0483] The lipid nanoparticle may include any cationic lipid suitable for forming a lipid nanoparticle. Preferably, the cationic lipid carries a net positive charge at about physiological pH.

[0484] The cationic lipid is preferably an amino lipid. As used herein, the term “amino lipid” is meant to include those lipids having one or two fatty acid or fatty alkyl chains and an amino head group (including an aikylamino or dialkylamino group) that may be protonated to form a cationic lipid at physiological pH.

[0485] The cationic lipid may be, for example, N,N-dioleyl-N,N-dimethylammonium chloride (DODAC), N,N-distearyl-N,N-dimethylammonium bromide (DDAB), 1,2-dioleoyltrimethyl ammonium propane chloride (DOTAP) (also known as N-(2,3-dioleoyloxy)propyl)-N,N,N-trimethylammonium chloride and 1,2-Dioleyloxy-3-trimethylaminopropane chloride salt), N-(1-(2,3-dioleyloxy)propyl)-N,N,N-trimethylammonium chloride (DOTMA), N,N-dimethyl-2,3-dioleyloxy)propylamine (DODMA), 1,2-DiLinoleyloxy-N,N-dimethylaminopropane (DLinDMA), 1,2-Dilinolenyloxy-N,N-dimethylaminopropane (DLenDMA), 1,2-di-y-linolenyloxy-N,N-dimethylaminopropane (γ-DLenDMA), 1,2-Dilinoleylcarbamoyloxy-3-dimethylaminopropane (DLin-C-DAP), 1,2-Dilinoleyoxy-3-(dimethylamino)acetoxypropane (DLin-DAC), 1,2-Dilinoleyoxy-3-morpholinopropane (DLin-MA), 1,2-Dilinoleoyl-3-dimethylaminopropane (DLinDAP), 1,2-Dilinoleylthio-3-dimethylaminopropane (DLin-S-DMA), 1-Linoleoyl-2-linoleyloxy-3-dimethylaminopropane (DLin-2-DMAP), 1,2-Dilinoleyloxy-3-trimethylaminopropane chloride salt (DLin-TMA.Cl), 1,2-Dilinoleoyl-3-trimethylaminopropane chloride salt (DLin-TAP.Cl), 1,2-Dilinoleyloxy-3-(N-methylpiperazino)propane (DLin-MPZ), or 3-(N,N-Dilinoleylamino)-1,2-propanediol (DLinAP), 3-(N,N-Dioleylamino)-1,2-propanedio (DOAP), 1,2-Dilinoleyloxo-3-(2-N,N-dimethylamino)ethoxypropane (DLin-EG-DM A), 2,2-Dilinoleyl-4-dimethylaminomethyl-[1,3]-dioxolane (DLin-K-DMA) or analogs thereof, (3aR,5s,6aS)—N,N-dimethyl-2,2-di((9Z,12Z)-octadeca-9,12-dienyl)tetrahydro-3aH-cyclopenta[d][1,3]dioxol-5-amine, (6Z,9Z,28Z,31Z)-heptatriaconta-6,9,28,31-tetraen-19-yl 4-(dimethylamino)butanoate (MC3), 1,1′-(2-(4-(2-((2-(bis(2-hydroxydodecyl)amino)ethyl)(2-hydroxydodecyl)amino)ethyl)piperazin-1-yl)ethylazanediyl)-didodecan-2-ol (C12-200), 2,2-dilinoleyl-4-(2-dimethylaminoethyl)-[1,3]-dioxolane (DLin-K-C2-DMA), 2,2-dilinoleyl-4-dimethylaminomethyl-[1,3]-dioxolane (DLin-K-DMA), (6Z,9Z,28Z,31Z)-heptatriaconta-6,9,28,31-tetraen-19-yl 4-(dimethylamino) butanoate (DLin-M-C3-DMA), 3-((6Z,9Z,28Z,31Z)-heptatriaconta-6,9,28,31-tetraen-19-yloxy)-N,N-dimethylpropan-1-amine (MC3 Ether), 4-((6Z,9Z,28Z,31 Z)-heptatriaconta-6,9,28,31-tetraen-19-yloxy)-N,N-dimethylbutan-1-amine (MC4 Ether), or any combination of any of the foregoing.

[0486] Other cationic lipids include, but are not limited to, N,N-distearyl-N,N-dimethylammonium bromide (DDAB), 3P—(N—(N′,N′-dimethylaminoethane)-carbamoyl)cholesterol (DC-Chol), N-(1-(2,3-dioleyloxy)propyl)-N-2-(sperminecarboxamido)ethyl)-N,N-dimethylammonium trifluoracetate (DOSPA), dioctadecylamidoglycyl carboxyspermine (DOGS), 1,2-dileoyl-sn-3-phosphoethanolamine (DOPE), 1,2-dioleoyl-3-dimethylammonium propane (DODAP), N-(1,2-dimyristyloxyprop-3-yl)-N,N-dimethyl-N-hydroxyethyl ammonium bromide (DMRIE), and 2,2-Dilinoleyl-4-dimethylaminoethyl-[1,3]-dioxolane (XTC). Additionally, commercial preparations of cationic lipids can be used, such as, e.g., LIPOFECTIN (including DOTMA and DOPE, available from GIBCO/BRL), and LIPOFECTAMINE (comprising DOSPA and DOPE, available from GIBCO/BRL).

[0487] Other suitable cationic lipids are disclosed in International Publication Nos. WO09/086558, WO09/127060, WO10/048536, WO10/054406, WO10/088537, WO10/129709, and WO2011/153493; U.S. Patent Publication Nos. 2011/0256175, 2012/0128760, and 2012/0027803; U.S. Pat. No. 8,158,601; and Love et al, PNAS, 107(5), 1864-69, 2010. [51] Other suitable amino lipids include those having alternative fatty acid groups and other dialkylamino groups, including those in which the alkyl substituents are different (e.g., N-ethyl-N-methylamino-, and N-propyl-N-ethylamino-). In general, amino lipids having less saturated acyl chains are more easily sized, particularly when the complexes must be sized below about 0.3 microns, for purposes of filter sterilization. Amino lipids containing unsaturated fatty acids with carbon chain lengths in the range of C14 to C22 may be used. Other scaffolds can also be used to separate the amino group and the fatty acid or fatty alkyl portion of the amino lipid.

[0488] In certain embodiments, amino or cationic lipids of the invention have at least one protonatable or deprotonatable group, such that the lipid is positively charged at a pH at or below physiological pH (e.g. pH 7.4), and neutral at a second pH, preferably at or above physiological pH. It will, of course, be understood that the addition or removal of protons as a function of pH is an equilibrium process, and that the reference to a charged or a neutral lipid refers to the nature of the predominant species and does not require that all of the lipid be present in the charged or neutral form. Lipids that have more than one protonatable or deprotonatable group, or which are zwitterionic, are not excluded from use in the invention.

[0489] In certain embodiments, the protonatable lipids have a pKa of the protonatable group in the range of about 4 to about 11, e.g., a pKa of about 5 to about 7.

[0490] Lipid particles preferably include two or more cationic lipids. The cationic lipids are preferably selected to contribute different advantageous properties. For example, cationic lipids that differ in properties such as amine pKa, chemical stability, half-life in circulation, half-life in tissue, net accumulation in tissue, or toxicity can be used in the lipid nanoparticle. In particular, the cationic lipids can be chosen so that the properties of the mixed-lipid particle are more desirable than the properties of a single-lipid particle of individual lipids.

[0491] The cationic lipid preferably comprises from about 20 mol % to about 70 mol % or 75 mol % or from about 45 mol % to about 65 mol % or about 20, 25, 30, 35, 40, 45, 50, 55, 60, 65, or about 70 mol % of the total lipid present in the particle. In another embodiment, the lipid nanoparticles include from about 25% to about 75% on a molar basis of cationic lipid, e.g., from about 20 to about 70%, from about 35 to about 65%, from about 45 to about 65%, about 60%, about 57.5%, about 57.1%, about 50% or about 40% on a molar basis (based upon 100% total moles of lipid in the lipid nanoparticle). In one embodiment, the ratio of cationic lipid to nucleic acid is from about 3 to about 15, such as from about 5 to about 13 or from about 7 to about 11.

### Non-Cationic Lipids

[0492] The non-cationic lipid is preferably a neutral lipid, an anionic lipid, or an amphipathic lipid. Neutral lipids, when present, can be any of a number of lipid species which exist either in an uncharged or neutral zwitterionic form at physiological pH. Such lipids include, for example, diacylphosphatidylcholine, diacylphosphatidylethanolamine, ceramide, sphingomyelin, dihydrosphingomyelin, cephalin, and cerebrosides. The selection of neutral lipids for use in the particles described herein is generally guided by consideration of, e.g., lipid particle size and stability of the lipid particle in the bloodstream. Preferably, the neutral lipid is a lipid having two acyl groups (e.g., diacylphosphatidylcholine and diacylphosphatidylethanolamine). In one embodiment, the neutral lipids contain saturated fatty acids with carbon chain lengths in the range of C10 to C20. In another embodiment, neutral lipids with mono or diunsaturated fatty acids with carbon chain lengths in the range of C10 to C2o are used. Additionally, neutral lipids having mixtures of saturated and unsaturated fatty acid chains can be used.

[0493] Suitable neutral lipids include, but are not limited to, distearoylphosphatidylcholine or 1,2-distearoyl-sn-glycero-3-phosphocholine (DSPC), dioleoylphosphatidylcholine (DOPC), dipalmitoylphosphatidylcholine (DPPC), dioleoylphosphatidylglycerol (DOPG), dipalmitoylphosphatidylglycerol (DPPG), dioleoyl-phosphatidylethanolamine (DOPE), palmitoyloleoylphosphatidylcholine (POPC), palmitoyloleoylphosphatidylethanolamine (POPE), dioleoyl-phosphatidylethanolamine 4-(N-maleimidomethyl)-cyclohexane-1-carboxylate (DOPE-mal), dipalmitoyl phosphatidyl ethanolamine (DPPE), dimyristoylphosphoethanolamine (DMPE), dimyristoyl phosphatidylcholine (DMPC), distearoyl-phosphatidyl-ethanolamine (DSPE), SM, 16-0-monomethyl PE, 16-O-dimethyl PE, 18-1-trans PE, 1-stearoyl-2-oleoyl-phosphatidyethanolamine (SOPE), cholesterol, or a mixture thereof. Anionic lipids suitable for use in lipid particles of the invention include, but are not limited to, phosphatidylglycerol, cardiolipin, diacylphosphatidylserine, diacylphosphatidic acid, N-dodecanoyl phosphatidylethanoloamine, N-succinyl phosphatidylethanolamine, N-glutaryl phosphatidylethanolamine, lysylphosphatidylglycerol, and other anionic modifying groups joined to neutral lipids.

[0494] In various embodiments, the molar ratio of the cationic lipid to the neutral lipid in the lipid-based carriers ranges from about 2:1 to about 8:1.

[0495] The neutral lipid is preferably from about 5 mol % to about 90 mol %, about 5 mol % to about 10 mol %, about 5, 10, 15, 20, 25, 30, 35, 40, 45, 50, 55, 60, 65, 70, 75, 80, 85, or about 90 mol % of the total lipid present in the lipid-based carrier. In one embodiment, the lipid-based carrier include from about 0% to about 15% or 45% on a molar basis of neutral lipid, e.g., from about 3% to about 12% or from about 5% to about 10%. For instance, the lipid-based carrier may include about 15%, about 10%, about 7.5%, or about 7.1% of neutral lipid on a molar basis (based upon 100% total moles of lipid in the lipid-based carrier).

[0496] The term “amphipathic lipid(s)” refers to any suitable material, wherein the hydrophobic portion of the lipid material orients into a hydrophobic phase, while the hydrophilic portion orients toward the aqueous phase. Such compounds include, but are not limited to, phospholipids, aminolipids, and sphingolipids. Representative phospholipids include sphingomyelin, phosphatidylcholine, phosphatidylethanolamine, phosphatidylserine, phosphatidylinositol, phosphatidic acid, palmitoyloleoyl phosphatdylcholine, lysophosphatidylcholine, lysophosphatidylethanolamine, dipalmitoylphosphatidylcholine, dioleoylphosphatidylcholine, distearoylphosphatidylcholine, or dilinoleoylphosphatidylcholine. Other phosphorus-lacking compounds, such as sphingolipids, glycosphingolipid families, diacylglycerols, and b-acyloxyacids, can also be used.

[0497] The non-cationic lipid is preferably from about 5 mol % to about 90 mol %, about 5 mol % to about 10 mol %, about 5, 10, 15, 20, 25, 30, 35, 40, 45, 50, 55, 60, 65, 70, 75, 80, 85, or about 90 mol % of the total lipid present in the particle. In one embodiment, the lipid nanoparticles include from about 0% to about 15% or 45% on a molar basis of neutral lipid, e.g., from about 3% to about 12% or from about 5% to about 10%. For instance, the lipid nanoparticles may include about 15%, about 10%, about 7.5%, or about 7.1% of neutral lipid on a molar basis (based upon 100% total moles of lipid in the lipid nanoparticle).

### Steroids, Steroid Analogs or Sterols

[0498] A preferred sterol is cholesterol. Further sterols as known in the art are further envisaged for use in the context of the present invention.

[0499] The sterol preferably constitutes about 10 mol % to about 60 mol % or about 25 mol % to about 40 mol % of the lipid particle. In one embodiment, the sterol is about 10, 15, 20, 25, 30, 35, 40, 45, 50, 55, or about 60 mol % of the total lipid present in the lipid particle. In another embodiment, the lipid nanoparticles include from about 5% to about 50% on a molar basis of the sterol, e.g., about 15% to about 45%, about 20% to about 40%, about 48%, about 40%, about 38.5%, about 35%, about 34.4%, about 31.5% or about 31% on a molar basis (based upon 100% total moles of lipid in the lipid nanoparticle).

[0500] The molar ratio of the cationic lipid to cholesterol in the lipid-based carriers may be in the range from about 2:1 to about 1:1. In some embodiments, the cholesterol may be PEGylated.

[0501] In some embodiments, the lipid-based carrier comprises about 10 mol % to about 60 mol % or about 25 mol % to about 40 mol % sterol (based on 100% total moles of lipids in the lipid-based carrier). In one embodiment, the sterol is about 10, 15, 20, 25, 30, 35, 40, 45, 50, 55, or about 60 mol % of the total lipid present in the lipid-based carrier. In another embodiment, the lipid-based carriers include from about 5% to about 50% on a molar basis of the sterol, e.g., about 15% to about 45%, about 20% to about 40%, about 48%, about 40%, about 38.5%, about 35%, about 34.4%, about 31.5% or about 30% on a molar basis (based upon 100% total moles of lipid in the lipid-based carrier). In preferred embodiments, the lipid-based carrier comprises about 28%, about 29% or about 30% sterol (based on 100% total moles of lipids in the lipid-based carrier). In most preferred embodiments, the lipid-based carrier comprises about 40.9% sterol (based on 100% total moles of lipids in the lipid-based carrier).

### Polymer Conjugated Lipid—Aggregation Reducing Agent

[0502] The aggregation reducing agent is preferably a lipid capable of reducing aggregation. Examples of such lipids include, but are not limited to, polyethylene glycol (PEG)-modified lipids, monosialoganglioside Gml, and polyamide oligomers (PAO) such as those described in U.S. Pat. No. 6,320,017, which is incorporated by reference in its entirety. Other compounds with uncharged, hydrophilic, steric-barrier moieties, which prevent aggregation during formulation, like PEG, Gml or ATTA, can also be coupled to lipids. ATTA-lipids are described, e.g., in U.S. Pat. No. 6,320,017, and PEG-lipid conjugates are described, e.g., in U.S. Pat. Nos. 5,820,873, 5,534,499 and 5,885,613, each of which is incorporated by reference in its entirety.

[0503] The aggregation reducing agent may be, for example, a polyethyleneglycol (PEG)-lipid including, without limitation, a PEG-diacylglycerol (DAG), a PEG-dialkylglycerol, a PEG-dialkyloxypropyl (DAA), a PEG-phospholipid, a PEG-ceramide (Cer), or a mixture thereof (such as PEG-Cerl4 or PEG-Cer20). The PEG-DAA conjugate may be, for example, a PEG-dilauryloxypropyl (C12), a PEG-dimyristyloxypropyl (C14), a PEG-dipalmityloxypropyl (C16), or a PEG-distearyloxypropyl (C18). Other pegylated-lipids include, but are not limited to, polyethylene glycol-didimyristoyl glycerol (C14-PEG or PEG-C14, where PEG has an average molecular weight of 2000 Da) (PEG-DMG); (R)-2,3-bis(octadecyloxy)propyl-1-(methoxy poly(ethylene glycol)2000)propylcarbamate) (PEG-DSG); PEG-carbamoyl-1,2-dimyristyloxypropylamine, in which PEG has an average molecular weight of 2000 Da (PEG-cDMA); N-Acetylgalactosamine-((R)-2,3-bis(octadecyloxy)propyl-1-(methoxypoly(ethylene glycol)2000)propylcarbamate)) (GalNAc-PEG-DSG); mPEG (mw2000)-diastearoylphosphatidyl-ethanolamine (PEG-DSPE); and polyethylene glycol dipalmitoylglycerol (PEG-DPG). In one embodiment, the aggregation reducing agent is PEG-DMG. In another embodiment, the aggregation reducing agent is PEG-c-DMA.

[0504] The liposome formulation may be influenced by, but not limited to, the selection of the cationic lipid component, the degree of cationic lipid saturation, the nature of the PEGylation, ratio of all components and biophysical parameters such as size. In one example by Semple et al. (Semple et al. Nature Biotech. 2010 28: 172-176; herein incorporated by reference in its entirety), the liposome formulation was composed of 57.1% cationic lipid, 7.1% dipalmitoylphosphatidylcholine, 34.3% cholesterol, and 1.4% PEG-c-DMA. As another example, changing the pharmaceutical composition of the cationic lipid could more effectively deliver siRNA to various antigen presenting cells (Basha et al. Mol Ther. 2011 19:2186-2200; herein incorporated by reference in its entirety). In some embodiments, liposome formulations may comprise from about 35 to about 45% cationic lipid, from about 40% to about 50% cationic lipid, from about 50% to about 60% cationic lipid and/or from about 55% to about 65% cationic lipid. In some embodiments, the ratio of lipid to mRNA in liposomes may be from about 5:1 to about 20:1, from about 10:1 to about 25:1, from about 15:1 to about 30:1 and/or at least 30:1.

[0505] The average molecular weight of the PEG moiety in the PEG-modified lipids preferably ranges from about 500 to about 8,000 Daltons (e.g., from about 1,000 to about 4,000 Daltons). In one preferred embodiment, the average molecular weight of the PEG moiety is about 2,000 Daltons.

[0506] The concentration of the aggregation reducing agent preferably ranges from about 0.1 mol % to about 15 mol %, based upon the 100% total moles of lipid in the lipid particle. In one embodiment, the formulation includes less than about 3, 2, or 1 mole percent of PEG or PEG-modified lipid, based upon the total moles of lipid in the lipid particle.

[0507] In another embodiment, the lipid nanoparticles include from about 0.1% to about 20% on a molar basis of the PEG-modified lipid, e.g., about 0.5 to about 10%, about 0.5 to about 5%, about 10%, about 5%, about 3.5%, about 1.5%, about 0.5%, or about 0.3% on a molar basis (based on 100% total moles of lipids in the lipid nanoparticle).

[0508] In some embodiments, the LNPs comprise a polymer conjugated lipid. The term “polymer conjugated lipid” refers to a molecule comprising both a lipid portion and a polymer portion. An example of a polymer conjugated lipid is a PEGylated lipid. The term “PEGylated lipid” refers to a molecule comprising both a lipid portion and a polyethylene glycol portion. PEGylated lipids are known in the art and include 1-(monomethoxy-polyethyleneglycol)-2,3-dimyristoylglycerol (PEG-s-DMG) and the like.

[0509] A polymer conjugated lipid as defined herein, e.g. a PEG-lipid, may serve as an aggregation reducing lipid.

[0510] In certain embodiments, the LNP comprises a stabilizing-lipid which is a polyethylene glycol-lipid (PEGylated lipid). Suitable polyethylene glycol-lipids include PEG-modified phosphatidylethanolamine, PEG-modified phosphatidic acid, PEG-modified ceramides (e.g. PEG-CerC14 or PEG-CerC20), PEG-modified dialkylamines, PEG-modified diacylglycerols, PEG-modified dialkylglycerols. Representative polyethylene glycol-lipids include PEG-c-DOMG, PEG-c-DMA, and PEG-s-DMG. In one embodiment, the polyethylene glycol-lipid is N-[(methoxy poly(ethylene glycol)2000)carbamyl]-1,2-dimyristyloxlpropyl-3-amine (PEG-c-DMA). In a preferred embodiment, the polyethylene glycol-lipid is PEG-2000-DMG. In one embodiment, the polyethylene glycol-lipid is PEG-c-DOMG). In other embodiments, the LNPs comprise a PEGylated diacylglycerol (PEG-DAG) such as 1-(monomethoxy-polyethyleneglycol)-2,3-dimyristoylglycerol (PEG-DMG), a PEGylated phosphatidylethanoloamine (PEG-PE), a PEG succinate diacylglycerol (PEG-S-DAG) such as 4-O-(2′,3′-di(tetradecanoyloxy)propyl-1-O-(ω-methoxy(polyethoxy)ethyl)butanedioate (PEG-S-DMG), a PEGylated ceramide (PEG-cer), or a PEG dialkoxypropylcarbamate such as ω-methoxy(polyethoxy)ethyl-N-(2,3di(tetradecanoxy)propyl)carbamate or 2,3-di(tetradecanoxy)propyl-N-(ω-methoxy(polyethoxy)ethyl)carbamate.

[0511] In preferred embodiments, the PEGylated lipid is preferably derived from formula (IV) of published PCT patent application WO2018078053. Accordingly, PEGylated lipids derived from formula (IV) of published PCT patent application WO2018078053, and the respective disclosure relating thereto, are herewith incorporated by reference.

[0512] In a particularly preferred embodiments, the at least one nucleic acid (e.g. RNA or DNA) of the composition is complexed with one or more lipids thereby forming LNPs, wherein the LNP comprises a PEGylated lipid, wherein the PEG lipid is preferably derived from formula (IVa) of published PCT patent application WO2018078053. Accordingly, PEGylated lipid derived from formula (IVa) of published PCT patent application WO2018078053, and the respective disclosure relating thereto, is herewith incorporated by reference.

[0513] In a particularly preferred embodiment, the at least one nucleic acid, preferably the at least one RNA is complexed with one or more lipids thereby forming lipid nanoparticles (LNP), wherein the LNP comprises a PEGylated lipid/PEG lipid. Preferably, said PEG lipid is of formula (IVa):

[chemical structure]

[0514] wherein n has a mean value ranging from 30 to 60, such as about 30±2, 32±2, 34±2, 36±2, 38±2, 40±2, 42±2, 44±2, 46±2, 48±2, 50±2, 52±2, 54±2, 56±2, 58±2, or 60±2. In a most preferred embodiment n is about 49. In further preferred aspects said PEG lipid is of formula (IVa) wherein n is an integer selected such that the average molecular weight of the PEG lipid is about 2000 g/mol to about 3000 g/mol or about 2300 g/mol to about 2700 g/mol, even more preferably about 2500 g/mol.

[0515] The lipid of formula IVa as suitably used herein has the chemical term 2[(polyethylene glycol)-2000]-N,N-ditetradecylacetamide, also referred to as ALC-0159.

[0516] Further examples of PEG-lipids suitable in that context are provided in US20150376115A1 and WO2015199952, each of which is incorporated by reference in its entirety.

[0517] In some embodiments, LNPs include less than about 3, 2, or 1 mole percent of PEG or PEG-modified lipid, based on the total moles of lipid in the LNP. In further embodiments, LNPs comprise from about 0.1% to about 20% of the PEG-modified lipid on a molar basis, e.g., about 0.5 to about 10%, about 0.5 to about 5%, about 10%, about 5%, about 3.5%, about 3%, about 2.5%, about 2%, about 1.5%, about 1%, about 0.5%, or about 0.3% on a molar basis (based on 100% total moles of lipids in the LNP). In preferred embodiments, LNPs comprise from about 1.0% to about 2.0% of the PEG-modified lipid on a molar basis, e.g., about 1.2 to about 1.9%, about 1.2 to about 1.8%, about 1.3 to about 1.8%, about 1.4 to about 1.8%, about 1.5 to about 1.8%, about 1.6 to about 1.8%, in particular about 1.4%, about 1.5%, about 1.6%, about 1.7%, about 1.8%, about 1.9%, most preferably 1.7% (based on 100% total moles of lipids in the LNP). In various embodiments, the molar ratio of the cationic lipid to the PEGylated lipid ranges from about 100:1 to about 25:1.

### Encapsulation/Complexation in LNPs:

[0518] In preferred embodiments of the second aspect, the at least one nucleic acid (e.g. DNA or RNA), preferably the at least one RNA, and optionally the at least one further nucleic acid, is complexed, encapsulated, partially encapsulated, or associated with one or more lipids (e.g. cationic lipids and/or neutral lipids), thereby forming liposomes, lipid nanoparticles (LNPs), lipoplexes, and/or nanoliposomes.

[0519] The liposomes, lipid nanoparticles (LNPs), lipoplexes, and/or nanoliposomes—incorporated nucleic acid (e.g. DNA or RNA) may be completely or partially located in the interior space of the liposomes, lipid nanoparticles (LNPs), lipoplexes, and/or nanoliposomes, within the lipid layer/membrane, or associated with the exterior surface of the lipid layer/membrane. The incorporation of a nucleic acid into liposomes/LNPs is also referred to herein as “encapsulation” wherein the nucleic acid, e.g. the RNA is entirely contained within the interior space of the liposomes, lipid nanoparticles (LNPs), lipoplexes, and/or nanoliposomes. The purpose of incorporating nucleic acid into liposomes, lipid nanoparticles (LNPs), lipoplexes, and/or nanoliposomes is to protect the nucleic acid, preferably RNA from an environment which may contain enzymes or chemicals or conditions that degrade nucleic acid and/or systems or receptors that cause the rapid excretion of the nucleic acid. Moreover, incorporating nucleic acid, preferably RNA into liposomes, lipid nanoparticles (LNPs), lipoplexes, and/or nanoliposomes may promote the uptake of the nucleic acid, and hence, may enhance the therapeutic effect of the nucleic acid, e.g. the mRNA medicine(s) for use in the therapy and prevention of liver diseases like liver fibrosis, liver cirrhosis, hepatocellular carcinoma (HCC), non-alcoholic fatty liver disease (NAFLD), non-alcoholic steatohepatitis (NASH) or liver cancer, and more particularly to mRNA medicines of this kind which can exhibit excellent therapeutic and preventive effects with respect to liver diseases individually developed or to complications resulting from diseases of these organs. Accordingly, incorporating a nucleic acid, e.g. RNA or DNA, into liposomes, lipid nanoparticles (LNPs), lipoplexes, and/or nanoliposomes may be particularly suitable for mRNA medicines for use in the therapy and prevention of liver diseases like liver fibrosis, liver cirrhosis, hepatocellular carcinoma (HCC), non-alcoholic fatty liver disease (NAFLD), non-alcoholic steatohepatitis (NASH) or liver cancer, and more particularly to mRNA medicines of this kind which can exhibit excellent therapeutic and preventive effects with respect to liver diseases individually developed or to complications resulting from diseases of these organs, e.g. for intravenous administration.

[0520] In this context, the terms “complexed” or “associated” refer to the essentially stable combination of nucleic acid with one or more lipids into larger complexes or assemblies without covalent binding.

[0521] The term “lipid nanoparticle”, also referred to as “LNP”, is not restricted to any particular morphology, and include any morphology generated when a cationic lipid and optionally one or more further lipids are combined, e.g. in an aqueous environment and/or in the presence of a nucleic acid, e.g. an RNA. For example, a liposome, a lipid complex, a lipoplex and the like are within the scope of a lipid nanoparticle (LNP).

[0522] Liposomes, lipid nanoparticles (LNPs), lipoplexes, and/or nanoliposomes can be of different sizes such as, but not limited to, a multilamellar vesicle (MLV) which may be hundreds of nanometers in diameter and may contain a series of concentric bilayers separated by narrow aqueous compartments, a small unicellular vesicle (SUV) which may be smaller than 50 nm in diameter, and a large unilamellar vesicle (LUV) which may be between 50 nm and 500 nm in diameter.

[0523] LNPs of the invention are suitably characterized as microscopic vesicles having an interior aqua space sequestered from an outer medium by a membrane of one or more bilayers. Bilayer membranes of LNPs are typically formed by amphiphilic molecules, such as lipids of synthetic or natural origin that comprise spatially separated hydrophilic and hydrophobic domains. Bilayer membranes of the liposomes can also be formed by amphophilic polymers and surfactants (e.g., polymerosomes, niosomes, etc.). In the context of the present invention, an LNP typically serves to transport the at least one nucleic acid, preferably the at least one RNA to a target tissue.

[0524] Accordingly, in preferred embodiments of all aspects of the invention, the at least one nucleic acid, preferably the at least one RNA is complexed with one or more lipids thereby forming lipid nanoparticles (LNP). Preferably, said LNP is particularly suitable for intramuscular, intradermal administration, subcutaneous, or intravenous injection, most preferably for intravenous injection i.e. intravenous infusion or respectively intravenous therapy (as IV therapy).

### Pharmaceutical Composition

[0525] In a further aspect, the present invention concerns a composition or a pharmaceutical composition comprising the mRNA according to the invention as described herein. The pharmaceutical composition according to the invention thus comprises an RNA comprising at least one coding sequence, wherein the coding sequence encodes at least one peptide or protein as described herein, preferably a HNF4A protein selected, or a fragment or a variant of any of a HNF4A protein, having the biological activity of a wild type HNF4A protein, as defined herein, and a pharmaceutically acceptable carrier. The pharmaceutical composition according to the invention is preferably provided as a pharmaceutical composition.

[0526] With respect to the mRNA comprised in the pharmaceutical composition, reference is made to the description of the mRNA according to the invention, which applies to the pharmaceutical composition.

[0527] The pharmaceutical composition according to the invention preferably comprises at least one RNA according to the invention as described herein. In alternative embodiments, the pharmaceutical composition comprises at least two species of the mRNA according to the invention.

[0528] In the context of the present invention, the pharmaceutical composition may comprise more than a single mRNA encoding a HNF4A protein as defined herein. In other words, according to a preferred embodiment, the pharmaceutical composition comprises a combination of different mRNAs encoding different HNF4A proteins, for example an mRNA(s) encoding WT HNF4A and additional mRNA(s) encoding one or more engineered HNF4A protein variants.

[0529] In a preferred embodiment, the pharmaceutical composition of the present invention may comprise at least one RNA according to the invention, wherein the at least one RNA encodes at least two, three, four, five, six, seven, eight, nine or more distinct peptides or proteins as defined herein or a fragment or variant thereof. Preferably, the pharmaceutical composition comprises several species, more preferably at least two, three, four, five, six, seven, eight, nine or more species, of the mRNA according to the invention, wherein each RNA species encodes one of the peptides or proteins or a fragment or variant thereof as defined herein. In another embodiment, the mRNA comprised in the pharmaceutical composition is a bi- or multicistronic RNA as defined herein, which encodes the at least two, three, four, five, six, seven, eight, nine or more distinct peptides or proteins. Mixtures between these embodiments are also envisaged, such as compositions comprising more than one RNA species, wherein at least one RNA species may be monocistronic, while at least one other RNA species may be bi- or multicistronic.

[0530] The pharmaceutical composition according to the present invention, preferably the at least one coding sequence of the mRNA comprised therein, may thus comprise any combination of the nucleic acid sequences as defined herein.

[0531] In a preferred embodiment of the pharmaceutical composition according to the invention, the mRNA as described herein is complexed with one or more cationic or polycationic compounds, preferably with cationic or polycationic polymers, cationic or polycationic peptides or proteins, e.g. protamine, cationic or polycationic polysaccharides and/or cationic or polycationic lipids.

[0532] In some embodiments, the mRNA may be formulated as saline or lipid formulation. According to a preferred embodiment, the mRNA according to the present invention may be complexed with lipids to form one or more liposomes, lipoplexes, or lipid nanoparticles. Therefore, in one embodiment, the inventive composition comprises liposomes, lipoplexes, and/or lipid nanoparticles comprising the mRNA according to the invention. In one embodiment the mRNA according to the present invention is complexed with cationic lipids and/or neutral lipids and thereby forms liposomes, lipid nanoparticles, lipoplexes or neutral lipid-based nanoliposomes.

[0533] In a preferred embodiment, the lipid formulation is thus selected from the group consisting of liposomes, lipoplexes, copolymers such as PLGA and lipid nanoparticles.

[0534] In one preferred embodiment, a lipid nanoparticle (LNP) comprises:
[0535] a) an RNA comprising at least one coding sequence as defined herein,
[0536] b) a cationic lipid,
[0537] c) an aggregation reducing agent (such as polyethylene glycol (PEG) lipid or PEG-modified lipid),
[0538] d) optionally a non-cationic lipid (such as a neutral lipid), and
[0539] e) optionally, a sterol.

[0540] In one embodiment, the lipid nanoparticle formulation consists of (i) at least one cationic lipid; (ii) a neutral lipid; (iii) a sterol, e.g., cholesterol; and (iv) a PEG-lipid, in a molar ratio of about 20-60% cationic lipid:5-25% neutral lipid:25-55% sterol; 0.5-15% PEG-lipid.

[0541] In one embodiment, the nucleic acids may be formulated in an aminoalcohol lipidoid. Aminoalcohol lipidoids which may be used in the present invention may be prepared by the methods described in U.S. Pat. No. 8,450,298, herein incorporated by reference in its entirety.

[0542] In another aspect, the present invention relates to a method of treating, preventing, attenuating or inhibiting a liver disease, preferably selected from the group consisting of liver fibrosis, liver cirrhosis, hepatocellular carcinoma (HCC), non-alcoholic fatty liver disease (NAFLD), non-alcoholic steatohepatitis (NASH) or liver cancer, comprising administering to a human subject in need the mRNA of the invention, the LNP of the invention, the pharmaceutical composition of the invention, or the kit or kit of parts of the invention, wherein the administration results in treatment, prevention, attenuation, inhibition, or prophylaxis of the disease.

[0543] In yet another embodiment, the method of the invention is related to the administration of the mRNA of the invention to a human subject in need, resulting in
[0544] (i) improved hepatocyte metabolic activity; and/or
[0545] (ii) revived function of hepatocytes; and/or
[0546] (iii) increased mRNA levels of hepatocyte markers such as albumin (ALB), alpha-1 antitrypsin (A1AT), transferrin (TF) and/or transthyretin (TTR) in the liver or hepatocytes; and/or
[0547] (iv) reduced expression of fibrogenic marker genes Col1a1, Col2a1 Ck19, Sox9, Epcam, and/or Acta2 in the liver or hepatocytes; and/or
[0548] (v) decreased levels of bilirubin, hydroxyproline content in hepatocytes in the liver or hepatocytes; and/or
[0549] (vi) reduced liver injury as measured by histology, desmin or Sirius red staining;
[0550] (vii) increased expression of transporters of drug metabolism in the liver or hepatocytes;
[0551] (viii) increased serum paraoxonase and arylesterase 1 (PON1) expression or activity;
[0552] (ix) increased endogenous HNF4A or endogenous HNF1A levels or induction of the endogenous HNF1A-HNF4A transcriptional feedback loop; and/or
[0553] (x) increased function and/or fitness of hepatocytes;
[0554] as when compared to a non-treated human subject in need.

[0555] In yet another embodiment, the invention provides a method of treating or preventing a liver disease, wherein the method comprises administration of the inventive mRNA encoding WNT HNF4A or preferably encoding an engineered hepatocyte nuclear factor 4 alpha (HNF4A) protein variant resulting in improved hepatocyte metabolic activity as when compared to a non-treated human subject in need.

[0556] In yet another embodiment, the invention provides a method of treating or preventing a liver disease, wherein the method comprises administration of the inventive mRNA encoding WT HNF4A or preferably encoding an engineered hepatocyte nuclear factor 4 alpha (HNF4A) protein variant resulting in improved revived function of hepatocytes as when compared to a non-treated human subject in need.

[0557] In yet another embodiment, the invention provides a method of treating or preventing a liver disease, wherein the method comprises administration of the inventive mRNA encoding WT HNF4A or preferably encoding an engineered hepatocyte nuclear factor 4 alpha (HNF4A) protein variant resulting in increased mRNA levels of hepatocyte markers such as albumin (ALB), alpha-1 antitrypsin (A1AT), transferrin (TF) and/or transthyretin (TTR) in the liver or hepatocytes as when compared to a non-treated human subject in need.

[0558] In yet another embodiment, the invention provides a method of treating or preventing a liver disease, wherein the method comprises administration of the inventive mRNA encoding WT HNF4A or preferably encoding an engineered hepatocyte nuclear factor 4 alpha (HNF4A) protein variant resulting in reduced expression of fibrogenic marker genes Col1a1, Col2a1 Ck19, Sox9, Epcam, and/or Acta2 in the liver or hepatocytes as when compared to a non-treated human subject in need.

[0559] In yet another embodiment, the invention provides a method of treating or preventing a liver disease, wherein the method comprises administration of the inventive mRNA encoding WT HNF4A or preferably encoding an engineered hepatocyte nuclear factor 4 alpha (HNF4A) protein variant resulting in decreased levels of bilirubin, hydroxyproline content in hepatocytes in the liver or hepatocytes as when compared to a non-treated human subject in need.

[0560] In yet another embodiment, the invention provides a method of treating or preventing a liver disease, wherein the method comprises administration of the inventive mRNA encoding WT HNF4A or preferably encoding an engineered hepatocyte nuclear factor 4 alpha (HNF4A) protein variant resulting in reduced liver injury as measured by histology, desmin or Sirius red staining as when compared to a non-treated human subject in need.

[0561] In yet another embodiment, the invention provides a method of treating or preventing a liver disease, wherein the method comprises administration of the inventive mRNA encoding WT HNF4A or preferably encoding an engineered hepatocyte nuclear factor 4 alpha (HNF4A) protein variant resulting in increased expression of transporters of drug metabolism in the liver or hepatocytes as when compared to a non-treated human subject in need.

[0562] In yet another embodiment, the invention provides a method of treating or preventing a liver disease, wherein the method comprises administration of the inventive mRNA encoding WT HNF4A or preferably encoding an engineered hepatocyte nuclear factor 4 alpha (HNF4A) protein variant resulting in increased serum paraoxonase and arylesterase 1 (PON1) expression or activity as when compared to a non-treated human subject in need.

[0563] In yet another embodiment, the invention provides a method of treating or preventing a liver disease, wherein the method comprises administration of the inventive mRNA encoding WT HNF4A or preferably encoding an engineered hepatocyte nuclear factor 4 alpha (HNF4A) protein variant resulting in increased endogenous HNF4A or endogenous HNF1A levels or induction of the endogenous HNF1A-HNF4A transcriptional feedback loop as when compared to a non-treated human subject in need.

[0564] In yet another embodiment, the invention provides a method of treating or preventing a liver disease, wherein the method comprises administration of the inventive mRNA encoding WT HNF4A or preferably encoding an engineered hepatocyte nuclear factor 4 alpha (HNF4A) protein variant resulting in increased function and/or fitness of hepatocytes as when compared to a non-treated human subject in need.

[0565] Surprisingly, the inventors found that the transient HNF4A expression leads to a prolonged therapeutic effect by triggering the endogenous HNF4A-HNF1A feedback loop or respectively increasing endogenous HNF4A or endogenous HNF1A levels. Accordingly, the terms “increased endogenous HNF4A or endogenous HNF1A levels” or “induction of the endogenous HNF1A-HNF4A transcriptional feedback loop” are related to the upregulation or induction of the endogenous “HNF1A-HNF4A feedback loop” upon which has been observed during the studies of the present invention, i.e. the ability of HNF4A to induce endogenous HNF4A and endogenous HNF1A (itself then inducing again endogenous HNF4A), thereby prolonging the therapeutic effect. Together with HNF4A, forms a critical transcriptional feedback loop, which mutually promote their own expression (PMID: 29175243). Therefore, in yet another aspect, the present invention relates to an isolated mRNA encoding an hepatocyte nuclear factor 1 alpha (HNF1A, HNF-1A, HNF1, IDDM20, LFB1, MODY3, TCF-1, TCF1, HNF1 homeobox A, HNF4A, HNF1alpha, OMIM: 142410), for use in treating, reversing, preventing, attenuating or inhibiting a liver disease, preferably selected from the group consisting of liver fibrosis, liver cirrhosis, hepatocellular carcinoma (HCC), non-alcoholic fatty liver disease (NAFLD), non-alcoholic steatohepatitis (NASH) and liver cancer. In a preferred embodiment, an mRNA, preferably codon-optimized and/or GC-optimized, encoding the 631 amino acid isoform of Uniprot isoform A: P20823-1, NCBI isoform 2: NP_000536.6, or respectively REFSEQ: accession NM_000545.8 is used (SEQ ID NO:5672), more preferably a sequence encoding HNF1A selected from the group consisting of SEQ ID NO:5673-5712, 5716-5718.

[0566] Advantageously, in comparison with AAV-related approaches, the mRNA-approach of the present invention leads to a transient transcription factor (HNF4A) expression, which is beneficial compared to a more constant AAV expression of a transcription factor.

[0567] The terms “hepatocyte metabolic activity” and “revived function of hepatocytes” are used to describe the actions of a hepatocyte. In this regard, the term “metabolic activity” or the “function” includes fundamental intermediary cellular metabolism that promotes and maintains hepatocyte viability as well as the normal synthesis of various plasma proteins, e.g., albumin, fibrinogen, various globulins and blood coagulation proteins, e.g., prothrombin and factor VII. Hepatocyte metabolic activity also includes the action on compounds (toxins, drugs) that are abnormally elevated in subjects with liver failure or contribute to symptoms of liver failure. These compounds are typically elevated in samples of blood, plasma, serum, or other body fluids. The metabolic activity of the hepatocytes therefore results in detoxification of compounds that are abnormally elevated in such subjects. Such metabolic activity should include the conversion of ammonia into urea, and preferably also the metabolism of drugs or endogenously produced toxic compounds by one or more enzymes from the cytochrome P450 family of enzymes present in the hepatocytes. Hepatocyte metabolic activity includes the elimination of aromatic amino acids, the conjugation of bilirubin, glucose metabolism, and heme metabolism.

[0568] The term “function and fitness of hepatocytes” is related to the property of hepatocytes, hepatocytes self, replicate, which potentially contributes to the effect of HNF4A over- or respectively reexpression.

[0569] In other aspects and embodiments of the invention, any pharmaceutical composition which (i) increases HNF1A levels or which (ii) increases serum paraoxonase and arylesterase 1 (PON1) expression or activity is comprised within the scope of the present application. Preferably, the HNF1A sequences as disclosed in Table A (preferred mRNA sequences and constructs of the invention), will be sufficient for a use in treating, preventing, attenuating or inhibiting a liver disease, preferably selected from the group consisting of liver fibrosis, liver cirrhosis, hepatocellular carcinoma (HCC), non-alcoholic fatty liver disease (NAFLD), non-alcoholic steatohepatitis (NASH) and liver cancer.

### Antagonists of RNA Sensing Pattern Recognition Receptors:

[0570] In preferred embodiments, in particular in embodiments where the nucleic acid of the composition is an RNA, the pharmaceutical composition may comprise at least one antagonist of at least one RNA sensing pattern recognition receptor.

[0571] In preferred embodiments in that context, the pharmaceutical composition comprises at least one antagonist of at least one RNA sensing pattern recognition receptor selected from a Toll-like receptor, preferably a TLR7 antagonist and/or a TLR8 antagonist.

[0572] Suitable antagonist of at least one RNA sensing pattern recognition receptor are disclosed in published PCT patent application WO2021028439, the full disclosure herewith incorporated by reference. In particular, the disclosure relating to suitable antagonist of at least one RNA sensing pattern recognition receptors as defined in any one of the claims 1 to 94 of WO2021028439 are incorporated by reference.

[0573] In preferred embodiments, the at least one antagonist of at least one RNA sensing pattern recognition receptor is a single stranded oligonucleotide that comprises or consists of a nucleic acid sequence being identical or at least 90%, 91%, 92%, 93%, 94%, 95%, 96%, 97%, 98%, 99%, or 100% identical to a nucleic acid sequence selected from the group consisting of SEQ ID NO:85-212 of WO2021028439, or fragments of any of these sequences. A particularly preferred antagonist in that context is 5′-GAG CGmG CCA-3′ (SEQ ID NO:85 of WO2021028439), or a fragment or variant thereof.

[0574] In preferred embodiments, the molar ratio of the at least one antagonist of at least one RNA sensing pattern recognition receptor to the at least one RNA suitably ranges from about 20:1 to about 80:1.

[0575] In preferred embodiments, the weight to weight ratio of the at least one antagonist of at least one RNA sensing pattern recognition receptor to the at least one RNA suitably ranges from about 1:2 to about 1:10.

[0576] In embodiments, the at least one antagonist of at least one RNA sensing pattern recognition receptor and the at least one RNA encoding are separately formulated in the lipid-based carriers as defined herein or co-formulated in the lipid-based carriers as defined herein.

### Routes of Administration

[0577] In a further embodiment, the method of the invention relates to the mRNA of the invention, or the LNP of the invention, or the pharmaceutical composition of the invention or the kit or kit of parts of the invention, being administered to the subject by subcutaneous, intramuscular or intravenous administration, preferably intravenous administration.

[0578] The choice of a pharmaceutically acceptable carrier is determined, in principle, by the manner, in which the pharmaceutical composition according to the invention is administered. The pharmaceutical composition of the invention can be administered, for example, systemically or locally. Routes for systemic administration in general include, for example, transdermal, oral, parenteral routes, including subcutaneous, intravenous, intramuscular, intraarterial, intradermal and intraperitoneal injections and/or intranasal administration routes.

[0579] Routes for local administration in general include, for example, topical administration routes but also intradermal, transdermal, subcutaneous, or intramuscular injections or intralesional, intracranial, intrapulmonal, intracardial, intratumoral and sublingual injections. Administration to the respiratory system can be performed by spray administration or inhalation may in particular be performed by aerosol administration to the lungs, bronchi, bronchioli, alveoli, or paranasal sinuses.

[0580] In further preferred embodiments, the route of administration is selected from the group consisting of extravascular administration to a subject, such as by extravascular injection, infusion or implantation; topical administration to the skin or a mucosa; inhalation such as to deliver the pharmaceutical composition to the respiratory system; or by transdermal or percutaneous administration. In even further preferred embodiments, the pharmaceutical composition of the invention can be administered via local or locoregional injection, infusion or implantation, in particular intradermal, subcutaneous, intramuscular, intracameral, subconjunctival, suprachoroidal injection, subretinal, subtenon, retrobulbar, topical, posterior juxtascleral administration, or intrapulmonal inhalation, interstitial, locoregional, intravitreal, intratumoral, intralymphatic, intranodal, intra-articular, intrasynovial, periarticular, intraperitoneal, intra-abdominal, intracardial, intralesional, intrapericardial, intraventricular, intrapleural, perineural, intrathoracic, epidural, intradural, peridural, intrathecal, intramedullary, intracerebral, intracavernous, intracorporus cavernosum, intraprostatic, intratesticular, intracartilaginous, intraosseous, intradiscal, intraspinal, intracaudal, intrabursal, intragingival, intraovarian, intrauterine, periocular, periodontal, retrobulbar, subarachnoid, subconjunctival or suprachoroidal injection, infusion or implantation.

[0581] Preferably, compositions according to the present invention may be administered by an intradermal, subcutaneous, intramuscular or intravenous route, preferably by injection, which may be needle-free and/or needle injection. Compositions according to the present invention are therefore preferably formulated in liquid or solid form. The suitable amount of the composition according to the invention to be administered can be determined by routine experiments, e.g. by using animal models. Such models include, without implying any limitation, rabbit, sheep, mouse, rat, dog and non-human primate models.

[0582] Preferred unit dose forms for injection include sterile solutions of water, physiological saline or mixtures thereof. The pH of such solutions should be adjusted to a physiologically tolerable pH, such as about 7.4. Suitable carriers for injection include hydrogels, devices for controlled or delayed release, polylactic acid and collagen matrices. Suitable pharmaceutically acceptable carriers for topical application include those which are suitable for use in lotions, creams, gels and the like. If the inventive composition is to be administered perorally, tablets, capsules and the like are the preferred unit dose form. The pharmaceutically acceptable carriers for the preparation of unit dose forms which can be used for oral administration are well known in the prior art. The choice thereof will depend on secondary considerations such as taste, costs and storability, which are not critical for the purposes of the present invention, and can be made without difficulty by a person skilled in the art.

miRNA Binding Sites

[0583] In further preferred embodiments, the mRNA comprises a 5′- or 3′-untranslated region (UTR) comprising at least one microRNA-binding site, preferably not being a microRNA-122 (miR-122) binding site, more preferably being miR-16, miR-21, miR-24, miR-27, miR-30c, miR-132, miR-133, miR-149, miR-192, miR-194, miR-204, miR-206, miR-208, or miR-223, most preferably being miRNA-148a, miRNA-101, miRNA-192 or miRNA-194, miR-126, miR-142-3p, or miR-142-5p.

[0584] In other preferred embodiments, the nucleic acid sequences of the invention comprise at least one miRNA binding site, which is substantially complementary to miRNA sequences selected from at least one or more of the group of Table I consisting of miRNA-148a, miRNA-101, miRNA-192 or miRNA-194. In further embodiments wherein a preferred expression in immune cells has to be avoided such as for protein replacement therapy the miRNA binding site sequence according to the invention preferably comprises at least one miRNA-148a, miRNA-101, and/or optionally a miRNA-192 binding site (depending on the target tissue), preferably at least one miRNA-148a binding site.

TABLE I
miRNA binding sites

| Tissue | Implicated miRNA | Expression profile |
|---|---|---|
| Immune cells | miRNA-148a | Expressed in immune cells |
| Endothelial cells, | miRNA-101 | Expresssed in endothelial cells, |
| epithelial cells | | epithelial cells and adipocytes |
| and adipocytes | | |
| Kidney | miRNA-192 | Kidney-specific expression |
| Kidney | miRNA-194 | Kidney-specific expression |

[0585] In another embodiment, treating or preventing the liver disease or liver disorder involves at least a single administration of the mRNA, the LNP, the pharmaceutical composition or the kit or kit of parts. It is clear that still further embodiments are possible, i.e. in yet another embodiment, treating or preventing the liver disease or liver disorder involves administration of a DNA encoding an engineered HNF4A protein variant or administration of the engineered HNF4A protein variant itself. A further embodiment is the use of circular RNA encoding the WT HNF4A protein or the engineered HNF4A protein variant(s) for treating or preventing the liver disease or liver disorder.

[0586] In other embodiments, the mRNA, the LNP, the pharmaceutical composition or the kit or kit of parts of the invention are the being administered in the method of the invention
[0587] (a) once, preferably more than once, more preferably wherein administration is repeated for a period of at least 1 month, at least 2 months, at least 3 months, at least 4 months, at least 5 months, at least 6 months, at least one year, or lifelong; or
[0588] (b) about once a day, about once a week, about twice a week, about three times a week, about four times a week, about six or seven times a week, about once every two weeks, about once every three weeks, about once a month, about twice a month, about three times a month, or about four times a month.

[0589] In a next aspect, the present invention relates to an isolated mRNA of the invention, the LNP of the invention or the pharmaceutical composition of the invention, or the kit or kit of parts of the invention, for use as a medicament.

[0590] In yet another aspect, the present invention relates to an engineered HNF4A protein variant, comprising one or more amino acid exchange(s), leading to an increased HNF4A transcriptional activity, DNA binding capacity, stability, longer-lasting HNF4A half-life and/or therapeutic effect as compared to the unmodified human wild type HNF4A protein according to SEQ ID NO:100, preferably an engineered HNF4A comprising an amino acid sequence having at least 80%, 81%, 82%, 83%, 84%, 85%, 86%, 87%, 88%, 89%, 90%, 91%, 92%, 93%, 94%, 95%, 96%, 97%, 98%, 99%, or 100% sequence identity to any one of SEQ ID NO:101-246, preferably an engineered HNF4A comprising (i) a S87A mutation, (ii) a S461E mutation, (iii) a S87A and a S461E mutation, (iv) S87A K106R K108R K126R K127R, preferably SEQ ID NO:138, (v) S87A K106R K108R K126R K127R S142A S143A S148A T166A S167A S313A S378A T429A T432A S436A K458R, preferably SEQ ID NO:186 or (vi) S87A K106R K108R K126R K127R S142A S143A S148A T166A S167A S313A S378A T429A T432A S436A K458R S461E mutations, preferably SEQ ID NO:140.

[0591] In yet a further aspect, the present invention relates to the engineered HNF4A protein variant of the invention, for use as a medicament.

[0592] According to one specific aspect, the present invention is directed to the first medical use of the mRNA according to the invention, of the pharmaceutical composition or of the kit or kit of parts comprising the mRNA according to the invention or a plurality of inventive RNAs as defined herein as a medicament, particularly in gene therapy, preferably for the treatment or prophylaxis of a liver disease or disorder as defined herein.

[0593] According to another aspect, the present invention is directed to the second medical use of the mRNA according to the invention, of the pharmaceutical composition, or of the kit or kit of parts comprising the mRNA according to the invention or a plurality of inventive RNAs as defined herein, for the treatment or prophylaxis of a liver disease or disorder as defined herein, preferably to the use of the mRNA as defined herein, of the pharmaceutical composition, or the kit or kit of parts comprising the mRNA according to the invention as defined herein, for the preparation of a medicament for the prophylaxis, treatment and/or amelioration of a liver disease or disorder as defined herein. Preferably, the pharmaceutical composition is used on or to be administered to a patient in need thereof for this purpose.

[0594] According to a further aspect, the mRNA according to the invention or the pharmaceutical composition comprising the mRNA according to the invention is used in the manufacture of a medicament, wherein the medicament is preferably for treatment or prophylaxis of a liver disease or disorder as defined herein.

[0595] In yet a further aspect, the present invention relates to an isolated mRNA comprising an open reading frame (ORF) encoding an engineered HNF4A, comprising one or more amino acid exchange(s), leading to an increased HNF4A transcriptional activity, DNA binding capacity, stability, longer-lasting HNF4A half-life and/or therapeutic effect as compared to the unmodified human wild type HNF4A protein according to SEQ ID NO:100, preferably an engineered HNF4A comprising an amino acid sequence having at least 80%, 81%, 82%, 83%, 84%, 85%, 86%, 87%, 88%, 89%, 90%, 91%, 92%, 93%, 94%, 95%, 96%, 97%, 98%, 99%, or 100% sequence identity to any one of SEQ ID NO:101-246, preferably an engineered HNF4A comprising (i) a S87A mutation, (ii) a S461E mutation, (iii) a S87A and a S461E mutation, (iv) S87A K106R K108R K126R K127R, preferably SEQ ID NO:138, (v) S87A K106R K108R K126R K127R S142A S143A S148A T166A S167A S313A S378A T429A T432A S436A K458R, preferably SEQ ID NO:186 or (vi) S87A K106R K108R K126R K127R S142A S143A S148A T166A S167A S313A S378A T429A T432A S436A K458R S461E mutations, preferably SEQ ID NO:140.

[0596] In a further aspect, the present invention relates to an isolated mRNA having at least 80%, 81%, 82%, 83%, 84%, 85%, 86%, 87%, 88%, 89%, 90%, 91%, 92%, 93%, 94%, 95%, 96%, 97%, 98%, 99%, or 100% sequence identity to any single element from the group consisting of SEQ ID NO:249-297, 692-740, 1135-1183, 298-346, 741-789, 1184-1232, 347-395, 790-838, 1233-1281, 396-444, 839-887, 1282-1330, 445-493, 888-936, 1331-1379, 494-542, 937-985, 1380-1428, 543-591, 986-1034, 1429-1477, 592-640, 1035-1083, 1478-1526, 641-689, 1084-1132, 1527-1575, 1576, 1577, 2019, 2020, 2462, 2463, 1578-1626, 2021-2069, 2464-2512, 1627-1675, 2070-2118, 2513-2561, 1676-1724, 2119-2167, 2562-2610, 1725-1773, 2168-2216, 2611-2659, 1774-1822, 2217-2265, 2660-2708, 1823-1871, 2266-2314, 2709-2757, 1872-1920, 2315-2363, 2758-2806, 1921-1969, 2364-2412, 2807-2855, 1970-2018, 2413-2461, 2856-2904, 2905, 2906, 3348, 3349, 3791, 3792, 2907-2955, 3350-3398, 3793-3841, 2956-3004, 3399-3447, 3842-3890, 3005-3053, 3448-3496, 3891-3939, 3054-3102, 3497-3545, 3940-3988, 3103-3151, 3546-3594, 3989-4037, 3152-3200, 3595-3643, 4038-4086, 3201-3249, 3644-3692, 4087-4135, 3250-3298, 3693-3741, 4136-4184, 3299-3347, 3742-3790, 4185-4233, 4234, 4235, 4677, 4678, 5120, 5121, 4236-4284, 4679-4727, 5122-5170, 4285-4333, 4728-4776, 5171-5219, 4334-4382, 4777-4825, 5220-5268, 4383-4431, 4826-4874, 5269-5317, 4432-4480, 4875-4923, 5318-5366, 4481-4529, 4924-4972, 5367-5415, 4530-4578, 4973-5021, 5416-5464, 4579-4627, 5022-5070, 5465-5513, 4628-4676, 5071-5119, 5514-5562, and 5719-5736 [if only engineered sequences are meant to appear in this list of sequences, sequences related to WT HNF4A are herewith excluded from the aforementioned list].

[0597] In yet a further aspect, the present invention relates to an isolated mRNA of the invention, LNP of the invention, composition of the invention, or kit or kit of parts of the invention, for use in treating, reversing, preventing, attenuating or inhibiting a liver disease, preferably selected from the group consisting of liver fibrosis, liver cirrhosis, hepatocellular carcinoma (HCC), non-alcoholic fatty liver disease (NAFLD), non-alcoholic steatohepatitis (NASH) and liver cancer in a human subject in need, comprising administering to a human subject in need the wherein the administration results in treatment, prevention, attenuation, inhibition, or prophylaxis of the liver fibrosis, liver cirrhosis, hepatocellular carcinoma (HCC), non-alcoholic fatty liver disease (NAFLD), non-alcoholic steatohepatitis (NASH) or liver cancer.

[0598] In a further aspect, the present invention relates to an isolated nucleic acid construct comprising a nucleic acid sequence encoding the mRNA of the invention, preferably an isolated nucleic acid construct having at least 80%, 81%, 82%, 83%, 84%, 85%, 86%, 87%, 88%, 89%, 90%, 91%, 92%, 93%, 94%, 95%, 96%, 97%, 98%, 99%, or 100% sequence identity to any one of the sequences selected from the group consisting of SEQ ID NO:1576-5615, 5683-5712, and 5716-5736 or to any one of the sequences as disclosed in the Table C2 “Constructs of the invention”.

[0599] In a further aspect, the present invention relates an engineered HNF4A protein variant, comprising one or more amino acid exchange(s), leading to an increased HNF4A transcriptional activity, DNA binding capacity, stability, longer-lasting HNF4A half-life and/or therapeutic effect as compared to the unmodified human wild type HNF4A protein according to SEQ ID NO:100, preferably an engineered HNF4A comprising an amino acid sequence having at least 80%, 81%, 82%, 83%, 84%, 85%, 86%, 87%, 88%, 89%, 90%, 91%, 92%, 93%, 94%, 95%, 96%, 97%, 98%, 99%, or 100% sequence identity to any one of SEQ ID NO:101-246, preferably to SEQ ID NO:138 or SEQ ID NO:140, preferably an engineered HNF4A comprising (i) a S87A mutation, (ii) a S461E mutation, (iii) a S87A and a S461E mutation, (iv) S87A K106R K108R K126R K127R, preferably SEQ ID NO:138, (v) S87A K106R K108R K126R K127R S142A S143A S148A T166A S167A S313A S378A T429A T432A S436A K458R, preferably SEQ ID NO:186 or (vi) S87A K106R K108R K126R K127R S142A S143A S148A T166A S167A S313A S378A T429A T432A S436A K458R S461E mutations, preferably SEQ ID NO:140.

[0600] In a further aspect, the present invention relates an engineered HNF4A protein variant for use as a medicament.

[0601] In even a further aspect, the present invention relates an engineered hepatocyte nuclear factor 4 alpha (HNF4A) protein variant, comprising one or more amino acid substitution, deletion, and/or insertion mutation leading to an increased HNF4A transcriptional activity, DNA binding capacity, stability, longer-lasting HNF4A half-life and/or therapeutic effect as compared to the unmodified human wild type HNF4A protein according to SEQ ID NO:100, preferably an engineered HNF4A comprising (i) a S87A mutation, (ii) a S461E mutation, (iii) a S87A and a S461E mutation, (iv) S87A K106R K108R K126R K127R, preferably SEQ ID NO:138, (v) S87A K106R K108R K126R K127R S142A S143A S148A T166A S167A S313A S378A T429A T432A S436A K458R, preferably SEQ ID NO:186 or (vi) S87A K106R K108R K126R K127R S142A S143A S148A T166A S167A S313A S378A T429A T432A S436A K458R S461E mutations, preferably SEQ ID NO:140.

[0602] In another embodiment, the present invention relates to the engineered hepatocyte nuclear factor 4 alpha (HNF4A) protein variant, wherein the engineered protein comprises an amino acid sequence having at least 80%, 81%, 82%, 83%, 84%, 85%, 86%, 87%, 88%, 89%, 90%, 91%, 92%, 93%, 94%, 95%, 96%, 97%, 98%, 99%, or 100% sequence identity to any one of SEQ ID NO:101-246, preferably to SEQ ID NO:138 or SEQ ID NO:140, or a fragment or variant of said sequences having the biological activity of a HNF4A protein, preferably an engineered HNF4A comprising (i) a S87A mutation, (ii) a S461E mutation, (iii) a S87A and a S461E mutation, (iv) S87A K106R K108R K126R K127R, preferably SEQ ID NO:138, (v) S87A K106R K108R K126R K127R S142A S143A S148A T166A S167A S313A S378A T429A T432A S436A K458R, preferably SEQ ID NO:186 or (vi) S87A K106R K108R K126R K127R S142A S143A S148A T166A S167A S313A S378A T429A T432A S436A K458R S461E mutations, preferably SEQ ID NO:140.

[0603] In another aspect, the present invention relates to a fusion protein comprising the engineered HNF4A protein variant of the invention or an mRNA encoding a fusion protein comprising the engineered HNF4A protein variant of the invention.

[0604] In the context of the present invention, a “fusion protein” contains at least one additional, heterologous amino acid sequence in addition to the amino acid sequence of the polypeptide of the present invention (which has the activity of a hepatocyte nuclear factor 4 alpha (HNF4A) protein). Often, but not necessarily, these additional sequences will be located at the N- or C-terminal end of the polypeptide. It may e.g. be convenient to initially express the polypeptide as a fusion protein from which the additional amino acid residues can be removed, e.g. by a proteinase capable of specifically trimming the polypeptide of the present invention.

[0605] In yet another aspect, the present invention relates to a vector comprising any one of the isolated mRNAs of the invention or to a host cell carrying said vector.

[0606] While the various aspects of this invention are susceptible of embodiment in many different forms, this specification and the accompanying drawings disclose only one specific form of each aspect of the invention as an example of the invention. Further, each aspect of the invention is not intended to be limited to the particular embodiment so described, however. The scope of the invention is pointed out in the appended claims. The disclosure in the present application makes available each and every combination of embodiments disclosed herein. Preferred or optional features of each aspect or embodiment of the invention are as for each of the other aspects or embodiments mutatis mutandis.

### Items

[0607] The present invention may further be characterized by the following items (for clarification purposes, back-references to e.g., item 1 comprises a back reference to any item 1 i.e. also sub-items designated “Item 1A”, “Item 1B”, “Item 1C” etc. or “Item 1.1”, “Item 1.2”, “Item 1.3” etc.):

[0608] Item 1. An isolated mRNA encoding
[0609] (i) an engineered hepatocyte nuclear factor 4 alpha (HNF4A) protein variant comprising one or more amino acid substitution, deletion, and/or insertion mutation leading to an increased HNF4A transcriptional activity or respectively DNA binding capacity, stability, longer-lasting HNF4A half-life and/or therapeutic effect as compared to the unmodified human wild type HNF4A protein according to SEQ ID NO:100, preferably an engineered HNF4A comprising a S87A mutation and/or a S461E mutation, more preferably an engineered HNF4A comprising a S461E mutation; or
[0610] (ii) wild type hepatocyte nuclear factor 4 alpha (HNF4A);
[0611] for use in treating, reversing, preventing, attenuating or inhibiting a liver disease, preferably selected from the group consisting of liver fibrosis, liver cirrhosis, hepatocellular carcinoma (HCC), non-alcoholic fatty liver disease (NAFLD), non-alcoholic steatohepatitis (NASH) and liver cancer, more preferably treating, preventing, attenuating or inhibiting liver fibrosis or liver cirrhosis.

[0612] Item 1B. An isolated mRNA encoding
[0613] (i) an engineered hepatocyte nuclear factor 4 alpha (HNF4A) protein variant comprising one or more amino acid substitution, deletion, and/or insertion mutation leading to an increased HNF4A transcriptional activity, DNA binding capacity, stability, longer-lasting HNF4A half-life and/or therapeutic effect as compared to the unmodified human wild type HNF4A protein according to SEQ ID NO:100, preferably an engineered HNF4A comprising a S87A mutation and/or a S461E mutation, more preferably an engineered HNF4A comprising a S461E mutation; or
[0614] (ii) wild type hepatocyte nuclear factor 4 alpha (HNF4A);
[0615] for use in treating, reversing, preventing, attenuating or inhibiting a liver disease, preferably selected from the group consisting of liver fibrosis, liver cirrhosis, hepatocellular carcinoma (HCC), non-alcoholic fatty liver disease (NAFLD), non-alcoholic steatohepatitis (NASH) and liver cancer, more preferably treating, preventing, attenuating or inhibiting liver fibrosis or liver cirrhosis.

[0616] Item 2.1 The mRNA of item 1(i) for use according to item 1, wherein said mRNA comprises an open reading frame (ORF) encoding an engineered HNF4A comprising one or more amino acid substitution, deletion, and/or insertion mutation leading to an increased HNF4A transcriptional activity, DNA binding capacity, stability, longer-lasting HNF4A half-life and/or therapeutic effect as compared to the unmodified human wild type HNF4A protein according to SEQ ID NO:100, preferably an engineered HNF4A comprising an amino acid sequence having at least 80%, 81%, 82%, 83%, 84%, 85%, 86%, 87%, 88%, 89%, 90%, 91%, 92%, 93%, 94%, 95%, 96%, 97%, 98%, 99%, or 100% sequence identity to any one of SEQ ID NO:101-246, more preferably an engineered HNF4A comprising (i) a S87A mutation, (ii) a S461E mutation, (iii) a S87A and a S461E mutation, (iv) S87A K106R K108R K126R K127R, preferably SEQ ID NO:138, (v) S87A K106R K108R K126R K127R S142A S143A S148A T166A S167A S313A S378A T429A T432A S436A K458R, preferably SEQ ID NO:186 or (vi) S87A K106R K108R K126R K127R S142A S143A S148A T166A S167A S313A S378A T429A T432A S436A K458R S461E mutations, preferably SEQ ID NO:140, or a fragment or variant of said sequences having the biological activity of a HNF4A protein.

[0617] Item 2.2 The mRNA of item 1(i) for use according to item 1, wherein said mRNA comprises an open reading frame (ORF) encoding an engineered HNF4A comprising one or more amino acid substitution, deletion, and/or insertion mutation leading to an increased HNF4A transcriptional activity or respectively DNA binding capacity, stability, longer-lasting HNF4A half-life and/or therapeutic effect as compared to the unmodified human wild type HNF4A protein according to SEQ ID NO:100,
[0618] preferably an engineered HNF4A comprising (i) a S87A mutation, (ii) a S461E mutation, (iii) a S87A and a S461E mutation, (iv) S87A K106R K108R K126R K127R, preferably SEQ ID NO:138, (v) S87A K106R K108R K126R K127R S142A S143A S148A T166A S167A S313A S378A T429A T432A S436A K458R, preferably SEQ ID NO:186 or (vi) S87A K106R K108R K126R K127R S142A S143A S148A T166A S167A S313A S378A T429A T432A S436A K458R S461E mutations, preferably SEQ ID NO:140,
[0619] more preferably an engineered HNF4A comprising an amino acid sequence having at least 80%, 81%, 82%, 83%, 84%, 85%, 86%, 87%, 88%, 89%, 90%, 91%, 92%, 93%, 94%, 95%, 96%, 97%, 98%, 99%, or 100% sequence identity to any one of SEQ ID NO:101-246, most preferably to SEQ ID NO:140; or a fragment or variant of said sequences having the biological activity of a HNF4A protein.

[0620] Item 2.3 The mRNA of item 1(i) for use according to item 1, wherein said mRNA comprises an open reading frame (ORF) encoding an engineered HNF4A comprising one or more amino acid substitution, deletion, and/or insertion mutation leading to an increased HNF4A transcriptional activity, DNA binding capacity, stability, longer-lasting HNF4A half-life and/or therapeutic effect as compared to the unmodified human wild type HNF4A protein according to SEQ ID NO:100,
[0621] preferably an engineered HNF4A comprising (i) a S87A mutation, (ii) a S461E mutation, (iii) a S87A and a S461E mutation, (iv) S87A K106R K108R K126R K127R, preferably SEQ ID NO:138, (v) S87A K106R K108R K126R K127R S142A S143A S148A T166A S167A S313A S378A T429A T432A S436A K458R, preferably SEQ ID NO:186 or (vi) S87A K106R K108R K126R K127R S142A S143A S148A T166A S167A S313A S378A T429A T432A S436A K458R S461E mutations, preferably SEQ ID NO:140,
[0622] more preferably an engineered HNF4A comprising an amino acid sequence having at least 80%, 81%, 82%, 83%, 84%, 85%, 86%, 87%, 88%, 89%, 90%, 91%, 92%, 93%, 94%, 95%, 96%, 97%, 98%, 99%, or 100% sequence identity to any one of SEQ ID NO:101-246, most preferably to SEQ ID NO:140 having the biological activity of a HNF4A protein;
[0623] or a fragment or variant of said sequences having the biological activity of a HNF4A protein.

[0624] Item 3. The mRNA according to any one of item 1 to item 2, wherein said mRNA preferably has at least 80%, 81%, 82%, 83%, 84%, 85%, 86%, 87%, 88%, 89%, 90%, 91%, 92%, 93%, 94%, 95%, 96%, 97%, 98%, 99%, or 100% sequence identity to any single SEQ ID NO-element of SEQ ID NO:250-297, 299-346, 348-395, 397-444, 446-493, 495-542, 544-591, 593-640, 642-689, 1579-1626, 1628-1675, 1677-1724, 1726-1773, 1775-1822, 1824-1871, 1873-1920, 1922-1969, 1971-2018, 2908-2955, 2957-3004, 3006-3053, 3055-3102, 3104-3151, 3153-3200, 3202-3249, 3251-3298, 3300-3347, 4237-4284, 4286-4333, 4335-4382, 4384-4431, 4433-4480, 4482-4529, 4531-4578, 4580-4627, 4629-4676, 5720, 5721, 5723, 5724, 5726, 5727, 5729, 5730, 5732, 5733, 5735, and 5736, or a fragment or variant of said sequences, wherein the encoded protein has the biological activity of a HNF4A protein.

[0625] Item 4. The mRNA according to any one of item 2 to item 3, wherein said engineered HNF4A comprises at least one substitution or substitution set at one or more positions selected from the group consisting of R2V, K5V, K179R, K180R, K234R, K300R, K307R, K309R, K447R, K470R, K458R, K106R, K108R, K126R, K127R, S313A, S313E, S142A, S143A, S142E, S143E, T166A, T166E, S148A, S148E, S183A, S183E, S461A, S461E, S167A, S167E, S378A, T429A, T432A, S436A, S378E, T429E, T432E, S436E, S87A, S87E, S95A, S99A, S138A, and T139A and/or combinations thereof, preferably an engineered HNF4A comprising (i) a S87A mutation, (ii) a S461E mutation, (iii) a S87A and a S461E mutation, (iv) S87A K106R K108R K126R K127R, preferably SEQ ID NO:138, (v) S87A K106R K108R K126R K127R S142A S143A S148A T166A S167A S313A S378A T429A T432A S436A K458R, preferably SEQ ID NO:186 or (vi) S87A K106R K108R K126R K127R S142A S143A S148A T166A S167A S313A S378A T429A T432A S436A K458R S461E mutations, preferably SEQ ID NO:140 and wherein the amino acid positions of said amino acid sequence are numbered with reference to the human wild-type HNF4A protein (SEQ ID NO:100).

[0626] Item 4B. The mRNA according to any one of item 2 to item 3, wherein said engineered HNF4A comprises at least one substitution or substitution set at one or more positions selected from the group consisting of R2V, K5V, K179R, K180R, K234R, K300R, K307R, K309R, K447R, K470R, K458R, K106R, K108R, K126R, K127R, S313A, S313E, S142A, S143A, S142E, S143E, T166A, T166E, S148A, S148E, S183A, S183E, S461A, S461E, S167A, S167E, S378A, T429A, T432A, S436A, S378E, T429E, T432E, S436E, S87A, S87E, S95A, S99A, S138A, and T139A and/or combinations thereof, preferably an engineered HNF4A comprising (i) a S87A mutation, (ii) a S461E mutation, (iii) a S87A and a S461E mutation, (iv) S87A K106R K108R K126R K127R, preferably SEQ ID NO:138, (v) S87A K106R K108R K126R K127R S142A S143A S148A T166A S167A S313A S378A T429A T432A S436A K458R, preferably SEQ ID NO:186 or (vi) S87A K106R K108R K126R K127R S142A S143A S148A T166A S167A S313A S378A T429A T432A S436A K458R S461E mutations, preferably SEQ ID NO:140 and wherein the amino acid positions of said amino acid sequence are numbered with reference to the human wild-type HNF4A protein (SEQ ID NO:100), more preferably an mRNA selected from the group consisting of SEQ ID NO:2947, SEQ ID NO:5721, SEQ ID NO:5724 and SEQ ID NO:5727.

[0627] Item 5. The mRNA of item 1(ii) or item 2 to item 4 or item 4B for use according to item 1, wherein said mRNA comprises an open reading frame (ORF) encoding an unmodified human wild type hepatocyte nuclear factor 4 alpha (HNF4A) according to SEQ ID NO:100, preferably wherein said mRNA has at least 80%, 81%, 82%, 83%, 84%, 85%, 86%, 87%, 88%, 89%, 90%, 91%, 92%, 93%, 94%, 95%, 96%, 97%, 98%, 99%, or 100% sequence identity to any one of SEQ ID NO:247, 248, 249, 298, 347, 396, 445, 494, 543, 592, 641, 1576, 1577, 1578, 1627, 1676, 1725, 1774, 1823, 1872, 1921, 1970, 2905, 2906, 2907, 2956, 3005, 3054, 3103, 3152, 3201, 3250, 3299, 4234, 4235, 4236, 4285, 4334, 4383, 4432, 4481, 4530, 4579, 4628, 5719, 5722, 5725, 5728, 5731, and 5734 or a fragment or variant of said sequences, wherein the encoded protein has the biological activity of a HNF4A protein, optionally wherein the mRNA further comprises an UTR combination selected from the group consisting of (i) a 5′-UTR derived from a mouse solute carrier family 7 (cationic amino acid transporter, y+ system) (SLC7A3) and a 3′-UTR derived from PSMB3; (ii) a 5′-UTR derived from mouse ribosomal protein L31 (RPL31) and a 3′-UTR derived from a human ribosomal protein S9 (RPS9); (iii) a 5′-UTR derived from ubiquilin 2 (Ubqln2) and a 3′-UTR derived from Guanine nucleotide-binding protein G(s) subunit alpha isoforms short (Gnas); and (iv) a 5′-UTR derived from a hydroxysteroid (17-beta) dehydrogenase 4 gene (HSD17B4) and a 3′-UTR derived from a proteasome subunit beta type-3 (PSMB3) UTR.

[0628] Item 6. The mRNA according to any one of item 1 to item 5, wherein the
[0629] (i) G/C content of the HNF4A coding sequence in said mRNA is increased compared to the coding sequence of the corresponding wild type HNF4A coding sequence of SEQ ID NO:247 or 248;
[0630] (ii) C content of the HNF4A coding sequence in said mRNA is increased compared to the coding sequence of the corresponding wild type HNF4A coding sequence of SEQ ID NO:247 or 248; and/or wherein
[0631] (iii) at least one codon of the HNF4A coding sequence in said mRNA is adapted to human codon usage, wherein the codon adaptation index (CAI) is preferably increased or maximised in the corresponding HNF4A coding sequence compared to the coding sequence of the corresponding wild type HNF4A coding sequence of SEQ ID NO:247 or 248.

[0632] Item 7. The mRNA according to any one of item 1 to item 6, wherein the mRNA comprises a 5′-cap structure, a poly(A) sequence comprising at least 70 A nucleotides, preferably about 100 A nucleotides, a poly(C) sequence, preferably comprising 10 to 200, 10 to 100, 20 to 70, 20 to 60 or 10 to 40 cytosine nucleotides, and/or at least one histone stem-loop, preferably, wherein the mRNA comprises a 3′-terminal A nucleotide.

[0633] Item 8. The mRNA according to any one of item 1 to item 7, wherein the mRNA comprises, preferably in 5′ to 3′ direction, the following elements:
[0634] a) a 5′-cap1 structure;
[0635] b) a 5′-UTR element comprising a nucleic acid sequence, preferably derived from a 5′-UTR of a HSD17B4 gene, comprising the nucleic acid sequence according to SEQ ID NO:1 or 2, or a homolog, a fragment or a variant thereof;
[0636] c) at least one coding sequence as defined in any one of item 1 to item 10;
[0637] d) a 3′-UTR element comprising a nucleic acid sequence, preferably derived from a 3′-UTR of a PSMB3 gene, comprising the nucleic acid sequence according to SEQ ID NO:33 or 34, or a homolog, a fragment or a variant thereof;
[0638] e) a poly(A) sequence comprising about 100 adenosine nucleotides, preferably, wherein the mRNA comprises a 3′-terminal A nucleotide;
[0639] f) an optional poly(C) tail, preferably comprising 10 to 40 cytosine nucleotides; and/or
[0640] g) an optional histone stem-loop, preferably comprising the nucleic acid sequence according to SEQ ID NO:63 or 64.

[0641] Item 9. The mRNA according to any one of item 1 to item 8, wherein the open reading frame does not comprise any chemically modified uracil or cytosine nucleotides.

[0642] Item 10. The mRNA according to any one of item 1 to item 8, wherein the mRNA is chemically modified, preferably wherein the mRNA comprises pseudouridine (psi-uridine), N1-methylpseudouridine (N1MPU), 2-aminoadenosine, 2-thiothymidine, inosine, pyrrolo-pyrimidine, 3-methyl adenosine, 5-methylcytidine, C-5 propynyl-cytidine, C-5 propynyl-uridine, 2-aminoadenosine, C5-bromouridine, C5-fluorouridine, C5-iodouridine, C5-propynyl-uridine, C5-propynyl-cytidine, C5-methylcytidine, 2-aminoadenosine, 7-deazaadenosme, 7-deazaguanosine, 8-oxoadenosine, 8-oxoguanosine, O(6)-methylguanine, and/or 2-thiocytidine, more preferably wherein all uridine bases of the mRNA are fully chemically modified, even more preferably wherein all uridine bases of the mRNA are pseudouridine or N1-methylpseudouridine (N1MPU) bases, most preferably wherein all uridine bases of the mRNA are N1-methylpseudouridine (N1MPU) bases.

[0643] Item 11. A lipid nanoparticle (LNP) comprising the mRNA according to any one of item 1 to item 10, wherein the LNP comprises an ionizable or cationic lipid, a phospholipid, a structural lipid, and a polymer conjugated lipid.

[0644] Item 12. The LNP according to item 11, wherein the lipids comprised in the LNP have a molar ratio of about 20-60% cationic or ionizable lipid, about 5-25% non-cationic lipid, about 25-55% sterol and about 0.5-15% polymer conjugated lipid.

[0645] Item 13. The LNP according to anyone of item 11 to item 12, wherein the LNP does not comprise polyethylene glycol (PEG) or a PEG-modified lipid.

[0646] Item 14. A pharmaceutical composition, comprising the mRNA according to any one of item 1 to item 10 or the LNP according to any one of item 11 to item 13.

[0647] Item 15. A kit, preferably kit of parts, comprising at least one mRNA according to any one of item 1 to item 10, the LNP according to any one of item 11 to item 13, or the pharmaceutical composition according to item 14, and optionally a liquid vehicle for solubilising and optionally technical instructions with information on the administration and dosage of the pharmaceutical composition.

[0648] Item 16. A method of treating, preventing, attenuating or inhibiting, preferably selected from the group consisting of liver fibrosis, liver cirrhosis, hepatocellular carcinoma (HCC), non-alcoholic fatty liver disease (NAFLD), non-alcoholic steatohepatitis (NASH) or liver cancer, comprising administering to a human subject in need the mRNA according to any one of item 1 to item 10, the LNP according to any one of item 11 to item 13, the pharmaceutical composition according to item 14, or the kit or kit of parts according to item 15, wherein the administration results in treatment, prevention, attenuation, inhibition, or prophylaxis of the disease.

[0649] Item 17. The method according to item 16, wherein administration of the mRNA to a human subject in need results in
[0650] (i) improved hepatocyte metabolic activity; and/or
[0651] (ii) revived function of hepatocytes; and/or
[0652] (iii) increased mRNA levels of hepatocyte markers such as albumin (ALB), alpha-1 antitrypsin (A1AT), transferrin (TF) and/or transthyretin (TTR) in the liver or hepatocytes; and/or
[0653] (iv) reduced expression of fibrogenic marker genes Col1a1, Col2a1 Ck19, Sox9, Epcam, and/or Acta2 in the liver or hepatocytes; and/or
[0654] (v) decreased levels of bilirubin, hydroxyproline content in hepatocytes in the liver or hepatocytes; and/or
[0655] (vi) reduced liver injury as measured by histology, desmin or Sirius red staining;
[0656] (vii) increased expression of transporters of drug metabolism in the liver or hepatocytes;
[0657] (viii) increased serum paraoxonase and arylesterase 1 (PON1) expression or activity;
[0658] (ix) increased endogenous HNF4A or endogenous HNF1A levels or induction of the endogenous HNF1A-HNF4A transcriptional feedback loop; and/or
[0659] (x) function and fitness of hepatocytes;
[0660] as when compared to a non-treated human subject in need.

[0661] Item 18. The method according to any one of item 16 to item 17, wherein the mRNA according to any one of item 1 to item 9, or the LNP according to any one of item 11 to item 13, or the pharmaceutical composition according to item 14 or the kit or kit of parts according to item 15 is administered to the subject by subcutaneous, intramuscular or intravenous administration, preferably intravenous administration.

[0662] Item 19. The method according to any one of item 16 to item 18, wherein the mRNA comprises a 5′- or 3′-untranslated region (UTR) comprising at least one microRNA-binding site, preferably not being a microRNA-122 (miR-122) binding site, more preferably being miR-16, miR-21, miR-24, miR-27, miR-30c, miR-132, miR-133, miR-149, miR-192, miR-194, miR-204, miR-206, miR-208, or miR-223, most preferably being miRNA-148a, miRNA-101, miRNA-192 or miRNA-194, miR-126, miR-142-3p, or miR-142-5p.

[0663] Item 20. The method according to any one of item 16 to item 19, wherein the method of treating the liver disease or liver disorder, preferably liver fibrosis, liver cirrhosis, hepatocellular carcinoma (HCC), non-alcoholic fatty liver disease (NAFLD), non-alcoholic steatohepatitis (NASH) or liver cancer, involves a single administration of the mRNA, the LNP, the pharmaceutical composition or the kit or kit of parts.

[0664] Item 21. The method according to any one of item 16 to item 20, wherein the mRNA, the LNP, the pharmaceutical composition or the kit or kit of parts is administered
[0665] (a) once, preferably more than once, more preferably wherein administration is repeated for a period of at least 1 month, at least 2 months, at least 3 months, at least 4 months, at least 5 months, at least 6 months, at least one year, or lifelong; or
[0666] (b) about once a day, about once a week, about twice a week, about three times a week, about four times a week, about six or seven times a week, about once every two weeks, about once every three weeks, about once a month, about twice a month, about three times a month, or about four times a month.

[0667] Item 22. An isolated mRNA according to any one of item 1 to item 10, or LNP according to any one of item 11 to item 13 or pharmaceutical composition according to item 14 or kit or kit of parts according to item 15, for use as a medicament.

[0668] Item 23. An engineered HNF4A protein variant, comprising one or more amino acid exchange(s), leading to an increased HNF4A transcriptional activity or respectively DNA binding capacity, stability, longer-lasting HNF4A half-life and/or therapeutic effect as compared to the unmodified human wild type HNF4A protein according to SEQ ID NO:100, preferably an engineered HNF4A protein variant comprising an amino acid sequence having at least 80%, 81%, 82%, 83%, 84%, 85%, 86%, 87%, 88%, 89%, 90%, 91%, 92%, 93%, 94%, 95%, 96%, 97%, 98%, 99%, or 100% sequence identity to any one of SEQ ID NO:101-246, preferably to SEQ ID NO:138 or SEQ ID NO:140, more preferably an engineered HNF4A comprising (i) a S87A mutation, (ii) a S461E mutation, (iii) a S87A and a S461E mutation, (iv) S87A K106R K108R K126R K127R, preferably SEQ ID NO:138, (v) S87A K106R K108R K126R K127R S142A S143A S148A T166A S167A S313A S378A T429A T432A S436A K458R, preferably SEQ ID NO:186 or (vi) S87A K106R K108R K126R K127R S142A S143A S148A T166A S167A S313A S378A T429A T432A S436A K458R S461E mutations, preferably SEQ ID NO:140.

[0669] Item 23B. An engineered HNF4A protein variant, comprising one or more amino acid exchange(s), leading to an increased HNF4A transcriptional activity, DNA binding capacity, stability, longer-lasting HNF4A half-life and/or therapeutic effect as compared to the unmodified human wild type HNF4A protein according to SEQ ID NO:100, preferably an engineered HNF4A protein variant comprising an amino acid sequence having at least 80%, 81%, 82%, 83%, 84%, 85%, 86%, 87%, 88%, 89%, 90%, 91%, 92%, 93%, 94%, 95%, 96%, 97%, 98%, 99%, or 100% sequence identity to any one of SEQ ID NO:101-246, preferably to SEQ ID NO:138 or SEQ ID NO:140, more preferably an engineered HNF4A comprising (i) a S87A mutation, (ii) a S461E mutation, (iii) a S87A and a S461E mutation, (iv) S87A K106R K108R K126R K127R, preferably SEQ ID NO:138, (v) S87A K106R K108R K126R K127R S142A S143A S148A T166A S167A S313A S378A T429A T432A S436A K458R, preferably SEQ ID NO:186 or (vi) S87A K106R K108R K126R K127R S142A S143A S148A T166A S167A S313A S378A T429A T432A S436A K458R S461E mutations, preferably SEQ ID NO:140.

[0670] Item 24. The engineered HNF4A protein variant according to item 23, for use as a medicament.

[0671] Item 25. An isolated mRNA comprising an open reading frame (ORF) encoding an engineered HNF4A protein variant, comprising one or more amino acid exchange(s), leading to an increased HNF4A transcriptional activity, DNA binding capacity, stability, longer-lasting HNF4A half-life and/or therapeutic effect as compared to the unmodified human wild type HNF4A protein according to SEQ ID NO:100, preferably an engineered HNF4A protein variant comprising an amino acid sequence having at least 80%, 81%, 82%, 83%, 84%, 85%, 86%, 87%, 88%, 89%, 90%, 91%, 92%, 93%, 94%, 95%, 96%, 97%, 98%, 99%, or 100% sequence identity to any one of SEQ ID NO:101-246, preferably to SEQ ID NO:138, SEQ ID NO:186 or SEQ ID NO:140, more preferably an engineered HNF4A comprising (i) a S87A mutation, (ii) a S461E mutation, (iii) a S87A and a S461E mutation, (iv) S87A K106R K108R K126R K127R, preferably SEQ ID NO:138, (v) S87A K106R K108R K126R K127R S142A S143A S148A T166A S167A S313A S378A T429A T432A S436A K458R, preferably SEQ ID NO:186 or (vi) S87A K106R K108R K126R K127R S142A S143A S148A T166A S167A S313A S378A T429A T432A S436A K458R S461E mutations, preferably SEQ ID NO:140.

[0672] Item 26. An isolated mRNA having at least 80%, 81%, 82%, 83%, 84%, 85%, 86%, 87%, 88%, 89%, 90%, 91%, 92%, 93%, 94%, 95%, 96%, 97%, 98%, 99%, or 100% sequence identity to any one of SEQ ID NO:250, 299, 348, 397, 446, 495, 544, 593, 642, 1579, 1628, 1677, 1726, 1775, 1824, 1873, 1922, 1971, 2908, 2957, 3006, 3055, 3104, 3153, 3202, 3251, 3300, 4237, 4286, 4335, 4384, 4433, 4482, 4531, 4580, 4629, 251, 300, 349, 398, 447, 496, 545, 594, 643, 1580, 1629, 1678, 1727, 1776, 1825, 1874, 1923, 1972, 2909, 2958, 3007, 3056, 3105, 3154, 3203, 3252, 3301, 4238, 4287, 4336, 4385, 4434, 4483, 4532, 4581, 4630, 252, 301, 350, 399, 448, 497, 546, 595, 644, 1581, 1630, 1679, 1728, 1777, 1826, 1875, 1924, 1973, 2910, 2959, 3008, 3057, 3106, 3155, 3204, 3253, 3302, 4239, 4288, 4337, 4386, 4435, 4484, 4533, 4582, 4631, 253, 302, 351, 400, 449, 498, 547, 596, 645, 1582, 1631, 1680, 1729, 1778, 1827, 1876, 1925, 1974, 2911, 2960, 3009, 3058, 3107, 3156, 3205, 3254, 3303, 4240, 4289, 4338, 4387, 4436, 4485, 4534, 4583, 4632, 254, 303, 352, 401, 450, 499, 548, 597, 646, 1583, 1632, 1681, 1730, 1779, 1828, 1877, 1926, 1975, 2912, 2961, 3010, 3059, 3108, 3157, 3206, 3255, 3304, 4241, 4290, 4339, 4388, 4437, 4486, 4535, 4584, 4633, 255, 304, 353, 402, 451, 500, 549, 598, 647, 1584, 1633, 1682, 1731, 1780, 1829, 1878, 1927, 1976, 2913, 2962, 3011, 3060, 3109, 3158, 3207, 3256, 3305, 4242, 4291, 4340, 4389, 4438, 4487, 4536, 4585, 4634, 256, 305, 354, 403, 452, 501, 550, 599, 648, 1585, 1634, 1683, 1732, 1781, 1830, 1879, 1928, 1977, 2914, 2963, 3012, 3061, 3110, 3159, 3208, 3257, 3306, 4243, 4292, 4341, 4390, 4439, 4488, 4537, 4586, 4635, 257, 306, 355, 404, 453, 502, 551, 600, 649, 1586, 1635, 1684, 1733, 1782, 1831, 1880, 1929, 1978, 2915, 2964, 3013, 3062, 3111, 3160, 3209, 3258, 3307, 4244, 4293, 4342, 4391, 4440, 4489, 4538, 4587, 4636, 258, 307, 356, 405, 454, 503, 552, 601, 650, 1587, 1636, 1685, 1734, 1783, 1832, 1881, 1930, 1979, 2916, 2965, 3014, 3063, 3112, 3161, 3210, 3259, 3308, 4245, 4294, 4343, 4392, 4441, 4490, 4539, 4588, 4637, 259, 308, 357, 406, 455, 504, 553, 602, 651, 1588, 1637, 1686, 1735, 1784, 1833, 1882, 1931, 1980, 2917, 2966, 3015, 3064, 3113, 3162, 3211, 3260, 3309, 4246, 4295, 4344, 4393, 4442, 4491, 4540, 4589, 4638, 260, 309, 358, 407, 456, 505, 554, 603, 652, 1589, 1638, 1687, 1736, 1785, 1834, 1883, 1932, 1981, 2918, 2967, 3016, 3065, 3114, 3163, 3212, 3261, 3310, 4247, 4296, 4345, 4394, 4443, 4492, 4541, 4590, 4639, 261, 310, 359, 408, 457, 506, 555, 604, 653, 1590, 1639, 1688, 1737, 1786, 1835, 1884, 1933, 1982, 2919, 2968, 3017, 3066, 3115, 3164, 3213, 3262, 3311, 4248, 4297, 4346, 4395, 4444, 4493, 4542, 4591, 4640, 262, 311, 360, 409, 458, 507, 556, 605, 654, 1591, 1640, 1689, 1738, 1787, 1836, 1885, 1934, 1983, 2920, 2969, 3018, 3067, 3116, 3165, 3214, 3263, 3312, 4249, 4298, 4347, 4396, 4445, 4494, 4543, 4592, 4641, 263, 312, 361, 410, 459, 508, 557, 606, 655, 1592, 1641, 1690, 1739, 1788, 1837, 1886, 1935, 1984, 2921, 2970, 3019, 3068, 3117, 3166, 3215, 3264, 3313, 4250, 4299, 4348, 4397, 4446, 4495, 4544, 4593, 4642, 264, 313, 362, 411, 460, 509, 558, 607, 656, 1593, 1642, 1691, 1740, 1789, 1838, 1887, 1936, 1985, 2922, 2971, 3020, 3069, 3118, 3167, 3216, 3265, 3314, 4251, 4300, 4349, 4398, 4447, 4496, 4545, 4594, 4643, 265, 314, 363, 412, 461, 510, 559, 608, 657, 1594, 1643, 1692, 1741, 1790, 1839, 1888, 1937, 1986, 2923, 2972, 3021, 3070, 3119, 3168, 3217, 3266, 3315, 4252, 4301, 4350, 4399, 4448, 4497, 4546, 4595, 4644, 266, 315, 364, 413, 462, 511, 560, 609, 658, 1595, 1644, 1693, 1742, 1791, 1840, 1889, 1938, 1987, 2924, 2973, 3022, 3071, 3120, 3169, 3218, 3267, 3316, 4253, 4302, 4351, 4400, 4449, 4498, 4547, 4596, 4645, 267, 316, 365, 414, 463, 512, 561, 610, 659, 1596, 1645, 1694, 1743, 1792, 1841, 1890, 1939, 1988, 2925, 2974, 3023, 3072, 3121, 3170, 3219, 3268, 3317, 4254, 4303, 4352, 4401, 4450, 4499, 4548, 4597, 4646, 268, 317, 366, 415, 464, 513, 562, 611, 660, 1597, 1646, 1695, 1744, 1793, 1842, 1891, 1940, 1989, 2926, 2975, 3024, 3073, 3122, 3171, 3220, 3269, 3318, 4255, 4304, 4353, 4402, 4451, 4500, 4549, 4598, 4647, 269, 318, 367, 416, 465, 514, 563, 612, 661, 1598, 1647, 1696, 1745, 1794, 1843, 1892, 1941, 1990, 2927, 2976, 3025, 3074, 3123, 3172, 3221, 3270, 3319, 4256, 4305, 4354, 4403, 4452, 4501, 4550, 4599, 4648, 270, 319, 368, 417, 466, 515, 564, 613, 662, 1599, 1648, 1697, 1746, 1795, 1844, 1893, 1942, 1991, 2928, 2977, 3026, 3075, 3124, 3173, 3222, 3271, 3320, 4257, 4306, 4355, 4404, 4453, 4502, 4551, 4600, 4649, 271, 320, 369, 418, 467, 516, 565, 614, 663, 1600, 1649, 1698, 1747, 1796, 1845, 1894, 1943, 1992, 2929, 2978, 3027, 3076, 3125, 3174, 3223, 3272, 3321, 4258, 4307, 4356, 4405, 4454, 4503, 4552, 4601, 4650, 272, 321, 370, 419, 468, 517, 566, 615, 664, 1601, 1650, 1699, 1748, 1797, 1846, 1895, 1944, 1993, 2930, 2979, 3028, 3077, 3126, 3175, 3224, 3273, 3322, 4259, 4308, 4357, 4406, 4455, 4504, 4553, 4602, 4651, 273, 322, 371, 420, 469, 518, 567, 616, 665, 1602, 1651, 1700, 1749, 1798, 1847, 1896, 1945, 1994, 2931, 2980, 3029, 3078, 3127, 3176, 3225, 3274, 3323, 4260, 4309, 4358, 4407, 4456, 4505, 4554, 4603, 4652, 274, 323, 372, 421, 470, 519, 568, 617, 666, 1603, 1652, 1701, 1750, 1799, 1848, 1897, 1946, 1995, 2932, 2981, 3030, 3079, 3128, 3177, 3226, 3275, 3324, 4261, 4310, 4359, 4408, 4457, 4506, 4555, 4604, 4653, 275, 324, 373, 422, 471, 520, 569, 618, 667, 1604, 1653, 1702, 1751, 1800, 1849, 1898, 1947, 1996, 2933, 2982, 3031, 3080, 3129, 3178, 3227, 3276, 3325, 4262, 4311, 4360, 4409, 4458, 4507, 4556, 4605, 4654, 276, 325, 374, 423, 472, 521, 570, 619, 668, 1605, 1654, 1703, 1752, 1801, 1850, 1899, 1948, 1997, 2934, 2983, 3032, 3081, 3130, 3179, 3228, 3277, 3326, 4263, 4312, 4361, 4410, 4459, 4508, 4557, 4606, 4655, 277, 326, 375, 424, 473, 522, 571, 620, 669, 1606, 1655, 1704, 1753, 1802, 1851, 1900, 1949, 1998, 2935, 2984, 3033, 3082, 3131, 3180, 3229, 3278, 3327, 4264, 4313, 4362, 4411, 4460, 4509, 4558, 4607, 4656, 278, 327, 376, 425, 474, 523, 572, 621, 670, 1607, 1656, 1705, 1754, 1803, 1852, 1901, 1950, 1999, 2936, 2985, 3034, 3083, 3132, 3181, 3230, 3279, 3328, 4265, 4314, 4363, 4412, 4461, 4510, 4559, 4608, 4657, 279, 328, 377, 426, 475, 524, 573, 622, 671, 1608, 1657, 1706, 1755, 1804, 1853, 1902, 1951, 2000, 2937, 2986, 3035, 3084, 3133, 3182, 3231, 3280, 3329, 4266, 4315, 4364, 4413, 4462, 4511, 4560, 4609, 4658, 280, 329, 378, 427, 476, 525, 574, 623, 672, 1609, 1658, 1707, 1756, 1805, 1854, 1903, 1952, 2001, 2938, 2987, 3036, 3085, 3134, 3183, 3232, 3281, 3330, 4267, 4316, 4365, 4414, 4463, 4512, 4561, 4610, 4659, 281, 330, 379, 428, 477, 526, 575, 624, 673, 1610, 1659, 1708, 1757, 1806, 1855, 1904, 1953, 2002, 2939, 2988, 3037, 3086, 3135, 3184, 3233, 3282, 3331, 4268, 4317, 4366, 4415, 4464, 4513, 4562, 4611, 4660, 282, 331, 380, 429, 478, 527, 576, 625, 674, 1611, 1660, 1709, 1758, 1807, 1856, 1905, 1954, 2003, 2940, 2989, 3038, 3087, 3136, 3185, 3234, 3283, 3332, 4269, 4318, 4367, 4416, 4465, 4514, 4563, 4612, 4661, 283, 332, 381, 430, 479, 528, 577, 626, 675, 1612, 1661, 1710, 1759, 1808, 1857, 1906, 1955, 2004, 2941, 2990, 3039, 3088, 3137, 3186, 3235, 3284, 3333, 4270, 4319, 4368, 4417, 4466, 4515, 4564, 4613, 4662, 284, 333, 382, 431, 480, 529, 578, 627, 676, 1613, 1662, 1711, 1760, 1809, 1858, 1907, 1956, 2005, 2942, 2991, 3040, 3089, 3138, 3187, 3236, 3285, 3334, 4271, 4320, 4369, 4418, 4467, 4516, 4565, 4614, 4663, 285, 334, 383, 432, 481, 530, 579, 628, 677, 1614, 1663, 1712, 1761, 1810, 1859, 1908, 1957, 2006, 2943, 2992, 3041, 3090, 3139, 3188, 3237, 3286, 3335, 4272, 4321, 4370, 4419, 4468, 4517, 4566, 4615, 4664, 286, 335, 384, 433, 482, 531, 580, 629, 678, 1615, 1664, 1713, 1762, 1811, 1860, 1909, 1958, 2007, 2944, 2993, 3042, 3091, 3140, 3189, 3238, 3287, 3336, 4273, 4322, 4371, 4420, 4469, 4518, 4567, 4616, 4665, 287, 336, 385, 434, 483, 532, 581, 630, 679, 1616, 1665, 1714, 1763, 1812, 1861, 1910, 1959, 2008, 2945, 2994, 3043, 3092, 3141, 3190, 3239, 3288, 3337, 4274, 4323, 4372, 4421, 4470, 4519, 4568, 4617, 4666, 288, 337, 386, 435, 484, 533, 582, 631, 680, 1617, 1666, 1715, 1764, 1813, 1862, 1911, 1960, 2009, 2946, 2995, 3044, 3093, 3142, 3191, 3240, 3289, 3338, 4275, 4324, 4373, 4422, 4471, 4520, 4569, 4618, 4667, 289, 338, 387, 436, 485, 534, 583, 632, 681, 1618, 1667, 1716, 1765, 1814, 1863, 1912, 1961, 2010, 2947, 2996, 3045, 3094, 3143, 3192, 3241, 3290, 3339, 4276, 4325, 4374, 4423, 4472, 4521, 4570, 4619, 4668, 290, 339, 388, 437, 486, 535, 584, 633, 682, 1619, 1668, 1717, 1766, 1815, 1864, 1913, 1962, 2011, 2948, 2997, 3046, 3095, 3144, 3193, 3242, 3291, 3340, 4277, 4326, 4375, 4424, 4473, 4522, 4571, 4620, 4669, 291, 340, 389, 438, 487, 536, 585, 634, 683, 1620, 1669, 1718, 1767, 1816, 1865, 1914, 1963, 2012, 2949, 2998, 3047, 3096, 3145, 3194, 3243, 3292, 3341, 4278, 4327, 4376, 4425, 4474, 4523, 4572, 4621, 4670, 292, 341, 390, 439, 488, 537, 586, 635, 684, 1621, 1670, 1719, 1768, 1817, 1866, 1915, 1964, 2013, 2950, 2999, 3048, 3097, 3146, 3195, 3244, 3293, 3342, 4279, 4328, 4377, 4426, 4475, 4524, 4573, 4622, 4671, 293, 342, 391, 440, 489, 538, 587, 636, 685, 1622, 1671, 1720, 1769, 1818, 1867, 1916, 1965, 2014, 2951, 3000, 3049, 3098, 3147, 3196, 3245, 3294, 3343, 4280, 4329, 4378, 4427, 4476, 4525, 4574, 4623, 4672, 294, 343, 392, 441, 490, 539, 588, 637, 686, 1623, 1672, 1721, 1770, 1819, 1868, 1917, 1966, 2015, 2952, 3001, 3050, 3099, 3148, 3197, 3246, 3295, 3344, 4281, 4330, 4379, 4428, 4477, 4526, 4575, 4624, 4673, 295, 344, 393, 442, 491, 540, 589, 638, 687, 1624, 1673, 1722, 1771, 1820, 1869, 1918, 1967, 2016, 2953, 3002, 3051, 3100, 3149, 3198, 3247, 3296, 3345, 4282, 4331, 4380, 4429, 4478, 4527, 4576, 4625, 4674, 296, 345, 394, 443, 492, 541, 590, 639, 688, 1625, 1674, 1723, 1772, 1821, 1870, 1919, 1968, 2017, 2954, 3003, 3052, 3101, 3150, 3199, 3248, 3297, 3346, 4283, 4332, 4381, 4430, 4479, 4528, 4577, 4626, 4675, 297, 346, 395, 444, 493, 542, 591, 640, 689, 1626, 1675, 1724, 1773, 1822, 1871, 1920, 1969, 2018, 2955, 3004, 3053, 3102, 3151, 3200, 3249, 3298, 3347, 4284, 4333, 4382, 4431, 4480, 4529, 4578, 4627, 4676, 5720, 5721, 5723, 5724, 5726, 5727, 5729, 5730, 5732, 5733, 5735, and 5736.

[0673] Item 27. An isolated mRNA according to any one of item 1 to item 10 and item 25 to item 26, LNP according to any one of item 11 to item 13, pharmaceutical composition according to item 14, or kit or kit of parts according to item 15, for use in treating, reversing, preventing, attenuating or inhibiting a liver disease, preferably selected from the group consisting of liver fibrosis, liver cirrhosis, hepatocellular carcinoma (HCC), non-alcoholic fatty liver disease (NAFLD), non-alcoholic steatohepatitis (NASH) and liver cancer in a human subject in need, comprising administering to a human subject in need the wherein the administration results in treatment, prevention, attenuation, inhibition, or prophylaxis of the liver fibrosis, liver cirrhosis, hepatocellular carcinoma (HCC), non-alcoholic fatty liver disease (NAFLD), non-alcoholic steatohepatitis (NASH) or liver cancer.

[0674] Item 28. An isolated nucleic acid construct comprising a nucleic acid sequence encoding the mRNA according to item 8, preferably an isolated nucleic acid construct having at least 80%, 81%, 82%, 83%, 84%, 85%, 86%, 87%, 88%, 89%, 90%, 91%, 92%, 93%, 94%, 95%, 96%, 97%, 98%, 99%, or 100% sequence identity to any one of the sequences selected from the group consisting of SEQ ID NO:1576-5615, 5683-5712, and 5716-5736 or SEQ ID NO:2906, 2956, 3005, 3250, 3299, 5728, 5731, 5734, 5563, 5564, 5565, 5566, 5567, 5568, 5569, 5570, 5571, 5572, 5573, 5574, 5575, 5576, 5577, 5578, 5579, 5580, 5581, 5582, 5583, 5584, 5585, 5586, 5587, 5588, 5589, 5590, 5591, 5592, 5593, 5594, 5595, 5596, 5597, 5598, 5599, 5600, 5601, 5602, 5603, 5604, 5605, 5606, 5607, 5608, 5609, 5610, 5611, 5612, 5613, 5614, and 5615 or to any one of the sequences as disclosed in Table C2 “Constructs of the invention”.

[0675] Item 28B. An isolated nucleic acid construct comprising a nucleic acid sequence encoding the mRNA according to item 8, preferably an isolated nucleic acid construct having at least 80%, 81%, 82%, 83%, 84%, 85%, 86%, 87%, 88%, 89%, 90%, 91%, 92%, 93%, 94%, 95%, 96%, 97%, 98%, 99%, or 100% sequence identity to any one of the sequences selected from the group consisting of SEQ ID NO:1576-5615, 5683-5712, and 5716-5736 or to any one of the sequences as disclosed in Table C2 “Constructs of the invention”.

[0676] Item 29. A fusion protein comprising the engineered HNF4A protein variant of any one of item 23 or item 24 or an mRNA encoding a fusion protein comprising the engineered HNF4A protein variant of any one of item 23 or item 24.

[0677] Item 30. A vector comprising the isolated mRNA according to any one of item 1 to item 10.

[0678] Item 31. A host cell carrying the vector of item 30.

[0679] Item 32. An isolated mRNA encoding wild type hepatocyte nuclear factor 4 alpha (HNF4A) or preferably an isolated mRNA encoding an engineered hepatocyte nuclear factor 4 alpha (HNF4A) protein variant comprising one or more amino acid substitution, deletion, and/or insertion mutation leading to an increased HNF4A transcriptional activity, DNA binding capacity, stability, longer-lasting HNF4A half-life and/or therapeutic effect as compared to the unmodified human wild type HNF4A protein according to SEQ ID NO:100, preferably an engineered HNF4A comprising a S87A mutation and/or a S461E mutation, more preferably an engineered HNF4A comprising a S461E mutation for use in treating or for use in supportive treatment of a disease which results in or leads to liver fibrosis or liver cirrhosis, said disease being selected from the group consisting of acute hepatic porphyria; Alagille syndrome; acute alcoholic hepatitis/alcoholic hepatitis; alcoholic steatohepatitis (ASH); alcoholic (fatty) liver disease (ALD); alcohol-related liver disease (ARLD); alpha-1 antitrypsin deficiency; autoimmune hepatitis (AIH); bile duct cancer (cholangiocarcinoma); biliary atresia; Brucellosis or syphilis; Budd-Chiari syndrome (BCS); chronic heart failure (HF); cystic fibrosis; galactosemia; glycogen storage disease Type 1/glycogen storage diseases; haemochromatosis; hepatitis A (HAV)/hepatitis A infection; hepatitis B (HBV)/chronic hepatitis B infection (CHB); hepatitis C (HCV)/chronic hepatitis C infection (CHC); hepatitis D (HDV)/chronic hepatitis D infection (CHD); hepatocellular carcinoma (HCC); benign liver tumors; lysosomal acid lipase deficiency (LAL-D); non-alcoholic fatty liver disease (NAFLD); non-alcoholic fatty liver (NAFL); non-alcoholic steatohepatitis (NASH); primary biliary cholangitis (PBC); primary biliary cirrhosis; primary sclerosing cholangitis (PSC); progressive familial intrahepatic cholestasis (PFIC); and Wilson disease.

[0680] Item 33. An isolated mRNA encoding
[0681] (i) an engineered hepatocyte nuclear factor 4 alpha (HNF4A) protein variant comprising one or more amino acid substitution, deletion, and/or insertion mutation leading to an increased HNF4A transcriptional activity, DNA binding capacity, stability, longer-lasting HNF4A half-life and/or therapeutic effect as compared to the unmodified human wild type HNF4A protein according to SEQ ID NO:100, preferably an engineered HNF4A comprising a S87A mutation and/or a S461E mutation, more preferably an engineered HNF4A comprising a S461E mutation; or
[0682] (ii) wild type hepatocyte nuclear factor 4 alpha (HNF4A);
[0683] for use in treating or for use in supportive treatment of a disease which results in or leads to liver fibrosis or liver cirrhosis, said disease being selected from the group consisting of acute hepatic porphyria; Alagille syndrome; acute alcoholic hepatitis/alcoholic hepatitis; alcoholic steatohepatitis (ASH); alcoholic (fatty) liver disease (ALD); alcohol-related liver disease (ARLD); alpha-1 antitrypsin deficiency; autoimmune hepatitis (AIH); bile duct cancer (cholangiocarcinoma); biliary atresia; Brucellosis or syphilis; Budd-Chiari syndrome (BCS); chronic heart failure (HF); cystic fibrosis; galactosemia; glycogen storage disease Type 1/glycogen storage diseases; haemochromatosis; hepatitis A (HAV)/hepatitis A infection; hepatitis B (HBV)/chronic hepatitis B infection (CHB); hepatitis C (HCV)/chronic hepatitis C infection (CHC); hepatitis D (HDV)/chronic hepatitis D infection (CHD); hepatocellular carcinoma (HCC); benign liver tumors; lysosomal acid lipase deficiency (LAL-D); non-alcoholic fatty liver disease (NAFLD); non-alcoholic fatty liver (NAFL); non-alcoholic steatohepatitis (NASH); primary biliary cholangitis (PBC); primary biliary cirrhosis; primary sclerosing cholangitis (PSC); progressive familial intrahepatic cholestasis (PFIC); and Wilson disease.

[0684] Item 34. An isolated mRNA according to any one of the previous items, wherein all of the uracil in the coding sequence or the full nucleic acid sequence are exchanged with N1-methylpseudouridine (m14J).

[0685] Item 35. An isolated mRNA encoding
[0686] (i) an engineered hepatocyte nuclear factor 4 alpha (HNF4A) protein variant comprising one or more amino acid substitution, deletion, and/or insertion mutation leading to an increased HNF4A transcriptional activity, DNA binding capacity, stability, longer-lasting HNF4A half-life and/or therapeutic effect as compared to the unmodified human wild type HNF4A protein according to SEQ ID NO:100, preferably an engineered HNF4A comprising (a) one or (b) more than one or (c) all substitutions selected from the group consisting of S87A, K106R, K108R K126R K127R S142A S143A S148A T166A S167A S313A S378A T429A T432A S436A K458R and S461E;
[0687] for use in treating, reversing, preventing, attenuating or inhibiting a liver disease, preferably selected from the group consisting of liver fibrosis, liver cirrhosis, hepatocellular carcinoma (HCC), non-alcoholic fatty liver disease (NAFLD), non-alcoholic steatohepatitis (NASH) and liver cancer, more preferably treating, preventing, attenuating or inhibiting liver fibrosis or liver cirrhosis.

[0688] Item 36. The mRNA of item 35(i) for use according to item 35, wherein said mRNA comprises an open reading frame (ORF) encoding an engineered HNF4A comprising one or more amino acid substitution, deletion, and/or insertion mutation leading to an increased HNF4A transcriptional activity, DNA binding capacity, stability, longer-lasting HNF4A half-life and/or therapeutic effect as compared to the unmodified human wild type HNF4A protein according to SEQ ID NO:100,
[0689] preferably an engineered HNF4A comprising (a) one or (b) more than one or (c) all substitutions selected from the group consisting of S87A, K106R, K108R K126R K127R S142A S143A S148A T166A S167A S313A S378A T429A T432A S436A K458R and S461E, preferably SEQ ID NO:140,
[0690] more preferably an engineered HNF4A comprising an amino acid sequence having at least 80%, 81%, 82%, 83%, 84%, 85%, 86%, 87%, 88%, 89%, 90%, 91%, 92%, 93%, 94%, 95%, 96%, 97%, 98%, 99%, or 100% sequence identity to any one of SEQ ID NO:101-246, or a fragment or variant of said sequences having the biological activity of a HNF4A protein.

### FIGURES—BRIEF DESCRIPTION OF THE DRAWINGS

[0691] FIG. 1: expression level of engineered HNF4A protein variants in HepG2 cells compared to WT HNF4A.

[0692] FIG. 2: Fold change of APOA4 protein levels in HepG2 cells upon expression of engineered HNF4A protein variants compared to WT HNF4A. Signals were normalized to unmutated codon-optimized WT HNF4A (GC; shown in black), error bars represent standard deviation (SD) of two independent biological experiments.

[0693] FIG. 3: HNF4A protein abundance in HepG2 cells upon expression of engineered HNF4A protein variants compared to unmutated HNF4A protein. Error bars represent standard deviation (SD) of two independent biological experiments followed by Western Blot analysis. Black line indicates height of unmutated HNF4A.

[0694] FIG. 4: HNF4A-dependent induction of endogenous APOA4 protein levels in HepG2 cells upon expression of engineered HNF4A protein variants compared to unmutated HNF4A protein. Error bars represent standard deviation (SD) of two independent biological experiments followed by Western Blot analysis. Black line indicates height of unmutated HNF4A.

[0695] FIG. 5: HNF4A protein abundance in HepG2 cells upon expression of engineered HNF4A protein variants compared to unmutated HNF4A protein. Error bars represent standard deviation (SD) of two independent biological experiments followed by Western Blot analysis. Black line indicates height of unmutated HNF4A.

[0696] FIG. 6: HNF4A-dependent induction of endogenous APOA4 protein levels in HepG2 cells upon expression of engineered HNF4A protein variants compared to unmutated HNF4A protein. Error bars represent standard deviation (SD) of two independent biological experiments followed by Western Blot analysis. Black line indicates height of unmutated HNF4A.

[0697] FIG. 7: qPCR analyses of human HNF4A mRNA in patients with fibrosis; 0 (n=9), 1 (n=3), 2 (n=3), 3 (n=3) and 4 (n=3) from Hannover Medical School (MHH), Germany and S0 (n=6), 51 (n=3), S2 (n=8), and S3 (n=5) and S4 (n=5) from Zhongshan Hospital, China.

[0698] FIG. 8: qPCRs for HNF4A target genes APOA2, APOB, F7 (y-axis: respective relative mRNA levels, x-axis: first column ZsGreen, 2^{nd} to 4^{th} column: HNF4A 3H, 6H, 12H)

[0699] FIG. 9: qPCRs for ALB, A1AT, TF and TTR in the following order of the probes:
[0700] 1^{st} column control PHH control w/o mRNA;
[0701] 2^{nd} column control PHH+ZsGreen mRNA;
[0702] 3^{rd} column control PHH+HNF4A mRNA;
[0703] 4^{th} column fibrotic PHH control w/o mRNA;
[0704] 5^{th} column fibrotic PHH+ZsGreen mRNA;
[0705] 6^{th} column fibrotic PHH+HNF4A mRNA.

[0706] FIG. 10: qPCRs for multiple CYPs, other enzymes, and transporters in phase I, phase II and phase III in the following order of the probes:
[0707] 1^{st} column control PHH control w/o mRNA;
[0708] 2^{nd} column control PHH+ZsGreen mRNA;
[0709] 3^{rd} column control PHH+HNF4A mRNA;
[0710] 4^{th} column fibrotic PHH control w/o mRNA;
[0711] 5^{th} column fibrotic PHH+ZsGreen mRNA;
[0712] 6^{th} column fibrotic PHH+HNF4A mRNA.

[0713] FIG. 11: ELISA for secreted ALB and A1AT in the following order of the probes:
[0714] 1^{st} column control PHH control w/o mRNA;
[0715] 2^{nd} column control PHH+ZsGreen mRNA;
[0716] 3^{rd} column control PHH+HNF4A mRNA;
[0717] 4^{h} column fibrotic PHH control w/o mRNA;
[0718] 5^{th} column fibrotic PHH+ZsGreen mRNA;
[0719] 6^{th} column fibrotic PHH+HNF4A mRNA.

[0720] FIG. 12: Representative immunofluorescence images at 3 hours (h), 6h, 12h, and 24h after ZsGreen mRNA transfection of PMH cells.

[0721] FIG. 13: the qPCR analyses of representative HNF4A target genes (Apoa2, Apob, and F7) expression after HNF4A mRNA transfection or ZsGreen mRNA.

[0722] FIG. 14: In this figures, the order of the probes is as follows:
[0723] 1^{st} column=PMH isolated from untreated WT mice without CCl₄ (Carbon tetrachloride) treatment+ZsGreen mRNA;
[0724] 2^{nd} column=PMH isolated from WT mice without CCl₄ treatment+HNF4A mRNA;
[0725] 3^{rd} column=PMH isolated from fibrotic mice with CCl₄ treatment+ZsGreen mRNA;
[0726] 4^{th} column=PMH isolated from fibrotic mice with CCl₄ treatment+HNF4A mRNA.

[0727] The first and second diagram show the qPCR analyses of relative mRNA levels of A/b and Ttr. The third and fourth diagram shows the hepatocyte function analyzed by measuring secreted levels of ALB (third diagram) and urea (fourth diagram). The fifth and sixth diagram show improved drug responsiveness of fibrotic hepatocytes after transfection with HNF4A mRNA as shown by elevated levels of Cyp1a2 (fifth diagram) and Cyp3a4 (sixth diagram). Data are mean+s.e.m; two-tailed Student's t-test. *: P<0.05; **: P<0.01.

[0728] FIG. 15-1 (A to H):
[0729] Column 1: WT control
[0730] Column 2: CCl₄ control
[0731] Column 3: AAV control
[0732] Column 4: ZsGreen LNP
[0733] Column 5 AAV HNF4A
[0734] Column 6 HNF4A mRNA LNP
[0735] (A) Schematic of experiments analysing effect of human HNF4A mRNA delivery in CCl4-(A-H)-induced mouse models of liver fibrosis (n=6 mice per CCl4 model—arrows in 1^{st} row=16×PBS injections, 2^{nd} to 6^{th} row=16×CCl4 injections, 3^{rd} row=plus 6 additional HNF4A mRNA/LNP injections (bigger arrows), 4^{th} row=plus 6 additional ZsGreen mRNA/LNP injections (bigger arrows), 5^{th} row=1 AAV-HNF4A injection (big arrow), 6^{th} row=1 AAV-control injection (big arrow)).
[0736] (B) Hnf4a qPCRs after CCl4 injection.
[0737] (C) Western blots showing HNF4A protein expression.
[0738] (D) Liver function test for ALT and bilirubin show reduced injury upon HNF4A/LNP administration.
[0739] (E) Hydroxyproline assay.
[0740] (F) Immunohistochemical images of H&E, desmin, and Sirius red stainings. Scale bars, 100 μm.
[0741] (G) Quantification of Sirius red and desmin stainings.
[0742] (H) qPCRs for Col1a1, Col2a1 and Acta2.
[0743] *: P<0.05; **: P<0.01; ***: P<0.001; ****: P<0.0001.

[0744] FIG. 15-2 (I to P):
[0745] Column 1: WT control
[0746] Column 2: CCl₄ control
[0747] Column 3: AAV control
[0748] Column 4: ZsGreen LNP
[0749] Column 5 AAV HNF4A
[0750] Column 6 HNF4A mRNA LNP
[0751] (I) Schematic of experiments analysing effect of human HNF4A mRNA delivery in DDC-(I-P)-induced mouse models of liver fibrosis (n=4 mice per DDC model—1^{st} row=normal diet, 2^{nd} to 6^{th} row=DDC diet, 3^{rd} row=plus 6 additional HNF4A mRNA/LNP injections (arrows), 4^{th} row=plus 6 additional ZsGreen mRNA/LNP injections (arrows), 5^{th} row=1 AAV-HNF4A injection (arrow), 6^{th} row=1 AAV-control injection (arrow)).
[0752] (J) Hnf4a qPCRs after DDC diet.
[0753] (K) Western blots showing HNF4A protein expression.
[0754] (L) Liver function test for ALT and bilirubin show reduced injury upon HNF4A/LNP administration.
[0755] (M) Hydroxyproline assay.
[0756] (N) Immunohistochemical images of H&E, desmin, and Sirius red stainings. Scale bars, 100 μm.
[0757] (O) Quantification of Sirius red and desmin stainings.
[0758] (P) qPCRs for Col1a1, Col2a1 and Acta2.
[0759] *: P<0.05; **: P<0.01; ***: P<0.001; ****: P<0.0001.

[0760] FIG. 16: Mitigation of liver injury in cirrhotic mice by delivery of HNF4A/LNP.
[0761] (A) Schematic of experimental design (small arrows in 1^{st} to 3^{rd} row=32×CCl₄ injections, 2^{nd} row=plus 6 additional HNF4A mRNA/LNP injections (bigger arrows), 3^{rd} row=plus 6 additional ZsGreen mRNA/LNP injections (bigger arrows)).
[0762] (B) qPCR for endogenous Hnf4a mRNA.
[0763] (C) Western blot revealing HNF4A protein expression in livers after HNF4A/LNP injection. Graphs showing
[0764] (D) Serum ALT levels and
[0765] (E) Hydroxyproline assay.
[0766] (F, G) Body weight and activity score for cirrhotic mice.
[0767] (H, I) Images of H&E, desmin, and Sirius red staining and quantification. Scale bars, 100 μm.
[0768] (J) qPCRs for Col1a1, Col2a1, and Acta2 in cirrhotic mice livers.
[0769] *: P<0.05; **: P<0.01; ***: P<0.001.

[0770] FIG. 17:
[0771] (A) Schematic of experimental design in Mdr2′ mice (1^{st} row=control, 2^{nd} row=plus 6 additional HNF4A mRNA/LNP injections (arrows), 3^{rd} row=plus 6 additional ZsGreen mRNA/LNP injections (arrows)).
[0772] (B) qPCR for endogenous Hnf4a mRNA in FVB control and Mdr2^{-/-} mice.
[0773] (C) Western blot revealed HNF4A protein expression after HNF4A/LNP injection. Graphs showing (D) Serum bilirubin levels and
[0774] (E) Hydroxyproline assay for collagen content.
[0775] (F) qPCRs for Ck19, Sox9, and Epcam.
[0776] (G) Images of H&E, desmin, and Sirius red staining
[0777] (H) and quantification. Scale bars, 100 μm.
[0778] (I) qPCRs for Col1a1, Col2a1, and Acta2 in livers from Mdr2^{-/-} mice.
[0779] *: P<0.05; **: P<0.01; ***: P<0.001.

[0780] FIG. 18: in vivo tolerability of repeated administration of LNP-formulated HNF4A mRNA (order starting top left, first row: IL-1b, IL-2, IL-3, IL-4, IL-10, 2^{nd} row: IL-12(p70), IL-13, IL-17, TNA-alpha, IFN-gamma). 1^{st} column=single ZsGreen/LNP injection, 2^{nd} column=single HNF4A/LNP injection, 3^{rd} column=repeated ZsGreen/LNP injection, 4^{th} column=repeated HNF4A/LNP injection. Data are mean±s.e.m; two-tailed Student's t-test for single injection groups.*: P<0.05.

[0781] FIG. 19: (A) qPCR analyses show that the endogenous Hnf4a was downregulated after 8 weeks of CCl₄ treatment, however its expression increased significantly in mice injected with multiple doses of HNF4A/LNP. n=6 for each group except WT control mice (n=4). (B) Similarly, the endogenous Hnf4a was downregulated in livers of mice fed with DDC diet, however the expression of endogenous Hnf4a increased significantly after repeated delivery of HNF4A/LNP. Data are mean±s.e.m; two-tailed Student's t-test. **: P<0.01; ***: P<0.001; ****: P<0.0001.

[0782] FIG. 20: Schematic experimental overview of Example 10. Mice were treated for 12 weeks with CCl₄ to induce liver cirrhosis. Thereafter, treatment phase began with mRNA encoding WT HNF4A protein or respectively engineered HNF4A protein variant combo 11, meanwhile CCl₄ treatment was maintained during treatment phase.

[0783] FIG. 21: Hydroxyproline assay (see Example 10). Deposition of collagen is a cornerstone of the progression of fibrotic pathology and its modulation is a promising target for a therapeutic strategy. Collagen can be quantified indirectly through hydroxyproline content since this amino acid is present almost exclusively in collagen. As apparent, hydroxyproline content is high in untreated disease model mice, while hydroxyproline content is reduced in disease model mice which received mRNA encoding WT HNF4A and reduced even stronger in mice which received engineered HNF4A protein variant combo 11. P value for CCl4+WT HNF4A was 0.02 while p value was significantly more potent for CCl4+engineered HNF4A combo 11 was 0.0015.

[0784] FIG. 22: Sirius red staining and quantification (see Example 10). Images from liver tissue stained with sirius red, staining collagen, shows, that collagen content is high in untreated disease model mice, while collagen content is reduced in disease model mice which received mRNA encoding WT HNF4A and reduced even stronger in mice which received engineered HNF4A protein variant combo 11. P value for CCl4+WT HNF4A was 0.035 while p value was significantly more potent for CCl4+engineered HNF4A combo 11 was 0.002.

[0785] FIG. 23: Col1a1 qPCR (see Example 10). Expression of fibrogenic marker gene Col1a1 was analyzed via qPCR. The detected Col1a1 RNA levels were comparable for the CCl₄ treated control and mRNA encoding WT HNF4A at 0.3 mg/kg, indicating that the mRNA encoding WT HNF4A was less efficient at this low dose and behaving as loss-of-function. In contrast, mRNA encoding combo 11 still decreased Col1a1 RNA levels at 0.3 mg/kg, confirming the conclusion that mRNA encoding engineered HNF4A protein variant combo 11 was more potent than mRNA encoding WT HNF4A. P value for CCl₄+WT HNF4A could not be assessed while p value was significantly more potent for CCl₄+engineered HNF4A combo 11 was 0.0014.

[0786] FIG. 24: Desmin staining and quantification (see Example 10). Desmin is a well-known marker of hepatic stellate cells in the normal liver. For further analysis in Example 10, images from liver tissue stained with desmin showed, that desmin positive area is high in untreated disease model mice, while desmin positive content is reduced in disease model mice which received mRNA encoding WT HNF4A and reduced even stronger in mice which received engineered HNF4A protein variant combo 11. P value for CCl₄+WT HNF4A was 0.039 while p value was significantly more potent for CCl₄+engineered HNF4A combo 11 was 0.008.

[0787] FIG. 25: Acta2 qPCR (see Example 10). Expression of fibrogenic marker gene Acta2 was analyzed via qPCR. The detected Acta2 RNA levels were high in untreated disease model mice and could be reduced through administration of mRNA encoding WT HNF4A and could be reduced even stronger through administration of engineered HNF4A protein variant combo 11. P value for CCl₄+WT HNF4A was 0.001404 while p value was significantly more potent for CCl₄+engineered HNF4A combo 11 was 0.000121.

[0788] FIG. 26: ALT (alanine aminotransferase) measurements (see Example 10). Strongly enhanced serum ALT levels were detected in untreated disease model mice. Detected ALT levels were reduced strongly in disease model mice treated with mRNA encoding WT HNF4A and engineered HNF4A protein variant combo 11, indicating improved liver function, suggesting decreased disease state. P value for CCl₄+WT HNF4A was 0.065 while p value was significantly more potent for CCl₄+engineered HNF4A combo 11 was 0.054.

### EXAMPLES

[0789] In the following section, particular examples illustrating various embodiments and aspects of the invention are presented. The present invention, however, is not limited in scope by the exemplified embodiments, which are intended as illustrations of single aspects of the invention only, and methods which are functionally equivalent are within the scope of the invention. Indeed, various modifications of the invention in addition to those described herein will become readily apparent to those skilled in the art from the foregoing description, accompanying figures and the examples below. All such modifications fall within the scope of the claims as disclosed herein.

Table of contents for Examples

| | |
|---|---|
| Example 1 | Preparation of DNA and RNA constructs, compositions, and mRNA/LNP formulations |
| Example 1B | Routine methods used in the working examples |
| Example 2 | Evaluation of HNF4A expression, stability and activity |
| Example 3 | In vitro WT HNF4A expression leads to improved function of fibrotic and non-fibrotic hepatocytes |
| | (PHH) |
| Example 4 | In vitro WT HNF4A expression leads to improved function of fibrotic and non-fibrotic hepatocytes |
| | (PMH) |
| Example 5 | In vivo verification of liver fibrosis inhibition in mouse model upon HNF4A mRNA delivery |
| Example 6 | In vivo verification of liver cirrhosis inhibition in mouse model upon HNF4A mRNA delivery |
| Example 7 | In vivo verification of suppression of cholestasis and fibrosis upon HNF4A mRNA delivery |
| Example 8 | In vivo tolerability of repeated administration of LNP-formulated HNF4A mRNA |
| Example 9 | Restoration of endogenous Hnf4a expression levels after repeated delivery of exogenous HNF4A |
| | mRNA encoding HNF4A WT protein in vivo |
| Example 10 | Suppression and reversal of liver cirrhosis in an In vivo disease mouse model upon administration |
| | of mRNA encoding engineered HNF4A protein variants |
| Example 11 | In vivo verification of liver cirrhosis inhibition in mouse model upon HNF4A mRNA delivery |
| [prophetic] | encoding engineered HNF4A protein variant S461E |

### Example 1: Preparation of DNA and RNA Constructs. Compositions, and mRNA/LNP Formulations

[0790] The present Example provides methods of obtaining the mRNA of the invention as well as methods of generating a pharmaceutical composition of the invention.

### 1.1. Preparation of DNA and RNA Constructs:

[0791] DNA sequences encoding different HNF4A protein designs, i.e. WT protein (SEQ ID NO:100) and engineered HNF4A protein variants (SEQ ID NO:101-246), were prepared and used for subsequent RNA in vitro transcription reactions. On DNA/RNA level, said DNA sequences were prepared by modifying the wild type or reference encoding DNA sequences by introducing a G/C optimized or modified coding sequence (e.g., “cds opt1”) for stabilization and expression optimization.

[0792] To further improve the intracellular stability as well as transcriptional activity of HNF4A, engineering of the protein sequence was performed in the context of “cds opt1”. For those engineered HNF4A protein variants, the amino acid sequence was modified on DNA/RNA level in accordance with the above and below disclosure of HNF4A variants and constructs of the invention. Molecular cloning techniques as well as gene synthesis was employed to generate engineered HNF4A protein variants/mutants. These mutants included deletions of N- and C-terminal regions, which vary across the 12 HNF4A isoforms, as well as mutants covering various post-translational modification sites (putative ubiquitination, acetylation, and phosphorylation sites). To prevent inhibitory ubiquitination and acetylation of HNF4A, arginine mutants were inserted. As the impact of phosphorylation on HNF4A activity is unclear, complementary phospho-incompetent (alanine) and phospho-mimetic (glutamate) mutants were generated.

[0793] Subsequently, sequences were introduced into a pUC derived DNA vector to comprise stabilizing 5′-UTR and 3′-UTR sequences, additionally comprising a stretch of adenosines (e.g. A64 or A100), optionally a histone-stem-loop (hSL) structure, and optionally a stretch of 30 cytosines (e.g. C30) (see Table Ex-1), also in accordance with the above and below disclosure of HNF4A variants and constructs of the invention. In sum, preferably, mRNA encoding engineered HNF4A protein variants were codon optimized (opt1), beared a CleanCap™ cap1 structure and a 3′-UTR tail ending with A100. For an overview of different designs see Table A to Table C1/2, Table Ex-1, the whole disclosure of the specification text and also the disclosure in the sequence listing, which comprises detailed information which is incorporated herein by reference in its entirety.

[0794] The obtained plasmid DNA constructs were transformed and propagated in bacteria using common protocols known in the art. Eventually, the plasmid DNA constructs were extracted, purified, and used for subsequent RNA in vitro transcription (see section 1.2.).

1.2. RNA In Vitro Transcription from Plasmid DNA Templates:

[0795] DNA plasmids prepared according to section 1.1 were enzymatically linearized using a restriction enzyme and used for DNA dependent RNA in vitro transcription using T7 RNA polymerase in the presence of a nucleotide mixture (ATP/GTP/CTP/UTP) and cap analog (e.g. m7GpppG, m7G(5′ppp(5)(2′OMeA)pG, m7G(5′)ppp(5)(2′OMeG)pG), 3′OMe-m7G(5)ppp(5′)(2′OMeA)pG, or respectively CleanCap™ purchased from TriLink) under suitable buffer conditions. The obtained RNA constructs were purified using RP-HPLC (PureMessenger®, CureVac AG, Thbingen, Germany; WO2008077592) and used for in vitro and in vivo experiments. DNA templates may also be generated using PCR. Such PCR templates can be used for DNA dependent RNA in vitro transcription using an RNA polymerase as outlined herein.

[0796] The resulting mRNA constructs of the examples or respectively RNA sequences/constructs are provided in Table Ex-1 with the encoded HNF4A protein or respectively engineered protein variant and the respective UTR elements indicated therein. If not indicated otherwise, the mRNA sequences/constructs of Table Ex-1 have been produced using RNA in vitro transcription in the presence of a m7GpppG or m7G(5)ppp(5)(2′OMeA)pG/CleanCap® respectively. Also here, for an overview of different designs see Table A to Table C1/2, Table Ex-1, the whole disclosure of the specification text and also the disclosure in the sequence listing, which comprises detailed information which is incorporated herein by reference in its entirety. Accordingly, the mRNA sequences/constructs comprise a 5′-cap1 structure. If not indicated otherwise, the mRNA sequences/constructs have been produced in the absence of chemically modified nucleotides like e.g. pseudouridine (4) or N(1)-methylpseudouridine (m14W or N1MPU).

TABLE EX-1
RNA constructs encoding different HNF4A protein or engineered HNF4A protein variants (more detailed information
can be found under <223> in the sequence listing of the invention [here, and throughout the whole
specification, it has to be noted that the priority application was filed with a sequence listing in accordance
with the WIPO Standard ST.25, which then was converted into a sequence listing according to WIPO Standard
ST.26 - information which was comprised within line <223> in ST.25 now was added to the respective SEQ ID NO:
as a note under “feature key”, i.e. “misc_feature” (for nucleic acids) or “REGION” (for proteins)])

| | 5′-UTR / | | | | | SEQ ID NO: | SEQ ID NO: |
|---|---|---|---|---|---|---|---|
| SEQ ID NO: | 3′-UTR; | RNA | | CDS | 3′- | Protein w/o | CDS w/o |
| RNA | UTR Design | ID | Name | opt. | end | HA-tag | HA-tag |
| 5713 | HSD17B4/ | R9011 | EGFP-3xHA | | hSL- | | |
| | PSMB3; a-1 | | | | A100 | | |
| 5714 | HSD17B4/ | R7797 | ZsGreen | | A64- | | |
| | PSMB3; a-1 | | | | N5 | | |
| 5715 | HSD17B4/ | R7805 | HNF4A(1-474) | opt29 | A64- | 100 | 641 |
| | PSMB3; a-1 | | | | N5 | | |
| 2906 | HSD17B4/ | R9821 | HNF4A(1-474) | wt | hSL- | 100 | 248 |
| | PSMB3; a-1 | | | | A100 | | |
| 2956 | HSD17B4/ | R9823, | HNF4A(1-474) | opt1 | hSL- | 100 | 298 |
| | PSMB3; a-1 | R10103 | | | A100 | | |
| 3005 | HSD17B4/ | R9824 | HNF4A(1-474) | opt2 | hSL- | 100 | 347 |
| | PSMB3; a-1 | | | | A100 | | |
| 3250 | HSD17B4/ | R9828 | HNF4A(1-474) | opt28 | hSL- | 100 | 592 |
| | PSMB3; a-1 | | | | A100 | | |
| 3299 | HSD17B4/ | R9822 | HNF4A(1-474) | opt29 | hSL- | 100 | 641 |
| | PSMB3; a-1 | | | | A100 | | |
| 5563 | HSD17B4/ | R9455 | HNF4A(1-474) HA-tag | wt | hSL- | 100 | 248 |
| | PSMB3; a-1 | | | | A100 | | |
| 5564 | HSD17B4/ | R9456 | HNF4A(1-474) HA-tag | opt1 | hSL- | 100 | 249 |
| | PSMB3; a-1 | | | | A100 | | |
| 5565 | HSD17B4/ | R9457 | HNF4A(1-474)(S313A) HA-tag | opt1 | hSL- | 101 | 250 |
| | PSMB3; a-1 | | | | A100 | | |
| 5566 | HSD17B4/ | R9458 | HNF4A(1-474)(S313E) HA-tag | opt1 | hSL- | 102 | 251 |
| | PSMB3; a-1 | | | | A100 | | |
| 5567 | HSD17B4/ | R9459 | HNF4A(1-474)(S142A S143A) | opt1 | hSL- | 103 | 252 |
| | PSMB3; a-1 | | HA-tag | | A100 | | |
| 5568 | HSD17B4/ | R9460 | HNF4A(1-474)(S142E S143E) | opt1 | hSL- | 104 | 253 |
| | PSMB3; a-1 | | HA-tag | | A100 | | |
| 5569 | HSD17B4/ | R9461 | HNF4A(1-474)(S143A) HA-tag | opt1 | hSL- | 105 | 254 |
| | PSMB3; a-1 | | | | A100 | | |
| 5570 | HSD17B4/ | R9462 | HNF4A(1-474)(T166A) HA-tag | opt1 | hSL- | 106 | 255 |
| | PSMB3; a-1 | | | | A100 | | |
| 5571 | HSD17B4/ | R9463 | HNF4A(1-474)(S167E) HA-tag | opt1 | hSL- | 107 | 256 |
| | PSMB3; a-1 | | | | A100 | | |
| 5572 | HSD17B4/ | R9464 | HNF4A(1-474)(S167A) HA-tag | opt1 | hSL- | 108 | 257 |
| | PSMB3; a-1 | | | | A100 | | |
| 5573 | HSD17B4/ | R9465 | HNF4A(1-474)(S167A S378A | opt1 | hSL- | 109 | 258 |
| | PSMB3; a-1 | | T429A T432A S436A) HA-tag | | A100 | | |
| 5574 | HSD17B4/ | R9466 | HNF4A(1-474)(S167E S378E | opt1 | hSL- | 110 | 259 |
| | PSMB3; a-1 | | T429E T432E S436E) HA-tag | | A100 | | |
| 5575 | HSD17B4/ | R9467 | HNF4A(1-474)(S87A) HA-tag | opt1 | hSL- | 111 | 260 |
| | PSMB3; a-1 | | | | A100 | | |
| 5576 | HSD17B4/ | R9468 | HNF4A(1-474)(S87E) HA-tag | opt1 | hSL- | 112 | 261 |
| | PSMB3; a-1 | | | | A100 | | |
| 5577 | HSD17B4/ | R9469 | HNF4A(1-474)(R2V) HA-tag | opt1 | hSL- | 113 | 262 |
| | PSMB3; a-1 | | | | A100 | | |
| 5578 | HSD17B4/ | R9470 | HNF4A(1-474)(R2V K5V) | opt1 | hSL- | 114 | 263 |
| | PSMB3; a-1 | | HA-tag | | A100 | | |
| 5579 | HSD17B4/ | R9471 | HNF4A(1-474)(K179R K180R) | opt1 | hSL- | 115 | 264 |
| | PSMB3; a-1 | | HA-tag | | A100 | | |
| 5580 | HSD17B4/ | R9472 | HNF4A(1-474)(K234R) HA-tag | opt1 | hSL- | 116 | 265 |
| | PSMB3; a-1 | | | | A100 | | |
| 5581 | HSD17B4/ | R9473 | HNF4A(1-474)(K300R) HA-tag | opt1 | hSL- | 117 | 266 |
| | PSMB3; a-1 | | | | A100 | | |
| 5582 | HSD17B4/ | R9474 | HNF4A(1-474)(K300R K307R | opt1 | hSL- | 118 | 267 |
| | PSMB3; a-1 | | K309R) HA-tag | | A100 | | |
| 5583 | HSD17B4/ | R9475 | HNF4A(1-474)(K447R K470R) | opt1 | hSL- | 119 | 268 |
| | PSMB3; a-1 | | HA-tag | | A100 | | |
| 5584 | HSD17B4/ | R9476 | HNF4A(1-474)(K458R) HA-tag | opt1 | hSL- | 120 | 269 |
| | PSMB3; a-1 | | | | A100 | | |
| 5585 | HSD17B4/ | R9477 | HNF4A(1-474)(K106R K108R | opt1 | hSL- | 121 | 270 |
| | PSMB3; a-1 | | K126R K127R) HA-tag | | A100 | | |
| 5586 | HSD17B4/ | R9480 | HNF4A(1-474)(E285Q) HA-tag | opt1 | hSL- | 122 | 271 |
| | PSMB3; a-1 | | | | A100 | | |
| 5587 | HSD17B4/ | R9481 | HNF4A(1-474)(T166E) HA-tag | opt1 | hSL- | 123 | 272 |
| | PSMB3; a-1 | | | | A100 | | |
| 5588 | HSD17B4/ | R9532 | HNF4A(1-474)(S148A) HA-tag | opt1 | hSL- | 124 | 273 |
| | PSMB3; a-1 | | | | A100 | | |
| 5589 | HSD17B4/ | R9533 | HNF4A(1-474)(S148E) HA-tag | opt1 | hSL- | 125 | 274 |
| | PSMB3; a-1 | | | | A100 | | |
| 5590 | HSD17B4/ | R9534 | HNF4A(1-474)(S183A) HA-tag | opt1 | hSL- | 126 | 275 |
| | PSMB3; a-1 | | | | A100 | | |
| 5591 | HSD17B4/ | R9535 | HNF4A(1-474)(S183E) HA-tag | opt1 | hSL- | 127 | 276 |
| | PSMB3; a-1 | | | | A100 | | |
| 5592 | HSD17B4/ | R9536 | HNF4A(1-474)(S461A) HA-tag | opt1 | hSL- | 128 | 277 |
| | PSMB3; a-1 | | | | A100 | | |
| 5593 | HSD17B4/ | R9537 | HNF4A(1-474)(S461E) HA-tag | opt1 | hSL- | 129 | 278 |
| | PSMB3; a-1 | | | | A100 | | |
| 5594 | HSD17B4/ | R9849 | HNF4A(1-474)(S142A S143A | opt1 | hSL- | 130 | 279 |
| | PSMB3; a-1 | | S313A) HA-tag | | A100 | | |
| 5595 | HSD17B4/ | R9850 | HNF4A(1-474)(S142A S143A | opt1 | hSL- | 131 | 280 |
| | PSMB3; a-1 | | S313A K458R) HA-tag | | A100 | | |
| 5596 | HSD17B4/ | R9851 | HNF4A(1-474)(S142A S143A | opt1 | hSL- | 132 | 281 |
| | PSMB3; a-1 | | S167A S313A S378A T429A T432A | | A100 | | |
| | | | S436A K458R) HA-tag | | | | |
| 5597 | HSD17B4/ | R9852 | HNF4A(1-474)(S142A S143A | opt1 | hSL- | 133 | 282 |
| | PSMB3; a-1 | | S148A S167A S313A S378A T429A | | A100 | | |
| | | | T432A S436A K458R) HA-tag | | | | |
| 5598 | HSD17B4/ | R9853 | HNF4A(1-474)(K106R K108R | opt1 | hSL- | 134 | 283 |
| | PSMB3; a-1 | | K126R K127R S142A S143A S148A | | A100 | | |
| | | | S167A S313A S378A T429A T432A | | | | |
| | | | S436A K458R) HA-tag | | | | |
| 5599 | HSD17B4/ | R9873 | HNF4A(1-474)(S142A S143A | opt1 | hSL- | 135 | 284 |
| | PSMB3; a-1 | | S148A T166A S167A S313A S378A | | A100 | | |
| | | | T429A T432A S436A K458R) | | | | |
| | | | HA-tag | | | | |
| 5600 | HSD17B4/ | R9874 | HNF4A(1-474)(S87A S142A S143A | opt1 | hSL- | 136 | 285 |
| | PSMB3; a-1 | | S148A T166A S167A S313A S378A | | A100 | | |
| | | | T429A T432A S436A K458R) | | | | |
| | | | HA-tag | | | | |
| 5601 | HSD17B4/ | R9875 | HNF4A(1-474)(S87A K106R K108R | opt1 | hSL- | 137 | 286 |
| | PSMB3; a-1 | | K126R K127R S142A S143A S148A | | A100 | | |
| | | | T166A S167A S313A S378A T429A | | | | |
| | | | T432A S436A K458R) HA-tag | | | | |
| 5602 | HSD17B4/ | R10313 | HNF4A(1-474)(S87A K106R K108R | opt1 | hSL- | 138 | 287 |
| | PSMB3; a-1 | | K126R K127R) HA-tag | | A100 | | |
| 5603 | HSD17B4/ | R10314 | HNF4A(1-474)(S87A K106R K108R | opt1 | hSL- | 139 | 288 |
| | PSMB3; a-1 | | K126R K127R S142A S143A S148A | | A100 | | |
| | | | T166A S167A S313A S378A T429A | | | | |
| | | | T432A S436A K458R S461A) | | | | |
| | | | HA-tag | | | | |
| 5604 | HSD17B4/ | R10315 | HNF4A(1-474)(S87A K106R K108R | opt1 | hSL- | 140 | 289 |
| | PSMB3; a-1 | | K126R K127R S142A S143A S148A | | A100 | | |
| | | | T166A S167A S313A S378A T429A | | | | |
| | | | T432A S436A K458R S461E) | | | | |
| | | | HA-tag | | | | |
| 5605 | HSD17B4/ | R10316 | HNF4A(1-474)(S87A K106R K108R | opt1 | hSL- | 141 | 290 |
| | PSMB3; a-1 | | K126R K127R S142A S143A S148E | | A100 | | |
| | | | T166A S167E S313A S378E T429E | | | | |
| | | | T432E S436E K458R S461E) | | | | |
| | | | HA-tag | | | | |
| 5606 | HSD17B4/ | R10317 | HNF4A(1-474)(S87A K106R K108R | opt1 | hSL- | 142 | 291 |
| | PSMB3; a-1 | | K126R K127R S142A S143A S148A | | A100 | | |
| | | | T166A S167A K179R K180R S313A | | | | |
| | | | S378A T429A T432A S436A K458R | | | | |
| | | | S461E) HA-tag | | | | |
| 5607 | HSD17B4/ | R10318 | HNF4A(1-474)(S87A K106R K108R | opt1 | hSL- | 143 | 292 |
| | PSMB3; a-1 | | K126R K127R S142A S143A S148A | | A100 | | |
| | | | T166A S167A K300R K307R K309R | | | | |
| | | | S313A S378A T429A T432A S436A | | | | |
| | | | K458R S461E) HA-tag | | | | |
| 5608 | HSD17B4/ | R10319 | HNF4A(1-474)(S87A K106R K108R | opt1 | hSL- | 144 | 293 |
| | PSMB3; a-1 | | K126R K127R S142A S143A S148A | | A100 | | |
| | | | T166A S167A S313A S378A T429A | | | | |
| | | | T432A S436A K447R K458R S461E | | | | |
| | | | K470R) HA-tag | | | | |
| 5609 | HSD17B4/ | R10320 | HNF4A(1-474)(S87A K106R K108R | opt1 | hSL- | 145 | 294 |
| | PSMB3; a-1 | | K126R K127R S142A S143A S148A | | A100 | | |
| | | | T166A S167A K179R K180R K234R | | | | |
| | | | K300R K307R K309R S313A S378A | | | | |
| | | | T429A T432A S436A K447R K458R | | | | |
| | | | S461E K470R) HA-tag | | | | |
| 5610 | HSD17B4/ | R10321 | HNF4A(1-474)(S87A S95A S99A | opt1 | hSL- | 146 | 295 |
| | PSMB3; a-1 | | K106R K108R K126R K127R S142A | | A100 | | |
| | | | S143A S148A T166A S167A S313A | | | | |
| | | | S378A T429A T432A S436A K458R | | | | |
| | | | S461E) HA-tag | | | | |
| 5611 | HSD17B4/ | R10322 | HNF4A(1-474)(S87A K106R K108R | opt1 | hSL- | 147 | 296 |
| | PSMB3; a-1 | | K126R K127R S138A T139A S142A | | A100 | | |
| | | | S143A S148A T166A S167A S313A | | | | |
| | | | S378A T429A T432A S436A K458R | | | | |
| | | | S461E) HA-tag | | | | |
| 5612 | HSD17B4/ | R10323 | HNF4A(1-474)(S87A S95A S99A | opt1 | hSL- | 148 | 297 |
| | PSMB3; a-1 | | K106R K108R K126R K127R S138A | | A100 | | |
| | | | T139A S142A S143A S148A T166A | | | | |
| | | | S167A S313A S378A T429A T432A | | | | |
| | | | S436A K458R S461E) HA-tag | | | | |
| 5613 | HSD17B4/ | R9478 | HNF4A(1-375) HA-tag | opt1 | hSL- | 149 | 692 |
| | PSMB3; a-1 | | | | A100 | | |
| 5614 | HSD17B4/ | R9479 | HNF4A(39-474) HA-tag | opt1 | hSL- | 198 | 1135 |
| | PSMB3; a-1 | | | | A100 | | |
| 5615 | HSD17B4/ | R9697 | HNF4A(1-474) HA-tag | opt29 | hSL- | 100 | 641 |
| | PSMB3; a-1 | | | | A100 | | |
| 2907 | HSD17B4/ | R10692 | HNF4A(1-474) | opt1 | hSL- | 100 | 249 |
| | PSMB3; a-1 | | | | A100 | | |
| 2947 | HSD17B4/ | R10665 | HNF4A(1-474) | opt1 | hSL- | 140 | 289 |
| | PSMB3; a-1 | | (S87A_K106R_K108R_K126R_{—} | | A100 | | |
| | | | K127R_S142A_S143A_S148A_{—} | | | | |
| | | | T166A_S167A_S313A_S378A_{—} | | | | |
| | | | T429A_T432A_S436A_K458R_S461E) | | | | |

[0797] In certain examples, e.g. Example 2, the mRNA from the basic enhanced fluorescent green fluorescent protein (EGFP) served as control SEQ ID NO: 5713). To enable detection and direct comparison of protein abundance, both HNF4A variants and EGFP were fused to a triple hemagglutinin tag (3×HA tag).

[0798] In further examples, mRNA from the basic constitutively fluorescent green fluorescent protein ZsGreen (derived from Zoanthus sp., SEQ ID NO:5714) were used as control and were produced and formulated analogously as described above or below.

[0799] For in vivo studies, mRNAs were further polyadenylated using A-Plus Poly (A) Polymerase Tailing Kit (Biozym) and carried out according to the manufacturer's recommendations.

1.3. Preparation of LNP Formulated mRNA Pharmaceutical Composition:

[0800] If for experimentation mRNAs of the invention encoding engineered HNF4A (see Table Ex-1) were formulated in LNPs, those LNPs were prepared and tested according to the general procedures described in Thess et al. (PMID 26050989), PCT Publication Nos WO2015199952, WO2017004143, WO2017075531 and most preferably WO2018078053, the full disclosures of which are incorporated herein by reference. For designation in the experimental part, the respective amino acid substitutions or deletions or combinations thereof were used, also referring to the designations provided above in Table B-I (combo 1 etc.), as can be seen here for easier reference (see Table Ex-1b).

TABLE Ex-1b
designation of combinations of amino acid substitutions or deletions (for further information
Table B-I shows further exemplary suitable HNF4A protein designs including mRNAs encoding
said proteins including their SEQ ID NOs) - “*” indicates an mRNA with N1-methylpseudouridine
(N1MPU, m1f), “**” indicates an mRNA with pseudouridine (psi-uridine, p)

| | | | Exemplary | Exemplary |
|---|---|---|---|---|
| | | | preferred | preferred |
| | amino acid substitutions or deletions in | PRT SEQ | CDS SEQ | mRNA SEQ |
| Designation | comparison to HNF4A WT protein | ID NO: | ID NO: | ID NO: |
| WT | | 100 | 249 | 2907, 5719, |
| | | | | 5722*, 5725** |
| S87A | S87A | 111 | 260 | 2918 |
| S461E | S461E | 129 | 278 | 2936, 5720, |
| | | | | 5723*, 5726** |
| combo 1 | S142A S143A S313A | 130 | 279 | 2937 |
| combo 2 | S142A S143A S313A K458R | 131 | 280 | 2938 |
| combo 3 | S142A S143A S167A S313A S378A T429A | 132 | 281 | 2939 |
| | T432A S436A K458R | | | |
| combo 4 | S142A S143A S148A S167A S313A S378A | 133 | 282 | 2940 |
| | T429A T432A S436A K458R | | | |
| combo 5 | K106R K108R K126R K127R S142A S143A | 134 | 283 | 2941 |
| | S148A S167A S313A S378A T429A T432A | | | |
| | S436A K458R | | | |
| combo 6 | S142A S143A S148A T166A S167A S313A | 135 | 284 | 2942 |
| | S378A T429A T432A S436A K458R | | | |
| combo 7 | S87A S142A S143A S148A T166A S167A S313A | 136 | 285 | 2943 |
| | S378A T429A T432A S436A K458R | | | |
| combo 8 | S87A K106R K108R K126R K127R S142A S143A | 137 | 286 | 2944 |
| | S148A T166A S167A S313A S378A T429A | | | |
| | T432A S436A K458R | | | |
| combo 9 (S87A | S87A K106R K108R K126R K127R | 138 | 287 | 2945 |
| 4x K to R) | | | | |
| combo 10 (combo | S87A K106R K108R K126R K127R S142A S143A | 139 | 288 | 2946 |
| 8 + S461A) | S148A T166A S167A S313A S378A T429A | | | |
| | T432A S436A K458R S461A | | | |
| combo 11 (combo | S87A K106R K108R K126R K127R S142A S143A | 140 | 289 | 2947, 5721, |
| 8 + S461E) | S148A T166A S167A S313A S378A T429A | | | 5724*, 5727** |
| | T432A S436A K458R S461E | | | |
| combo 12 | S87A K106R K108R K126R K127R S142A S143A | 141 | 290 | 2948 |
| | S148E T166A S167E S313A S378E T429E T432E | | | |
| | S436E K458R S461E | | | |
| combo 13 | S87A K106R K108R K126R K127R S142A S143A | 142 | 291 | 2949 |
| | S148A T166A S167A K179R K180R S313A | | | |
| | S378A T429A T432A S436A K458R S461E | | | |
| combo 14 | S87A K106R K108R K126R K127R S142A S143A | 143 | 292 | 2950 |
| | S148A T166A S167A K300R K307R K309R | | | |
| | S313A S378A T429A T432A S436A K458R | | | |
| | S461E | | | |
| combo 15 | S87A K106R K108R K126R K127R S142A S143A | 144 | 293 | 2951 |
| | S148A T166A S167A S313A S378A T429A | | | |
| | T432A S436A K447R K458R S461E K470R | | | |
| combo 16 | S87A K106R K108R K126R K127R S142A S143A | 145 | 294 | 2952 |
| | S148A T166A S167A K179R K180R K234R | | | |
| | K300R K307R K309R S313A S378A T429A | | | |
| | T432A S436A K447R K458R S461E K470R | | | |
| combo 17 | S87A S95A S99A K106R K108R K126R K127R | 146 | 29 | 2953 |
| | S142A S143A S148A T166A S167A S313A | | | |
| | S378A T429A T432A S436A K458R S461E | | | |
| combo 18 | S87A K106R K108R K126R K127R S138A T139A | 147 | 296 | 2954 |
| | S142A S143A S148A T166A S167A S313A | | | |
| | S378A T429A T432A S436A K458R S461E | | | |
| combo 19 | S87A S95A S99A K106R K108R K126R K127R | 148 | 297 | 2955 |
| | S138A T139A S142A S143A S148A T166A | | | |
| | S167A S313A S378A T429A T432A S436A | | | |
| | K458R S461E | | | |

[0801] Summarized, LNP-formulated mRNAs were prepared using an ionizable amino lipid (cationic lipid), phospholipid, cholesterol and a PEGylated lipid. LNPs were prepared as follows. Cationic lipid according to formula III-3 (ALC-0315; GAS 2036272-55-4), DSPC, cholesterol and PEG-lipid according to formula IVa (ALC-0159) were solubilized in ethanol at a molar ratio of approximately 47.5:10:40.8:1.7 (see Table Ex-2). LNPs comprising compound III-3 were prepared at a ratio of mRNA (sequences see Table Ex-1) to total lipid of 0.03-0.04 weight/weight. Briefly, the mRNA was diluted to 0.05 to 0.2 mg/mL in 10 to 50 mM citrate buffer, pH 4. Syringe pumps were used to mix the ethanolic lipid solution with the mRNA aqueous solution at a ratio of about 1:5 to 1:3 (vol/vol) with total flow rates above 15 ml/min. For injections, the ethanol was then removed and mRNA-LNPs and the external buffer was replaced with phosphate-buffered saline pH 7.4 (PBS) by dialysis. Finally, the LNPs were filtered through a 0.2 μm pore sterile filter. Lipid nanoparticle particle diameter size was 60-90 nm as determined by quasi-elastic light scattering using a Malvern Zetasizer Nano (Malvern, UK).

TABLE EX-2
Lipid-based carrier composition of the examples

| | LNP | Proportion | |
|---|---|---|---|
| | excipients | (mol %) | Structure |
| 1 | Cationic lipid ALC- 0315 CAS 2036272- 55-4 | 47.4 | [chemical structure] |
| 2 | Cholesterol | 40.9 | [chemical structure] |
| 3 | 1,2- distearoyl- sn-glycero-3- phosphocholine (DSPC) | 10 | [chemical structure] |
| 4 | PEG lipid ALC- 0159 CAS 1849616- 42-7 | 1.7 | [chemical structure] Average n = ~49 |

### Example 1B—Routine Methods Used in the Working Examples

### Reverse Transcription and Quantitative PCR (RT-qPCR)

[0802] Livers were taken at indicated time points after injection with mRNA/LNP. For in vitro studies, primary mouse hepatocytes and primary human hepatocytes were cultured according to routine methods. Total RNAs were extracted by Trizol reagent (Qiagen, Hilden, Germany) from cells or tissues according to manufacturer's instructions. cDNA was generated using TaqMan Reverse Transcription Reagents (ThermoFisher Scientific, Waltham, USA). RT-qPCR was performed according to the TaqMan (Invitrogen, Waltham, US) or SYBR Green (ThermoFisher Scientific, Waltham, USA) Gene Expression Assay protocols using a 96-well ABI StepOne Plus Real-Time PCR System (ThermoFisher Scientific, Waltham, USA). Samples were run in triplicate. Relative mRNA expression was determined after normalizing the expression with respect to GAPDH, which was used as a house-keeping gene.

### Blood Chemistry Analyses and Multiple Cytokines and Chemokines Analyses

[0803] 200 μl blood from mice with different treatments and sera were prepared and stored in −80° C. Bilirubin and alanine aminotransferase (ALT) were assayed as indicators of liver function. Plasma multiple cytokines and chemokine concentrations were quantified by multiplex protein arrays kit, according to the manufacturer's protocols (BioRad Laboratories, Hercules, USA). Following cytokines and chemokines were measured according to routine methods: IL-1 beta, IL-2, IL-3, IL-4, IL-10, IL-12p70, IL-13, IL-17, tumor necrosis factor-alpha (TNF-α), and Interferon-gamma (IFN-γ). To normalize the hemodilution at the end of the procedure, all biochemistry and cytokine values were corrected by using the following formula: Value (calculated)=(Value (measured)×Hematocrit (measured))/Hematocrit (baseline)

### Histology, Immunohistochemistry, and Immunofluorescence

[0804] Liver tissues were fixed with 4% formalin, embedded in paraffin, and cut into 5 μm-thick sections for histological and immunohistochemical analyses. For Sirius red staining, following deparaffinization, the sections were stained with Picro-Sirius Red Stain Kit according to manufacturer's instructions (Abcam, ab150681). The sections were hydrated in distilled water and incubated in a picro-Sirius red solution for 60 minutes. After washing slides with acetic acid solution and absolute alcohol, the slides were then dehydrated and subsequently mounted. Immunofluorescence stainings for desmin (Thermo Scientific, RB-9140), CD45 (BioLegend, 103106), F4/80 (Abcam, 6640), SOX9 (Millipore, AB5535) and ALB (Abcam, ab19196) were performed on frozen sections following a standardized protocol. Quantification of immunofluorescence or immunohistochemical staining was performed using ImageJ software in a blinded manner.

### Histological Grading and Staging

[0805] Sections of 2 μm thickness from liver allograft biopsies with a 17 gauge needle were stained with haematoxylin and eosin, elastic van gieson stain, periodic acid-Schiff stain, silver stain, Berlin blue stain and rhodanine stain. Histological examination and scoring for fibrosis stage (Ishak score or Scheuer score) was performed by experienced liver pathologists in blinded fashion.

### Example 2—Evaluation of HNF4A Expression, Stability and Activity

[0806] Expression, stability and activity of the engineered HNF4A protein variants was evaluated in this working example. Therefore, (i) expression was analyzed in HEK293T cells and a HepG2 liver cancer cell line according to standard procedures; for analysis of expression, EGFP was used as reference control, i.e. HepG2 cells were transfected with 2 μg EGFP-3×HA RNA (SEQ ID NO:5713) and (ii) HNF4A-dependent APOA4 target gene induction (APOA4 is an endogenous HNF4A-target) was analyzed further by Western Blot analysis in a quantitative manner.

[0807] Experimental details for APOA4 target gene induction Western Blot analysis are as follows (i.e. reverse transfection of HepG2 cells): on the day of transfection, cells were trypsinized and resuspended in cell line medium+20% FCS (antibiotics-free). mRNAs were complexed with Lipofectamine2000 at a ratio of 1/1.5 (w/v) in Opti-MEM medium (Thermo Fisher) for 20 minutes. 2 μg mRNA of lipocomplexed mRNAs in Opti-MEM (in 1 ml) were then added to 1 million cells in DMEM or RPMI plus 20% FCS (in 1 ml) per 6-well, resulting in a total volume of 2 ml. Cells were maintained at 37° C., 5% CO2.

[0808] 14-16 h post transfection cells were harvested and cell lysis with urea buffer was performed. For cell lysis, 400 μl lysis buffer was added to each 6-well and cells were incubated while rocking in lysis buffer at room temperature for 15 minutes (100 ml Lysis buffer contained as follows: 2M Urea (12.01 g of Urea M=60.06 g/mol BioChemica (A1360)), 4% sucrose (4.02 g of 99.5% sucrose from Sigma (84097)), 5% SDS (25 ml of 20% SDS from Applichem (A0675)) and 1 mM EDTA (37.22 mg EDTA M=372.24 g/mol from Applichem (A2937)), then filled up with H₂O to 100 ml). Resulting lysates were run over a QIAshredder column to remove the precipitated DNA. Finally, protein concentration was measured according to standard protocols in a BCA Assay Kit (Sigma Aldrich, B9643-1L/SLCB6552, C2284-25 mL/SLCB6519, 23208/UG288327D) and Licor Loading Buffer (4×) was added before loading (SDSPage and Western Blot analysis with cell lysates).

[0809] Consequently for detection, a Western Blot was performed according to standard procedures, using HA-tag or ApoA4 antibodies with HSP90 serving as common loading control. Thus, in detail for detection in Western Blot, primary antibodies anti-HA (12CA5) mouse mAb (Roche Cat.: 11583816001, 0.4 mg/ml, dilution 1:1000) and HSP90 (C45G5) rabbit mAb [Cell Signaling Technology (CST) Cat. #4877, dilution 1:2000] as well as ApoA4 (1D6B6) mouse mAb (Cell Signaling Technology (CST) Cat. #5700S, dilution 1:500) and HSP90 (C45G5) rabbit mAb (Cell Signaling Technology (CST) Cat. #4877, dilution 1:2000) were used. As secondary antibody, for antibody detection, for the HA-tag or respectively ApoA4, IRDye 800CW Goat anti-mouse IgG (H+L, LI-COR Biosciences GmbH Cat: 926-32210, dilution 1:10000) and for the HSP90 loading control, IRDye 680RD Goat anti-rabbit IgG (H+L, LI-COR Biosciences GmbH Cat: 926-68071, dilution 1:10000) were used.

[0810] Membranes were incubated with 10 ml of primary antibody dilutions (HA supplemented with milk powder, APOA4 with BSA fraction V) for 4h at room temperature and both membranes were incubated with 10 ml of secondary antibody dilutions for 30 min at room temperature, washed and detection was carried out using an Odyssey CLX image system.

### Results:

[0811] As described above, codon-optimized (GC) mRNA-encoded engineered HNF4A protein variants were compared with equally codon-optimized (GC) HNF4A mRNA encoding the amino acid sequence of unmodified HNF4A WT protein (SEQ ID NO:5564), and analysed for either (i) expression levels in HEK293T and HepG2 cells or (ii) HNF4A-dependent APOA4 target gene induction by Western Blot analysis. Experimental results are displayed in FIG. 1 and FIG. 2.

[0812] Re (i), in vitro expression of HNF4A constructs in HEK293T (data not shown), HepG2 cells (FIG. 1) clearly showed stable and higher expression of codon-optimized (GC) HNF4A in transfected cells as compared to WT HNF4A. Further, nuclear localization of HNF4A proteins was shown (image data from transfected cells and subsequent fluorescent staining with DAPI not shown).

[0813] Re (ii), upregulation of APOA4 protein in HepG2 cells was evaluated upon expression of HNF4A mRNA constructs. As clearly apparent, engineered HNF4A protein variants induced higher APOA4 gene expression i.e. have a higher activity (>2-fold) in HepG2 cells as compared to WT HNF4A (FIG. 2). In particular, S87A and S461E have higher activity (>2-fold).

[0814] Continuing the screening of single and combinatorial mutants regarding increased (i) HNF4A expression and stability and (ii) HNF4A activity, it was found that expression/stability could be increased up to factor ˜2 and activity up to factor ˜14 (see FIG. 3 to FIG. 4). In detail, a synergistic effect of mutant S87A with K106R K108R K126R K127R was revealed and also mutations S87A K106R K108R K126R K127R S142A S143A S148A T166A S167A S313A S378A T429A T432A S436A K458R S461E (combo 11) was identified as being the most potent mutant, having ˜2-fold increased stability and ˜14-fold higher activity relative to wild type HNF4A.

[0815] Thus, as apparent, it was possible to significantly increase HNF4A expression, activity and/or stability in the inventive engineered HNF4A protein variants.

### Example 3—In Vitro WT HNF4A Expression Leads to Improved Function of Fibrotic and Non-Fibrotic Hepatocytes (PHH)

[0816] Liver tissues from fibrotic human livers were isolated by Hannover Medical School (MHH), Germany, and Shanghai Zhongshan Hospital, China and examined by MHH for stage-dependent expression of HNF4A mRNA. The analysis showed, that endogenous HNF4A mRNA levels in patients with liver fibrosis stages 0-4, graded by the Ishak score (Ishak et al., 1995; 22(6):696-9) or S1-S4 stages, graded according to the Scheuer system (Scheuer, J Hepatol. 1991; 13(3):372-4) showed reduced endogenous HNF4A mRNA levels (see FIG. 7). Similarly, HNF4A protein expression was reduced in primary human hepatocytes (PHH) from the fibrotic human livers (data not shown).

[0817] Experimental details regarding the process of RNA extraction and following quantitative PCR (qPCR) analysis to detect the endogenous Hnf4a mRNA expression are as follows. Livers were taken at indicated time points after injection with mRNA/LNP. For in vitro studies, primary mouse hepatocytes and primary human hepatocytes were cultured and treated as mentioned above. Total RNAs were extracted by Trizol reagent (Qiagen) from cells or tissues according to the manufacturer's instructions. cDNA was generated using TaqMan Reverse Transcription Reagents (ThermoFisher). qPCR was performed according to the TaqMan (Invitrogen) or SYBR Green (ThermoFisher) Gene Expression Assay protocols using a 96-well ABI StepOne Plus Real-Time PCR System (ThermoFisher). Samples were run in triplicate. The primer sequences are provided in SEQ ID NO:5616 to SEQ ID NO:5671 (more information on the primers is disclosed in the ST.25 sequence listing under <223> Other Information [here, and throughout the whole specification, it has to be noted that the priority application was filed with a sequence listing in accordance with the WIPO Standard ST.25, which then was converted into a sequence listing according to WIPO Standard ST.26—information which was comprised within line <223> in ST.25 now was added to the respective SEQ ID NO: as a note under “feature key”, i.e. “misc_feature” (for nucleic acids) or “REGION” (for proteins)]) and Table Ex-3. Relative mRNA expression was determined after normalizing the expression with respect to glyceraldehyde-3-phosphate dehydrogenase (GAPDH), which was used as a house-keeping gene.

TABLE Ex-3
primers used for Taqman qPCR

| Probes | ThermoFisher Catalog number |
|---|---|
| GAPDH (Human) | Hs02758991_g1 |
| HNF4A (Human) | Hs00604438_m1 |
| APOA2 (Human) | Hs00155788_m1 |
| APOB (Human) | Hs00181142_m1 |
| F7 (Human) | Hs01551994_m1 |
| Alb (Mouse) | Mm00802090_m1 |
| Apoa2 (Mouse) | Mm00442687_m1 |
| Apob (Mouse) | Mm01545154_g1 |
| Ck19(Krt19, Mouse) | Mm00492980_m1 |
| F7 (Mouse) | Mm00487329_m1 |
| Gapdh (Mouse) | Mm99999915_g1 |
| Hnf4a (Mouse) | Mm00433964_m1 |
| Sox9 (Mouse) | Mm00448840_m1 |
| Ttr (Mouse) | Mm00443267_m1 |

[0818] For analysing the ability of WT HNF4A expression leading to improved function of fibrotic hepatocytes, codon optimized HNF4A mRNA (SEQ ID NO:5715) was transfected into PHH according to routine methods. As control, ZsGreen (SEQ ID NO:5714) was used.

mRNA Transfection

[0819] Primary mouse hepatocytes (PMH) and primary human hepatocytes (PHH) were cultured in hepatocytes culture medium (HCM), which was prepared by adding chemicals from HCM SingleQuots Kit into hepatocytes basal medium. LX2 cells and HeLa cells were cultured in high glucose (4.5 g/l) DMEM GlutaMAX medium containing 10% heat-inactivated FBS, 1% non-essential amino acid solution (NEAA), 1% penicillin/streptomycin, and 0.2% 2-mercaptoethanol. For in vitro mRNA transfection, HNF4A mRNA or ZsGreen mRNA were complexed with lipofectamine MessengerMAX following manufacturer's instructions. Briefly, cells were washed with PBS, and the medium was replaced with Gibco Opti-medium before transfection. 1 μg, 0.5 μg, and 0.25 μg mRNA were used to transfect 6-well, 12-well, and 24-well plates, respectively. mRNA/lipofectamine MessengerMAX complex was prepared by keeping a 1:3 ratio.

[0820] Thereby, it was confirmed, that codon optimized mRNA was functionally active as indicated by significant upregulation of HNF4A-target genes APOA2, APOB and F7 (results see FIG. 8).

[0821] Transfection of PHH with HNF4A mRNA further restored impaired functions in PHH from fibrotic livers, as qPCR analyses showed significantly increased or respectively upregulated expression of hepatocyte markers albumin (ALB), alpha-1 antitrypsin (A1A7), transferrin (TF) and transthyretin (TTR) (see FIG. 9) and of various enzymes involved in phase I and phase II drug-metabolism and phase III drug transporters (see FIG. 10). Similar results were achieved upon HNF4A WT mRNA transfection of hepatocytes from non-fibrotic livers (data not shown).

[0822] Also a significant increase in secreted protein levels of ALB and A1AT in PHH transfected with HNF4A mRNA further showed that HNF4A WT mRNA in fibrotic PHH was able to revive function of said PHH (FIG. 11).

### Example 4—In Vitro WT HNF4A Expression Leads to Improved Function of Fibrotic and Non-Fibrotic Hepatocytes (PMH)

[0823] Analogously to the previous working example, it was tested whether HNF4A mRNA delivery (SEQ ID NO:5715 encoding WT HNF4A protein) restores the function of fibrotic primary mouse hepatocytes (PMH), which showed reduced levels of endogenous Hnf4a mRNA due to induction of acute liver injury through bi-weekly carbon tetrachloride injections for 8 to 16 weeks (details for this procedure, which is applicable also for other working examples, is shown herein below).

[0824] In detail, for establishing the liver fibrosis or cirrhosis mouse model, 8-12 weeks old male BALB/c mice were injected via intraperitoneal (i.p.) route with 4 μl/g 10% CCl₄/olive oil, twice a week for 8 weeks (fibrosis) and 16 weeks (cirrhosis), or fed with 3,5-diethoxycarbonyl-1,4-dihydrocollidine (DDC, cholestasis-induced fibrosis) consistently for six weeks according to routine procedures known in the art. Bleeds were performed via sub-mandibular route or via tail nick on scheduled days. Approximately 100 μl of whole blood was collected in serum separator tubes and serum was prepared and stored at −20° C.

[0825] As DNASTAR MegAlign showed 95.8% sequence homology between human HNF4A and mouse Hnf4a (comparison not shown), therefore DNA binding domains of both exhibit similar molecular function due to high homology. To determine whether HNF4A mRNA (SEQ ID NO:5715) inhibits liver cirrhosis in mice, firstly ZsGreen mRNA was used as control in PMH to verify the potential to transfect relevant cells in mice, leading to expression of the encoded mRNA. Transfected cells showed robust protein ZsGreen expression (see immunofluorescence images of FIG. 12).

[0826] As apparent, HNF4A mRNA transfection induced expression of target genes in PMH (see FIG. 13) and led to restoration of functions in fibrotic PMH (see FIG. 14); control experiments were performed with PMH isolated from WT mice without CCl₄ treatment.

[0827] Results: As apparent from FIG. 13 to FIG. 14, detailed in vitro analyses confirmed human HNF4A mRNA delivered into PMH improved functions, as was observed in PHH.

### Example 5—In Vivo Verification of Liver Fibrosis Inhibition in Mouse Model Upon HNF4A mRNA Delivery Encoding HNF4A WT Protein

[0828] In the present working example, in vivo targeted delivery of LNP-encapsulated HNF4A-mRNA (SEQ ID NO:5715, encoding HNF4A WT protein) into hepatocytes of fibrotic livers in mice was tested for therapeutic effects.

[0829] In detail for testing whether systemic administration of LNP-formulated mRNA encoding HNF4A WT protein inhibits liver fibrosis, the above described liver fibrosis mouse model with toxin- (repeated i.p. CCl₄ injection until termination, 16×) (FIG. 15-1 A-H) or cholestasis-induced fibrosis (induced via 3,5-diethoxycarbonyl-1,4-dihydrocollidine (DDC)-containing diet, continued diet until termination) (FIG. 15-2 I-P) were used. Efficacy of HNF4A/LNP was further compared with recombinant adeno-associated virus (AAV) vector serotype 8 (AAV8), by injecting fibrotic mice with 1×10¹¹ AAV8 particles, encoding optimized human HNF4A under transthyretin promoter.

[0830] Accordingly, LNP-formulated mRNA encoding HNF4A WT protein was injected into the animals via intravenous route (i.v.) starting on day 84 post CCl₄/DDC administration initiation. Treatment interval (6 repetitive injections) for HNF4A or ZsGreen mRNA was 5 days while a single injection was chosen for AAV control. A further control mice group received PBS buffer only. Final harvest was performed on day 112, i.e. all animals were weighed, blood was extracted by cardiac bleed for serum preparation, and the animals were euthanized followed by gross necropsy. Subsequently, the liver of each animal was harvested and prepared for further experimentation as described above (Hnf4a qPCRs, Western blots showing HNF4A protein expression, Liver function tests for ALT and bilirubin showing potentially reduced injury upon HNF4A/LNP administration. hydroxyproline assay, preparing of immunohistochemical images of H&E, desmin, and Sirius red stainings; all performed according to standard procedures which are routine for the skilled artisan, exemplary shown in working example 1B).

[0831] Results: HNF4A mRNA levels significantly decreased in fibrotic livers from both models (CCl₄ shown in FIG. 15-1 B, DDC-induced shown in FIG. 15-2 J). HNF4A/LNP or ZsGreen/LNP control were injected iv. in fibrotic mice at 2 mg/kg per injection (FIG. 15-1 A, FIG. 15-2 I). HNF4A protein expression was confirmed in HNF4A/LNP-injected mice livers (FIG. 15-1 C, FIG. 15-2 K) and was absent in control mice, since the HNF4A antibody was only specific to human but not mouse HNF4A. HNF4A/LNP-injected mice showed significantly reduced alanine aminotransferase (ALT) (FIG. 15-1 D) and bilirubin (FIG. 15-2 L) indicating improved liver function, and significantly reduced levels of collagen, suggesting decreased fibrosis in both CCl₄ (FIG. 15E) and DDC (FIG. 15-2 M) models. Histological analyses, desmin and Sirius red staining further confirmed reduced fibrosis from CCl₄ (FIG. 15-1 F-G) and DDC groups (FIG. 15-2 N-O). Additionally, qPCR showed significantly decreased expression of fibrogenic marker genes, Col1a1, Col2a1 and Acta2 (FIG. 15-1 H, FIG. 15-2 P).

[0832] Further, liver function test, hydroxyproline assay, histological analyses, desmin and Sirius red staining, and qPCR analyses of fibrogenic genes showed attenuation of liver fibrosis by HNF4A/LNP is comparable to AAV-mediated HNF4A delivery in CCl₄-induced (FIG. 15-1 D-H) or DDC-induced fibrosis (FIG. 15-2 L-P).

[0833] Accordingly, it could be successfully shown, that LNP-formulated mRNA encoding HNF4A WT protein inhibited toxin- and cholestasis-induced liver fibrosis in a several relevant in vivo models.

### Example 6—In Vivo Verification of Liver Cirrhosis Inhibition in Mouse Model Upon HNF4A mRNA Delivery Encoding HNF4A WT Protein

[0834] To determine, whether HNF4A mRNA encoding HNF4A WT protein inhibits liver cirrhosis in mice injected with CCl₄ twice weekly for 16 weeks (FIG. 16A), LNP-formulated mRNA encoding HNF4A WT protein (SEQ ID NO:5715) or LNP-formulated ZsGreen (SEQ ID NO:5714) were administered i.v. starting from 12 weeks, once every 5 days.

[0835] Consequently, HNF4A protein expression was measured by Western blot analyses (FIG. 16C), injury was assessed through ALT-measurement, and hydroxyproline content, body weight changes, activity score, histology, desmin, Sirius red staining and qPCR analyses for fibrogenic genes were further performed.

[0836] For experimental results see FIG. 16.

[0837] Results: as apparent from FIG. 16, cirrhotic mice showed loss of Hnf4a (FIG. 16B). HNF4A/LNP delivery led to HNF4A protein expression, as determined by Western blot analyses (FIG. 16C). Injury was evaluated by measurement of ALT, hydroxyproline content, body weight changes, activity score, histology, desmin, Sirius red staining and qPCR analyses for fibrogenic genes. All these analyses provided evidence that HNF4A/LNP inhibited liver cirrhosis in mice (FIG. 16D-J).

[0838] Thus, delivery of human HNF4A mRNA inhibited liver injury in a mouse model with features of cirrhosis.

### Example 7—In Vivo Verification of Suppression of Cholestasis and Fibrosis Upon HNF4A mRNA Delivery Encoding HNF4A WT Protein

[0839] In this working example, it was addressed whether HNF4A mRNA encoding HNF4A WT protein is able to suppress injury in multidrug resistance gene 2 knockout mice (Mdr2^{-/-}), a surrogate mouse model of progressive familial intrahepatic cholestasis. 12-week old Mdr2^{-/-} mice were injected with 2 mg/kg HNF4A/LNP (SEQ ID NO:5715) or ZsGreen/LNP (SEQ ID NO:5714), once every 5 days, before they were sacrificed at 16 weeks of age (FIG. 17A). For this evaluation, expression of Hnf4a mRNA in Mdr2^{-/-} mice was compared to age-matched Friend Virus B (FVB, Jackson Laboratory) background control mice (FIG. 17B). HNF4A protein expression, levels of bilirubin, hydroxyproline content, expression of Ck19, Sox9 and Epcam, injury by histology, desmin and Sirius red staining, and expression of fibrogenic genes, Col1a1, Col2a1 and Acta2 were measured (FIG. 17D-I).

[0840] For experimental results see FIG. 17.

[0841] Results: As apparent from FIG. 17, lower expression of Hnf4a mRNA in Mdr2^{-/-} mice was observed compared to age-matched FVB background control mice (FIG. 17B). Further, HNF4A/LNP-injected mice showed HNF4A protein expression (FIG. 17C), significantly decreased levels of bilirubin, hydroxyproline content, reduced expression of Ck19, Sox9 and Epcam, reduced injury by histology, desmin and Sirius red staining, and decreased expression of fibrogenic genes, Col1a1, Col2a1 and Acta2 (FIG. 17D-I).

[0842] Thus, delivery of LNP-formulated mRNA encoding HNF4A WT protein suppressed cholestasis and fibrosis in Mdr21-mice.

### Example 8—In Vivo Tolerability of Repeated Administration of LNP-Formulated HNF4A mRNA Encoding HNF4A WT Protein

[0843] In this working example, it was tested, whether repeated HNF4A mRNA encoding HNF4A WT protein LNP-administration was well tolerated in CCl₄-induced fibrotic mice. For this, the sera from mice with single or multiple injections with ZsGreen/LNP (SEQ ID NO:5714) or HNF4A/LNP (codon optimized HNF4A mRNA encoding WT HNF4A (SEQ ID NO:5715)) were subjected to cytokine analyses (n=3 mice for single ZsGreen/LNP or HNF4A/LNP injection group, n=6 mice for multiple ZsGreen/LNP or HNF4A/LNP injection group). Serum was collected at 6 hours after a single time mRNA/LNP injection or last injection during multiple mRNA/LNP injection. 2 mg/kg dose was used for both single and multiple injections experiments (for results, see FIG. 18).

[0844] Results: most of the cytokines between single and multiple injections either with ZsGreen/LNP or HNF4A/LNP did not differ significantly. Thus, repeated administration of HNF4A mRNA was found to be well tolerated as for mRNA-doses of up to 2 mg/kg, no significant immune response was induced as apparent from IL-1b, IL-4, IL-12, IL-13, TNF-α, and IFN-γ cytokine measurements.

### Example 9—Restoration of Endogenous Hnf4a Expression Levels after Repeated Delivery of Exogenous HNF4A mRNA Encoding HNF4A WT Protein In Vivo

[0845] To test whether transient delivery of HNF4A/LNP restores endogenous Hnf4a expression, qPCR analyses were performed with mice after 8 weeks of CCl₄ treatment or respectively DDC diet. Mice consequently received HNF4A mRNA treatment as described above (codon optimized HNF4A mRNA encoding WT HNF4A (SEQ ID NO:5715), n=6 for each group except WT control mice (n=4)). For results, see FIG. 19A/B.

[0846] Results: it was shown by qPCR analyses, that endogenous Hnf4a was downregulated after 8 weeks of CCl₄ treatment or in DDC model mice, however endogenous HNF4A expression increased significantly in mice injected with multiple doses of HNF4A/LNP, indicating a long-lasting phenotypic change in hepatocytes.

[0847] Consequently, it could be shown that the endogenous Hnf4a expression level was restored after repeated delivery of exogenous HNF4A mRNA.

### Example 10—Suppression and Reversal of Liver Cirrhosis in an In Vivo Disease Mouse Model Upon Administration of mRNA Encoding Engineered HNF4A Protein Variants

[0848] To determine, whether mRNA encoding engineered HNF4A protein variant combo 11 inhibits, reverses and/or attenuates liver cirrhosis in vivo, LNP-formulated mRNA encoding WT HNF4A protein and LNP-formulated mRNA encoding engineered HNF4A protein variant combo 11 were administered to a cirrhotic disease mice model. PBS buffer injection served as a control, as indicated in below Table Ex-4.

[0849] In detail, consistent with previous studies, for induction of cirrhosis in mice, mice were injected with CCl₄ every five days for 12 weeks. During treatment phase, the resulting cirrhotic mice were injected i.v. 6 times every 5 days with 0.3 mg/kg of mRNA according to Table Ex-4. In parallel to treatment injections during treatment phase, injection of CCl₄ was continued every 5 days to keep up the fibrosis/cirrhosis trigger. 24 hours after the last i.v. injection, mice were sacrificed and prepared for analysis. A schematic experimental overview is shown in FIG. 20.

TABLE Ex-4
in vivo verification of liver cirrhosis inhibition in mouse model upon
HNF4A mRNA delivery, either encoding WT HNF4A protein (SEQ ID NO: 100)
or encoding engineered HNF4A protein variant combo 11 (SEQ ID NO: 2947).
mRNA was formulated as described above in state of the art LNPs.

| | | | | | Dose, |
|---|---|---|---|---|---|
| | | | | | injection |
| Group | | | SEQ ID NO | No. of | route and |
| No. | Group | HNF4A protein version | (PRT/mRNA) | animals | schedule |
| 1 | no CCl₄ + PBS | N/A | N/A | 3 | N/A |
| | (control 1) | | | | |
| 2 | CCl4 + PBS | N/A | N/A | 3 | N/A |
| | (control 2) | | | | |
| 3 | CCl₄ + WT HNF4A | WT HNF4A | 100/2907 | 4 | 0.3 mg/kg |
| | | | | | 6 i.v. |
| 4 | CCl₄ + engineered | combo 11 (S87A K106R | 140/2947 | 4 | injections |
| | HNF4A protein | K108R K126R K127R S142A | | | every 5 days |
| | variant combo 11 | S143A S148A T166A S167A | | | |
| | | S313A S378A T429A T432A | | | |
| | | S436A K458R S461E) | | | |

[0850] In a subsequent detailed analysis phase,
[0851] Hydroxyproline assay;
[0852] Sirius red stainings;
[0853] Col1a1 qPCRs;
[0854] Desmin stainings;
[0855] Acta2 qPCRs; and
[0856] ALT measurements;

[0857] were performed, to determine, whether administration of mRNA encoding engineered HNF4A protein variants, can inhibit, reverse and/or attenuate liver cirrhosis in an in vivo model. All analyses were performed according to standard procedures which are routine for the skilled artisan, exemplary shown in working example 1B.

[0858] Results: it was shown by
[0859] Hydroxyproline assay (for details see FIG. 21);
[0860] Sirius red staining and quantification (for details see FIG. 22);
[0861] Col1a1 qPCR (for details see FIG. 23);
[0862] Desmin staining and quantification (for details see FIG. 24);
[0863] Acta2 qPCR (for details see FIG. 25); and
[0864] ALT (alanine aminotransferase) measurements (for details see FIG. 26);

[0865] analyses, that engineered HNF4A protein variant combo 11 was effective at doses of even 0.3 mg/kg for treating and/or suppressing liver cirrhosis. As apparent from FIG. 21 to FIG. 26, mRNA encoding engineered HNF4A protein variant combo 11 was more potent than mRNA encoding WT HNF4A following statistical analysis (p value comparison), especially regarding effects on hydroxyproline, sirus red staining, desmin staining, and Acta2 RNA levels. As apparent from FIG. 23, the detected Col1a1 RNA levels were comparable for the CCl₄ treated control and mRNA encoding WT HNF4A at 0.3 mg/kg, indicating that the mRNA encoding WT HNF4A was less efficient at this low dose and behaving as loss-of-function. In contrast, mRNA encoding combo 11 still decreased Col1a1 RNA levels at 0.3 mg/kg, confirming the conclusion that mRNA encoding engineered HNF4A protein variant combo 11 was more potent than mRNA encoding WT HNF4A. In conclusion, it could be verified in an in vivo model, that liver cirrhosis can be inhibited, reversed and/or attenuated upon administration of mRNA encoding engineered HNF4A protein variants, especially engineered HNF4A protein variant combo 11 (S87A K106R K108R K126R K127R S142A S143A S148A T166A S167A S313A S378A T429A T432A S436A K458R S461E).

### Example 11 [Prophetic]—In Vivo Verification of Liver Cirrhosis Inhibition in Mouse Model Upon HNF4A mRNA Delivery Encoding Engineered HNF4A Protein Variant S461E

[0866] To determine, whether mRNA encoding further engineered HNF4A protein variants inhibit and/or cure liver cirrhosis in vivo, LNP-formulated mRNA encoding WT HNF4A protein and LNP-formulated mRNA encoding engineered HNF4A protein variants are administered to a cirrhotic disease mice model. Buffer serves as a control as indicated in below Table Ex-5.

[0867] In detail, similar to previous procedures, for induction of cirrhosis in mice, mice are injected with CCl₄ every five days for 12 weeks. During treatment phase, the resulting cirrhotic mice are injected i.v. 6 times every 5 days with 0.1 mg/kg or 0.3 mg/kg of mRNA according to Table Ex-5. In parallel to treatment injections during treatment phase, also CCl₄ is injected every 5 days to further keep up the fibrosis/cirrhosis trigger. 24 hours after the last i.v. injection, mice are sacrificed and prepared for further analysis. A schematic experimental overview is shown in FIG. 20.

TABLE Ex-5
in vivo verification of liver cirrhosis inhibition in mouse model upon HNF4A mRNA delivery,
either encoding WT HNF4A protein (SEQ ID NO: 100) or encoding engineered HNF4A protein
variants. mRNA is formulated as described above in state of the art LNPs.

| | | | | | Dose, |
|---|---|---|---|---|---|
| | | | | | injection |
| Group | | | SEQ ID NO | No. of | route and |
| No. | Group | HNF4A protein version | (PRT/mRNA) | animals | schedule |
| 1 | no CCl₄ + PBS | N/A | N/A | 3 | N/A |
| | (control 1) | | | | |
| 2 | CCl4 + PBS | N/A | N/A | 3 | N/A |
| | (control 2) | | | | |
| 3 | CCl₄ + WT HNF4A | WT HNF4A | 100/2907 | 4 | 0.3 mg/kg |
| 4 | CCl₄ + engineered | S461E | 129/2936 | 4 | 6 i.v. |
| | HNF4A protein | | | | injections |
| | variant S461E | | | | every 5 days |
| 5 | CCl₄ + engineered | S461E | 129/5720 | 4 | |
| | HNF4A protein | | | | |
| | variant S461E | | | | |
| 6 | CCl₄ + engineered | S461E | 129/5723 | 4 | |
| | HNF4A protein | | | | |
| | variant S461E | | | | |
| 7 | CCl₄ + engineered | S461E | 129/5726 | 4 | |
| | HNF4A protein | | | | |
| | variant S461E | | | | |
| 8 | CCl₄ + WT HNF4A | WT HNF4A | 100/2907 | 4 | 0.1 mg/kg |
| 9 | CCl₄ + engineered | S461E | 129/2936 | 4 | 6 i.v. |
| | HNF4A protein | | | | injections |
| | variant S461E | | | | every 5 days |
| 10 | CCl₄ + engineered | S461E | 129/5720 | 4 | |
| | HNF4A protein | | | | |
| | variant S461E | | | | |
| 11 | CCl₄ + engineered | S461E | 129/5723 | 4 | |
| | HNF4A protein | | | | |
| | variant S461E | | | | |
| 12 | CCl₄ + engineered | S461E | 129/5726 | 4 | |
| | HNF4A protein | | | | |
| | variant S461E | | | | |

[0868] In a subsequent detailed analysis phase,
[0869] hydroxyproline assays;
[0870] Sirius red stainings;
[0871] Col1a1 qPCRs;
[0872] Desmin stainings;
[0873] Acta2 qPCRs; and
[0874] ALT measurements;

[0875] are performed, to find out, whether administration of mRNA encoding engineered HNF4A protein variants, can inhibit and/or cure liver cirrhosis in an in vivo model. All analyses are performed according to standard procedures which are routine for the skilled artisan, exemplary shown in working example 1B.

[0876] Results: it is shown by
[0877] hydroxyproline assay;
[0878] Sirius red staining;
[0879] Col1a1 qPCR;
[0880] Desmin staining;
[0881] Acta2 qPCR; and
[0882] ALT;

[0883] measurement and analyses, that engineered HNF4A protein variants are effective for treating and/or suppressing cirrhosis.

1. An isolated mRNA encoding
(i) an engineered hepatocyte nuclear factor 4 alpha (HNF4A) protein variant comprising one or more amino acid substitution, deletion, and/or insertion mutation leading to an increased HNF4A transcriptional activity, DNA binding capacity, stability, longer-lasting HNF4A half-life and/or therapeutic effect as compared to the unmodified human wild type HNF4A protein according to SEQ ID NO:100, preferably an engineered HNF4A comprising a S87A mutation and/or a S461E mutation, more preferably an engineered HNF4A comprising a S461E mutation; or
(ii) wild type hepatocyte nuclear factor 4 alpha (HNF4A);
for use in treating, reversing, preventing, attenuating or inhibiting a liver disease, preferably selected from the group consisting of liver fibrosis, liver cirrhosis, hepatocellular carcinoma (HCC), non-alcoholic fatty liver disease (NAFLD), non-alcoholic steatohepatitis (NASH) and liver cancer, more preferably treating, preventing, attenuating or inhibiting liver fibrosis or liver cirrhosis.

2. The mRNA of claim 1(i) for use according to claim 1, wherein said mRNA comprises an open reading frame (ORF) encoding an engineered HNF4A comprising one or more amino acid substitution, deletion, and/or insertion mutation leading to an increased HNF4A transcriptional activity, DNA binding capacity, stability, longer-lasting HNF4A half-life and/or therapeutic effect as compared to the unmodified human wild type HNF4A protein according to SEQ ID NO:100,
preferably an engineered HNF4A comprising (i) a S87A mutation, (ii) a S461E mutation, (iii) a S87A and a S461E mutation, (iv) S87A K106R K108R K126R K127R, preferably SEQ ID NO:138, (v) S87A K106R K108R K126R K127R S142A S143A S148A T166A S167A S313A S378A T429A T432A S436A K458R, preferably SEQ ID NO:186 or (vi) S87A K106R K108R K126R K127R S142A S143A S148A T166A S167A S313A S378A T429A T432A S436A K458R S461E mutations, preferably SEQ ID NO:140,
more preferably an engineered HNF4A comprising an amino acid sequence having at least 80%, 81%, 82%, 83%, 84%, 85%, 86%, 87%, 88%, 89%, 90%, 91%, 92%, 93%, 94%, 95%, 96%, 97%, 98%, 99%,
or 100% sequence identity to any one of SEQ ID NO:101-246, most preferably to SEQ ID NO:140 having the biological activity of a HNF4A protein;
or a fragment or variant of said sequences having the biological activity of a HNF4A protein.

3. The mRNA according to any one of claim 1 to claim 2, wherein said mRNA preferably has at least 80%, 81%, 82%, 83%, 84%, 85%, 86%, 87%, 88%, 89%, 90%, 91%, 92%, 93%, 94%, 95%, 96%, 97%, 98%, 99%, or 100% sequence identity to any single SEQ ID NO-element of SEQ ID NO:250-297, 299-346, 348-395, 397-444, 446-493, 495-542, 544-591, 593-640, 642-689, 1579-1626, 1628-1675, 1677-1724, 1726-1773, 1775-1822, 1824-1871, 1873-1920, 1922-1969, 1971-2018, 2908-2955, 2957-3004, 3006-3053, 3055-3102, 3104-3151, 3153-3200, 3202-3249, 3251-3298, 3300-3347, 4237-4284, 4286-4333, 4335-4382, 4384-4431, 4433-4480, 4482-4529, 4531-4578, 4580-4627, 4629-4676, 5720, 5721, 5723, 5724, 5726, 5727, 5729, 5730, 5732, 5733, 5735, and 5736, or a fragment or variant of said sequences, wherein the encoded protein has the biological activity of a HNF4A protein.

4. The mRNA according to any one of claim 2 to claim 3, wherein said engineered HNF4A comprises at least one substitution or substitution set at one or more positions selected from the group consisting of R2V, KSV, K179R, K180R, K234R, K300R, K307R, K309R, K447R, K470R, K458R, K106R, K108R, K126R, K127R, S313A, S313E, S142A, S143A, S142E, S143E, T166A, T166E, S148A, S148E, S183A, S183E, S461A, S461E, S167A, S167E, S378A, T429A, T432A, S436A, S378E, T429E, T432E, S436E, S87A, S87E, S95A, S99A, S138A, and T139A and/or combinations thereof, preferably an engineered HNF4A comprising (i) a S87A mutation, (ii) a S461E mutation, (iii) a S87A and a S461E mutation, (iv) S87A K106R K108R K126R K127R, preferably SEQ ID NO:138, (v) S87A K106R K108R K126R K127R S142A S143A S148A T166A S167A S313A S378A T429A T432A S436A K458R, preferably SEQ ID NO:186 or (vi) S87A K106R K108R K126R K127R S142A S143A S148A T166A S167A S313A S378A T429A T432A S436A K458R S461E mutations, preferably SEQ ID NO:140 and wherein the amino acid positions of said amino acid sequence are numbered with reference to the human wild-type HNF4A protein (SEQ ID NO:100), more preferably an mRNA selected from the group consisting of SEQ ID NO:2947, SEQ ID NO:5721, SEQ ID NO:5724 and SEQ ID NO:5727.

5. The mRNA of claim 1(ii) or claim 2 to claim 4 for use according to claim 1, wherein said mRNA comprises an open reading frame (ORF) encoding an unmodified human wild type hepatocyte nuclear factor 4 alpha (HNF4A) according to SEQ ID NO:100, preferably wherein said mRNA has at least 80%, 81%, 82%, 83%, 84%, 85%, 86%, 87%, 88%, 89%, 90%, 91%, 92%, 93%, 94%, 95%, 96%, 97%, 98%, 99%, or 100% sequence identity to any one of SEQ ID NO:247, 248, 249, 298, 347, 396, 445, 494, 543, 592, 641, 1576, 1577, 1578, 1627, 1676, 1725, 1774, 1823, 1872, 1921, 1970, 2905, 2906, 2907, 2956, 3005, 3054, 3103, 3152, 3201, 3250, 3299, 4234, 4235, 4236, 4285, 4334, 4383, 4432, 4481, 4530, 4579, 4628, 5719, 5722, 5725, 5728, 5731, and 5734 or a fragment or variant of said sequences, wherein the encoded protein has the biological activity of a HNF4A protein, optionally wherein the mRNA further comprises an UTR combination selected from the group consisting of (i) a 5′-UTR derived from a mouse solute carrier family 7 (cationic amino acid transporter, y+ system) (SLC7A3) and a 3′-UTR derived from PSMB3; (ii) a 5′-UTR derived from mouse ribosomal protein L31 (RPL31) and a 3′-UTR derived from a human ribosomal protein S9 (RPS9); (iii) a 5′-UTR derived from ubiquilin 2 (Ubqln2) and a 3′-UTR derived from Guanine nucleotide-binding protein G(s) subunit alpha isoforms short (Gnas); and (iv) a 5′-UTR derived from a hydroxysteroid (17-beta) dehydrogenase 4 gene (HSD17B4) and a 3′-UTR derived from a proteasome subunit beta type-3 (PSMB3) UTR.

6. The mRNA according to any one of claim 1 to claim 5, wherein the
(i) G/C content of the HNF4A coding sequence in said mRNA is increased compared to the coding sequence of the corresponding wild type HNF4A coding sequence of SEQ ID NO:247 or 248;
(ii) C content of the HNF4A coding sequence in said mRNA is increased compared to the coding sequence of the corresponding wild type HNF4A coding sequence of SEQ ID NO:247 or 248; and/or wherein
(iii) at least one codon of the HNF4A coding sequence in said mRNA is adapted to human codon usage, wherein the codon adaptation index (CAI) is preferably increased or maximised in the corresponding HNF4A coding sequence compared to the coding sequence of the corresponding wild type HNF4A coding sequence of SEQ ID NO:247 or 248.

7. The mRNA according to any one of claim 1 to claim 6, wherein the mRNA comprises a 5′-cap structure, a poly(A) sequence comprising at least 70 A nucleotides, preferably about 100 A nucleotides, a poly(C) sequence, preferably comprising 10 to 200, 10 to 100, 20 to 70, 20 to 60 or 10 to 40 cytosine nucleotides, and/or at least one histone stem-loop, preferably, wherein the mRNA comprises a 3′-terminal A nucleotide.

8. The mRNA according to any one of claim 1 to claim 7, wherein the mRNA comprises, preferably in 5′ to 3′ direction, the following elements:
a) a 5′-cap1 structure;
b) a 5′-UTR element comprising a nucleic acid sequence, preferably derived from a 5′-UTR of a HSD17B4 gene, comprising the nucleic acid sequence according to SEQ ID NO:1 or 2, or a homolog, a fragment or a variant thereof;
c) at least one coding sequence as defined in any one of claim 1 to claim 10;
d) a 3′-UTR element comprising a nucleic acid sequence, preferably derived from a 3′-UTR of a PSMB3 gene, comprising the nucleic acid sequence according to SEQ ID NO:33 or 34, or a homolog, a fragment or a variant thereof;
e) a poly(A) sequence comprising about 100 adenosine nucleotides, preferably, wherein the mRNA comprises a 3′-terminal A nucleotide;
f) an optional poly(C) tail, preferably comprising 10 to 40 cytosine nucleotides; and/or
g) an optional histone stem-loop, preferably comprising the nucleic acid sequence according to SEQ ID NO:63 or 64.

9. The mRNA according to any one of claim 1 to claim 8, wherein the open reading frame does not comprise any chemically modified uracil or cytosine nucleotides.

10. The mRNA according to any one of claim 1 to claim 8, wherein the mRNA is chemically modified, preferably wherein the mRNA comprises pseudouridine (psi-uridine), N1-methylpseudouridine (N1MPU), 2-aminoadenosine, 2-thiothymidine, inosine, pyrrolo-pyrimidine, 3-methyl adenosine, 5-methylcytidine, C-5 propynyl-cytidine, C-5 propynyl-uridine, 2-aminoadenosine, C5-bromouridine, C5-fluorouridine, C5-iodouridine, C5-propynyl-uridine, C5-propynyl-cytidine, C5-methylcytidine, 2-aminoadenosine, 7-deazaadenosme, 7-deazaguanosine, 8-oxoadenosine, 8-oxoguanosine, O(6)-methylguanine, and/or 2-thiocytidine, more preferably wherein all uridine bases of the mRNA are fully chemically modified, even more preferably wherein all uridine bases of the mRNA are pseudouridine or N1-methylpseudouridine (N1MPU) bases, most preferably wherein all uridine bases of the mRNA are N1-methylpseudouridine (N1MPU) bases.

11. A lipid nanoparticle (LNP) comprising the mRNA according to any one of claim 1 to claim 10, wherein the LNP comprises an ionizable or cationic lipid, a phospholipid, a structural lipid, and a polymer conjugated lipid.

12. The LNP according to claim 11, wherein the lipids comprised in the LNP have a molar ratio of about 20-60% cationic or ionizable lipid, about 5-25% non-cationic lipid, about 25-55% sterol and about 0.5-15% polymer conjugated lipid.

13. The LNP according to anyone of claim 11 to claim 12, wherein the LNP does not comprise polyethylene glycol (PEG) or a PEG-modified lipid.

14. A pharmaceutical composition, comprising the mRNA according to any one of claim 1 to claim 10 or the LNP according to any one of claim 11 to claim 13.

15. A kit, preferably kit of parts, comprising at least one mRNA according to any one of claim 1 to claim 10, the LNP according to any one of claim 11 to claim 13, or the pharmaceutical composition according to claim 14, and optionally a liquid vehicle for solubilising and optionally technical instructions with information on the administration and dosage of the pharmaceutical composition.

16. A method of treating, preventing, attenuating or inhibiting a liver disease, preferably selected from the group consisting of liver fibrosis, liver cirrhosis, hepatocellular carcinoma (HCC), non-alcoholic fatty liver disease (NAFLD), non-alcoholic steatohepatitis (NASH) or liver cancer, comprising administering to a human subject in need the mRNA according to any one of claim 1 to claim 10, the LNP according to any one of claim 11 to claim 13, the pharmaceutical composition according to claim 14, or the kit or kit of parts according to claim 15, wherein the administration results in treatment, prevention, attenuation, inhibition, or prophylaxis of the disease.

17. The method according to claim 16, wherein administration of the mRNA to a human subject in need results in
(i) improved hepatocyte metabolic activity; and/or
(ii) revived function of hepatocytes; and/or
(iii) increased mRNA levels of hepatocyte markers such as albumin (ALB), alpha-1 antitrypsin (A1AT), transferrin (TF) and/or transthyretin (TTR) in the liver or hepatocytes; and/or
(iv) reduced expression of fibrogenic marker genes Col1a1, Col2a1 Ck19, Sox9, Epcam, and/or Acta2 in the liver or hepatocytes; and/or
(v) decreased levels of bilirubin, hydroxyproline content in hepatocytes in the liver or hepatocytes; and/or
(vi) reduced liver injury as measured by histology, desmin or Sirius red staining;
(vii) increased expression of transporters of drug metabolism in the liver or hepatocytes;
(viii) increased serum paraoxonase and arylesterase 1 (PON1) expression or activity;
(ix) increased endogenous HNF4A or endogenous HNF1A levels or induction of the endogenous HNF1A-HNF4A transcriptional feedback loop; and/or
(x) function and fitness of hepatocytes;
as when compared to a non-treated human subject in need.

18. The method according to any one of claim 16 to claim 17, wherein the mRNA according to any one of claim 1 to claim 9, or the LNP according to any one of claim 11 to claim 13, or the pharmaceutical composition according to claim 14 or the kit or kit of parts according to claim 15 is administered to the subject by subcutaneous, intramuscular or intravenous administration, preferably intravenous administration.

19. The method according to any one of claim 16 to claim 18, wherein the mRNA comprises a 5′- or 3′-untranslated region (UTR) comprising at least one microRNA-binding site, preferably not being a microRNA-122 (miR-122) binding site, more preferably being miR-16, miR-21, miR-24, miR-27, miR-30c, miR-132, miR-133, miR-149, miR-192, miR-194, miR-204, miR-206, miR-208, or miR-223, most preferably being miRNA-148a, miRNA-101, miRNA-192 or miRNA-194, miR-126, miR-142-3p, or miR-142-5p.

20. The method according to any one of claim 16 to claim 19, wherein the method of treating the liver disease or liver disorder, preferably liver fibrosis, liver cirrhosis, hepatocellular carcinoma (HCC), non-alcoholic fatty liver disease (NAFLD), non-alcoholic steatohepatitis (NASH) or liver cancer, involves a single administration of the mRNA, the LNP, the pharmaceutical composition or the kit or kit of parts.

21. The method according to any one of claim 16 to claim 20, wherein the mRNA, the LNP, the pharmaceutical composition or the kit or kit of parts is administered
(a) once, preferably more than once, more preferably wherein administration is repeated for a period of at least 1 month, at least 2 months, at least 3 months, at least 4 months, at least 5 months, at least 6 months, at least one year, or lifelong; or
(b) about once a day, about once a week, about twice a week, about three times a week, about four times a week, about six or seven times a week, about once every two weeks, about once every three weeks, about once a month, about twice a month, about three times a month, or about four times a month.

22. An isolated mRNA according to any one of claim 1 to claim 10, or LNP according to any one of claim 11 to claim 13 or pharmaceutical composition according to claim 14 or kit or kit of parts according to claim 15, for use as a medicament.

23. An engineered HNF4A protein variant, comprising one or more amino acid exchange(s), leading to an increased HNF4A transcriptional activity, DNA binding capacity, stability, longer-lasting HNF4A half-life and/or therapeutic effect as compared to the unmodified human wild type HNF4A protein according to SEQ ID NO:100, preferably an engineered HNF4A protein variant comprising an amino acid sequence having at least 80%, 81%, 82%, 83%, 84%, 85%, 86%, 87%, 88%, 89%, 90%, 91%, 92%, 93%, 94%, 95%, 96%, 97%, 98%, 99%, or 100% sequence identity to any one of SEQ ID NO:101-246, preferably to SEQ ID NO:138 or SEQ ID NO:140, more preferably an engineered HNF4A comprising (i) a S87A mutation, (ii) a S461E mutation, (iii) a S87A and a S461E mutation, (iv) S87A K106R K108R K126R K127R, preferably SEQ ID NO:138, (v) S87A K106R K108R K126R K127R S142A S143A S148A T166A S167A S313A S378A T429A T432A S436A K458R, preferably SEQ ID NO:186 or (vi) S87A K106R K108R K126R K127R S142A S143A S148A T166A S167A S313A S378A T429A T432A S436A K458R S461E mutations, preferably SEQ ID NO:140.

24. The engineered HNF4A protein variant according to claim 23, for use as a medicament.

25. An isolated mRNA comprising an open reading frame (ORF) encoding an engineered HNF4A protein variant, comprising one or more amino acid exchange(s), leading to an increased HNF4A transcriptional activity, DNA binding capacity, stability, longer-lasting HNF4A half-life and/or therapeutic effect as compared to the unmodified human wild type HNF4A protein according to SEQ ID NO:100, preferably an engineered HNF4A protein variant comprising an amino acid sequence having at least 80%, 81%, 82%, 83%, 84%, 85%, 86%, 87%, 88%, 89%, 90%, 91%, 92%, 93%, 94%, 95%, 96%, 97%, 98%, 99%, or 100% sequence identity to any one of SEQ ID NO:101-246, preferably to SEQ ID NO:138, SEQ ID NO:186 or SEQ ID NO:140, more preferably an engineered HNF4A comprising (i) a S87A mutation, (ii) a S461E mutation, (iii) a S87A and a S461E mutation, (iv) S87A K106R K108R K126R K127R, preferably SEQ ID NO:138, (v) S87A K106R K108R K126R K127R S142A S143A S148A T166A S167A S313A S378A T429A T432A S436A K458R, preferably SEQ ID NO:186 or (vi) S87A K106R K108R K126R K127R S142A S143A S148A T166A S167A S313A S378A T429A T432A S436A K458R S461E mutations, preferably SEQ ID NO:140.

26. An isolated mRNA having at least 80%, 81%, 82%, 83%, 84%, 85%, 86%, 87%, 88%, 89%, 90%, 91%, 92%, 93%, 94%, 95%, 96%, 97%, 98%, 99%, or 100% sequence identity to any one of SEQ ID NO:250, 299, 348, 397, 446, 495, 544, 593, 642, 1579, 1628, 1677, 1726, 1775, 1824, 1873, 1922, 1971, 2908, 2957, 3006, 3055, 3104, 3153, 3202, 3251, 3300, 4237, 4286, 4335, 4384, 4433, 4482, 4531, 4580, 4629, 251, 300, 349, 398, 447, 496, 545, 594, 643, 1580, 1629, 1678, 1727, 1776, 1825, 1874, 1923, 1972, 2909, 2958, 3007, 3056, 3105, 3154, 3203, 3252, 3301, 4238, 4287, 4336, 4385, 4434, 4483, 4532, 4581, 4630, 252, 301, 350, 399, 448, 497, 546, 595, 644, 1581, 1630, 1679, 1728, 1777, 1826, 1875, 1924, 1973, 2910, 2959, 3008, 3057, 3106, 3155, 3204, 3253, 3302, 4239, 4288, 4337, 4386, 4435, 4484, 4533, 4582, 4631, 253, 302, 351, 400, 449, 498, 547, 596, 645, 1582, 1631, 1680, 1729, 1778, 1827, 1876, 1925, 1974, 2911, 2960, 3009, 3058, 3107, 3156, 3205, 3254, 3303, 4240, 4289, 4338, 4387, 4436, 4485, 4534, 4583, 4632, 254, 303, 352, 401, 450, 499, 548, 597, 646, 1583, 1632, 1681, 1730, 1779, 1828, 1877, 1926, 1975, 2912, 2961, 3010, 3059, 3108, 3157, 3206, 3255, 3304, 4241, 4290, 4339, 4388, 4437, 4486, 4535, 4584, 4633, 255, 304, 353, 402, 451, 500, 549, 598, 647, 1584, 1633, 1682, 1731, 1780, 1829, 1878, 1927, 1976, 2913, 2962, 3011, 3060, 3109, 3158, 3207, 3256, 3305, 4242, 4291, 4340, 4389, 4438, 4487, 4536, 4585, 4634, 256, 305, 354, 403, 452, 501, 550, 599, 648, 1585, 1634, 1683, 1732, 1781, 1830, 1879, 1928, 1977, 2914, 2963, 3012, 3061, 3110, 3159, 3208, 3257, 3306, 4243, 4292, 4341, 4390, 4439, 4488, 4537, 4586, 4635, 257, 306, 355, 404, 453, 502, 551, 600, 649, 1586, 1635, 1684, 1733, 1782, 1831, 1880, 1929, 1978, 2915, 2964, 3013, 3062, 3111, 3160, 3209, 3258, 3307, 4244, 4293, 4342, 4391, 4440, 4489, 4538, 4587, 4636, 258, 307, 356, 405, 454, 503, 552, 601, 650, 1587, 1636, 1685, 1734, 1783, 1832, 1881, 1930, 1979, 2916, 2965, 3014, 3063, 3112, 3161, 3210, 3259, 3308, 4245, 4294, 4343, 4392, 4441, 4490, 4539, 4588, 4637, 259, 308, 357, 406, 455, 504, 553, 602, 651, 1588, 1637, 1686, 1735, 1784, 1833, 1882, 1931, 1980, 2917, 2966, 3015, 3064, 3113, 3162, 3211, 3260, 3309, 4246, 4295, 4344, 4393, 4442, 4491, 4540, 4589, 4638, 260, 309, 358, 407, 456, 505, 554, 603, 652, 1589, 1638, 1687, 1736, 1785, 1834, 1883, 1932, 1981, 2918, 2967, 3016, 3065, 3114, 3163, 3212, 3261, 3310, 4247, 4296, 4345, 4394, 4443, 4492, 4541, 4590, 4639, 261, 310, 359, 408, 457, 506, 555, 604, 653, 1590, 1639, 1688, 1737, 1786, 1835, 1884, 1933, 1982, 2919, 2968, 3017, 3066, 3115, 3164, 3213, 3262, 3311, 4248, 4297, 4346, 4395, 4444, 4493, 4542, 4591, 4640, 262, 311, 360, 409, 458, 507, 556, 605, 654, 1591, 1640, 1689, 1738, 1787, 1836, 1885, 1934, 1983, 2920, 2969, 3018, 3067, 3116, 3165, 3214, 3263, 3312, 4249, 4298, 4347, 4396, 4445, 4494, 4543, 4592, 4641, 263, 312, 361, 410, 459, 508, 557, 606, 655, 1592, 1641, 1690, 1739, 1788, 1837, 1886, 1935, 1984, 2921, 2970, 3019, 3068, 3117, 3166, 3215, 3264, 3313, 4250, 4299, 4348, 4397, 4446, 4495, 4544, 4593, 4642, 264, 313, 362, 411, 460, 509, 558, 607, 656, 1593, 1642, 1691, 1740, 1789, 1838, 1887, 1936, 1985, 2922, 2971, 3020, 3069, 3118, 3167, 3216, 3265, 3314, 4251, 4300, 4349, 4398, 4447, 4496, 4545, 4594, 4643, 265, 314, 363, 412, 461, 510, 559, 608, 657, 1594, 1643, 1692, 1741, 1790, 1839, 1888, 1937, 1986, 2923, 2972, 3021, 3070, 3119, 3168, 3217, 3266, 3315, 4252, 4301, 4350, 4399, 4448, 4497, 4546, 4595, 4644, 266, 315, 364, 413, 462, 511, 560, 609, 658, 1595, 1644, 1693, 1742, 1791, 1840, 1889, 1938, 1987, 2924, 2973, 3022, 3071, 3120, 3169, 3218, 3267, 3316, 4253, 4302, 4351, 4400, 4449, 4498, 4547, 4596, 4645, 267, 316, 365, 414, 463, 512, 561, 610, 659, 1596, 1645, 1694, 1743, 1792, 1841, 1890, 1939, 1988, 2925, 2974, 3023, 3072, 3121, 3170, 3219, 3268, 3317, 4254, 4303, 4352, 4401, 4450, 4499, 4548, 4597, 4646, 268, 317, 366, 415, 464, 513, 562, 611, 660, 1597, 1646, 1695, 1744, 1793, 1842, 1891, 1940, 1989, 2926, 2975, 3024, 3073, 3122, 3171, 3220, 3269, 3318, 4255, 4304, 4353, 4402, 4451, 4500, 4549, 4598, 4647, 269, 318, 367, 416, 465, 514, 563, 612, 661, 1598, 1647, 1696, 1745, 1794, 1843, 1892, 1941, 1990, 2927, 2976, 3025, 3074, 3123, 3172, 3221, 3270, 3319, 4256, 4305, 4354, 4403, 4452, 4501, 4550, 4599, 4648, 270, 319, 368, 417, 466, 515, 564, 613, 662, 1599, 1648, 1697, 1746, 1795, 1844, 1893, 1942, 1991, 2928, 2977, 3026, 3075, 3124, 3173, 3222, 3271, 3320, 4257, 4306, 4355, 4404, 4453, 4502, 4551, 4600, 4649, 271, 320, 369, 418, 467, 516, 565, 614, 663, 1600, 1649, 1698, 1747, 1796, 1845, 1894, 1943, 1992, 2929, 2978, 3027, 3076, 3125, 3174, 3223, 3272, 3321, 4258, 4307, 4356, 4405, 4454, 4503, 4552, 4601, 4650, 272, 321, 370, 419, 468, 517, 566, 615, 664, 1601, 1650, 1699, 1748, 1797, 1846, 1895, 1944, 1993, 2930, 2979, 3028, 3077, 3126, 3175, 3224, 3273, 3322, 4259, 4308, 4357, 4406, 4455, 4504, 4553, 4602, 4651, 273, 322, 371, 420, 469, 518, 567, 616, 665, 1602, 1651, 1700, 1749, 1798, 1847, 1896, 1945, 1994, 2931, 2980, 3029, 3078, 3127, 3176, 3225, 3274, 3323, 4260, 4309, 4358, 4407, 4456, 4505, 4554, 4603, 4652, 274, 323, 372, 421, 470, 519, 568, 617, 666, 1603, 1652, 1701, 1750, 1799, 1848, 1897, 1946, 1995, 2932, 2981, 3030, 3079, 3128, 3177, 3226, 3275, 3324, 4261, 4310, 4359, 4408, 4457, 4506, 4555, 4604, 4653, 275, 324, 373, 422, 471, 520, 569, 618, 667, 1604, 1653, 1702, 1751, 1800, 1849, 1898, 1947, 1996, 2933, 2982, 3031, 3080, 3129, 3178, 3227, 3276, 3325, 4262, 4311, 4360, 4409, 4458, 4507, 4556, 4605, 4654, 276, 325, 374, 423, 472, 521, 570, 619, 668, 1605, 1654, 1703, 1752, 1801, 1850, 1899, 1948, 1997, 2934, 2983, 3032, 3081, 3130, 3179, 3228, 3277, 3326, 4263, 4312, 4361, 4410, 4459, 4508, 4557, 4606, 4655, 277, 326, 375, 424, 473, 522, 571, 620, 669, 1606, 1655, 1704, 1753, 1802, 1851, 1900, 1949, 1998, 2935, 2984, 3033, 3082, 3131, 3180, 3229, 3278, 3327, 4264, 4313, 4362, 4411, 4460, 4509, 4558, 4607, 4656, 278, 327, 376, 425, 474, 523, 572, 621, 670, 1607, 1656, 1705, 1754, 1803, 1852, 1901, 1950, 1999, 2936, 2985, 3034, 3083, 3132, 3181, 3230, 3279, 3328, 4265, 4314, 4363, 4412, 4461, 4510, 4559, 4608, 4657, 279, 328, 377, 426, 475, 524, 573, 622, 671, 1608, 1657, 1706, 1755, 1804, 1853, 1902, 1951, 2000, 2937, 2986, 3035, 3084, 3133, 3182, 3231, 3280, 3329, 4266, 4315, 4364, 4413, 4462, 4511, 4560, 4609, 4658, 280, 329, 378, 427, 476, 525, 574, 623, 672, 1609, 1658, 1707, 1756, 1805, 1854, 1903, 1952, 2001, 2938, 2987, 3036, 3085, 3134, 3183, 3232, 3281, 3330, 4267, 4316, 4365, 4414, 4463, 4512, 4561, 4610, 4659, 281, 330, 379, 428, 477, 526, 575, 624, 673, 1610, 1659, 1708, 1757, 1806, 1855, 1904, 1953, 2002, 2939, 2988, 3037, 3086, 3135, 3184, 3233, 3282, 3331, 4268, 4317, 4366, 4415, 4464, 4513, 4562, 4611, 4660, 282, 331, 380, 429, 478, 527, 576, 625, 674, 1611, 1660, 1709, 1758, 1807, 1856, 1905, 1954, 2003, 2940, 2989, 3038, 3087, 3136, 3185, 3234, 3283, 3332, 4269, 4318, 4367, 4416, 4465, 4514, 4563, 4612, 4661, 283, 332, 381, 430, 479, 528, 577, 626, 675, 1612, 1661, 1710, 1759, 1808, 1857, 1906, 1955, 2004, 2941, 2990, 3039, 3088, 3137, 3186, 3235, 3284, 3333, 4270, 4319, 4368, 4417, 4466, 4515, 4564, 4613, 4662, 284, 333, 382, 431, 480, 529, 578, 627, 676, 1613, 1662, 1711, 1760, 1809, 1858, 1907, 1956, 2005, 2942, 2991, 3040, 3089, 3138, 3187, 3236, 3285, 3334, 4271, 4320, 4369, 4418, 4467, 4516, 4565, 4614, 4663, 285, 334, 383, 432, 481, 530, 579, 628, 677, 1614, 1663, 1712, 1761, 1810, 1859, 1908, 1957, 2006, 2943, 2992, 3041, 3090, 3139, 3188, 3237, 3286, 3335, 4272, 4321, 4370, 4419, 4468, 4517, 4566, 4615, 4664, 286, 335, 384, 433, 482, 531, 580, 629, 678, 1615, 1664, 1713, 1762, 1811, 1860, 1909, 1958, 2007, 2944, 2993, 3042, 3091, 3140, 3189, 3238, 3287, 3336, 4273, 4322, 4371, 4420, 4469, 4518, 4567, 4616, 4665, 287, 336, 385, 434, 483, 532, 581, 630, 679, 1616, 1665, 1714, 1763, 1812, 1861, 1910, 1959, 2008, 2945, 2994, 3043, 3092, 3141, 3190, 3239, 3288, 3337, 4274, 4323, 4372, 4421, 4470, 4519, 4568, 4617, 4666, 288, 337, 386, 435, 484, 533, 582, 631, 680, 1617, 1666, 1715, 1764, 1813, 1862, 1911, 1960, 2009, 2946, 2995, 3044, 3093, 3142, 3191, 3240, 3289, 3338, 4275, 4324, 4373, 4422, 4471, 4520, 4569, 4618, 4667, 289, 338, 387, 436, 485, 534, 583, 632, 681, 1618, 1667, 1716, 1765, 1814, 1863, 1912, 1961, 2010, 2947, 2996, 3045, 3094, 3143, 3192, 3241, 3290, 3339, 4276, 4325, 4374, 4423, 4472, 4521, 4570, 4619, 4668, 290, 339, 388, 437, 486, 535, 584, 633, 682, 1619, 1668, 1717, 1766, 1815, 1864, 1913, 1962, 2011, 2948, 2997, 3046, 3095, 3144, 3193, 3242, 3291, 3340, 4277, 4326, 4375, 4424, 4473, 4522, 4571, 4620, 4669, 291, 340, 389, 438, 487, 536, 585, 634, 683, 1620, 1669, 1718, 1767, 1816, 1865, 1914, 1963, 2012, 2949, 2998, 3047, 3096, 3145, 3194, 3243, 3292, 3341, 4278, 4327, 4376, 4425, 4474, 4523, 4572, 4621, 4670, 292, 341, 390, 439, 488, 537, 586, 635, 684, 1621, 1670, 1719, 1768, 1817, 1866, 1915, 1964, 2013, 2950, 2999, 3048, 3097, 3146, 3195, 3244, 3293, 3342, 4279, 4328, 4377, 4426, 4475, 4524, 4573, 4622, 4671, 293, 342, 391, 440, 489, 538, 587, 636, 685, 1622, 1671, 1720, 1769, 1818, 1867, 1916, 1965, 2014, 2951, 3000, 3049, 3098, 3147, 3196, 3245, 3294, 3343, 4280, 4329, 4378, 4427, 4476, 4525, 4574, 4623, 4672, 294, 343, 392, 441, 490, 539, 588, 637, 686, 1623, 1672, 1721, 1770, 1819, 1868, 1917, 1966, 2015, 2952, 3001, 3050, 3099, 3148, 3197, 3246, 3295, 3344, 4281, 4330, 4379, 4428, 4477, 4526, 4575, 4624, 4673, 295, 344, 393, 442, 491, 540, 589, 638, 687, 1624, 1673, 1722, 1771, 1820, 1869, 1918, 1967, 2016, 2953, 3002, 3051, 3100, 3149, 3198, 3247, 3296, 3345, 4282, 4331, 4380, 4429, 4478, 4527, 4576, 4625, 4674, 296, 345, 394, 443, 492, 541, 590, 639, 688, 1625, 1674, 1723, 1772, 1821, 1870, 1919, 1968, 2017, 2954, 3003, 3052, 3101, 3150, 3199, 3248, 3297, 3346, 4283, 4332, 4381, 4430, 4479, 4528, 4577, 4626, 4675, 297, 346, 395, 444, 493, 542, 591, 640, 689, 1626, 1675, 1724, 1773, 1822, 1871, 1920, 1969, 2018, 2955, 3004, 3053, 3102, 3151, 3200, 3249, 3298, 3347, 4284, 4333, 4382, 4431, 4480, 4529, 4578, 4627, 4676, 5720, 5721, 5723, 5724, 5726, 5727, 5729, 5730, 5732, 5733, 5735, and 5736.

27. An isolated mRNA according to any one of claim 1 to claim 10 and claim 25 to claim 26, LNP according to any one of claim 11 to claim 13, pharmaceutical composition according to claim 14, or kit or kit of parts according to claim 15, for use in treating, reversing, preventing, attenuating or inhibiting a liver disease, preferably selected from the group consisting of liver fibrosis, liver cirrhosis, hepatocellular carcinoma (HCC), non-alcoholic fatty liver disease (NAFLD), non-alcoholic steatohepatitis (NASH) and liver cancer in a human subject in need, comprising administering to a human subject in need the wherein the administration results in treatment, prevention, attenuation, inhibition, or prophylaxis of the liver fibrosis, liver cirrhosis, hepatocellular carcinoma (HCC), non-alcoholic fatty liver disease (NAFLD), non-alcoholic steatohepatitis (NASH) or liver cancer.

28. An isolated nucleic acid construct comprising a nucleic acid sequence encoding the mRNA according to claim 8, preferably an isolated nucleic acid construct having at least 80%, 81%, 82%, 83%, 84%, 85%, 86%, 87%, 88%, 89%, 90%, 91%, 92%, 93%, 94%, 95%, 96%, 97%, 98%, 99%, or 100% sequence identity to any one of the sequences selected from the group consisting of SEQ ID NO:1576-5615, 5683-5712, and 5716-5736 or SEQ ID NO:2906, 2956, 3005, 3250, 3299, 5728, 5731, 5734, 5563, 5564, 5565, 5566, 5567, 5568, 5569, 5570, 5571, 5572, 5573, 5574, 5575, 5576, 5577, 5578, 5579, 5580, 5581, 5582, 5583, 5584, 5585, 5586, 5587, 5588, 5589, 5590, 5591, 5592, 5593, 5594, 5595, 5596, 5597, 5598, 5599, 5600, 5601, 5602, 5603, 5604, 5605, 5606, 5607, 5608, 5609, 5610, 5611, 5612, 5613, 5614, and 5615 or to any one of the sequences as disclosed in Table C2 “Constructs of the invention”.

29. A fusion protein comprising the engineered HNF4A protein variant of any one of claim 23 or claim 24 or an mRNA encoding a fusion protein comprising the engineered HNF4A protein variant of any one of claim 23 or claim 24.

30. A vector comprising the isolated mRNA according to any one of claim 1 to claim 10.

31. A host cell carrying the vector of claim 30.

The application's sequence listing, which the Patent Office published only in electronic form, follows.

SEQUENCE LISTING (5736 sequences)

SEQ ID NO: 1 - DNA, 62 bp, Homo sapiens
  misc_feature 1..62: note = 5'-UTR of human peroxisomal multifunctional enzyme type 2 lacking the 5'-terminal oligopyrimidine tract (HSD17B4)
  source 1..62: mol_type = genomic DNA
gtcccgcagtcggcgtccagcggctctgcttgttcgtgtgtgtgtcgttgcaggccttattc

SEQ ID NO: 2 - RNA, 62 nt, Homo sapiens
  misc_feature 1..62: note = 5'-UTR of human peroxisomal multifunctional enzyme type 2 lacking the 5'-terminal oligopyrimidine tract (HSD17B4) mRNA
  source 1..62: mol_type = mRNA
gtcccgcagtcggcgtccagcggctctgcttgttcgtgtgtgtgtcgttgcaggccttattc

SEQ ID NO: 3 - DNA, 42 bp, Homo sapiens
  misc_feature 1..42: note = 5'-UTR of human ribosomal protein Large 32 lacking the 5'-terminal oligopyrimidine tract (RPL32, 32L4, 32L3)
  source 1..42: mol_type = genomic DNA
ggcgctgcctacggaggtggcagccatctccttctcggcatc

SEQ ID NO: 4 - RNA, 42 nt, Homo sapiens
  misc_feature 1..42: note = 5'-UTR of human ribosomal protein Large 32 lacking the 5'-terminal oligopyrimidine tract (RPL32, 32L4, 32L3) mRNA
  source 1..42: mol_type = mRNA
ggcgctgcctacggaggtggcagccatctccttctcggcatc

SEQ ID NO: 5 - DNA, 31 bp, Homo sapiens
  misc_feature 1..31: note = 5'-UTR of human androgen-induced gene 1 protein lacking the 5'-terminal oligopyrimidine tract (AIG1)
  source 1..31: mol_type = genomic DNA
gccgcccagccggtccaggcctctggcgaac

SEQ ID NO: 6 - RNA, 31 nt, Homo sapiens
  misc_feature 1..31: note = 5'-UTR of human androgen-induced gene 1 protein lacking the 5'-terminal oligopyrimidine tract (AIG1) mRNA
  source 1..31: mol_type = mRNA
gccgcccagccggtccaggcctctggcgaac

SEQ ID NO: 7 - DNA, 42 bp, Homo sapiens
  misc_feature 1..42: note = 5'-UTR of human acid ceramidase lacking the 5'-terminal oligopyrimidine tract (ASAH1)
  source 1..42: mol_type = genomic DNA
gcctctgctggagtccggggagtggcgttggctgctagagcg

SEQ ID NO: 8 - RNA, 42 nt, Homo sapiens
  misc_feature 1..42: note = 5'-UTR of human acid ceramidase lacking the 5'-terminal oligopyrimidine tract (ASAH1) mRNA
  source 1..42: mol_type = mRNA
gcctctgctggagtccggggagtggcgttggctgctagagcg

SEQ ID NO: 9 - DNA, 75 bp, Homo sapiens
  misc_feature 1..75: note = 5'-UTR of human mitochondrial ATP synthase subunit alpha lacking the 5'-terminal oligopyrimidine tract (ATP5A1)
  source 1..75: mol_type = genomic DNA
gcggctcggccattttgtcccagtcagtccggaggctgcggctgcagaagtaccgcctgcggagtaactgcaaag

SEQ ID NO: 10 - RNA, 75 nt, Homo sapiens
  misc_feature 1..75: note = 5'-UTR of human mitochondrial ATP synthase subunit alpha lacking the 5'-terminal oligopyrimidine tract (ATP5A1) mRNA
  source 1..75: mol_type = mRNA
gcggctcggccattttgtcccagtcagtccggaggctgcggctgcagaagtaccgcctgcggagtaactgcaaag

SEQ ID NO: 11 - DNA, 56 bp, Homo sapiens
  misc_feature 1..56: note = 5'-UTR of human cytochrome c oxidase subunit 6C lacking the 5'-terminal oligopyrimidine tract (COX6C)
  source 1..56: mol_type = genomic DNA
agtcaggaaggacgttggtgttgaggttagcatacgtatcaaggacagtaactacc

SEQ ID NO: 12 - RNA, 56 nt, Homo sapiens
  misc_feature 1..56: note = 5'-UTR of human cytochrome c oxidase subunit 6C lacking the 5'-terminal oligopyrimidine tract (COX6C) mRNA
  source 1..56: mol_type = mRNA
agtcaggaaggacgttggtgttgaggttagcatacgtatcaaggacagtaactacc

SEQ ID NO: 13 - DNA, 232 bp, Mus musculus
  misc_feature 1..232: note = 5'-UTR of mouse dihydropyrimidinase-like 2 (Dpysl2)
  source 1..232: mol_type = genomic DNA
ctctctccctctttcttttttccgccctagctggatctgtgttggaggagaggaaaagagacagaggattgcatctgttttgaaatctcctaatagcaagaccagttaagggattgtacctttttcctacaaatataaatatatatatattttaaaccaagtctttttttttccggctatctttgctttaaagctgtcctcttgagattacttcctcccgccccccggagag

SEQ ID NO: 14 - RNA, 232 nt, Mus musculus
  misc_feature 1..232: note = 5'-UTR of mouse dihydropyrimidinase-like 2 (Dpysl2) mRNA
  source 1..232: mol_type = mRNA
ctctctccctctttcttttttccgccctagctggatctgtgttggaggagaggaaaagagacagaggattgcatctgttttgaaatctcctaatagcaagaccagttaagggattgtacctttttcctacaaatataaatatatatatattttaaaccaagtctttttttttccggctatctttgctttaaagctgtcctcttgagattacttcctcccgccccccggagag

SEQ ID NO: 15 - DNA, 22 bp, Homo sapiens
  misc_feature 1..22: note = 5'-UTR of human ATP binding cassette subfamily B member 7 lacking the 5'-terminal oligopyrimidine tract (MDR, ABCB7)
  source 1..22: mol_type = genomic DNA
ggttcctctttcctcgctcaag

SEQ ID NO: 16 - RNA, 22 nt, Homo sapiens
  misc_feature 1..22: note = 5'-UTR of human ATP binding cassette subfamily B member 7 lacking the 5'-terminal oligopyrimidine tract (MDR, ABCB7) mRNA
  source 1..22: mol_type = mRNA
ggttcctctttcctcgctcaag

SEQ ID NO: 17 - DNA, 54 bp, Mus musculus
  misc_feature 1..54: note = 5'-UTR of mouse RIKEN cDNA 2010107E04 gene (Mp68, 2010107E04Rik)
  source 1..54: mol_type = genomic DNA
ctttcccattctgtagcagaatttggtgttgcctgtggtcttggtcccgcggag

SEQ ID NO: 18 - RNA, 54 nt, Mus musculus
  misc_feature 1..54: note = 5'-UTR of mouse RIKEN cDNA 2010107E04 gene (Mp68, 2010107E04Rik) mRNA
  source 1..54: mol_type = mRNA
ctttcccattctgtagcagaatttggtgttgcctgtggtcttggtcccgcggag

SEQ ID NO: 19 - DNA, 81 bp, Mus musculus
  misc_feature 1..81: note = 5'-UTR of mouse NADH dehydrogenase (ubiquinone) 1 alpha subcomplex, 4 (Ndufa4)
  source 1..81: mol_type = genomic DNA
gtccgctcagccaggttgcagaagcggcttagcgtgtgtcctaatcttctctctgcgtgtaggtaggcctgtgccgcaaac

SEQ ID NO: 20 - RNA, 81 nt, Mus musculus
  misc_feature 1..81: note = 5'-UTR of mouse NADH dehydrogenase (ubiquinone) 1 alpha subcomplex, 4 (Ndufa4) mRNA
  source 1..81: mol_type = mRNA
gtccgctcagccaggttgcagaagcggcttagcgtgtgtcctaatcttctctctgcgtgtaggtaggcctgtgccgcaaac

SEQ ID NO: 21 - DNA, 108 bp, Mus musculus
  misc_feature 1..108: note = 5'-UTR of mouse nitric oxide synthase interacting protein (Nosip)
  source 1..108: mol_type = genomic DNA
ctcctgtcgggcggaagtaggaggagtagagtttaaaaacagtactctttttccggttcgggacgtagttgaagcaacgacaagccggataaccgctcttgagacagg

SEQ ID NO: 22 - RNA, 108 nt, Mus musculus
  misc_feature 1..108: note = 5'-UTR of mouse nitric oxide synthase interacting protein (Nosip) mRNA
  source 1..108: mol_type = mRNA
ctcctgtcgggcggaagtaggaggagtagagtttaaaaacagtactctttttccggttcgggacgtagttgaagcaacgacaagccggataaccgctcttgagacagg

SEQ ID NO: 23 - DNA, 84 bp, Mus musculus
  misc_feature 1..84: note = 5'-UTR of mouse ribosomal protein L31 (Rpl31)
  source 1..84: mol_type = genomic DNA
cccgtgacccggaagttgtacggctacgcgactttccctcccacaaaccctcgcgcccttcctttcctacttgggcccggcaga

SEQ ID NO: 24 - RNA, 84 nt, Mus musculus
  misc_feature 1..84: note = 5'-UTR of mouse ribosomal protein L31 (Rpl31) mRNA
  source 1..84: mol_type = mRNA
cccgtgacccggaagttgtacggctacgcgactttccctcccacaaaccctcgcgcccttcctttcctacttgggcccggcaga

SEQ ID NO: 25 - DNA, 56 bp, Homo sapiens
  misc_feature 1..56: note = 5'-UTR of human 60S ribosomal protein L35a lacking the 5'-terminal oligopyrimidine tract (RPL35A)
  source 1..56: mol_type = genomic DNA
accgccatcttggctcctgtggaggcctgctgggaacgggacttctaaaaggaact

SEQ ID NO: 26 - RNA, 56 nt, Homo sapiens
  misc_feature 1..56: note = 5'-UTR of human 60S ribosomal protein L35a lacking the 5'-terminal oligopyrimidine tract (RPL35A) mRNA
  source 1..56: mol_type = mRNA
accgccatcttggctcctgtggaggcctgctgggaacgggacttctaaaaggaact

SEQ ID NO: 27 - DNA, 159 bp, Mus musculus
  misc_feature 1..159: note = 5'-UTR of mouse solute carrier family 7 (cationic amino acid transporter, y+ system), member 3 (Slc7a3)
  source 1..159: mol_type = genomic DNA
gggcgcttggcttgcaaggaccctgagctgcggcattgaagcacacccaacccaactcgactgaagtcagcctcactgaaccggatctgagaatcttctctctctgggcttgccagggctctccgaacctagctagcatcctcttcaattccaactaga

SEQ ID NO: 28 - RNA, 159 nt, Mus musculus
  misc_feature 1..159: note = 5'-UTR of mouse solute carrier family 7 (cationic amino acid transporter, y+ system), member 3 (Slc7a3) mRNA
  source 1..159: mol_type = mRNA
gggcgcttggcttgcaaggaccctgagctgcggcattgaagcacacccaacccaactcgactgaagtcagcctcactgaaccggatctgagaatcttctctctctgggcttgccagggctctccgaacctagctagcatcctcttcaattccaactaga

SEQ ID NO: 29 - DNA, 102 bp, Homo sapiens
  misc_feature 1..102: note = 5'-UTR of human tubulin beta 4B class Ivb (TUBB4B)
  source 1..102: mol_type = genomic DNA
atataagcgttggcggagcgtcggttgtagcactctgcgcgcccgctcttctgctgctgtttgtctacttcctcctgcttccccgccgccgccgccgccatc

SEQ ID NO: 30 - RNA, 102 nt, Homo sapiens
  misc_feature 1..102: note = 5'-UTR of human tubulin beta 4B class Ivb (TUBB4B) mRNA
  source 1..102: mol_type = mRNA
atataagcgttggcggagcgtcggttgtagcactctgcgcgcccgctcttctgctgctgtttgtctacttcctcctgcttccccgccgccgccgccgccatc

SEQ ID NO: 31 - DNA, 222 bp, Mus musculus
  misc_feature 1..222: note = 5'-UTR of mouse ubiquilin 2 (Ubqln2)
  source 1..222: mol_type = genomic DNA
cggagacggcctgcaggacctgctctctcagccctcagccgaggcctacgccgagccgagtgcgcagccgacgaccgggaggagccgcagccttcaactctgaggtactgtgatccgcgctgcccgccgggccgccccagtccgctgctgcggcacctccttccctcgcgccctcttcgctcgccagcgccttccctgtgagcctgcgtcaccgcggccgcc

SEQ ID NO: 32 - RNA, 222 nt, Mus musculus
  misc_feature 1..222: note = 5'-UTR of mouse ubiquilin 2 (Ubqln2) mRNA
  source 1..222: mol_type = mRNA
cggagacggcctgcaggacctgctctctcagccctcagccgaggcctacgccgagccgagtgcgcagccgacgaccgggaggagccgcagccttcaactctgaggtactgtgatccgcgctgcccgccgggccgccccagtccgctgctgcggcacctccttccctcgcgccctcttcgctcgccagcgccttccctgtgagcctgcgtcaccgcggccgcc

SEQ ID NO: 33 - DNA, 57 bp, Homo sapiens
  misc_feature 1..57: note = 3'-UTR of human proteasome subunit beta 3 (PSMB3)
  source 1..57: mol_type = genomic DNA
ccctgttcccagagcccacttttttttctttttttgaaataaaatagcctgtctttc

SEQ ID NO: 34 - RNA, 57 nt, Homo sapiens
  misc_feature 1..57: note = 3'-UTR of human proteasome subunit beta 3 (PSMB3) mRNA
  source 1..57: mol_type = mRNA
ccctgttcccagagcccacttttttttctttttttgaaataaaatagcctgtctttc

SEQ ID NO: 35 - DNA, 44 bp, Homo sapiens
  misc_feature 1..44: note = Center, alpha-complex-binding portion of the 3'-UTR of an alpha-globin gene (muag)
  source 1..44: mol_type = genomic DNA
gcccgatgggcctcccaacgggccctcctcccctccttgcaccg

SEQ ID NO: 36 - RNA, 44 nt, Homo sapiens
  misc_feature 1..44: note = Center, alpha-complex-binding portion of the 3'-UTR of an alpha-globin gene (muag) mRNA
  source 1..44: mol_type = mRNA
gcccgatgggcctcccaacgggccctcctcccctccttgcaccg

SEQ ID NO: 37 - DNA, 187 bp, Homo sapiens
  misc_feature 1..187: note = 3'-UTR ALB7
  source 1..187: mol_type = genomic DNA
gcatcacatttaaaagcatctcagcctaccatgagaataagagaaagaaaatgaagatcaatagcttattcatctctttttctttttcgttggtgtaaagccaacaccctgtctaaaaaacataaatttctttaatcattttgcctcttttctctgtgcttcaattaataaaaaatggaaagaacct

SEQ ID NO: 38 - RNA, 187 nt, Homo sapiens
  misc_feature 1..187: note = 3'-UTR ALB7 mRNA
  source 1..187: mol_type = mRNA
gcatcacatttaaaagcatctcagcctaccatgagaataagagaaagaaaatgaagatcaatagcttattcatctctttttctttttcgttggtgtaaagccaacaccctgtctaaaaaacataaatttctttaatcattttgcctcttttctctgtgcttcaattaataaaaaatggaaagaacct

SEQ ID NO: 39 - DNA, 266 bp, Homo sapiens
  misc_feature 1..266: note = 3'-UTR of human annexin A4 (ANXA4)
  source 1..266: mol_type = genomic DNA
aataaaaatcccagaaggacaggaggattctcaacactttgaatttttttaacttcatttttctacactgctattatcattatctcagaatgcttatttccaattaaaacgcctacagctgcctcctagaatatagactgtctgtattattattcacctataattagtcattatgatgctttaaagctgtacttgcatttcaaagcttataagatataaatggagattttaaagtagaaataaatatgtattccatgtttttaaaa

SEQ ID NO: 40 - RNA, 266 nt, Homo sapiens
  misc_feature 1..266: note = 3'-UTR of human annexin A4 (ANXA4) mRNA
  source 1..266: mol_type = mRNA
aataaaaatcccagaaggacaggaggattctcaacactttgaatttttttaacttcatttttctacactgctattatcattatctcagaatgcttatttccaattaaaacgcctacagctgcctcctagaatatagactgtctgtattattattcacctataattagtcattatgatgctttaaagctgtacttgcatttcaaagcttataagatataaatggagattttaaagtagaaataaatatgtattccatgtttttaaaa

SEQ ID NO: 41 - DNA, 121 bp, Homo sapiens
  misc_feature 1..121: note = 3'-UTR of human caspase 1 (CASP1)
  source 1..121: mol_type = genomic DNA
aataaggaaactgtatgaatgtctgtgggcaggaagtgaagagatccttctgtaaaggtttttggaattatgtctgctgaataataaacttttttgaaataataaatctggtagaaaaatg

SEQ ID NO: 42 - RNA, 121 nt, Homo sapiens
  misc_feature 1..121: note = 3'-UTR of human caspase 1 (CASP1) mRNA
  source 1..121: mol_type = mRNA
aataaggaaactgtatgaatgtctgtgggcaggaagtgaagagatccttctgtaaaggtttttggaattatgtctgctgaataataaacttttttgaaataataaatctggtagaaaaatg

SEQ ID NO: 43 - DNA, 137 bp, Homo sapiens
  misc_feature 1..137: note = 3'-UTR of human cytochrome c oxidase subunit 6B1 (COX6B1)
  source 1..137: mol_type = genomic DNA
actggctgcatctccctttcctctgtcctccatccttctcccaggatggtgaagggggacctggtacccagtgatccccaccccaggatcctaaatcatgacttacctgctaataaaaactcattggaaaagtgaga

SEQ ID NO: 44 - RNA, 137 nt, Homo sapiens
  misc_feature 1..137: note = 3'-UTR of human cytochrome c oxidase subunit 6B1 (COX6B1) mRNA
  source 1..137: mol_type = mRNA
actggctgcatctccctttcctctgtcctccatccttctcccaggatggtgaagggggacctggtacccagtgatccccaccccaggatcctaaatcatgacttacctgctaataaaaactcattggaaaagtgaga

SEQ ID NO: 45 - DNA, 166 bp, Homo sapiens
  misc_feature 1..166: note = 3'-UTR of human FIG4 phosphoinositide 5-phosphatase (FIG4)
  source 1..166: mol_type = genomic DNA
aaagagcgcaggtccacctggtggacacgtctgattagcttagaacctgtcttgtctcatcttcaaaaggtaacttattaaaagtcctttgcgtctgaagcctttctccttttctgtcacttgcaaattccaaattatagctaataaagatgactagataatttgc

SEQ ID NO: 46 - RNA, 166 nt, Homo sapiens
  misc_feature 1..166: note = 3'-UTR of human FIG4 phosphoinositide 5-phosphatase (FIG4) mRNA
  source 1..166: mol_type = mRNA
aaagagcgcaggtccacctggtggacacgtctgattagcttagaacctgtcttgtctcatcttcaaaaggtaacttattaaaagtcctttgcgtctgaagcctttctccttttctgtcacttgcaaattccaaattatagctaataaagatgactagataatttgc

SEQ ID NO: 47 - DNA, 353 bp, Mus musculus
  misc_feature 1..353: note = 3'-UTR of mouse GNAS (guanine nucleotide binding protein, alpha stimulating) complex locus (Gnas)
  source 1..353: mol_type = genomic DNA
gaagggaacacccaaatttaattcagccttaagcacaattaattaagagtgaaacgtaattgtacaagcagttggtcacccaccatagggcatgatcaacaccgcaacctttcctttttcccccagtgattctgaaaaacccctcttcccttcagcttgcttagatgttccaaatttagtaagcttaaggcggcctacagaagaaaaagaaaaaaaaggccacaaaagttccctctcactttcagtaaataaaataaaagcagcaacagaaataaagaaataaatgaaattcaaaatgaaataaatattgtgttgtgcagcattaaaaaatcaataaaaattaaaaatgagca

SEQ ID NO: 48 - RNA, 353 nt, Mus musculus
  misc_feature 1..353: note = 3'-UTR of mouse GNAS (guanine nucleotide binding protein, alpha stimulating) complex locus (Gnas) mRNA
  source 1..353: mol_type = mRNA
gaagggaacacccaaatttaattcagccttaagcacaattaattaagagtgaaacgtaattgtacaagcagttggtcacccaccatagggcatgatcaacaccgcaacctttcctttttcccccagtgattctgaaaaacccctcttcccttcagcttgcttagatgttccaaatttagtaagcttaaggcggcctacagaagaaaaagaaaaaaaaggccacaaaagttccctctcactttcagtaaataaaataaaagcagcaacagaaataaagaaataaatgaaattcaaaatgaaataaatattgtgttgtgcagcattaaaaaatcaataaaaattaaaaatgagca

SEQ ID NO: 49 - DNA, 133 bp, Mus musculus
  misc_feature 1..133: note = 3'-UTR of mouse NADH dehydrogenase (ubiquinone) 1 alpha subcomplex, 1 (Ndufa1)
  source 1..133: mol_type = genomic DNA
ggaagcattttcctggctgattaaaagaaattactcagctatggtcatctgttcctgttagaaggctatgcagcatattatatactatgcgcatgttatgaaatgcataataaaaaattttaaaaaatctaaa

SEQ ID NO: 50 - RNA, 133 nt, Mus musculus
  misc_feature 1..133: note = 3'-UTR of mouse NADH dehydrogenase (ubiquinone) 1 alpha subcomplex, 1 (Ndufa1) mRNA
  source 1..133: mol_type = mRNA
ggaagcattttcctggctgattaaaagaaattactcagctatggtcatctgttcctgttagaaggctatgcagcatattatatactatgcgcatgttatgaaatgcataataaaaaattttaaaaaatctaaa

SEQ ID NO: 51 - DNA, 70 bp, Homo sapiens
  misc_feature 1..70: note = 3'-UTR of human ribosomal protein S9 (RPS9)
  source 1..70: mol_type = genomic DNA
gtccacctgtccctcctgggctgctggattgtctcgttttcctgccaaataaacaggatcagcgctttac

SEQ ID NO: 52 - RNA, 70 nt, Homo sapiens
  misc_feature 1..70: note = 3'-UTR of human ribosomal protein S9 (RPS9) mRNA
  source 1..70: mol_type = mRNA
gtccacctgtccctcctgggctgctggattgtctcgttttcctgccaaataaacaggatcagcgctttac

SEQ ID NO: 53 - DNA, 240 bp, Mus musculus
  misc_feature 1..240: note = 3'-UTR of mouse solute carrier family 7 (cationic amino acid transporter, y+ system), member 3 (Slc7a3)
  source 1..240: mol_type = genomic DNA
cctaaccatacctaattgttgtcttgttctcctatacaataatggagagtactcttgaccccacgaagagctgggcctctcatgtggtgttagtgacggatatgaaataatgctctgtatttcttgtgaaatgatggctatgtctttgctgtttctcatttgtttttaacttgtatactttgaaatagtctctgtagttgtttcctggctttgaaaaaaatgttattaaaggaaaattgt

SEQ ID NO: 54 - RNA, 240 nt, Mus musculus
  misc_feature 1..240: note = 3'-UTR of mouse solute carrier family 7 (cationic amino acid transporter, y+ system), member 3 (Slc7a3) mRNA
  source 1..240: mol_type = mRNA
cctaaccatacctaattgttgtcttgttctcctatacaataatggagagtactcttgaccccacgaagagctgggcctctcatgtggtgttagtgacggatatgaaataatgctctgtatttcttgtgaaatgatggctatgtctttgctgtttctcatttgtttttaacttgtatactttgaaatagtctctgtagttgtttcctggctttgaaaaaaatgttattaaaggaaaattgt

SEQ ID NO: 55 - DNA, 151 bp, Homo sapiens
  misc_feature 1..151: note = 3'-UTR of human tubulin beta 4B class Ivb (TUBB4B)
  source 1..151: mol_type = genomic DNA
agccttcagtcactggggaaagcagggaagcagtgtgaactctttattcactcccagcctgtcctgtggcctgtcccactgtgtgcacttgctgttttccctgtccacatccatgctgtacagacaccaccattaaagcattttcatagtg

SEQ ID NO: 56 - RNA, 151 nt, Homo sapiens
  misc_feature 1..151: note = 3'-UTR of human tubulin beta 4B class Ivb (TUBB4B) mRNA
  source 1..151: mol_type = mRNA
agccttcagtcactggggaaagcagggaagcagtgtgaactctttattcactcccagcctgtcctgtggcctgtcccactgtgtgcacttgctgttttccctgtccacatccatgctgtacagacaccaccattaaagcattttcatagtg

SEQ ID NO: 57-58 - skipped (2 entries)

SEQ ID NO: 59 - DNA, 13 bp, synthetic construct
  misc_feature 1..13: note = Kozak sequence
  source 1..13: mol_type = other DNA
gccgccaccatgg

SEQ ID NO: 60 - RNA, 13 nt, synthetic construct
  misc_feature 1..13: note = Kozak sequence mRNA
  source 1..13: mol_type = other RNA
gccgccaccatgg

SEQ ID NO: 61-62 - skipped (2 entries)

SEQ ID NO: 63 - DNA, 24 bp, Homo sapiens
  misc_feature 1..24: note = histone stem-loop sequence (histoneSL, hSL)
  source 1..24: mol_type = genomic DNA
caaaggctcttttcagagccacca

SEQ ID NO: 64 - RNA, 24 nt, Homo sapiens
  misc_feature 1..24: note = histone stem-loop sequence (histoneSL, hSL) mRNA
  source 1..24: mol_type = mRNA
caaaggctcttttcagagccacca

SEQ ID NO: 65 - RNA, 128 nt, synthetic construct
  misc_feature 1..128: note = mRNA 3'-end A64-N5-C30-histoneSL-N5
  source 1..128: mol_type = other RNA
aaaaaaaaaaaaaaaaaaaaaaaaaaaaaaaaaaaaaaaaaaaaaaaaaaaaaaaaaaaaaaaatgcatcccccccccccccccccccccccccccccccaaaggctcttttcagagccaccagaatt

SEQ ID NO: 66 - RNA, 98 nt, synthetic construct
  misc_feature 1..98: note = mRNA 3'-end A64-N5-histoneSL-N5
  source 1..98: mol_type = other RNA
aaaaaaaaaaaaaaaaaaaaaaaaaaaaaaaaaaaaaaaaaaaaaaaaaaaaaaaaaaaaaaaatgcatcaaaggctcttttcagagccaccagaatt

SEQ ID NO: 67 - RNA, 129 nt, synthetic construct
  misc_feature 1..129: note = mRNA 3'-end histoneSL-A100-N5
  source 1..129: mol_type = other RNA
caaaggctcttttcagagccaccaaaaaaaaaaaaaaaaaaaaaaaaaaaaaaaaaaaaaaaaaaaaaaaaaaaaaaaaaaaaaaaaaaaaaaaaaaaaaaaaaaaaaaaaaaaaaaaaaaaaagaatt

SEQ ID NO: 68 - RNA, 93 nt, synthetic construct
  misc_feature 1..93: note = mRNA 3'-end histoneSL-A64-N5
  source 1..93: mol_type = other RNA
caaaggctcttttcagagccaccaaaaaaaaaaaaaaaaaaaaaaaaaaaaaaaaaaaaaaaaaaaaaaaaaaaaaaaaaaaaaaaaagaatt

SEQ ID NO: 69 - RNA, 105 nt, synthetic construct
  misc_feature 1..105: note = mRNA 3'-end A100-N5
  source 1..105: mol_type = other RNA
aaaaaaaaaaaaaaaaaaaaaaaaaaaaaaaaaaaaaaaaaaaaaaaaaaaaaaaaaaaaaaaaaaaaaaaaaaaaaaaaaaaaaaaaaaaaaaaaaaaagaatt

SEQ ID NO: 70 - RNA, 69 nt, synthetic construct
  misc_feature 1..69: note = mRNA 3'-end A64-N5
  source 1..69: mol_type = other RNA
aaaaaaaaaaaaaaaaaaaaaaaaaaaaaaaaaaaaaaaaaaaaaaaaaaaaaaaaaaaaaaaagaatt

SEQ ID NO: 71 - RNA, 124 nt, synthetic construct
  misc_feature 1..124: note = mRNA 3'-end histoneSL-A100
  source 1..124: mol_type = other RNA
caaaggctcttttcagagccaccaaaaaaaaaaaaaaaaaaaaaaaaaaaaaaaaaaaaaaaaaaaaaaaaaaaaaaaaaaaaaaaaaaaaaaaaaaaaaaaaaaaaaaaaaaaaaaaaaaaaa

SEQ ID NO: 72 - RNA, 88 nt, synthetic construct
  misc_feature 1..88: note = mRNA 3'-end histoneSL-A64
  source 1..88: mol_type = other RNA
caaaggctcttttcagagccaccaaaaaaaaaaaaaaaaaaaaaaaaaaaaaaaaaaaaaaaaaaaaaaaaaaaaaaaaaaaaaaaaa

SEQ ID NO: 73 - RNA, 100 nt, synthetic construct
  misc_feature 1..100: note = mRNA 3'-end A100
  source 1..100: mol_type = other RNA
aaaaaaaaaaaaaaaaaaaaaaaaaaaaaaaaaaaaaaaaaaaaaaaaaaaaaaaaaaaaaaaaaaaaaaaaaaaaaaaaaaaaaaaaaaaaaaaaaaaa

SEQ ID NO: 74 - RNA, 64 nt, synthetic construct
  misc_feature 1..64: note = mRNA 3'-end A64
  source 1..64: mol_type = other RNA
aaaaaaaaaaaaaaaaaaaaaaaaaaaaaaaaaaaaaaaaaaaaaaaaaaaaaaaaaaaaaaaa

SEQ ID NO: 75 - RNA, 93 nt, synthetic construct
  misc_feature 1..93: note = mRNA 3'-end A64-histoneSL-N5
  source 1..93: mol_type = other RNA
aaaaaaaaaaaaaaaaaaaaaaaaaaaaaaaaaaaaaaaaaaaaaaaaaaaaaaaaaaaaaaaacaaaggctcttttcagagccaccagaatt

SEQ ID NO: 76 - RNA, 134 nt, synthetic construct
  misc_feature 1..134: note = mRNA 3'-end N6-A64-N5-C30-histoneSL-N5
  source 1..134: mol_type = other RNA
attaataaaaaaaaaaaaaaaaaaaaaaaaaaaaaaaaaaaaaaaaaaaaaaaaaaaaaaaaaaaaaaaatgcatcccccccccccccccccccccccccccccccaaaggctcttttcagagccaccagaatt

SEQ ID NO: 77 - RNA, 134 nt, synthetic construct
  misc_feature 1..134: note = mRNA 3'-end N6-A64-N5-C30-histoneSL-N5
  source 1..134: mol_type = other RNA
agatctaaaaaaaaaaaaaaaaaaaaaaaaaaaaaaaaaaaaaaaaaaaaaaaaaaaaaaaaaaaaaaaatgcatcccccccccccccccccccccccccccccccaaaggctcttttcagagccaccagaatt

SEQ ID NO: 78 - RNA, 104 nt, synthetic construct
  misc_feature 1..104: note = mRNA 3'-end A64-N5-histoneSL-N5
  source 1..104: mol_type = other RNA
attaataaaaaaaaaaaaaaaaaaaaaaaaaaaaaaaaaaaaaaaaaaaaaaaaaaaaaaaaaaaaaaaatgcatcaaaggctcttttcagagccaccagaatt

SEQ ID NO: 79 - RNA, 104 nt, synthetic construct
  misc_feature 1..104: note = mRNA 3'-end A64-N5-histoneSL-N5
  source 1..104: mol_type = other RNA
agatctaaaaaaaaaaaaaaaaaaaaaaaaaaaaaaaaaaaaaaaaaaaaaaaaaaaaaaaaaaaaaaaatgcatcaaaggctcttttcagagccaccagaatt

SEQ ID NO: 80 - RNA, 135 nt, synthetic construct
  misc_feature 1..135: note = mRNA 3'-end N6-histoneSL-A100-N5
  source 1..135: mol_type = other RNA
attaatcaaaggctcttttcagagccaccaaaaaaaaaaaaaaaaaaaaaaaaaaaaaaaaaaaaaaaaaaaaaaaaaaaaaaaaaaaaaaaaaaaaaaaaaaaaaaaaaaaaaaaaaaaaaaaaaaaaagaatt

SEQ ID NO: 81 - RNA, 135 nt, synthetic construct
  misc_feature 1..135: note = mRNA 3'-end N6-histoneSL-A100-N5
  source 1..135: mol_type = other RNA
agatctcaaaggctcttttcagagccaccaaaaaaaaaaaaaaaaaaaaaaaaaaaaaaaaaaaaaaaaaaaaaaaaaaaaaaaaaaaaaaaaaaaaaaaaaaaaaaaaaaaaaaaaaaaaaaaaaaaaagaatt

SEQ ID NO: 82 - RNA, 99 nt, synthetic construct
  misc_feature 1..99: note = mRNA 3'-end N6-histoneSL-A64-N5
  source 1..99: mol_type = other RNA
attaatcaaaggctcttttcagagccaccaaaaaaaaaaaaaaaaaaaaaaaaaaaaaaaaaaaaaaaaaaaaaaaaaaaaaaaaaaaaaaaaagaatt

SEQ ID NO: 83 - RNA, 99 nt, synthetic construct
  misc_feature 1..99: note = mRNA 3'-end N6-histoneSL-A64-N5
  source 1..99: mol_type = other RNA
agatctcaaaggctcttttcagagccaccaaaaaaaaaaaaaaaaaaaaaaaaaaaaaaaaaaaaaaaaaaaaaaaaaaaaaaaaaaaaaaaaagaatt

SEQ ID NO: 84 - RNA, 111 nt, synthetic construct
  misc_feature 1..111: note = mRNA 3'-end N6-A100-N5
  source 1..111: mol_type = other RNA
attaataaaaaaaaaaaaaaaaaaaaaaaaaaaaaaaaaaaaaaaaaaaaaaaaaaaaaaaaaaaaaaaaaaaaaaaaaaaaaaaaaaaaaaaaaaaaaaaaaaaagaatt

SEQ ID NO: 85 - RNA, 111 nt, synthetic construct
  misc_feature 1..111: note = mRNA 3'-end N6-A100-N5
  source 1..111: mol_type = other RNA
agatctaaaaaaaaaaaaaaaaaaaaaaaaaaaaaaaaaaaaaaaaaaaaaaaaaaaaaaaaaaaaaaaaaaaaaaaaaaaaaaaaaaaaaaaaaaaaaaaaaaaagaatt

SEQ ID NO: 86 - RNA, 75 nt, synthetic construct
  misc_feature 1..75: note = mRNA 3'-end N6-A64-N5
  source 1..75: mol_type = other RNA
attaataaaaaaaaaaaaaaaaaaaaaaaaaaaaaaaaaaaaaaaaaaaaaaaaaaaaaaaaaaaaaaaagaatt

SEQ ID NO: 87 - RNA, 75 nt, synthetic construct
  misc_feature 1..75: note = mRNA 3'-end N6-A64-N5
  source 1..75: mol_type = other RNA
agatctaaaaaaaaaaaaaaaaaaaaaaaaaaaaaaaaaaaaaaaaaaaaaaaaaaaaaaaaaaaaaaaagaatt

SEQ ID NO: 88 - RNA, 130 nt, synthetic construct
  misc_feature 1..130: note = mRNA 3'-end N6-histoneSL-A100
  source 1..130: mol_type = other RNA
attaatcaaaggctcttttcagagccaccaaaaaaaaaaaaaaaaaaaaaaaaaaaaaaaaaaaaaaaaaaaaaaaaaaaaaaaaaaaaaaaaaaaaaaaaaaaaaaaaaaaaaaaaaaaaaaaaaaaaa

SEQ ID NO: 89 - RNA, 130 nt, synthetic construct
  misc_feature 1..130: note = mRNA 3'-end N6-histoneSL-A100
  source 1..130: mol_type = other RNA
agatctcaaaggctcttttcagagccaccaaaaaaaaaaaaaaaaaaaaaaaaaaaaaaaaaaaaaaaaaaaaaaaaaaaaaaaaaaaaaaaaaaaaaaaaaaaaaaaaaaaaaaaaaaaaaaaaaaaaa

SEQ ID NO: 90 - RNA, 94 nt, synthetic construct
  misc_feature 1..94: note = mRNA 3'-end N6-histoneSL-A64
  source 1..94: mol_type = other RNA
attaatcaaaggctcttttcagagccaccaaaaaaaaaaaaaaaaaaaaaaaaaaaaaaaaaaaaaaaaaaaaaaaaaaaaaaaaaaaaaaaaa

SEQ ID NO: 91 - RNA, 94 nt, synthetic construct
  misc_feature 1..94: note = mRNA 3'-end N6-histoneSL-A64
  source 1..94: mol_type = other RNA
agatctcaaaggctcttttcagagccaccaaaaaaaaaaaaaaaaaaaaaaaaaaaaaaaaaaaaaaaaaaaaaaaaaaaaaaaaaaaaaaaaa

SEQ ID NO: 92 - RNA, 106 nt, synthetic construct
  misc_feature 1..106: note = mRNA 3'-end N6-A100
  source 1..106: mol_type = other RNA
attaataaaaaaaaaaaaaaaaaaaaaaaaaaaaaaaaaaaaaaaaaaaaaaaaaaaaaaaaaaaaaaaaaaaaaaaaaaaaaaaaaaaaaaaaaaaaaaaaaaaa

SEQ ID NO: 93 - RNA, 106 nt, synthetic construct
  misc_feature 1..106: note = mRNA 3'-end N6-A100
  source 1..106: mol_type = other RNA
agatctaaaaaaaaaaaaaaaaaaaaaaaaaaaaaaaaaaaaaaaaaaaaaaaaaaaaaaaaaaaaaaaaaaaaaaaaaaaaaaaaaaaaaaaaaaaaaaaaaaaa

SEQ ID NO: 94 - RNA, 70 nt, synthetic construct
  misc_feature 1..70: note = mRNA 3'-end N6-A64
  source 1..70: mol_type = other RNA
attaataaaaaaaaaaaaaaaaaaaaaaaaaaaaaaaaaaaaaaaaaaaaaaaaaaaaaaaaaaaaaaaa

SEQ ID NO: 95 - RNA, 70 nt, synthetic construct
  misc_feature 1..70: note = mRNA 3'-end N6-A64
  source 1..70: mol_type = other RNA
agatctaaaaaaaaaaaaaaaaaaaaaaaaaaaaaaaaaaaaaaaaaaaaaaaaaaaaaaaaaaaaaaaa

SEQ ID NO: 96 - RNA, 99 nt, synthetic construct
  misc_feature 1..99: note = mRNA 3'-end N6-A64-histoneSL-N5
  source 1..99: mol_type = other RNA
attaataaaaaaaaaaaaaaaaaaaaaaaaaaaaaaaaaaaaaaaaaaaaaaaaaaaaaaaaaaaaaaaacaaaggctcttttcagagccaccagaatt

SEQ ID NO: 97 - RNA, 99 nt, synthetic construct
  misc_feature 1..99: note = mRNA 3'-end N6-A64-histoneSL-N5
  source 1..99: mol_type = other RNA
agatctaaaaaaaaaaaaaaaaaaaaaaaaaaaaaaaaaaaaaaaaaaaaaaaaaaaaaaaaaaaaaaaacaaaggctcttttcagagccaccagaatt

SEQ ID NO: 98 - RNA, 105 nt, synthetic construct
  misc_feature 1..105: note = mRNA 3'-end A100-N5
  source 1..105: mol_type = other RNA
aaaaaaaaaaaaaaaaaaaaaaaaaaaaaaaaaaaaaaaaaaaaaaaaaaaaaaaaaaaaaaaaaaaaaaaaaaaaaaaaaaaaaaaaaaaaaaaaaaaatctag

SEQ ID NO: 99 - RNA, 110 nt, synthetic construct
  misc_feature 1..110: note = mRNA 3'-end A30-N10-A70
  source 1..110: mol_type = other RNA
aaaaaaaaaaaaaaaaaaaaaaaaaaaaaagcatatgactaaaaaaaaaaaaaaaaaaaaaaaaaaaaaaaaaaaaaaaaaaaaaaaaaaaaaaaaaaaaaaaaaaaaaa

SEQ ID NO: 100 - protein, 474 aa, Homo sapiens
  REGION 1..474: note = protein (wt) from Homo sapiens__NP_000448.3__HNF4A(1-474)
MRLSKTLVDMDMADYSAALDPAYTTLEFENVQVLTMGNDTSPSEGTNLNAPNSLGVSALCAICGDRATGKHYGASSCDGCKGFFRRSVRKNHMYSCRFSRQCVVDKDKRNQCRYCRLKKCFRAGMKKEAVQNERDRISTRRSSYEDSSLPSINALLQAEVLSRQITSPVSGINGDIRAKKIASIADVCESMKEQLLVLVEWAKYIPAFCELPLDDQVALLRAHAGEHLLLGATKRSMVFKDVLLLGNDYIVPRHCPELAEMSRVSIRILDELVLPFQELQIDDNEYAYLKAIIFFDPDAKGLSDPGKIKRLRSQVQVSLEDYINDRQYDSRGRFGELLLLLPTLQSITWQMIEQIQFIKLFGMAKIDNLLQEMLLGGSPSDAPHAHHPLHPHLMQEHMGTNVIVANTMPTHLSNGQMCEWPRPRGQAATPETPQPSPPGGSGSEPYKLLPGAVATIVKPLSAIPQPTITKQEVI

SEQ ID NO: 101 - protein, 474 aa, synthetic construct
  REGION 1..474: note = protein (artificial) from Homo sapiens__NP_000448.3__HNF4A(1-474)(S313A)
MRLSKTLVDMDMADYSAALDPAYTTLEFENVQVLTMGNDTSPSEGTNLNAPNSLGVSALCAICGDRATGKHYGASSCDGCKGFFRRSVRKNHMYSCRFSRQCVVDKDKRNQCRYCRLKKCFRAGMKKEAVQNERDRISTRRSSYEDSSLPSINALLQAEVLSRQITSPVSGINGDIRAKKIASIADVCESMKEQLLVLVEWAKYIPAFCELPLDDQVALLRAHAGEHLLLGATKRSMVFKDVLLLGNDYIVPRHCPELAEMSRVSIRILDELVLPFQELQIDDNEYAYLKAIIFFDPDAKGLSDPGKIKRLRAQVQVSLEDYINDRQYDSRGRFGELLLLLPTLQSITWQMIEQIQFIKLFGMAKIDNLLQEMLLGGSPSDAPHAHHPLHPHLMQEHMGTNVIVANTMPTHLSNGQMCEWPRPRGQAATPETPQPSPPGGSGSEPYKLLPGAVATIVKPLSAIPQPTITKQEVI

SEQ ID NO: 102 - protein, 474 aa, synthetic construct
  REGION 1..474: note = protein (artificial) from Homo sapiens__NP_000448.3__HNF4A(1-474)(S313E)
MRLSKTLVDMDMADYSAALDPAYTTLEFENVQVLTMGNDTSPSEGTNLNAPNSLGVSALCAICGDRATGKHYGASSCDGCKGFFRRSVRKNHMYSCRFSRQCVVDKDKRNQCRYCRLKKCFRAGMKKEAVQNERDRISTRRSSYEDSSLPSINALLQAEVLSRQITSPVSGINGDIRAKKIASIADVCESMKEQLLVLVEWAKYIPAFCELPLDDQVALLRAHAGEHLLLGATKRSMVFKDVLLLGNDYIVPRHCPELAEMSRVSIRILDELVLPFQELQIDDNEYAYLKAIIFFDPDAKGLSDPGKIKRLREQVQVSLEDYINDRQYDSRGRFGELLLLLPTLQSITWQMIEQIQFIKLFGMAKIDNLLQEMLLGGSPSDAPHAHHPLHPHLMQEHMGTNVIVANTMPTHLSNGQMCEWPRPRGQAATPETPQPSPPGGSGSEPYKLLPGAVATIVKPLSAIPQPTITKQEVI

SEQ ID NO: 103 - protein, 474 aa, synthetic construct
  REGION 1..474: note = protein (artificial) from Homo sapiens__NP_000448.3__HNF4A(1-474)(S142A_S143A)
MRLSKTLVDMDMADYSAALDPAYTTLEFENVQVLTMGNDTSPSEGTNLNAPNSLGVSALCAICGDRATGKHYGASSCDGCKGFFRRSVRKNHMYSCRFSRQCVVDKDKRNQCRYCRLKKCFRAGMKKEAVQNERDRISTRRAAYEDSSLPSINALLQAEVLSRQITSPVSGINGDIRAKKIASIADVCESMKEQLLVLVEWAKYIPAFCELPLDDQVALLRAHAGEHLLLGATKRSMVFKDVLLLGNDYIVPRHCPELAEMSRVSIRILDELVLPFQELQIDDNEYAYLKAIIFFDPDAKGLSDPGKIKRLRSQVQVSLEDYINDRQYDSRGRFGELLLLLPTLQSITWQMIEQIQFIKLFGMAKIDNLLQEMLLGGSPSDAPHAHHPLHPHLMQEHMGTNVIVANTMPTHLSNGQMCEWPRPRGQAATPETPQPSPPGGSGSEPYKLLPGAVATIVKPLSAIPQPTITKQEVI

SEQ ID NO: 104 - protein, 474 aa, synthetic construct
  REGION 1..474: note = protein (artificial) from Homo sapiens__NP_000448.3__HNF4A(1-474)(S142E_S143E)
MRLSKTLVDMDMADYSAALDPAYTTLEFENVQVLTMGNDTSPSEGTNLNAPNSLGVSALCAICGDRATGKHYGASSCDGCKGFFRRSVRKNHMYSCRFSRQCVVDKDKRNQCRYCRLKKCFRAGMKKEAVQNERDRISTRREEYEDSSLPSINALLQAEVLSRQITSPVSGINGDIRAKKIASIADVCESMKEQLLVLVEWAKYIPAFCELPLDDQVALLRAHAGEHLLLGATKRSMVFKDVLLLGNDYIVPRHCPELAEMSRVSIRILDELVLPFQELQIDDNEYAYLKAIIFFDPDAKGLSDPGKIKRLRSQVQVSLEDYINDRQYDSRGRFGELLLLLPTLQSITWQMIEQIQFIKLFGMAKIDNLLQEMLLGGSPSDAPHAHHPLHPHLMQEHMGTNVIVANTMPTHLSNGQMCEWPRPRGQAATPETPQPSPPGGSGSEPYKLLPGAVATIVKPLSAIPQPTITKQEVI

SEQ ID NO: 105 - protein, 474 aa, synthetic construct
  REGION 1..474: note = protein (artificial) from Homo sapiens__NP_000448.3__HNF4A(1-474)(S143A)
MRLSKTLVDMDMADYSAALDPAYTTLEFENVQVLTMGNDTSPSEGTNLNAPNSLGVSALCAICGDRATGKHYGASSCDGCKGFFRRSVRKNHMYSCRFSRQCVVDKDKRNQCRYCRLKKCFRAGMKKEAVQNERDRISTRRSAYEDSSLPSINALLQAEVLSRQITSPVSGINGDIRAKKIASIADVCESMKEQLLVLVEWAKYIPAFCELPLDDQVALLRAHAGEHLLLGATKRSMVFKDVLLLGNDYIVPRHCPELAEMSRVSIRILDELVLPFQELQIDDNEYAYLKAIIFFDPDAKGLSDPGKIKRLRSQVQVSLEDYINDRQYDSRGRFGELLLLLPTLQSITWQMIEQIQFIKLFGMAKIDNLLQEMLLGGSPSDAPHAHHPLHPHLMQEHMGTNVIVANTMPTHLSNGQMCEWPRPRGQAATPETPQPSPPGGSGSEPYKLLPGAVATIVKPLSAIPQPTITKQEVI

SEQ ID NO: 106 - protein, 474 aa, synthetic construct
  REGION 1..474: note = protein (artificial) from Homo sapiens__NP_000448.3__HNF4A(1-474)(T166A)
MRLSKTLVDMDMADYSAALDPAYTTLEFENVQVLTMGNDTSPSEGTNLNAPNSLGVSALCAICGDRATGKHYGASSCDGCKGFFRRSVRKNHMYSCRFSRQCVVDKDKRNQCRYCRLKKCFRAGMKKEAVQNERDRISTRRSSYEDSSLPSINALLQAEVLSRQIASPVSGINGDIRAKKIASIADVCESMKEQLLVLVEWAKYIPAFCELPLDDQVALLRAHAGEHLLLGATKRSMVFKDVLLLGNDYIVPRHCPELAEMSRVSIRILDELVLPFQELQIDDNEYAYLKAIIFFDPDAKGLSDPGKIKRLRSQVQVSLEDYINDRQYDSRGRFGELLLLLPTLQSITWQMIEQIQFIKLFGMAKIDNLLQEMLLGGSPSDAPHAHHPLHPHLMQEHMGTNVIVANTMPTHLSNGQMCEWPRPRGQAATPETPQPSPPGGSGSEPYKLLPGAVATIVKPLSAIPQPTITKQEVI

SEQ ID NO: 107 - protein, 474 aa, synthetic construct
  REGION 1..474: note = protein (artificial) from Homo sapiens__NP_000448.3__HNF4A(1-474)(S167E)
MRLSKTLVDMDMADYSAALDPAYTTLEFENVQVLTMGNDTSPSEGTNLNAPNSLGVSALCAICGDRATGKHYGASSCDGCKGFFRRSVRKNHMYSCRFSRQCVVDKDKRNQCRYCRLKKCFRAGMKKEAVQNERDRISTRRSSYEDSSLPSINALLQAEVLSRQITEPVSGINGDIRAKKIASIADVCESMKEQLLVLVEWAKYIPAFCELPLDDQVALLRAHAGEHLLLGATKRSMVFKDVLLLGNDYIVPRHCPELAEMSRVSIRILDELVLPFQELQIDDNEYAYLKAIIFFDPDAKGLSDPGKIKRLRSQVQVSLEDYINDRQYDSRGRFGELLLLLPTLQSITWQMIEQIQFIKLFGMAKIDNLLQEMLLGGSPSDAPHAHHPLHPHLMQEHMGTNVIVANTMPTHLSNGQMCEWPRPRGQAATPETPQPSPPGGSGSEPYKLLPGAVATIVKPLSAIPQPTITKQEVI

SEQ ID NO: 108 - protein, 474 aa, synthetic construct
  REGION 1..474: note = protein (artificial) from Homo sapiens__NP_000448.3__HNF4A(1-474)(S167A)
MRLSKTLVDMDMADYSAALDPAYTTLEFENVQVLTMGNDTSPSEGTNLNAPNSLGVSALCAICGDRATGKHYGASSCDGCKGFFRRSVRKNHMYSCRFSRQCVVDKDKRNQCRYCRLKKCFRAGMKKEAVQNERDRISTRRSSYEDSSLPSINALLQAEVLSRQITAPVSGINGDIRAKKIASIADVCESMKEQLLVLVEWAKYIPAFCELPLDDQVALLRAHAGEHLLLGATKRSMVFKDVLLLGNDYIVPRHCPELAEMSRVSIRILDELVLPFQELQIDDNEYAYLKAIIFFDPDAKGLSDPGKIKRLRSQVQVSLEDYINDRQYDSRGRFGELLLLLPTLQSITWQMIEQIQFIKLFGMAKIDNLLQEMLLGGSPSDAPHAHHPLHPHLMQEHMGTNVIVANTMPTHLSNGQMCEWPRPRGQAATPETPQPSPPGGSGSEPYKLLPGAVATIVKPLSAIPQPTITKQEVI

SEQ ID NO: 109 - protein, 474 aa, synthetic construct
  REGION 1..474: note = protein (artificial) from Homo sapiens__NP_000448.3__HNF4A(1-474)(S167A_S378A_T429A_T432A_ S436A)
MRLSKTLVDMDMADYSAALDPAYTTLEFENVQVLTMGNDTSPSEGTNLNAPNSLGVSALCAICGDRATGKHYGASSCDGCKGFFRRSVRKNHMYSCRFSRQCVVDKDKRNQCRYCRLKKCFRAGMKKEAVQNERDRISTRRSSYEDSSLPSINALLQAEVLSRQITAPVSGINGDIRAKKIASIADVCESMKEQLLVLVEWAKYIPAFCELPLDDQVALLRAHAGEHLLLGATKRSMVFKDVLLLGNDYIVPRHCPELAEMSRVSIRILDELVLPFQELQIDDNEYAYLKAIIFFDPDAKGLSDPGKIKRLRSQVQVSLEDYINDRQYDSRGRFGELLLLLPTLQSITWQMIEQIQFIKLFGMAKIDNLLQEMLLGGAPSDAPHAHHPLHPHLMQEHMGTNVIVANTMPTHLSNGQMCEWPRPRGQAAAPEAPQPAPPGGSGSEPYKLLPGAVATIVKPLSAIPQPTITKQEVI

SEQ ID NO: 110 - protein, 474 aa, synthetic construct
  REGION 1..474: note = protein (artificial) from Homo sapiens__NP_000448.3__HNF4A(1-474)(S167E_S378E_T429E_T432E_ S436E)
MRLSKTLVDMDMADYSAALDPAYTTLEFENVQVLTMGNDTSPSEGTNLNAPNSLGVSALCAICGDRATGKHYGASSCDGCKGFFRRSVRKNHMYSCRFSRQCVVDKDKRNQCRYCRLKKCFRAGMKKEAVQNERDRISTRRSSYEDSSLPSINALLQAEVLSRQITEPVSGINGDIRAKKIASIADVCESMKEQLLVLVEWAKYIPAFCELPLDDQVALLRAHAGEHLLLGATKRSMVFKDVLLLGNDYIVPRHCPELAEMSRVSIRILDELVLPFQELQIDDNEYAYLKAIIFFDPDAKGLSDPGKIKRLRSQVQVSLEDYINDRQYDSRGRFGELLLLLPTLQSITWQMIEQIQFIKLFGMAKIDNLLQEMLLGGEPSDAPHAHHPLHPHLMQEHMGTNVIVANTMPTHLSNGQMCEWPRPRGQAAEPEEPQPEPPGGSGSEPYKLLPGAVATIVKPLSAIPQPTITKQEVI

SEQ ID NO: 111 - protein, 474 aa, synthetic construct
  REGION 1..474: note = protein (artificial) from Homo sapiens__NP_000448.3__HNF4A(1-474)(S87A)
MRLSKTLVDMDMADYSAALDPAYTTLEFENVQVLTMGNDTSPSEGTNLNAPNSLGVSALCAICGDRATGKHYGASSCDGCKGFFRRAVRKNHMYSCRFSRQCVVDKDKRNQCRYCRLKKCFRAGMKKEAVQNERDRISTRRSSYEDSSLPSINALLQAEVLSRQITSPVSGINGDIRAKKIASIADVCESMKEQLLVLVEWAKYIPAFCELPLDDQVALLRAHAGEHLLLGATKRSMVFKDVLLLGNDYIVPRHCPELAEMSRVSIRILDELVLPFQELQIDDNEYAYLKAIIFFDPDAKGLSDPGKIKRLRSQVQVSLEDYINDRQYDSRGRFGELLLLLPTLQSITWQMIEQIQFIKLFGMAKIDNLLQEMLLGGSPSDAPHAHHPLHPHLMQEHMGTNVIVANTMPTHLSNGQMCEWPRPRGQAATPETPQPSPPGGSGSEPYKLLPGAVATIVKPLSAIPQPTITKQEVI

SEQ ID NO: 112 - protein, 474 aa, synthetic construct
  REGION 1..474: note = protein (artificial) from Homo sapiens__NP_000448.3__HNF4A(1-474)(S87E)
MRLSKTLVDMDMADYSAALDPAYTTLEFENVQVLTMGNDTSPSEGTNLNAPNSLGVSALCAICGDRATGKHYGASSCDGCKGFFRREVRKNHMYSCRFSRQCVVDKDKRNQCRYCRLKKCFRAGMKKEAVQNERDRISTRRSSYEDSSLPSINALLQAEVLSRQITSPVSGINGDIRAKKIASIADVCESMKEQLLVLVEWAKYIPAFCELPLDDQVALLRAHAGEHLLLGATKRSMVFKDVLLLGNDYIVPRHCPELAEMSRVSIRILDELVLPFQELQIDDNEYAYLKAIIFFDPDAKGLSDPGKIKRLRSQVQVSLEDYINDRQYDSRGRFGELLLLLPTLQSITWQMIEQIQFIKLFGMAKIDNLLQEMLLGGSPSDAPHAHHPLHPHLMQEHMGTNVIVANTMPTHLSNGQMCEWPRPRGQAATPETPQPSPPGGSGSEPYKLLPGAVATIVKPLSAIPQPTITKQEVI

SEQ ID NO: 113 - protein, 474 aa, synthetic construct
  REGION 1..474: note = protein (artificial) from Homo sapiens__NP_000448.3__HNF4A(1-474)(R2V)
MVLSKTLVDMDMADYSAALDPAYTTLEFENVQVLTMGNDTSPSEGTNLNAPNSLGVSALCAICGDRATGKHYGASSCDGCKGFFRRSVRKNHMYSCRFSRQCVVDKDKRNQCRYCRLKKCFRAGMKKEAVQNERDRISTRRSSYEDSSLPSINALLQAEVLSRQITSPVSGINGDIRAKKIASIADVCESMKEQLLVLVEWAKYIPAFCELPLDDQVALLRAHAGEHLLLGATKRSMVFKDVLLLGNDYIVPRHCPELAEMSRVSIRILDELVLPFQELQIDDNEYAYLKAIIFFDPDAKGLSDPGKIKRLRSQVQVSLEDYINDRQYDSRGRFGELLLLLPTLQSITWQMIEQIQFIKLFGMAKIDNLLQEMLLGGSPSDAPHAHHPLHPHLMQEHMGTNVIVANTMPTHLSNGQMCEWPRPRGQAATPETPQPSPPGGSGSEPYKLLPGAVATIVKPLSAIPQPTITKQEVI

SEQ ID NO: 114 - protein, 474 aa, synthetic construct
  REGION 1..474: note = protein (artificial) from Homo sapiens__NP_000448.3__HNF4A(1-474)(R2V_K5V)
MVLSVTLVDMDMADYSAALDPAYTTLEFENVQVLTMGNDTSPSEGTNLNAPNSLGVSALCAICGDRATGKHYGASSCDGCKGFFRRSVRKNHMYSCRFSRQCVVDKDKRNQCRYCRLKKCFRAGMKKEAVQNERDRISTRRSSYEDSSLPSINALLQAEVLSRQITSPVSGINGDIRAKKIASIADVCESMKEQLLVLVEWAKYIPAFCELPLDDQVALLRAHAGEHLLLGATKRSMVFKDVLLLGNDYIVPRHCPELAEMSRVSIRILDELVLPFQELQIDDNEYAYLKAIIFFDPDAKGLSDPGKIKRLRSQVQVSLEDYINDRQYDSRGRFGELLLLLPTLQSITWQMIEQIQFIKLFGMAKIDNLLQEMLLGGSPSDAPHAHHPLHPHLMQEHMGTNVIVANTMPTHLSNGQMCEWPRPRGQAATPETPQPSPPGGSGSEPYKLLPGAVATIVKPLSAIPQPTITKQEVI

SEQ ID NO: 115 - protein, 474 aa, synthetic construct
  REGION 1..474: note = protein (artificial) from Homo sapiens__NP_000448.3__HNF4A(1-474)(K179R_K180R)
MRLSKTLVDMDMADYSAALDPAYTTLEFENVQVLTMGNDTSPSEGTNLNAPNSLGVSALCAICGDRATGKHYGASSCDGCKGFFRRSVRKNHMYSCRFSRQCVVDKDKRNQCRYCRLKKCFRAGMKKEAVQNERDRISTRRSSYEDSSLPSINALLQAEVLSRQITSPVSGINGDIRARRIASIADVCESMKEQLLVLVEWAKYIPAFCELPLDDQVALLRAHAGEHLLLGATKRSMVFKDVLLLGNDYIVPRHCPELAEMSRVSIRILDELVLPFQELQIDDNEYAYLKAIIFFDPDAKGLSDPGKIKRLRSQVQVSLEDYINDRQYDSRGRFGELLLLLPTLQSITWQMIEQIQFIKLFGMAKIDNLLQEMLLGGSPSDAPHAHHPLHPHLMQEHMGTNVIVANTMPTHLSNGQMCEWPRPRGQAATPETPQPSPPGGSGSEPYKLLPGAVATIVKPLSAIPQPTITKQEVI

SEQ ID NO: 116 - protein, 474 aa, synthetic construct
  REGION 1..474: note = protein (artificial) from Homo sapiens__NP_000448.3__HNF4A(1-474)(K234R)
MRLSKTLVDMDMADYSAALDPAYTTLEFENVQVLTMGNDTSPSEGTNLNAPNSLGVSALCAICGDRATGKHYGASSCDGCKGFFRRSVRKNHMYSCRFSRQCVVDKDKRNQCRYCRLKKCFRAGMKKEAVQNERDRISTRRSSYEDSSLPSINALLQAEVLSRQITSPVSGINGDIRAKKIASIADVCESMKEQLLVLVEWAKYIPAFCELPLDDQVALLRAHAGEHLLLGATRRSMVFKDVLLLGNDYIVPRHCPELAEMSRVSIRILDELVLPFQELQIDDNEYAYLKAIIFFDPDAKGLSDPGKIKRLRSQVQVSLEDYINDRQYDSRGRFGELLLLLPTLQSITWQMIEQIQFIKLFGMAKIDNLLQEMLLGGSPSDAPHAHHPLHPHLMQEHMGTNVIVANTMPTHLSNGQMCEWPRPRGQAATPETPQPSPPGGSGSEPYKLLPGAVATIVKPLSAIPQPTITKQEVI

SEQ ID NO: 117 - protein, 474 aa, synthetic construct
  REGION 1..474: note = protein (artificial) from Homo sapiens__NP_000448.3__HNF4A(1-474)(K300R)
MRLSKTLVDMDMADYSAALDPAYTTLEFENVQVLTMGNDTSPSEGTNLNAPNSLGVSALCAICGDRATGKHYGASSCDGCKGFFRRSVRKNHMYSCRFSRQCVVDKDKRNQCRYCRLKKCFRAGMKKEAVQNERDRISTRRSSYEDSSLPSINALLQAEVLSRQITSPVSGINGDIRAKKIASIADVCESMKEQLLVLVEWAKYIPAFCELPLDDQVALLRAHAGEHLLLGATKRSMVFKDVLLLGNDYIVPRHCPELAEMSRVSIRILDELVLPFQELQIDDNEYAYLKAIIFFDPDARGLSDPGKIKRLRSQVQVSLEDYINDRQYDSRGRFGELLLLLPTLQSITWQMIEQIQFIKLFGMAKIDNLLQEMLLGGSPSDAPHAHHPLHPHLMQEHMGTNVIVANTMPTHLSNGQMCEWPRPRGQAATPETPQPSPPGGSGSEPYKLLPGAVATIVKPLSAIPQPTITKQEVI

SEQ ID NO: 118 - protein, 474 aa, synthetic construct
  REGION 1..474: note = protein (artificial) from Homo sapiens__NP_000448.3__HNF4A(1-474)(K300R_K307R_K309R)
MRLSKTLVDMDMADYSAALDPAYTTLEFENVQVLTMGNDTSPSEGTNLNAPNSLGVSALCAICGDRATGKHYGASSCDGCKGFFRRSVRKNHMYSCRFSRQCVVDKDKRNQCRYCRLKKCFRAGMKKEAVQNERDRISTRRSSYEDSSLPSINALLQAEVLSRQITSPVSGINGDIRAKKIASIADVCESMKEQLLVLVEWAKYIPAFCELPLDDQVALLRAHAGEHLLLGATKRSMVFKDVLLLGNDYIVPRHCPELAEMSRVSIRILDELVLPFQELQIDDNEYAYLKAIIFFDPDARGLSDPGRIRRLRSQVQVSLEDYINDRQYDSRGRFGELLLLLPTLQSITWQMIEQIQFIKLFGMAKIDNLLQEMLLGGSPSDAPHAHHPLHPHLMQEHMGTNVIVANTMPTHLSNGQMCEWPRPRGQAATPETPQPSPPGGSGSEPYKLLPGAVATIVKPLSAIPQPTITKQEVI

SEQ ID NO: 119 - protein, 474 aa, synthetic construct
  REGION 1..474: note = protein (artificial) from Homo sapiens__NP_000448.3__HNF4A(1-474)(K447R_K470R)
MRLSKTLVDMDMADYSAALDPAYTTLEFENVQVLTMGNDTSPSEGTNLNAPNSLGVSALCAICGDRATGKHYGASSCDGCKGFFRRSVRKNHMYSCRFSRQCVVDKDKRNQCRYCRLKKCFRAGMKKEAVQNERDRISTRRSSYEDSSLPSINALLQAEVLSRQITSPVSGINGDIRAKKIASIADVCESMKEQLLVLVEWAKYIPAFCELPLDDQVALLRAHAGEHLLLGATKRSMVFKDVLLLGNDYIVPRHCPELAEMSRVSIRILDELVLPFQELQIDDNEYAYLKAIIFFDPDAKGLSDPGKIKRLRSQVQVSLEDYINDRQYDSRGRFGELLLLLPTLQSITWQMIEQIQFIKLFGMAKIDNLLQEMLLGGSPSDAPHAHHPLHPHLMQEHMGTNVIVANTMPTHLSNGQMCEWPRPRGQAATPETPQPSPPGGSGSEPYRLLPGAVATIVKPLSAIPQPTITRQEVI

SEQ ID NO: 120 - protein, 474 aa, synthetic construct
  REGION 1..474: note = protein (artificial) from Homo sapiens__NP_000448.3__HNF4A(1-474)(K458R)
MRLSKTLVDMDMADYSAALDPAYTTLEFENVQVLTMGNDTSPSEGTNLNAPNSLGVSALCAICGDRATGKHYGASSCDGCKGFFRRSVRKNHMYSCRFSRQCVVDKDKRNQCRYCRLKKCFRAGMKKEAVQNERDRISTRRSSYEDSSLPSINALLQAEVLSRQITSPVSGINGDIRAKKIASIADVCESMKEQLLVLVEWAKYIPAFCELPLDDQVALLRAHAGEHLLLGATKRSMVFKDVLLLGNDYIVPRHCPELAEMSRVSIRILDELVLPFQELQIDDNEYAYLKAIIFFDPDAKGLSDPGKIKRLRSQVQVSLEDYINDRQYDSRGRFGELLLLLPTLQSITWQMIEQIQFIKLFGMAKIDNLLQEMLLGGSPSDAPHAHHPLHPHLMQEHMGTNVIVANTMPTHLSNGQMCEWPRPRGQAATPETPQPSPPGGSGSEPYKLLPGAVATIVRPLSAIPQPTITKQEVI

SEQ ID NO: 121 - protein, 474 aa, synthetic construct
  REGION 1..474: note = protein (artificial) from Homo sapiens__NP_000448.3__HNF4A(1-474)(K106R_K108R_K126R_K127R)
MRLSKTLVDMDMADYSAALDPAYTTLEFENVQVLTMGNDTSPSEGTNLNAPNSLGVSALCAICGDRATGKHYGASSCDGCKGFFRRSVRKNHMYSCRFSRQCVVDRDRRNQCRYCRLKKCFRAGMRREAVQNERDRISTRRSSYEDSSLPSINALLQAEVLSRQITSPVSGINGDIRAKKIASIADVCESMKEQLLVLVEWAKYIPAFCELPLDDQVALLRAHAGEHLLLGATKRSMVFKDVLLLGNDYIVPRHCPELAEMSRVSIRILDELVLPFQELQIDDNEYAYLKAIIFFDPDAKGLSDPGKIKRLRSQVQVSLEDYINDRQYDSRGRFGELLLLLPTLQSITWQMIEQIQFIKLFGMAKIDNLLQEMLLGGSPSDAPHAHHPLHPHLMQEHMGTNVIVANTMPTHLSNGQMCEWPRPRGQAATPETPQPSPPGGSGSEPYKLLPGAVATIVKPLSAIPQPTITKQEVI

SEQ ID NO: 122 - protein, 474 aa, synthetic construct
  REGION 1..474: note = protein (artificial) from Homo sapiens__NP_000448.3__HNF4A(1-474)(E285Q)
MRLSKTLVDMDMADYSAALDPAYTTLEFENVQVLTMGNDTSPSEGTNLNAPNSLGVSALCAICGDRATGKHYGASSCDGCKGFFRRSVRKNHMYSCRFSRQCVVDKDKRNQCRYCRLKKCFRAGMKKEAVQNERDRISTRRSSYEDSSLPSINALLQAEVLSRQITSPVSGINGDIRAKKIASIADVCESMKEQLLVLVEWAKYIPAFCELPLDDQVALLRAHAGEHLLLGATKRSMVFKDVLLLGNDYIVPRHCPELAEMSRVSIRILDELVLPFQELQIDDNQYAYLKAIIFFDPDAKGLSDPGKIKRLRSQVQVSLEDYINDRQYDSRGRFGELLLLLPTLQSITWQMIEQIQFIKLFGMAKIDNLLQEMLLGGSPSDAPHAHHPLHPHLMQEHMGTNVIVANTMPTHLSNGQMCEWPRPRGQAATPETPQPSPPGGSGSEPYKLLPGAVATIVKPLSAIPQPTITKQEVI

SEQ ID NO: 123 - protein, 474 aa, synthetic construct
  REGION 1..474: note = protein (artificial) from Homo sapiens__NP_000448.3__HNF4A(1-474)(T166E)
MRLSKTLVDMDMADYSAALDPAYTTLEFENVQVLTMGNDTSPSEGTNLNAPNSLGVSALCAICGDRATGKHYGASSCDGCKGFFRRSVRKNHMYSCRFSRQCVVDKDKRNQCRYCRLKKCFRAGMKKEAVQNERDRISTRRSSYEDSSLPSINALLQAEVLSRQIESPVSGINGDIRAKKIASIADVCESMKEQLLVLVEWAKYIPAFCELPLDDQVALLRAHAGEHLLLGATKRSMVFKDVLLLGNDYIVPRHCPELAEMSRVSIRILDELVLPFQELQIDDNEYAYLKAIIFFDPDAKGLSDPGKIKRLRSQVQVSLEDYINDRQYDSRGRFGELLLLLPTLQSITWQMIEQIQFIKLFGMAKIDNLLQEMLLGGSPSDAPHAHHPLHPHLMQEHMGTNVIVANTMPTHLSNGQMCEWPRPRGQAATPETPQPSPPGGSGSEPYKLLPGAVATIVKPLSAIPQPTITKQEVI

SEQ ID NO: 124 - protein, 474 aa, synthetic construct
  REGION 1..474: note = protein (artificial) from Homo sapiens__NP_000448.3__HNF4A(1-474)(S148A)
MRLSKTLVDMDMADYSAALDPAYTTLEFENVQVLTMGNDTSPSEGTNLNAPNSLGVSALCAICGDRATGKHYGASSCDGCKGFFRRSVRKNHMYSCRFSRQCVVDKDKRNQCRYCRLKKCFRAGMKKEAVQNERDRISTRRSSYEDSALPSINALLQAEVLSRQITSPVSGINGDIRAKKIASIADVCESMKEQLLVLVEWAKYIPAFCELPLDDQVALLRAHAGEHLLLGATKRSMVFKDVLLLGNDYIVPRHCPELAEMSRVSIRILDELVLPFQELQIDDNEYAYLKAIIFFDPDAKGLSDPGKIKRLRSQVQVSLEDYINDRQYDSRGRFGELLLLLPTLQSITWQMIEQIQFIKLFGMAKIDNLLQEMLLGGSPSDAPHAHHPLHPHLMQEHMGTNVIVANTMPTHLSNGQMCEWPRPRGQAATPETPQPSPPGGSGSEPYKLLPGAVATIVKPLSAIPQPTITKQEVI

SEQ ID NO: 125 - protein, 474 aa, synthetic construct
  REGION 1..474: note = protein (artificial) from Homo sapiens__NP_000448.3__HNF4A(1-474)(S148E)
MRLSKTLVDMDMADYSAALDPAYTTLEFENVQVLTMGNDTSPSEGTNLNAPNSLGVSALCAICGDRATGKHYGASSCDGCKGFFRRSVRKNHMYSCRFSRQCVVDKDKRNQCRYCRLKKCFRAGMKKEAVQNERDRISTRRSSYEDSELPSINALLQAEVLSRQITSPVSGINGDIRAKKIASIADVCESMKEQLLVLVEWAKYIPAFCELPLDDQVALLRAHAGEHLLLGATKRSMVFKDVLLLGNDYIVPRHCPELAEMSRVSIRILDELVLPFQELQIDDNEYAYLKAIIFFDPDAKGLSDPGKIKRLRSQVQVSLEDYINDRQYDSRGRFGELLLLLPTLQSITWQMIEQIQFIKLFGMAKIDNLLQEMLLGGSPSDAPHAHHPLHPHLMQEHMGTNVIVANTMPTHLSNGQMCEWPRPRGQAATPETPQPSPPGGSGSEPYKLLPGAVATIVKPLSAIPQPTITKQEVI

SEQ ID NO: 126 - protein, 474 aa, synthetic construct
  REGION 1..474: note = protein (artificial) from Homo sapiens__NP_000448.3__HNF4A(1-474)(S183A)
MRLSKTLVDMDMADYSAALDPAYTTLEFENVQVLTMGNDTSPSEGTNLNAPNSLGVSALCAICGDRATGKHYGASSCDGCKGFFRRSVRKNHMYSCRFSRQCVVDKDKRNQCRYCRLKKCFRAGMKKEAVQNERDRISTRRSSYEDSSLPSINALLQAEVLSRQITSPVSGINGDIRAKKIAAIADVCESMKEQLLVLVEWAKYIPAFCELPLDDQVALLRAHAGEHLLLGATKRSMVFKDVLLLGNDYIVPRHCPELAEMSRVSIRILDELVLPFQELQIDDNEYAYLKAIIFFDPDAKGLSDPGKIKRLRSQVQVSLEDYINDRQYDSRGRFGELLLLLPTLQSITWQMIEQIQFIKLFGMAKIDNLLQEMLLGGSPSDAPHAHHPLHPHLMQEHMGTNVIVANTMPTHLSNGQMCEWPRPRGQAATPETPQPSPPGGSGSEPYKLLPGAVATIVKPLSAIPQPTITKQEVI

SEQ ID NO: 127 - protein, 474 aa, synthetic construct
  REGION 1..474: note = protein (artificial) from Homo sapiens__NP_000448.3__HNF4A(1-474)(S183E)
MRLSKTLVDMDMADYSAALDPAYTTLEFENVQVLTMGNDTSPSEGTNLNAPNSLGVSALCAICGDRATGKHYGASSCDGCKGFFRRSVRKNHMYSCRFSRQCVVDKDKRNQCRYCRLKKCFRAGMKKEAVQNERDRISTRRSSYEDSSLPSINALLQAEVLSRQITSPVSGINGDIRAKKIAEIADVCESMKEQLLVLVEWAKYIPAFCELPLDDQVALLRAHAGEHLLLGATKRSMVFKDVLLLGNDYIVPRHCPELAEMSRVSIRILDELVLPFQELQIDDNEYAYLKAIIFFDPDAKGLSDPGKIKRLRSQVQVSLEDYINDRQYDSRGRFGELLLLLPTLQSITWQMIEQIQFIKLFGMAKIDNLLQEMLLGGSPSDAPHAHHPLHPHLMQEHMGTNVIVANTMPTHLSNGQMCEWPRPRGQAATPETPQPSPPGGSGSEPYKLLPGAVATIVKPLSAIPQPTITKQEVI

SEQ ID NO: 128 - protein, 474 aa, synthetic construct
  REGION 1..474: note = protein (artificial) from Homo sapiens__NP_000448.3__HNF4A(1-474)(S461A)
MRLSKTLVDMDMADYSAALDPAYTTLEFENVQVLTMGNDTSPSEGTNLNAPNSLGVSALCAICGDRATGKHYGASSCDGCKGFFRRSVRKNHMYSCRFSRQCVVDKDKRNQCRYCRLKKCFRAGMKKEAVQNERDRISTRRSSYEDSSLPSINALLQAEVLSRQITSPVSGINGDIRAKKIASIADVCESMKEQLLVLVEWAKYIPAFCELPLDDQVALLRAHAGEHLLLGATKRSMVFKDVLLLGNDYIVPRHCPELAEMSRVSIRILDELVLPFQELQIDDNEYAYLKAIIFFDPDAKGLSDPGKIKRLRSQVQVSLEDYINDRQYDSRGRFGELLLLLPTLQSITWQMIEQIQFIKLFGMAKIDNLLQEMLLGGSPSDAPHAHHPLHPHLMQEHMGTNVIVANTMPTHLSNGQMCEWPRPRGQAATPETPQPSPPGGSGSEPYKLLPGAVATIVKPLAAIPQPTITKQEVI

SEQ ID NO: 129 - protein, 474 aa, synthetic construct
  REGION 1..474: note = protein (artificial) from Homo sapiens__NP_000448.3__HNF4A(1-474)(S461E)
MRLSKTLVDMDMADYSAALDPAYTTLEFENVQVLTMGNDTSPSEGTNLNAPNSLGVSALCAICGDRATGKHYGASSCDGCKGFFRRSVRKNHMYSCRFSRQCVVDKDKRNQCRYCRLKKCFRAGMKKEAVQNERDRISTRRSSYEDSSLPSINALLQAEVLSRQITSPVSGINGDIRAKKIASIADVCESMKEQLLVLVEWAKYIPAFCELPLDDQVALLRAHAGEHLLLGATKRSMVFKDVLLLGNDYIVPRHCPELAEMSRVSIRILDELVLPFQELQIDDNEYAYLKAIIFFDPDAKGLSDPGKIKRLRSQVQVSLEDYINDRQYDSRGRFGELLLLLPTLQSITWQMIEQIQFIKLFGMAKIDNLLQEMLLGGSPSDAPHAHHPLHPHLMQEHMGTNVIVANTMPTHLSNGQMCEWPRPRGQAATPETPQPSPPGGSGSEPYKLLPGAVATIVKPLEAIPQPTITKQEVI

SEQ ID NO: 130 - protein, 474 aa, synthetic construct
  REGION 1..474: note = protein (artificial) from Homo sapiens__NP_000448.3__HNF4A(1-474)(S142A_S143A_S313A)
MRLSKTLVDMDMADYSAALDPAYTTLEFENVQVLTMGNDTSPSEGTNLNAPNSLGVSALCAICGDRATGKHYGASSCDGCKGFFRRSVRKNHMYSCRFSRQCVVDKDKRNQCRYCRLKKCFRAGMKKEAVQNERDRISTRRAAYEDSSLPSINALLQAEVLSRQITSPVSGINGDIRAKKIASIADVCESMKEQLLVLVEWAKYIPAFCELPLDDQVALLRAHAGEHLLLGATKRSMVFKDVLLLGNDYIVPRHCPELAEMSRVSIRILDELVLPFQELQIDDNEYAYLKAIIFFDPDAKGLSDPGKIKRLRAQVQVSLEDYINDRQYDSRGRFGELLLLLPTLQSITWQMIEQIQFIKLFGMAKIDNLLQEMLLGGSPSDAPHAHHPLHPHLMQEHMGTNVIVANTMPTHLSNGQMCEWPRPRGQAATPETPQPSPPGGSGSEPYKLLPGAVATIVKPLSAIPQPTITKQEVI

SEQ ID NO: 131 - protein, 474 aa, synthetic construct
  REGION 1..474: note = protein (artificial) from Homo sapiens__NP_000448.3__HNF4A(1-474)(S142A_S143A_S313A_K458R)
MRLSKTLVDMDMADYSAALDPAYTTLEFENVQVLTMGNDTSPSEGTNLNAPNSLGVSALCAICGDRATGKHYGASSCDGCKGFFRRSVRKNHMYSCRFSRQCVVDKDKRNQCRYCRLKKCFRAGMKKEAVQNERDRISTRRAAYEDSSLPSINALLQAEVLSRQITSPVSGINGDIRAKKIASIADVCESMKEQLLVLVEWAKYIPAFCELPLDDQVALLRAHAGEHLLLGATKRSMVFKDVLLLGNDYIVPRHCPELAEMSRVSIRILDELVLPFQELQIDDNEYAYLKAIIFFDPDAKGLSDPGKIKRLRAQVQVSLEDYINDRQYDSRGRFGELLLLLPTLQSITWQMIEQIQFIKLFGMAKIDNLLQEMLLGGSPSDAPHAHHPLHPHLMQEHMGTNVIVANTMPTHLSNGQMCEWPRPRGQAATPETPQPSPPGGSGSEPYKLLPGAVATIVRPLSAIPQPTITKQEVI

SEQ ID NO: 132 - protein, 474 aa, synthetic construct
  REGION 1..474: note = protein (artificial) from Homo sapiens__NP_000448.3__HNF4A(1-474)(S142A_S143A_S167A_S313A_ S378A_T429A_T432A_S436A_K458R)
MRLSKTLVDMDMADYSAALDPAYTTLEFENVQVLTMGNDTSPSEGTNLNAPNSLGVSALCAICGDRATGKHYGASSCDGCKGFFRRSVRKNHMYSCRFSRQCVVDKDKRNQCRYCRLKKCFRAGMKKEAVQNERDRISTRRAAYEDSSLPSINALLQAEVLSRQITAPVSGINGDIRAKKIASIADVCESMKEQLLVLVEWAKYIPAFCELPLDDQVALLRAHAGEHLLLGATKRSMVFKDVLLLGNDYIVPRHCPELAEMSRVSIRILDELVLPFQELQIDDNEYAYLKAIIFFDPDAKGLSDPGKIKRLRAQVQVSLEDYINDRQYDSRGRFGELLLLLPTLQSITWQMIEQIQFIKLFGMAKIDNLLQEMLLGGAPSDAPHAHHPLHPHLMQEHMGTNVIVANTMPTHLSNGQMCEWPRPRGQAAAPEAPQPAPPGGSGSEPYKLLPGAVATIVRPLSAIPQPTITKQEVI

SEQ ID NO: 133 - protein, 474 aa, synthetic construct
  REGION 1..474: note = protein (artificial) from Homo sapiens__NP_000448.3__HNF4A(1-474)(S142A_S143A_S148A_S167A_ S313A_S378A_T429A_T432A_S436A_K458R)
MRLSKTLVDMDMADYSAALDPAYTTLEFENVQVLTMGNDTSPSEGTNLNAPNSLGVSALCAICGDRATGKHYGASSCDGCKGFFRRSVRKNHMYSCRFSRQCVVDKDKRNQCRYCRLKKCFRAGMKKEAVQNERDRISTRRAAYEDSALPSINALLQAEVLSRQITAPVSGINGDIRAKKIASIADVCESMKEQLLVLVEWAKYIPAFCELPLDDQVALLRAHAGEHLLLGATKRSMVFKDVLLLGNDYIVPRHCPELAEMSRVSIRILDELVLPFQELQIDDNEYAYLKAIIFFDPDAKGLSDPGKIKRLRAQVQVSLEDYINDRQYDSRGRFGELLLLLPTLQSITWQMIEQIQFIKLFGMAKIDNLLQEMLLGGAPSDAPHAHHPLHPHLMQEHMGTNVIVANTMPTHLSNGQMCEWPRPRGQAAAPEAPQPAPPGGSGSEPYKLLPGAVATIVRPLSAIPQPTITKQEVI

SEQ ID NO: 134 - protein, 474 aa, synthetic construct
  REGION 1..474: note = protein (artificial) from Homo sapiens__NP_000448.3__HNF4A(1-474)(K106R_K108R_K126R_K127R_ S142A_S143A_S148A_S167A_S313A_S378A_T429A_T432A_S436A_K458R )
MRLSKTLVDMDMADYSAALDPAYTTLEFENVQVLTMGNDTSPSEGTNLNAPNSLGVSALCAICGDRATGKHYGASSCDGCKGFFRRSVRKNHMYSCRFSRQCVVDRDRRNQCRYCRLKKCFRAGMRREAVQNERDRISTRRAAYEDSALPSINALLQAEVLSRQITAPVSGINGDIRAKKIASIADVCESMKEQLLVLVEWAKYIPAFCELPLDDQVALLRAHAGEHLLLGATKRSMVFKDVLLLGNDYIVPRHCPELAEMSRVSIRILDELVLPFQELQIDDNEYAYLKAIIFFDPDAKGLSDPGKIKRLRAQVQVSLEDYINDRQYDSRGRFGELLLLLPTLQSITWQMIEQIQFIKLFGMAKIDNLLQEMLLGGAPSDAPHAHHPLHPHLMQEHMGTNVIVANTMPTHLSNGQMCEWPRPRGQAAAPEAPQPAPPGGSGSEPYKLLPGAVATIVRPLSAIPQPTITKQEVI

SEQ ID NO: 135 - protein, 474 aa, synthetic construct
  REGION 1..474: note = protein (artificial) from Homo sapiens__NP_000448.3__HNF4A(1-474)(S142A_S143A_S148A_T166A_ S167A_S313A_S378A_T429A_T432A_S436A_K458R)
MRLSKTLVDMDMADYSAALDPAYTTLEFENVQVLTMGNDTSPSEGTNLNAPNSLGVSALCAICGDRATGKHYGASSCDGCKGFFRRSVRKNHMYSCRFSRQCVVDKDKRNQCRYCRLKKCFRAGMKKEAVQNERDRISTRRAAYEDSALPSINALLQAEVLSRQIAAPVSGINGDIRAKKIASIADVCESMKEQLLVLVEWAKYIPAFCELPLDDQVALLRAHAGEHLLLGATKRSMVFKDVLLLGNDYIVPRHCPELAEMSRVSIRILDELVLPFQELQIDDNEYAYLKAIIFFDPDAKGLSDPGKIKRLRAQVQVSLEDYINDRQYDSRGRFGELLLLLPTLQSITWQMIEQIQFIKLFGMAKIDNLLQEMLLGGAPSDAPHAHHPLHPHLMQEHMGTNVIVANTMPTHLSNGQMCEWPRPRGQAAAPEAPQPAPPGGSGSEPYKLLPGAVATIVRPLSAIPQPTITKQEVI

SEQ ID NO: 136 - protein, 474 aa, synthetic construct
  REGION 1..474: note = protein (artificial) from Homo sapiens__NP_000448.3__HNF4A(1-474)(S87A_S142A_S143A_S148A_T 166A_S167A_S313A_S378A_T429A_T432A_S436A_K458R)
MRLSKTLVDMDMADYSAALDPAYTTLEFENVQVLTMGNDTSPSEGTNLNAPNSLGVSALCAICGDRATGKHYGASSCDGCKGFFRRAVRKNHMYSCRFSRQCVVDKDKRNQCRYCRLKKCFRAGMKKEAVQNERDRISTRRAAYEDSALPSINALLQAEVLSRQIAAPVSGINGDIRAKKIASIADVCESMKEQLLVLVEWAKYIPAFCELPLDDQVALLRAHAGEHLLLGATKRSMVFKDVLLLGNDYIVPRHCPELAEMSRVSIRILDELVLPFQELQIDDNEYAYLKAIIFFDPDAKGLSDPGKIKRLRAQVQVSLEDYINDRQYDSRGRFGELLLLLPTLQSITWQMIEQIQFIKLFGMAKIDNLLQEMLLGGAPSDAPHAHHPLHPHLMQEHMGTNVIVANTMPTHLSNGQMCEWPRPRGQAAAPEAPQPAPPGGSGSEPYKLLPGAVATIVRPLSAIPQPTITKQEVI

SEQ ID NO: 137 - protein, 474 aa, synthetic construct
  REGION 1..474: note = protein (artificial) from Homo sapiens__NP_000448.3__HNF4A(1-474)(S87A_K106R_K108R_K126R_K 127R_S142A_S143A_S148A_T166A_S167A_S313A_S378A_T429A_T432A_ S436A_K458R)
MRLSKTLVDMDMADYSAALDPAYTTLEFENVQVLTMGNDTSPSEGTNLNAPNSLGVSALCAICGDRATGKHYGASSCDGCKGFFRRAVRKNHMYSCRFSRQCVVDRDRRNQCRYCRLKKCFRAGMRREAVQNERDRISTRRAAYEDSALPSINALLQAEVLSRQIAAPVSGINGDIRAKKIASIADVCESMKEQLLVLVEWAKYIPAFCELPLDDQVALLRAHAGEHLLLGATKRSMVFKDVLLLGNDYIVPRHCPELAEMSRVSIRILDELVLPFQELQIDDNEYAYLKAIIFFDPDAKGLSDPGKIKRLRAQVQVSLEDYINDRQYDSRGRFGELLLLLPTLQSITWQMIEQIQFIKLFGMAKIDNLLQEMLLGGAPSDAPHAHHPLHPHLMQEHMGTNVIVANTMPTHLSNGQMCEWPRPRGQAAAPEAPQPAPPGGSGSEPYKLLPGAVATIVRPLSAIPQPTITKQEVI

SEQ ID NO: 138 - protein, 474 aa, synthetic construct
  REGION 1..474: note = protein (artificial) from Homo sapiens__NP_000448.3__HNF4A(1-474)(S87A_K106R_K108R_K126R_K 127R)
MRLSKTLVDMDMADYSAALDPAYTTLEFENVQVLTMGNDTSPSEGTNLNAPNSLGVSALCAICGDRATGKHYGASSCDGCKGFFRRAVRKNHMYSCRFSRQCVVDRDRRNQCRYCRLKKCFRAGMRREAVQNERDRISTRRSSYEDSSLPSINALLQAEVLSRQITSPVSGINGDIRAKKIASIADVCESMKEQLLVLVEWAKYIPAFCELPLDDQVALLRAHAGEHLLLGATKRSMVFKDVLLLGNDYIVPRHCPELAEMSRVSIRILDELVLPFQELQIDDNEYAYLKAIIFFDPDAKGLSDPGKIKRLRSQVQVSLEDYINDRQYDSRGRFGELLLLLPTLQSITWQMIEQIQFIKLFGMAKIDNLLQEMLLGGSPSDAPHAHHPLHPHLMQEHMGTNVIVANTMPTHLSNGQMCEWPRPRGQAATPETPQPSPPGGSGSEPYKLLPGAVATIVKPLSAIPQPTITKQEVI

SEQ ID NO: 139 - protein, 474 aa, synthetic construct
  REGION 1..474: note = protein (artificial) from Homo sapiens__NP_000448.3__HNF4A(1-474)(S87A_K106R_K108R_K126R_K 127R_S142A_S143A_S148A_T166A_S167A_S313A_S378A_T429A_T432A_ S436A_K458R_S461A)
MRLSKTLVDMDMADYSAALDPAYTTLEFENVQVLTMGNDTSPSEGTNLNAPNSLGVSALCAICGDRATGKHYGASSCDGCKGFFRRAVRKNHMYSCRFSRQCVVDRDRRNQCRYCRLKKCFRAGMRREAVQNERDRISTRRAAYEDSALPSINALLQAEVLSRQIAAPVSGINGDIRAKKIASIADVCESMKEQLLVLVEWAKYIPAFCELPLDDQVALLRAHAGEHLLLGATKRSMVFKDVLLLGNDYIVPRHCPELAEMSRVSIRILDELVLPFQELQIDDNEYAYLKAIIFFDPDAKGLSDPGKIKRLRAQVQVSLEDYINDRQYDSRGRFGELLLLLPTLQSITWQMIEQIQFIKLFGMAKIDNLLQEMLLGGAPSDAPHAHHPLHPHLMQEHMGTNVIVANTMPTHLSNGQMCEWPRPRGQAAAPEAPQPAPPGGSGSEPYKLLPGAVATIVRPLAAIPQPTITKQEVI

SEQ ID NO: 140 - protein, 474 aa, synthetic construct
  REGION 1..474: note = protein (artificial) from Homo sapiens__NP_000448.3__HNF4A(1-474)(S87A_K106R_K108R_K126R_K 127R_S142A_S143A_S148A_T166A_S167A_S313A_S378A_T429A_T432A_ S436A_K458R_S461E)
MRLSKTLVDMDMADYSAALDPAYTTLEFENVQVLTMGNDTSPSEGTNLNAPNSLGVSALCAICGDRATGKHYGASSCDGCKGFFRRAVRKNHMYSCRFSRQCVVDRDRRNQCRYCRLKKCFRAGMRREAVQNERDRISTRRAAYEDSALPSINALLQAEVLSRQIAAPVSGINGDIRAKKIASIADVCESMKEQLLVLVEWAKYIPAFCELPLDDQVALLRAHAGEHLLLGATKRSMVFKDVLLLGNDYIVPRHCPELAEMSRVSIRILDELVLPFQELQIDDNEYAYLKAIIFFDPDAKGLSDPGKIKRLRAQVQVSLEDYINDRQYDSRGRFGELLLLLPTLQSITWQMIEQIQFIKLFGMAKIDNLLQEMLLGGAPSDAPHAHHPLHPHLMQEHMGTNVIVANTMPTHLSNGQMCEWPRPRGQAAAPEAPQPAPPGGSGSEPYKLLPGAVATIVRPLEAIPQPTITKQEVI

SEQ ID NO: 141 - protein, 474 aa, synthetic construct
  REGION 1..474: note = protein (artificial) from Homo sapiens__NP_000448.3__HNF4A(1-474)(S87A_K106R_K108R_K126R_K 127R_S142A_S143A_S148E_T166A_S167E_S313A_S378E_T429E_T432E_ S436E_K458R_S461E)
MRLSKTLVDMDMADYSAALDPAYTTLEFENVQVLTMGNDTSPSEGTNLNAPNSLGVSALCAICGDRATGKHYGASSCDGCKGFFRRAVRKNHMYSCRFSRQCVVDRDRRNQCRYCRLKKCFRAGMRREAVQNERDRISTRRAAYEDSELPSINALLQAEVLSRQIAEPVSGINGDIRAKKIASIADVCESMKEQLLVLVEWAKYIPAFCELPLDDQVALLRAHAGEHLLLGATKRSMVFKDVLLLGNDYIVPRHCPELAEMSRVSIRILDELVLPFQELQIDDNEYAYLKAIIFFDPDAKGLSDPGKIKRLRAQVQVSLEDYINDRQYDSRGRFGELLLLLPTLQSITWQMIEQIQFIKLFGMAKIDNLLQEMLLGGEPSDAPHAHHPLHPHLMQEHMGTNVIVANTMPTHLSNGQMCEWPRPRGQAAEPEEPQPEPPGGSGSEPYKLLPGAVATIVRPLEAIPQPTITKQEVI

SEQ ID NO: 142 - protein, 474 aa, synthetic construct
  REGION 1..474: note = protein (artificial) from Homo sapiens__NP_000448.3__HNF4A(1-474)(S87A_K106R_K108R_K126R_K 127R_S142A_S143A_S148A_T166A_S167A_K179R_K180R_S313A_S378A_ T429A_T432A_S436A_K458R_S461E)
MRLSKTLVDMDMADYSAALDPAYTTLEFENVQVLTMGNDTSPSEGTNLNAPNSLGVSALCAICGDRATGKHYGASSCDGCKGFFRRAVRKNHMYSCRFSRQCVVDRDRRNQCRYCRLKKCFRAGMRREAVQNERDRISTRRAAYEDSALPSINALLQAEVLSRQIAAPVSGINGDIRARRIASIADVCESMKEQLLVLVEWAKYIPAFCELPLDDQVALLRAHAGEHLLLGATKRSMVFKDVLLLGNDYIVPRHCPELAEMSRVSIRILDELVLPFQELQIDDNEYAYLKAIIFFDPDAKGLSDPGKIKRLRAQVQVSLEDYINDRQYDSRGRFGELLLLLPTLQSITWQMIEQIQFIKLFGMAKIDNLLQEMLLGGAPSDAPHAHHPLHPHLMQEHMGTNVIVANTMPTHLSNGQMCEWPRPRGQAAAPEAPQPAPPGGSGSEPYKLLPGAVATIVRPLEAIPQPTITKQEVI

SEQ ID NO: 143 - protein, 474 aa, synthetic construct
  REGION 1..474: note = protein (artificial) from Homo sapiens__NP_000448.3__HNF4A(1-474)(S87A_K106R_K108R_K126R_K 127R_S142A_S143A_S148A_T166A_S167A_K300R_K307R_K309R_S313A_ S378A_T429A_T432A_S436A_K458R_S461E)
MRLSKTLVDMDMADYSAALDPAYTTLEFENVQVLTMGNDTSPSEGTNLNAPNSLGVSALCAICGDRATGKHYGASSCDGCKGFFRRAVRKNHMYSCRFSRQCVVDRDRRNQCRYCRLKKCFRAGMRREAVQNERDRISTRRAAYEDSALPSINALLQAEVLSRQIAAPVSGINGDIRAKKIASIADVCESMKEQLLVLVEWAKYIPAFCELPLDDQVALLRAHAGEHLLLGATKRSMVFKDVLLLGNDYIVPRHCPELAEMSRVSIRILDELVLPFQELQIDDNEYAYLKAIIFFDPDARGLSDPGRIRRLRAQVQVSLEDYINDRQYDSRGRFGELLLLLPTLQSITWQMIEQIQFIKLFGMAKIDNLLQEMLLGGAPSDAPHAHHPLHPHLMQEHMGTNVIVANTMPTHLSNGQMCEWPRPRGQAAAPEAPQPAPPGGSGSEPYKLLPGAVATIVRPLEAIPQPTITKQEVI

SEQ ID NO: 144 - protein, 474 aa, synthetic construct
  REGION 1..474: note = protein (artificial) from Homo sapiens__NP_000448.3__HNF4A(1-474)(S87A_K106R_K108R_K126R_K 127R_S142A_S143A_S148A_T166A_S167A_S313A_S378A_T429A_T432A_ S436A_K447R_K458R_S461E_K470R)
MRLSKTLVDMDMADYSAALDPAYTTLEFENVQVLTMGNDTSPSEGTNLNAPNSLGVSALCAICGDRATGKHYGASSCDGCKGFFRRAVRKNHMYSCRFSRQCVVDRDRRNQCRYCRLKKCFRAGMRREAVQNERDRISTRRAAYEDSALPSINALLQAEVLSRQIAAPVSGINGDIRAKKIASIADVCESMKEQLLVLVEWAKYIPAFCELPLDDQVALLRAHAGEHLLLGATKRSMVFKDVLLLGNDYIVPRHCPELAEMSRVSIRILDELVLPFQELQIDDNEYAYLKAIIFFDPDAKGLSDPGKIKRLRAQVQVSLEDYINDRQYDSRGRFGELLLLLPTLQSITWQMIEQIQFIKLFGMAKIDNLLQEMLLGGAPSDAPHAHHPLHPHLMQEHMGTNVIVANTMPTHLSNGQMCEWPRPRGQAAAPEAPQPAPPGGSGSEPYRLLPGAVATIVRPLEAIPQPTITRQEVI

SEQ ID NO: 145 - protein, 474 aa, synthetic construct
  REGION 1..474: note = protein (artificial) from Homo sapiens__NP_000448.3__HNF4A(1-474)(S87A_K106R_K108R_K126R_K 127R_S142A_S143A_S148A_T166A_S167A_K179R_K180R_K234R_K300R_ K307R_K309R_S313A_S378A_T429A_T432A_S436A_K447R_K458R_S461E _K470R)
MRLSKTLVDMDMADYSAALDPAYTTLEFENVQVLTMGNDTSPSEGTNLNAPNSLGVSALCAICGDRATGKHYGASSCDGCKGFFRRAVRKNHMYSCRFSRQCVVDRDRRNQCRYCRLKKCFRAGMRREAVQNERDRISTRRAAYEDSALPSINALLQAEVLSRQIAAPVSGINGDIRARRIASIADVCESMKEQLLVLVEWAKYIPAFCELPLDDQVALLRAHAGEHLLLGATRRSMVFKDVLLLGNDYIVPRHCPELAEMSRVSIRILDELVLPFQELQIDDNEYAYLKAIIFFDPDARGLSDPGRIRRLRAQVQVSLEDYINDRQYDSRGRFGELLLLLPTLQSITWQMIEQIQFIKLFGMAKIDNLLQEMLLGGAPSDAPHAHHPLHPHLMQEHMGTNVIVANTMPTHLSNGQMCEWPRPRGQAAAPEAPQPAPPGGSGSEPYRLLPGAVATIVRPLEAIPQPTITRQEVI

SEQ ID NO: 146 - protein, 474 aa, synthetic construct
  REGION 1..474: note = protein (artificial) from Homo sapiens__NP_000448.3__HNF4A(1-474)(S87A_S95A_S99A_K106R_K10 8R_K126R_K127R_S142A_S143A_S148A_T166A_S167A_S313A_S378A_T4 29A_T432A_S436A_K458R_S461E)
MRLSKTLVDMDMADYSAALDPAYTTLEFENVQVLTMGNDTSPSEGTNLNAPNSLGVSALCAICGDRATGKHYGASSCDGCKGFFRRAVRKNHMYACRFARQCVVDRDRRNQCRYCRLKKCFRAGMRREAVQNERDRISTRRAAYEDSALPSINALLQAEVLSRQIAAPVSGINGDIRAKKIASIADVCESMKEQLLVLVEWAKYIPAFCELPLDDQVALLRAHAGEHLLLGATKRSMVFKDVLLLGNDYIVPRHCPELAEMSRVSIRILDELVLPFQELQIDDNEYAYLKAIIFFDPDAKGLSDPGKIKRLRAQVQVSLEDYINDRQYDSRGRFGELLLLLPTLQSITWQMIEQIQFIKLFGMAKIDNLLQEMLLGGAPSDAPHAHHPLHPHLMQEHMGTNVIVANTMPTHLSNGQMCEWPRPRGQAAAPEAPQPAPPGGSGSEPYKLLPGAVATIVRPLEAIPQPTITKQEVI

SEQ ID NO: 147 - protein, 474 aa, synthetic construct
  REGION 1..474: note = protein (artificial) from Homo sapiens__NP_000448.3__HNF4A(1-474)(S87A_K106R_K108R_K126R_K 127R_S138A_T139A_S142A_S143A_S148A_T166A_S167A_S313A_S378A_ T429A_T432A_S436A_K458R_S461E)
MRLSKTLVDMDMADYSAALDPAYTTLEFENVQVLTMGNDTSPSEGTNLNAPNSLGVSALCAICGDRATGKHYGASSCDGCKGFFRRAVRKNHMYSCRFSRQCVVDRDRRNQCRYCRLKKCFRAGMRREAVQNERDRIAARRAAYEDSALPSINALLQAEVLSRQIAAPVSGINGDIRAKKIASIADVCESMKEQLLVLVEWAKYIPAFCELPLDDQVALLRAHAGEHLLLGATKRSMVFKDVLLLGNDYIVPRHCPELAEMSRVSIRILDELVLPFQELQIDDNEYAYLKAIIFFDPDAKGLSDPGKIKRLRAQVQVSLEDYINDRQYDSRGRFGELLLLLPTLQSITWQMIEQIQFIKLFGMAKIDNLLQEMLLGGAPSDAPHAHHPLHPHLMQEHMGTNVIVANTMPTHLSNGQMCEWPRPRGQAAAPEAPQPAPPGGSGSEPYKLLPGAVATIVRPLEAIPQPTITKQEVI

SEQ ID NO: 148 - protein, 474 aa, synthetic construct
  REGION 1..474: note = protein (artificial) from Homo sapiens__NP_000448.3__HNF4A(1-474)(S87A_S95A_S99A_K106R_K10 8R_K126R_K127R_S138A_T139A_S142A_S143A_S148A_T166A_S167A_S3 13A_S378A_T429A_T432A_S436A_K458R_S461E)
MRLSKTLVDMDMADYSAALDPAYTTLEFENVQVLTMGNDTSPSEGTNLNAPNSLGVSALCAICGDRATGKHYGASSCDGCKGFFRRAVRKNHMYACRFARQCVVDRDRRNQCRYCRLKKCFRAGMRREAVQNERDRIAARRAAYEDSALPSINALLQAEVLSRQIAAPVSGINGDIRAKKIASIADVCESMKEQLLVLVEWAKYIPAFCELPLDDQVALLRAHAGEHLLLGATKRSMVFKDVLLLGNDYIVPRHCPELAEMSRVSIRILDELVLPFQELQIDDNEYAYLKAIIFFDPDAKGLSDPGKIKRLRAQVQVSLEDYINDRQYDSRGRFGELLLLLPTLQSITWQMIEQIQFIKLFGMAKIDNLLQEMLLGGAPSDAPHAHHPLHPHLMQEHMGTNVIVANTMPTHLSNGQMCEWPRPRGQAAAPEAPQPAPPGGSGSEPYKLLPGAVATIVRPLEAIPQPTITKQEVI

SEQ ID NO: 149 - protein, 375 aa, Homo sapiens
  REGION 1..375: note = protein (wt) from Homo sapiens__NP_000448.3__HNF4A(1-375)
MRLSKTLVDMDMADYSAALDPAYTTLEFENVQVLTMGNDTSPSEGTNLNAPNSLGVSALCAICGDRATGKHYGASSCDGCKGFFRRSVRKNHMYSCRFSRQCVVDKDKRNQCRYCRLKKCFRAGMKKEAVQNERDRISTRRSSYEDSSLPSINALLQAEVLSRQITSPVSGINGDIRAKKIASIADVCESMKEQLLVLVEWAKYIPAFCELPLDDQVALLRAHAGEHLLLGATKRSMVFKDVLLLGNDYIVPRHCPELAEMSRVSIRILDELVLPFQELQIDDNEYAYLKAIIFFDPDAKGLSDPGKIKRLRSQVQVSLEDYINDRQYDSRGRFGELLLLLPTLQSITWQMIEQIQFIKLFGMAKIDNLLQEMLL

SEQ ID NO: 150 - protein, 375 aa, synthetic construct
  REGION 1..375: note = protein (artificial) from Homo sapiens__NP_000448.3__HNF4A(1-375)(S313A)
MRLSKTLVDMDMADYSAALDPAYTTLEFENVQVLTMGNDTSPSEGTNLNAPNSLGVSALCAICGDRATGKHYGASSCDGCKGFFRRSVRKNHMYSCRFSRQCVVDKDKRNQCRYCRLKKCFRAGMKKEAVQNERDRISTRRSSYEDSSLPSINALLQAEVLSRQITSPVSGINGDIRAKKIASIADVCESMKEQLLVLVEWAKYIPAFCELPLDDQVALLRAHAGEHLLLGATKRSMVFKDVLLLGNDYIVPRHCPELAEMSRVSIRILDELVLPFQELQIDDNEYAYLKAIIFFDPDAKGLSDPGKIKRLRAQVQVSLEDYINDRQYDSRGRFGELLLLLPTLQSITWQMIEQIQFIKLFGMAKIDNLLQEMLL

SEQ ID NO: 151 - protein, 375 aa, synthetic construct
  REGION 1..375: note = protein (artificial) from Homo sapiens__NP_000448.3__HNF4A(1-375)(S313E)
MRLSKTLVDMDMADYSAALDPAYTTLEFENVQVLTMGNDTSPSEGTNLNAPNSLGVSALCAICGDRATGKHYGASSCDGCKGFFRRSVRKNHMYSCRFSRQCVVDKDKRNQCRYCRLKKCFRAGMKKEAVQNERDRISTRRSSYEDSSLPSINALLQAEVLSRQITSPVSGINGDIRAKKIASIADVCESMKEQLLVLVEWAKYIPAFCELPLDDQVALLRAHAGEHLLLGATKRSMVFKDVLLLGNDYIVPRHCPELAEMSRVSIRILDELVLPFQELQIDDNEYAYLKAIIFFDPDAKGLSDPGKIKRLREQVQVSLEDYINDRQYDSRGRFGELLLLLPTLQSITWQMIEQIQFIKLFGMAKIDNLLQEMLL

SEQ ID NO: 152 - protein, 375 aa, synthetic construct
  REGION 1..375: note = protein (artificial) from Homo sapiens__NP_000448.3__HNF4A(1-375)(S142A_S143A)
MRLSKTLVDMDMADYSAALDPAYTTLEFENVQVLTMGNDTSPSEGTNLNAPNSLGVSALCAICGDRATGKHYGASSCDGCKGFFRRSVRKNHMYSCRFSRQCVVDKDKRNQCRYCRLKKCFRAGMKKEAVQNERDRISTRRAAYEDSSLPSINALLQAEVLSRQITSPVSGINGDIRAKKIASIADVCESMKEQLLVLVEWAKYIPAFCELPLDDQVALLRAHAGEHLLLGATKRSMVFKDVLLLGNDYIVPRHCPELAEMSRVSIRILDELVLPFQELQIDDNEYAYLKAIIFFDPDAKGLSDPGKIKRLRSQVQVSLEDYINDRQYDSRGRFGELLLLLPTLQSITWQMIEQIQFIKLFGMAKIDNLLQEMLL

SEQ ID NO: 153 - protein, 375 aa, synthetic construct
  REGION 1..375: note = protein (artificial) from Homo sapiens__NP_000448.3__HNF4A(1-375)(S142E_S143E)
MRLSKTLVDMDMADYSAALDPAYTTLEFENVQVLTMGNDTSPSEGTNLNAPNSLGVSALCAICGDRATGKHYGASSCDGCKGFFRRSVRKNHMYSCRFSRQCVVDKDKRNQCRYCRLKKCFRAGMKKEAVQNERDRISTRREEYEDSSLPSINALLQAEVLSRQITSPVSGINGDIRAKKIASIADVCESMKEQLLVLVEWAKYIPAFCELPLDDQVALLRAHAGEHLLLGATKRSMVFKDVLLLGNDYIVPRHCPELAEMSRVSIRILDELVLPFQELQIDDNEYAYLKAIIFFDPDAKGLSDPGKIKRLRSQVQVSLEDYINDRQYDSRGRFGELLLLLPTLQSITWQMIEQIQFIKLFGMAKIDNLLQEMLL

SEQ ID NO: 154 - protein, 375 aa, synthetic construct
  REGION 1..375: note = protein (artificial) from Homo sapiens__NP_000448.3__HNF4A(1-375)(S143A)
MRLSKTLVDMDMADYSAALDPAYTTLEFENVQVLTMGNDTSPSEGTNLNAPNSLGVSALCAICGDRATGKHYGASSCDGCKGFFRRSVRKNHMYSCRFSRQCVVDKDKRNQCRYCRLKKCFRAGMKKEAVQNERDRISTRRSAYEDSSLPSINALLQAEVLSRQITSPVSGINGDIRAKKIASIADVCESMKEQLLVLVEWAKYIPAFCELPLDDQVALLRAHAGEHLLLGATKRSMVFKDVLLLGNDYIVPRHCPELAEMSRVSIRILDELVLPFQELQIDDNEYAYLKAIIFFDPDAKGLSDPGKIKRLRSQVQVSLEDYINDRQYDSRGRFGELLLLLPTLQSITWQMIEQIQFIKLFGMAKIDNLLQEMLL

SEQ ID NO: 155 - protein, 375 aa, synthetic construct
  REGION 1..375: note = protein (artificial) from Homo sapiens__NP_000448.3__HNF4A(1-375)(T166A)
MRLSKTLVDMDMADYSAALDPAYTTLEFENVQVLTMGNDTSPSEGTNLNAPNSLGVSALCAICGDRATGKHYGASSCDGCKGFFRRSVRKNHMYSCRFSRQCVVDKDKRNQCRYCRLKKCFRAGMKKEAVQNERDRISTRRSSYEDSSLPSINALLQAEVLSRQIASPVSGINGDIRAKKIASIADVCESMKEQLLVLVEWAKYIPAFCELPLDDQVALLRAHAGEHLLLGATKRSMVFKDVLLLGNDYIVPRHCPELAEMSRVSIRILDELVLPFQELQIDDNEYAYLKAIIFFDPDAKGLSDPGKIKRLRSQVQVSLEDYINDRQYDSRGRFGELLLLLPTLQSITWQMIEQIQFIKLFGMAKIDNLLQEMLL

SEQ ID NO: 156 - protein, 375 aa, synthetic construct
  REGION 1..375: note = protein (artificial) from Homo sapiens__NP_000448.3__HNF4A(1-375)(S167E)
MRLSKTLVDMDMADYSAALDPAYTTLEFENVQVLTMGNDTSPSEGTNLNAPNSLGVSALCAICGDRATGKHYGASSCDGCKGFFRRSVRKNHMYSCRFSRQCVVDKDKRNQCRYCRLKKCFRAGMKKEAVQNERDRISTRRSSYEDSSLPSINALLQAEVLSRQITEPVSGINGDIRAKKIASIADVCESMKEQLLVLVEWAKYIPAFCELPLDDQVALLRAHAGEHLLLGATKRSMVFKDVLLLGNDYIVPRHCPELAEMSRVSIRILDELVLPFQELQIDDNEYAYLKAIIFFDPDAKGLSDPGKIKRLRSQVQVSLEDYINDRQYDSRGRFGELLLLLPTLQSITWQMIEQIQFIKLFGMAKIDNLLQEMLL

SEQ ID NO: 157 - protein, 375 aa, synthetic construct
  REGION 1..375: note = protein (artificial) from Homo sapiens__NP_000448.3__HNF4A(1-375)(S167A)
MRLSKTLVDMDMADYSAALDPAYTTLEFENVQVLTMGNDTSPSEGTNLNAPNSLGVSALCAICGDRATGKHYGASSCDGCKGFFRRSVRKNHMYSCRFSRQCVVDKDKRNQCRYCRLKKCFRAGMKKEAVQNERDRISTRRSSYEDSSLPSINALLQAEVLSRQITAPVSGINGDIRAKKIASIADVCESMKEQLLVLVEWAKYIPAFCELPLDDQVALLRAHAGEHLLLGATKRSMVFKDVLLLGNDYIVPRHCPELAEMSRVSIRILDELVLPFQELQIDDNEYAYLKAIIFFDPDAKGLSDPGKIKRLRSQVQVSLEDYINDRQYDSRGRFGELLLLLPTLQSITWQMIEQIQFIKLFGMAKIDNLLQEMLL

SEQ ID NO: 158 - protein, 375 aa, synthetic construct; identical to SEQ ID NO: 157
  REGION 1..375: note = protein (artificial) from Homo sapiens__NP_000448.3__HNF4A(1-375)(S167A_S378A_T429A_T432A_ S436A)

SEQ ID NO: 159 - protein, 375 aa, synthetic construct; identical to SEQ ID NO: 156
  REGION 1..375: note = protein (artificial) from Homo sapiens__NP_000448.3__HNF4A(1-375)(S167E_S378E_T429E_T432E_ S436E)

SEQ ID NO: 160 - protein, 375 aa, synthetic construct
  REGION 1..375: note = protein (artificial) from Homo sapiens__NP_000448.3__HNF4A(1-375)(S87A)
MRLSKTLVDMDMADYSAALDPAYTTLEFENVQVLTMGNDTSPSEGTNLNAPNSLGVSALCAICGDRATGKHYGASSCDGCKGFFRRAVRKNHMYSCRFSRQCVVDKDKRNQCRYCRLKKCFRAGMKKEAVQNERDRISTRRSSYEDSSLPSINALLQAEVLSRQITSPVSGINGDIRAKKIASIADVCESMKEQLLVLVEWAKYIPAFCELPLDDQVALLRAHAGEHLLLGATKRSMVFKDVLLLGNDYIVPRHCPELAEMSRVSIRILDELVLPFQELQIDDNEYAYLKAIIFFDPDAKGLSDPGKIKRLRSQVQVSLEDYINDRQYDSRGRFGELLLLLPTLQSITWQMIEQIQFIKLFGMAKIDNLLQEMLL

SEQ ID NO: 161 - protein, 375 aa, synthetic construct
  REGION 1..375: note = protein (artificial) from Homo sapiens__NP_000448.3__HNF4A(1-375)(S87E)
MRLSKTLVDMDMADYSAALDPAYTTLEFENVQVLTMGNDTSPSEGTNLNAPNSLGVSALCAICGDRATGKHYGASSCDGCKGFFRREVRKNHMYSCRFSRQCVVDKDKRNQCRYCRLKKCFRAGMKKEAVQNERDRISTRRSSYEDSSLPSINALLQAEVLSRQITSPVSGINGDIRAKKIASIADVCESMKEQLLVLVEWAKYIPAFCELPLDDQVALLRAHAGEHLLLGATKRSMVFKDVLLLGNDYIVPRHCPELAEMSRVSIRILDELVLPFQELQIDDNEYAYLKAIIFFDPDAKGLSDPGKIKRLRSQVQVSLEDYINDRQYDSRGRFGELLLLLPTLQSITWQMIEQIQFIKLFGMAKIDNLLQEMLL

SEQ ID NO: 162 - protein, 375 aa, synthetic construct
  REGION 1..375: note = protein (artificial) from Homo sapiens__NP_000448.3__HNF4A(1-375)(R2V)
MVLSKTLVDMDMADYSAALDPAYTTLEFENVQVLTMGNDTSPSEGTNLNAPNSLGVSALCAICGDRATGKHYGASSCDGCKGFFRRSVRKNHMYSCRFSRQCVVDKDKRNQCRYCRLKKCFRAGMKKEAVQNERDRISTRRSSYEDSSLPSINALLQAEVLSRQITSPVSGINGDIRAKKIASIADVCESMKEQLLVLVEWAKYIPAFCELPLDDQVALLRAHAGEHLLLGATKRSMVFKDVLLLGNDYIVPRHCPELAEMSRVSIRILDELVLPFQELQIDDNEYAYLKAIIFFDPDAKGLSDPGKIKRLRSQVQVSLEDYINDRQYDSRGRFGELLLLLPTLQSITWQMIEQIQFIKLFGMAKIDNLLQEMLL

SEQ ID NO: 163 - protein, 375 aa, synthetic construct
  REGION 1..375: note = protein (artificial) from Homo sapiens__NP_000448.3__HNF4A(1-375)(R2V_K5V)
MVLSVTLVDMDMADYSAALDPAYTTLEFENVQVLTMGNDTSPSEGTNLNAPNSLGVSALCAICGDRATGKHYGASSCDGCKGFFRRSVRKNHMYSCRFSRQCVVDKDKRNQCRYCRLKKCFRAGMKKEAVQNERDRISTRRSSYEDSSLPSINALLQAEVLSRQITSPVSGINGDIRAKKIASIADVCESMKEQLLVLVEWAKYIPAFCELPLDDQVALLRAHAGEHLLLGATKRSMVFKDVLLLGNDYIVPRHCPELAEMSRVSIRILDELVLPFQELQIDDNEYAYLKAIIFFDPDAKGLSDPGKIKRLRSQVQVSLEDYINDRQYDSRGRFGELLLLLPTLQSITWQMIEQIQFIKLFGMAKIDNLLQEMLL

SEQ ID NO: 164 - protein, 375 aa, synthetic construct
  REGION 1..375: note = protein (artificial) from Homo sapiens__NP_000448.3__HNF4A(1-375)(K179R_K180R)
MRLSKTLVDMDMADYSAALDPAYTTLEFENVQVLTMGNDTSPSEGTNLNAPNSLGVSALCAICGDRATGKHYGASSCDGCKGFFRRSVRKNHMYSCRFSRQCVVDKDKRNQCRYCRLKKCFRAGMKKEAVQNERDRISTRRSSYEDSSLPSINALLQAEVLSRQITSPVSGINGDIRARRIASIADVCESMKEQLLVLVEWAKYIPAFCELPLDDQVALLRAHAGEHLLLGATKRSMVFKDVLLLGNDYIVPRHCPELAEMSRVSIRILDELVLPFQELQIDDNEYAYLKAIIFFDPDAKGLSDPGKIKRLRSQVQVSLEDYINDRQYDSRGRFGELLLLLPTLQSITWQMIEQIQFIKLFGMAKIDNLLQEMLL

SEQ ID NO: 165 - protein, 375 aa, synthetic construct
  REGION 1..375: note = protein (artificial) from Homo sapiens__NP_000448.3__HNF4A(1-375)(K234R)
MRLSKTLVDMDMADYSAALDPAYTTLEFENVQVLTMGNDTSPSEGTNLNAPNSLGVSALCAICGDRATGKHYGASSCDGCKGFFRRSVRKNHMYSCRFSRQCVVDKDKRNQCRYCRLKKCFRAGMKKEAVQNERDRISTRRSSYEDSSLPSINALLQAEVLSRQITSPVSGINGDIRAKKIASIADVCESMKEQLLVLVEWAKYIPAFCELPLDDQVALLRAHAGEHLLLGATRRSMVFKDVLLLGNDYIVPRHCPELAEMSRVSIRILDELVLPFQELQIDDNEYAYLKAIIFFDPDAKGLSDPGKIKRLRSQVQVSLEDYINDRQYDSRGRFGELLLLLPTLQSITWQMIEQIQFIKLFGMAKIDNLLQEMLL

SEQ ID NO: 166 - protein, 375 aa, synthetic construct
  REGION 1..375: note = protein (artificial) from Homo sapiens__NP_000448.3__HNF4A(1-375)(K300R)
MRLSKTLVDMDMADYSAALDPAYTTLEFENVQVLTMGNDTSPSEGTNLNAPNSLGVSALCAICGDRATGKHYGASSCDGCKGFFRRSVRKNHMYSCRFSRQCVVDKDKRNQCRYCRLKKCFRAGMKKEAVQNERDRISTRRSSYEDSSLPSINALLQAEVLSRQITSPVSGINGDIRAKKIASIADVCESMKEQLLVLVEWAKYIPAFCELPLDDQVALLRAHAGEHLLLGATKRSMVFKDVLLLGNDYIVPRHCPELAEMSRVSIRILDELVLPFQELQIDDNEYAYLKAIIFFDPDARGLSDPGKIKRLRSQVQVSLEDYINDRQYDSRGRFGELLLLLPTLQSITWQMIEQIQFIKLFGMAKIDNLLQEMLL

SEQ ID NO: 167 - protein, 375 aa, synthetic construct
  REGION 1..375: note = protein (artificial) from Homo sapiens__NP_000448.3__HNF4A(1-375)(K300R_K307R_K309R)
MRLSKTLVDMDMADYSAALDPAYTTLEFENVQVLTMGNDTSPSEGTNLNAPNSLGVSALCAICGDRATGKHYGASSCDGCKGFFRRSVRKNHMYSCRFSRQCVVDKDKRNQCRYCRLKKCFRAGMKKEAVQNERDRISTRRSSYEDSSLPSINALLQAEVLSRQITSPVSGINGDIRAKKIASIADVCESMKEQLLVLVEWAKYIPAFCELPLDDQVALLRAHAGEHLLLGATKRSMVFKDVLLLGNDYIVPRHCPELAEMSRVSIRILDELVLPFQELQIDDNEYAYLKAIIFFDPDARGLSDPGRIRRLRSQVQVSLEDYINDRQYDSRGRFGELLLLLPTLQSITWQMIEQIQFIKLFGMAKIDNLLQEMLL

SEQ ID NO: 168 - protein, 375 aa, synthetic construct; identical to SEQ ID NO: 149
  REGION 1..375: note = protein (artificial) from Homo sapiens__NP_000448.3__HNF4A(1-375)(K447R_K470R)

SEQ ID NO: 169 - protein, 375 aa, synthetic construct; identical to SEQ ID NO: 149
  REGION 1..375: note = protein (artificial) from Homo sapiens__NP_000448.3__HNF4A(1-375)(K458R)

SEQ ID NO: 170 - protein, 375 aa, synthetic construct
  REGION 1..375: note = protein (artificial) from Homo sapiens__NP_000448.3__HNF4A(1-375)(K106R_K108R_K126R_K127R)
MRLSKTLVDMDMADYSAALDPAYTTLEFENVQVLTMGNDTSPSEGTNLNAPNSLGVSALCAICGDRATGKHYGASSCDGCKGFFRRSVRKNHMYSCRFSRQCVVDRDRRNQCRYCRLKKCFRAGMRREAVQNERDRISTRRSSYEDSSLPSINALLQAEVLSRQITSPVSGINGDIRAKKIASIADVCESMKEQLLVLVEWAKYIPAFCELPLDDQVALLRAHAGEHLLLGATKRSMVFKDVLLLGNDYIVPRHCPELAEMSRVSIRILDELVLPFQELQIDDNEYAYLKAIIFFDPDAKGLSDPGKIKRLRSQVQVSLEDYINDRQYDSRGRFGELLLLLPTLQSITWQMIEQIQFIKLFGMAKIDNLLQEMLL

SEQ ID NO: 171 - protein, 375 aa, synthetic construct
  REGION 1..375: note = protein (artificial) from Homo sapiens__NP_000448.3__HNF4A(1-375)(E285Q)
MRLSKTLVDMDMADYSAALDPAYTTLEFENVQVLTMGNDTSPSEGTNLNAPNSLGVSALCAICGDRATGKHYGASSCDGCKGFFRRSVRKNHMYSCRFSRQCVVDKDKRNQCRYCRLKKCFRAGMKKEAVQNERDRISTRRSSYEDSSLPSINALLQAEVLSRQITSPVSGINGDIRAKKIASIADVCESMKEQLLVLVEWAKYIPAFCELPLDDQVALLRAHAGEHLLLGATKRSMVFKDVLLLGNDYIVPRHCPELAEMSRVSIRILDELVLPFQELQIDDNQYAYLKAIIFFDPDAKGLSDPGKIKRLRSQVQVSLEDYINDRQYDSRGRFGELLLLLPTLQSITWQMIEQIQFIKLFGMAKIDNLLQEMLL

SEQ ID NO: 172 - protein, 375 aa, synthetic construct
  REGION 1..375: note = protein (artificial) from Homo sapiens__NP_000448.3__HNF4A(1-375)(T166E)
MRLSKTLVDMDMADYSAALDPAYTTLEFENVQVLTMGNDTSPSEGTNLNAPNSLGVSALCAICGDRATGKHYGASSCDGCKGFFRRSVRKNHMYSCRFSRQCVVDKDKRNQCRYCRLKKCFRAGMKKEAVQNERDRISTRRSSYEDSSLPSINALLQAEVLSRQIESPVSGINGDIRAKKIASIADVCESMKEQLLVLVEWAKYIPAFCELPLDDQVALLRAHAGEHLLLGATKRSMVFKDVLLLGNDYIVPRHCPELAEMSRVSIRILDELVLPFQELQIDDNEYAYLKAIIFFDPDAKGLSDPGKIKRLRSQVQVSLEDYINDRQYDSRGRFGELLLLLPTLQSITWQMIEQIQFIKLFGMAKIDNLLQEMLL

SEQ ID NO: 173 - protein, 375 aa, synthetic construct
  REGION 1..375: note = protein (artificial) from Homo sapiens__NP_000448.3__HNF4A(1-375)(S148A)
MRLSKTLVDMDMADYSAALDPAYTTLEFENVQVLTMGNDTSPSEGTNLNAPNSLGVSALCAICGDRATGKHYGASSCDGCKGFFRRSVRKNHMYSCRFSRQCVVDKDKRNQCRYCRLKKCFRAGMKKEAVQNERDRISTRRSSYEDSALPSINALLQAEVLSRQITSPVSGINGDIRAKKIASIADVCESMKEQLLVLVEWAKYIPAFCELPLDDQVALLRAHAGEHLLLGATKRSMVFKDVLLLGNDYIVPRHCPELAEMSRVSIRILDELVLPFQELQIDDNEYAYLKAIIFFDPDAKGLSDPGKIKRLRSQVQVSLEDYINDRQYDSRGRFGELLLLLPTLQSITWQMIEQIQFIKLFGMAKIDNLLQEMLL

SEQ ID NO: 174 - protein, 375 aa, synthetic construct
  REGION 1..375: note = protein (artificial) from Homo sapiens__NP_000448.3__HNF4A(1-375)(S148E)
MRLSKTLVDMDMADYSAALDPAYTTLEFENVQVLTMGNDTSPSEGTNLNAPNSLGVSALCAICGDRATGKHYGASSCDGCKGFFRRSVRKNHMYSCRFSRQCVVDKDKRNQCRYCRLKKCFRAGMKKEAVQNERDRISTRRSSYEDSELPSINALLQAEVLSRQITSPVSGINGDIRAKKIASIADVCESMKEQLLVLVEWAKYIPAFCELPLDDQVALLRAHAGEHLLLGATKRSMVFKDVLLLGNDYIVPRHCPELAEMSRVSIRILDELVLPFQELQIDDNEYAYLKAIIFFDPDAKGLSDPGKIKRLRSQVQVSLEDYINDRQYDSRGRFGELLLLLPTLQSITWQMIEQIQFIKLFGMAKIDNLLQEMLL

SEQ ID NO: 175 - protein, 375 aa, synthetic construct
  REGION 1..375: note = protein (artificial) from Homo sapiens__NP_000448.3__HNF4A(1-375)(S183A)
MRLSKTLVDMDMADYSAALDPAYTTLEFENVQVLTMGNDTSPSEGTNLNAPNSLGVSALCAICGDRATGKHYGASSCDGCKGFFRRSVRKNHMYSCRFSRQCVVDKDKRNQCRYCRLKKCFRAGMKKEAVQNERDRISTRRSSYEDSSLPSINALLQAEVLSRQITSPVSGINGDIRAKKIAAIADVCESMKEQLLVLVEWAKYIPAFCELPLDDQVALLRAHAGEHLLLGATKRSMVFKDVLLLGNDYIVPRHCPELAEMSRVSIRILDELVLPFQELQIDDNEYAYLKAIIFFDPDAKGLSDPGKIKRLRSQVQVSLEDYINDRQYDSRGRFGELLLLLPTLQSITWQMIEQIQFIKLFGMAKIDNLLQEMLL

SEQ ID NO: 176 - protein, 375 aa, synthetic construct
  REGION 1..375: note = protein (artificial) from Homo sapiens__NP_000448.3__HNF4A(1-375)(S183E)
MRLSKTLVDMDMADYSAALDPAYTTLEFENVQVLTMGNDTSPSEGTNLNAPNSLGVSALCAICGDRATGKHYGASSCDGCKGFFRRSVRKNHMYSCRFSRQCVVDKDKRNQCRYCRLKKCFRAGMKKEAVQNERDRISTRRSSYEDSSLPSINALLQAEVLSRQITSPVSGINGDIRAKKIAEIADVCESMKEQLLVLVEWAKYIPAFCELPLDDQVALLRAHAGEHLLLGATKRSMVFKDVLLLGNDYIVPRHCPELAEMSRVSIRILDELVLPFQELQIDDNEYAYLKAIIFFDPDAKGLSDPGKIKRLRSQVQVSLEDYINDRQYDSRGRFGELLLLLPTLQSITWQMIEQIQFIKLFGMAKIDNLLQEMLL

SEQ ID NO: 177 - protein, 375 aa, synthetic construct; identical to SEQ ID NO: 149
  REGION 1..375: note = protein (artificial) from Homo sapiens__NP_000448.3__HNF4A(1-375)(S461A)

SEQ ID NO: 178 - protein, 375 aa, synthetic construct; identical to SEQ ID NO: 149
  REGION 1..375: note = protein (artificial) from Homo sapiens__NP_000448.3__HNF4A(1-375)(S461E)

SEQ ID NO: 179 - protein, 375 aa, synthetic construct
  REGION 1..375: note = protein (artificial) from Homo sapiens__NP_000448.3__HNF4A(1-375)(S142A_S143A_S313A)
MRLSKTLVDMDMADYSAALDPAYTTLEFENVQVLTMGNDTSPSEGTNLNAPNSLGVSALCAICGDRATGKHYGASSCDGCKGFFRRSVRKNHMYSCRFSRQCVVDKDKRNQCRYCRLKKCFRAGMKKEAVQNERDRISTRRAAYEDSSLPSINALLQAEVLSRQITSPVSGINGDIRAKKIASIADVCESMKEQLLVLVEWAKYIPAFCELPLDDQVALLRAHAGEHLLLGATKRSMVFKDVLLLGNDYIVPRHCPELAEMSRVSIRILDELVLPFQELQIDDNEYAYLKAIIFFDPDAKGLSDPGKIKRLRAQVQVSLEDYINDRQYDSRGRFGELLLLLPTLQSITWQMIEQIQFIKLFGMAKIDNLLQEMLL

SEQ ID NO: 180 - protein, 375 aa, synthetic construct; identical to SEQ ID NO: 179
  REGION 1..375: note = protein (artificial) from Homo sapiens__NP_000448.3__HNF4A(1-375)(S142A_S143A_S313A_K458R)

SEQ ID NO: 181 - protein, 375 aa, synthetic construct
  REGION 1..375: note = protein (artificial) from Homo sapiens__NP_000448.3__HNF4A(1-375)(S142A_S143A_S167A_S313A_ S378A_T429A_T432A_S436A_K458R)
MRLSKTLVDMDMADYSAALDPAYTTLEFENVQVLTMGNDTSPSEGTNLNAPNSLGVSALCAICGDRATGKHYGASSCDGCKGFFRRSVRKNHMYSCRFSRQCVVDKDKRNQCRYCRLKKCFRAGMKKEAVQNERDRISTRRAAYEDSSLPSINALLQAEVLSRQITAPVSGINGDIRAKKIASIADVCESMKEQLLVLVEWAKYIPAFCELPLDDQVALLRAHAGEHLLLGATKRSMVFKDVLLLGNDYIVPRHCPELAEMSRVSIRILDELVLPFQELQIDDNEYAYLKAIIFFDPDAKGLSDPGKIKRLRAQVQVSLEDYINDRQYDSRGRFGELLLLLPTLQSITWQMIEQIQFIKLFGMAKIDNLLQEMLL

SEQ ID NO: 182 - protein, 375 aa, synthetic construct
  REGION 1..375: note = protein (artificial) from Homo sapiens__NP_000448.3__HNF4A(1-375)(S142A_S143A_S148A_S167A_ S313A_S378A_T429A_T432A_S436A_K458R)
MRLSKTLVDMDMADYSAALDPAYTTLEFENVQVLTMGNDTSPSEGTNLNAPNSLGVSALCAICGDRATGKHYGASSCDGCKGFFRRSVRKNHMYSCRFSRQCVVDKDKRNQCRYCRLKKCFRAGMKKEAVQNERDRISTRRAAYEDSALPSINALLQAEVLSRQITAPVSGINGDIRAKKIASIADVCESMKEQLLVLVEWAKYIPAFCELPLDDQVALLRAHAGEHLLLGATKRSMVFKDVLLLGNDYIVPRHCPELAEMSRVSIRILDELVLPFQELQIDDNEYAYLKAIIFFDPDAKGLSDPGKIKRLRAQVQVSLEDYINDRQYDSRGRFGELLLLLPTLQSITWQMIEQIQFIKLFGMAKIDNLLQEMLL

SEQ ID NO: 183 - protein, 375 aa, synthetic construct
  REGION 1..375: note = protein (artificial) from Homo sapiens__NP_000448.3__HNF4A(1-375)(K106R_K108R_K126R_K127R_ S142A_S143A_S148A_S167A_S313A_S378A_T429A_T432A_S436A_K458R )
MRLSKTLVDMDMADYSAALDPAYTTLEFENVQVLTMGNDTSPSEGTNLNAPNSLGVSALCAICGDRATGKHYGASSCDGCKGFFRRSVRKNHMYSCRFSRQCVVDRDRRNQCRYCRLKKCFRAGMRREAVQNERDRISTRRAAYEDSALPSINALLQAEVLSRQITAPVSGINGDIRAKKIASIADVCESMKEQLLVLVEWAKYIPAFCELPLDDQVALLRAHAGEHLLLGATKRSMVFKDVLLLGNDYIVPRHCPELAEMSRVSIRILDELVLPFQELQIDDNEYAYLKAIIFFDPDAKGLSDPGKIKRLRAQVQVSLEDYINDRQYDSRGRFGELLLLLPTLQSITWQMIEQIQFIKLFGMAKIDNLLQEMLL

SEQ ID NO: 184 - protein, 375 aa, synthetic construct
  REGION 1..375: note = protein (artificial) from Homo sapiens__NP_000448.3__HNF4A(1-375)(S142A_S143A_S148A_T166A_ S167A_S313A_S378A_T429A_T432A_S436A_K458R)
MRLSKTLVDMDMADYSAALDPAYTTLEFENVQVLTMGNDTSPSEGTNLNAPNSLGVSALCAICGDRATGKHYGASSCDGCKGFFRRSVRKNHMYSCRFSRQCVVDKDKRNQCRYCRLKKCFRAGMKKEAVQNERDRISTRRAAYEDSALPSINALLQAEVLSRQIAAPVSGINGDIRAKKIASIADVCESMKEQLLVLVEWAKYIPAFCELPLDDQVALLRAHAGEHLLLGATKRSMVFKDVLLLGNDYIVPRHCPELAEMSRVSIRILDELVLPFQELQIDDNEYAYLKAIIFFDPDAKGLSDPGKIKRLRAQVQVSLEDYINDRQYDSRGRFGELLLLLPTLQSITWQMIEQIQFIKLFGMAKIDNLLQEMLL

SEQ ID NO: 185 - protein, 375 aa, synthetic construct
  REGION 1..375: note = protein (artificial) from Homo sapiens__NP_000448.3__HNF4A(1-375)(S87A_S142A_S143A_S148A_T 166A_S167A_S313A_S378A_T429A_T432A_S436A_K458R)
MRLSKTLVDMDMADYSAALDPAYTTLEFENVQVLTMGNDTSPSEGTNLNAPNSLGVSALCAICGDRATGKHYGASSCDGCKGFFRRAVRKNHMYSCRFSRQCVVDKDKRNQCRYCRLKKCFRAGMKKEAVQNERDRISTRRAAYEDSALPSINALLQAEVLSRQIAAPVSGINGDIRAKKIASIADVCESMKEQLLVLVEWAKYIPAFCELPLDDQVALLRAHAGEHLLLGATKRSMVFKDVLLLGNDYIVPRHCPELAEMSRVSIRILDELVLPFQELQIDDNEYAYLKAIIFFDPDAKGLSDPGKIKRLRAQVQVSLEDYINDRQYDSRGRFGELLLLLPTLQSITWQMIEQIQFIKLFGMAKIDNLLQEMLL

SEQ ID NO: 186 - protein, 375 aa, synthetic construct
  REGION 1..375: note = protein (artificial) from Homo sapiens__NP_000448.3__HNF4A(1-375)(S87A_K106R_K108R_K126R_K 127R_S142A_S143A_S148A_T166A_S167A_S313A_S378A_T429A_T432A_ S436A_K458R)
MRLSKTLVDMDMADYSAALDPAYTTLEFENVQVLTMGNDTSPSEGTNLNAPNSLGVSALCAICGDRATGKHYGASSCDGCKGFFRRAVRKNHMYSCRFSRQCVVDRDRRNQCRYCRLKKCFRAGMRREAVQNERDRISTRRAAYEDSALPSINALLQAEVLSRQIAAPVSGINGDIRAKKIASIADVCESMKEQLLVLVEWAKYIPAFCELPLDDQVALLRAHAGEHLLLGATKRSMVFKDVLLLGNDYIVPRHCPELAEMSRVSIRILDELVLPFQELQIDDNEYAYLKAIIFFDPDAKGLSDPGKIKRLRAQVQVSLEDYINDRQYDSRGRFGELLLLLPTLQSITWQMIEQIQFIKLFGMAKIDNLLQEMLL

SEQ ID NO: 187 - protein, 375 aa, synthetic construct
  REGION 1..375: note = protein (artificial) from Homo sapiens__NP_000448.3__HNF4A(1-375)(S87A_K106R_K108R_K126R_K 127R)
MRLSKTLVDMDMADYSAALDPAYTTLEFENVQVLTMGNDTSPSEGTNLNAPNSLGVSALCAICGDRATGKHYGASSCDGCKGFFRRAVRKNHMYSCRFSRQCVVDRDRRNQCRYCRLKKCFRAGMRREAVQNERDRISTRRSSYEDSSLPSINALLQAEVLSRQITSPVSGINGDIRAKKIASIADVCESMKEQLLVLVEWAKYIPAFCELPLDDQVALLRAHAGEHLLLGATKRSMVFKDVLLLGNDYIVPRHCPELAEMSRVSIRILDELVLPFQELQIDDNEYAYLKAIIFFDPDAKGLSDPGKIKRLRSQVQVSLEDYINDRQYDSRGRFGELLLLLPTLQSITWQMIEQIQFIKLFGMAKIDNLLQEMLL

SEQ ID NO: 188 - protein, 375 aa, synthetic construct; identical to SEQ ID NO: 186
  REGION 1..375: note = protein (artificial) from Homo sapiens__NP_000448.3__HNF4A(1-375)(S87A_K106R_K108R_K126R_K 127R_S142A_S143A_S148A_T166A_S167A_S313A_S378A_T429A_T432A_ S436A_K458R_S461A)

SEQ ID NO: 189 - protein, 375 aa, synthetic construct; identical to SEQ ID NO: 186
  REGION 1..375: note = protein (artificial) from Homo sapiens__NP_000448.3__HNF4A(1-375)(S87A_K106R_K108R_K126R_K 127R_S142A_S143A_S148A_T166A_S167A_S313A_S378A_T429A_T432A_ S436A_K458R_S461E)

SEQ ID NO: 190 - protein, 375 aa, synthetic construct
  REGION 1..375: note = protein (artificial) from Homo sapiens__NP_000448.3__HNF4A(1-375)(S87A_K106R_K108R_K126R_K 127R_S142A_S143A_S148E_T166A_S167E_S313A_S378E_T429E_T432E_ S436E_K458R_S461E)
MRLSKTLVDMDMADYSAALDPAYTTLEFENVQVLTMGNDTSPSEGTNLNAPNSLGVSALCAICGDRATGKHYGASSCDGCKGFFRRAVRKNHMYSCRFSRQCVVDRDRRNQCRYCRLKKCFRAGMRREAVQNERDRISTRRAAYEDSELPSINALLQAEVLSRQIAEPVSGINGDIRAKKIASIADVCESMKEQLLVLVEWAKYIPAFCELPLDDQVALLRAHAGEHLLLGATKRSMVFKDVLLLGNDYIVPRHCPELAEMSRVSIRILDELVLPFQELQIDDNEYAYLKAIIFFDPDAKGLSDPGKIKRLRAQVQVSLEDYINDRQYDSRGRFGELLLLLPTLQSITWQMIEQIQFIKLFGMAKIDNLLQEMLL

SEQ ID NO: 191 - protein, 375 aa, synthetic construct
  REGION 1..375: note = protein (artificial) from Homo sapiens__NP_000448.3__HNF4A(1-375)(S87A_K106R_K108R_K126R_K 127R_S142A_S143A_S148A_T166A_S167A_K179R_K180R_S313A_S378A_ T429A_T432A_S436A_K458R_S461E)
MRLSKTLVDMDMADYSAALDPAYTTLEFENVQVLTMGNDTSPSEGTNLNAPNSLGVSALCAICGDRATGKHYGASSCDGCKGFFRRAVRKNHMYSCRFSRQCVVDRDRRNQCRYCRLKKCFRAGMRREAVQNERDRISTRRAAYEDSALPSINALLQAEVLSRQIAAPVSGINGDIRARRIASIADVCESMKEQLLVLVEWAKYIPAFCELPLDDQVALLRAHAGEHLLLGATKRSMVFKDVLLLGNDYIVPRHCPELAEMSRVSIRILDELVLPFQELQIDDNEYAYLKAIIFFDPDAKGLSDPGKIKRLRAQVQVSLEDYINDRQYDSRGRFGELLLLLPTLQSITWQMIEQIQFIKLFGMAKIDNLLQEMLL

SEQ ID NO: 192 - protein, 375 aa, synthetic construct
  REGION 1..375: note = protein (artificial) from Homo sapiens__NP_000448.3__HNF4A(1-375)(S87A_K106R_K108R_K126R_K 127R_S142A_S143A_S148A_T166A_S167A_K300R_K307R_K309R_S313A_ S378A_T429A_T432A_S436A_K458R_S461E)
MRLSKTLVDMDMADYSAALDPAYTTLEFENVQVLTMGNDTSPSEGTNLNAPNSLGVSALCAICGDRATGKHYGASSCDGCKGFFRRAVRKNHMYSCRFSRQCVVDRDRRNQCRYCRLKKCFRAGMRREAVQNERDRISTRRAAYEDSALPSINALLQAEVLSRQIAAPVSGINGDIRAKKIASIADVCESMKEQLLVLVEWAKYIPAFCELPLDDQVALLRAHAGEHLLLGATKRSMVFKDVLLLGNDYIVPRHCPELAEMSRVSIRILDELVLPFQELQIDDNEYAYLKAIIFFDPDARGLSDPGRIRRLRAQVQVSLEDYINDRQYDSRGRFGELLLLLPTLQSITWQMIEQIQFIKLFGMAKIDNLLQEMLL

SEQ ID NO: 193 - protein, 375 aa, synthetic construct; identical to SEQ ID NO: 186
  REGION 1..375: note = protein (artificial) from Homo sapiens__NP_000448.3__HNF4A(1-375)(S87A_K106R_K108R_K126R_K 127R_S142A_S143A_S148A_T166A_S167A_S313A_S378A_T429A_T432A_ S436A_K447R_K458R_S461E_K470R)

SEQ ID NO: 194 - protein, 375 aa, synthetic construct
  REGION 1..375: note = protein (artificial) from Homo sapiens__NP_000448.3__HNF4A(1-375)(S87A_K106R_K108R_K126R_K 127R_S142A_S143A_S148A_T166A_S167A_K179R_K180R_K234R_K300R_ K307R_K309R_S313A_S378A_T429A_T432A_S436A_K447R_K458R_S461E _K470R)
MRLSKTLVDMDMADYSAALDPAYTTLEFENVQVLTMGNDTSPSEGTNLNAPNSLGVSALCAICGDRATGKHYGASSCDGCKGFFRRAVRKNHMYSCRFSRQCVVDRDRRNQCRYCRLKKCFRAGMRREAVQNERDRISTRRAAYEDSALPSINALLQAEVLSRQIAAPVSGINGDIRARRIASIADVCESMKEQLLVLVEWAKYIPAFCELPLDDQVALLRAHAGEHLLLGATRRSMVFKDVLLLGNDYIVPRHCPELAEMSRVSIRILDELVLPFQELQIDDNEYAYLKAIIFFDPDARGLSDPGRIRRLRAQVQVSLEDYINDRQYDSRGRFGELLLLLPTLQSITWQMIEQIQFIKLFGMAKIDNLLQEMLL

SEQ ID NO: 195 - protein, 375 aa, synthetic construct
  REGION 1..375: note = protein (artificial) from Homo sapiens__NP_000448.3__HNF4A(1-375)(S87A_S95A_S99A_K106R_K10 8R_K126R_K127R_S142A_S143A_S148A_T166A_S167A_S313A_S378A_T4 29A_T432A_S436A_K458R_S461E)
MRLSKTLVDMDMADYSAALDPAYTTLEFENVQVLTMGNDTSPSEGTNLNAPNSLGVSALCAICGDRATGKHYGASSCDGCKGFFRRAVRKNHMYACRFARQCVVDRDRRNQCRYCRLKKCFRAGMRREAVQNERDRISTRRAAYEDSALPSINALLQAEVLSRQIAAPVSGINGDIRAKKIASIADVCESMKEQLLVLVEWAKYIPAFCELPLDDQVALLRAHAGEHLLLGATKRSMVFKDVLLLGNDYIVPRHCPELAEMSRVSIRILDELVLPFQELQIDDNEYAYLKAIIFFDPDAKGLSDPGKIKRLRAQVQVSLEDYINDRQYDSRGRFGELLLLLPTLQSITWQMIEQIQFIKLFGMAKIDNLLQEMLL

SEQ ID NO: 196 - protein, 375 aa, synthetic construct
  REGION 1..375: note = protein (artificial) from Homo sapiens__NP_000448.3__HNF4A(1-375)(S87A_K106R_K108R_K126R_K 127R_S138A_T139A_S142A_S143A_S148A_T166A_S167A_S313A_S378A_ T429A_T432A_S436A_K458R_S461E)
MRLSKTLVDMDMADYSAALDPAYTTLEFENVQVLTMGNDTSPSEGTNLNAPNSLGVSALCAICGDRATGKHYGASSCDGCKGFFRRAVRKNHMYSCRFSRQCVVDRDRRNQCRYCRLKKCFRAGMRREAVQNERDRIAARRAAYEDSALPSINALLQAEVLSRQIAAPVSGINGDIRAKKIASIADVCESMKEQLLVLVEWAKYIPAFCELPLDDQVALLRAHAGEHLLLGATKRSMVFKDVLLLGNDYIVPRHCPELAEMSRVSIRILDELVLPFQELQIDDNEYAYLKAIIFFDPDAKGLSDPGKIKRLRAQVQVSLEDYINDRQYDSRGRFGELLLLLPTLQSITWQMIEQIQFIKLFGMAKIDNLLQEMLL

SEQ ID NO: 197 - protein, 375 aa, synthetic construct
  REGION 1..375: note = protein (artificial) from Homo sapiens__NP_000448.3__HNF4A(1-375)(S87A_S95A_S99A_K106R_K10 8R_K126R_K127R_S138A_T139A_S142A_S143A_S148A_T166A_S167A_S3 13A_S378A_T429A_T432A_S436A_K458R_S461E)
MRLSKTLVDMDMADYSAALDPAYTTLEFENVQVLTMGNDTSPSEGTNLNAPNSLGVSALCAICGDRATGKHYGASSCDGCKGFFRRAVRKNHMYACRFARQCVVDRDRRNQCRYCRLKKCFRAGMRREAVQNERDRIAARRAAYEDSALPSINALLQAEVLSRQIAAPVSGINGDIRAKKIASIADVCESMKEQLLVLVEWAKYIPAFCELPLDDQVALLRAHAGEHLLLGATKRSMVFKDVLLLGNDYIVPRHCPELAEMSRVSIRILDELVLPFQELQIDDNEYAYLKAIIFFDPDAKGLSDPGKIKRLRAQVQVSLEDYINDRQYDSRGRFGELLLLLPTLQSITWQMIEQIQFIKLFGMAKIDNLLQEMLL

SEQ ID NO: 198 - protein, 437 aa, Homo sapiens
  REGION 1..437: note = protein (wt) from Homo sapiens__NP_000448.3__HNF4A(39-474)
MDTSPSEGTNLNAPNSLGVSALCAICGDRATGKHYGASSCDGCKGFFRRSVRKNHMYSCRFSRQCVVDKDKRNQCRYCRLKKCFRAGMKKEAVQNERDRISTRRSSYEDSSLPSINALLQAEVLSRQITSPVSGINGDIRAKKIASIADVCESMKEQLLVLVEWAKYIPAFCELPLDDQVALLRAHAGEHLLLGATKRSMVFKDVLLLGNDYIVPRHCPELAEMSRVSIRILDELVLPFQELQIDDNEYAYLKAIIFFDPDAKGLSDPGKIKRLRSQVQVSLEDYINDRQYDSRGRFGELLLLLPTLQSITWQMIEQIQFIKLFGMAKIDNLLQEMLLGGSPSDAPHAHHPLHPHLMQEHMGTNVIVANTMPTHLSNGQMCEWPRPRGQAATPETPQPSPPGGSGSEPYKLLPGAVATIVKPLSAIPQPTITKQEVI

SEQ ID NO: 199 - protein, 437 aa, synthetic construct
  REGION 1..437: note = protein (artificial) from Homo sapiens__NP_000448.3__HNF4A(39-474)(S313A)
MDTSPSEGTNLNAPNSLGVSALCAICGDRATGKHYGASSCDGCKGFFRRSVRKNHMYSCRFSRQCVVDKDKRNQCRYCRLKKCFRAGMKKEAVQNERDRISTRRSSYEDSSLPSINALLQAEVLSRQITSPVSGINGDIRAKKIASIADVCESMKEQLLVLVEWAKYIPAFCELPLDDQVALLRAHAGEHLLLGATKRSMVFKDVLLLGNDYIVPRHCPELAEMSRVSIRILDELVLPFQELQIDDNEYAYLKAIIFFDPDAKGLSDPGKIKRLRAQVQVSLEDYINDRQYDSRGRFGELLLLLPTLQSITWQMIEQIQFIKLFGMAKIDNLLQEMLLGGSPSDAPHAHHPLHPHLMQEHMGTNVIVANTMPTHLSNGQMCEWPRPRGQAATPETPQPSPPGGSGSEPYKLLPGAVATIVKPLSAIPQPTITKQEVI

SEQ ID NO: 200 - protein, 437 aa, synthetic construct
  REGION 1..437: note = protein (artificial) from Homo sapiens__NP_000448.3__HNF4A(39-474)(S313E)
MDTSPSEGTNLNAPNSLGVSALCAICGDRATGKHYGASSCDGCKGFFRRSVRKNHMYSCRFSRQCVVDKDKRNQCRYCRLKKCFRAGMKKEAVQNERDRISTRRSSYEDSSLPSINALLQAEVLSRQITSPVSGINGDIRAKKIASIADVCESMKEQLLVLVEWAKYIPAFCELPLDDQVALLRAHAGEHLLLGATKRSMVFKDVLLLGNDYIVPRHCPELAEMSRVSIRILDELVLPFQELQIDDNEYAYLKAIIFFDPDAKGLSDPGKIKRLREQVQVSLEDYINDRQYDSRGRFGELLLLLPTLQSITWQMIEQIQFIKLFGMAKIDNLLQEMLLGGSPSDAPHAHHPLHPHLMQEHMGTNVIVANTMPTHLSNGQMCEWPRPRGQAATPETPQPSPPGGSGSEPYKLLPGAVATIVKPLSAIPQPTITKQEVI

SEQ ID NO: 201 - protein, 437 aa, synthetic construct
  REGION 1..437: note = protein (artificial) from Homo sapiens__NP_000448.3__HNF4A(39-474)(S142A_S143A)
MDTSPSEGTNLNAPNSLGVSALCAICGDRATGKHYGASSCDGCKGFFRRSVRKNHMYSCRFSRQCVVDKDKRNQCRYCRLKKCFRAGMKKEAVQNERDRISTRRAAYEDSSLPSINALLQAEVLSRQITSPVSGINGDIRAKKIASIADVCESMKEQLLVLVEWAKYIPAFCELPLDDQVALLRAHAGEHLLLGATKRSMVFKDVLLLGNDYIVPRHCPELAEMSRVSIRILDELVLPFQELQIDDNEYAYLKAIIFFDPDAKGLSDPGKIKRLRSQVQVSLEDYINDRQYDSRGRFGELLLLLPTLQSITWQMIEQIQFIKLFGMAKIDNLLQEMLLGGSPSDAPHAHHPLHPHLMQEHMGTNVIVANTMPTHLSNGQMCEWPRPRGQAATPETPQPSPPGGSGSEPYKLLPGAVATIVKPLSAIPQPTITKQEVI

SEQ ID NO: 202 - protein, 437 aa, synthetic construct
  REGION 1..437: note = protein (artificial) from Homo sapiens__NP_000448.3__HNF4A(39-474)(S142E_S143E)
MDTSPSEGTNLNAPNSLGVSALCAICGDRATGKHYGASSCDGCKGFFRRSVRKNHMYSCRFSRQCVVDKDKRNQCRYCRLKKCFRAGMKKEAVQNERDRISTRREEYEDSSLPSINALLQAEVLSRQITSPVSGINGDIRAKKIASIADVCESMKEQLLVLVEWAKYIPAFCELPLDDQVALLRAHAGEHLLLGATKRSMVFKDVLLLGNDYIVPRHCPELAEMSRVSIRILDELVLPFQELQIDDNEYAYLKAIIFFDPDAKGLSDPGKIKRLRSQVQVSLEDYINDRQYDSRGRFGELLLLLPTLQSITWQMIEQIQFIKLFGMAKIDNLLQEMLLGGSPSDAPHAHHPLHPHLMQEHMGTNVIVANTMPTHLSNGQMCEWPRPRGQAATPETPQPSPPGGSGSEPYKLLPGAVATIVKPLSAIPQPTITKQEVI

SEQ ID NO: 203 - protein, 437 aa, synthetic construct
  REGION 1..437: note = protein (artificial) from Homo sapiens__NP_000448.3__HNF4A(39-474)(S143A)
MDTSPSEGTNLNAPNSLGVSALCAICGDRATGKHYGASSCDGCKGFFRRSVRKNHMYSCRFSRQCVVDKDKRNQCRYCRLKKCFRAGMKKEAVQNERDRISTRRSAYEDSSLPSINALLQAEVLSRQITSPVSGINGDIRAKKIASIADVCESMKEQLLVLVEWAKYIPAFCELPLDDQVALLRAHAGEHLLLGATKRSMVFKDVLLLGNDYIVPRHCPELAEMSRVSIRILDELVLPFQELQIDDNEYAYLKAIIFFDPDAKGLSDPGKIKRLRSQVQVSLEDYINDRQYDSRGRFGELLLLLPTLQSITWQMIEQIQFIKLFGMAKIDNLLQEMLLGGSPSDAPHAHHPLHPHLMQEHMGTNVIVANTMPTHLSNGQMCEWPRPRGQAATPETPQPSPPGGSGSEPYKLLPGAVATIVKPLSAIPQPTITKQEVI

SEQ ID NO: 204 - protein, 437 aa, synthetic construct
  REGION 1..437: note = protein (artificial) from Homo sapiens__NP_000448.3__HNF4A(39-474)(T166A)
MDTSPSEGTNLNAPNSLGVSALCAICGDRATGKHYGASSCDGCKGFFRRSVRKNHMYSCRFSRQCVVDKDKRNQCRYCRLKKCFRAGMKKEAVQNERDRISTRRSSYEDSSLPSINALLQAEVLSRQIASPVSGINGDIRAKKIASIADVCESMKEQLLVLVEWAKYIPAFCELPLDDQVALLRAHAGEHLLLGATKRSMVFKDVLLLGNDYIVPRHCPELAEMSRVSIRILDELVLPFQELQIDDNEYAYLKAIIFFDPDAKGLSDPGKIKRLRSQVQVSLEDYINDRQYDSRGRFGELLLLLPTLQSITWQMIEQIQFIKLFGMAKIDNLLQEMLLGGSPSDAPHAHHPLHPHLMQEHMGTNVIVANTMPTHLSNGQMCEWPRPRGQAATPETPQPSPPGGSGSEPYKLLPGAVATIVKPLSAIPQPTITKQEVI

SEQ ID NO: 205 - protein, 437 aa, synthetic construct
  REGION 1..437: note = protein (artificial) from Homo sapiens__NP_000448.3__HNF4A(39-474)(S167E)
MDTSPSEGTNLNAPNSLGVSALCAICGDRATGKHYGASSCDGCKGFFRRSVRKNHMYSCRFSRQCVVDKDKRNQCRYCRLKKCFRAGMKKEAVQNERDRISTRRSSYEDSSLPSINALLQAEVLSRQITEPVSGINGDIRAKKIASIADVCESMKEQLLVLVEWAKYIPAFCELPLDDQVALLRAHAGEHLLLGATKRSMVFKDVLLLGNDYIVPRHCPELAEMSRVSIRILDELVLPFQELQIDDNEYAYLKAIIFFDPDAKGLSDPGKIKRLRSQVQVSLEDYINDRQYDSRGRFGELLLLLPTLQSITWQMIEQIQFIKLFGMAKIDNLLQEMLLGGSPSDAPHAHHPLHPHLMQEHMGTNVIVANTMPTHLSNGQMCEWPRPRGQAATPETPQPSPPGGSGSEPYKLLPGAVATIVKPLSAIPQPTITKQEVI

SEQ ID NO: 206 - protein, 437 aa, synthetic construct
  REGION 1..437: note = protein (artificial) from Homo sapiens__NP_000448.3__HNF4A(39-474)(S167A)
MDTSPSEGTNLNAPNSLGVSALCAICGDRATGKHYGASSCDGCKGFFRRSVRKNHMYSCRFSRQCVVDKDKRNQCRYCRLKKCFRAGMKKEAVQNERDRISTRRSSYEDSSLPSINALLQAEVLSRQITAPVSGINGDIRAKKIASIADVCESMKEQLLVLVEWAKYIPAFCELPLDDQVALLRAHAGEHLLLGATKRSMVFKDVLLLGNDYIVPRHCPELAEMSRVSIRILDELVLPFQELQIDDNEYAYLKAIIFFDPDAKGLSDPGKIKRLRSQVQVSLEDYINDRQYDSRGRFGELLLLLPTLQSITWQMIEQIQFIKLFGMAKIDNLLQEMLLGGSPSDAPHAHHPLHPHLMQEHMGTNVIVANTMPTHLSNGQMCEWPRPRGQAATPETPQPSPPGGSGSEPYKLLPGAVATIVKPLSAIPQPTITKQEVI

SEQ ID NO: 207 - protein, 437 aa, synthetic construct
  REGION 1..437: note = protein (artificial) from Homo sapiens__NP_000448.3__HNF4A(39-474)(S167A_S378A_T429A_T432A _S436A)
MDTSPSEGTNLNAPNSLGVSALCAICGDRATGKHYGASSCDGCKGFFRRSVRKNHMYSCRFSRQCVVDKDKRNQCRYCRLKKCFRAGMKKEAVQNERDRISTRRSSYEDSSLPSINALLQAEVLSRQITAPVSGINGDIRAKKIASIADVCESMKEQLLVLVEWAKYIPAFCELPLDDQVALLRAHAGEHLLLGATKRSMVFKDVLLLGNDYIVPRHCPELAEMSRVSIRILDELVLPFQELQIDDNEYAYLKAIIFFDPDAKGLSDPGKIKRLRSQVQVSLEDYINDRQYDSRGRFGELLLLLPTLQSITWQMIEQIQFIKLFGMAKIDNLLQEMLLGGAPSDAPHAHHPLHPHLMQEHMGTNVIVANTMPTHLSNGQMCEWPRPRGQAAAPEAPQPAPPGGSGSEPYKLLPGAVATIVKPLSAIPQPTITKQEVI

SEQ ID NO: 208 - protein, 437 aa, synthetic construct
  REGION 1..437: note = protein (artificial) from Homo sapiens__NP_000448.3__HNF4A(39-474)(S167E_S378E_T429E_T432E _S436E)
MDTSPSEGTNLNAPNSLGVSALCAICGDRATGKHYGASSCDGCKGFFRRSVRKNHMYSCRFSRQCVVDKDKRNQCRYCRLKKCFRAGMKKEAVQNERDRISTRRSSYEDSSLPSINALLQAEVLSRQITEPVSGINGDIRAKKIASIADVCESMKEQLLVLVEWAKYIPAFCELPLDDQVALLRAHAGEHLLLGATKRSMVFKDVLLLGNDYIVPRHCPELAEMSRVSIRILDELVLPFQELQIDDNEYAYLKAIIFFDPDAKGLSDPGKIKRLRSQVQVSLEDYINDRQYDSRGRFGELLLLLPTLQSITWQMIEQIQFIKLFGMAKIDNLLQEMLLGGEPSDAPHAHHPLHPHLMQEHMGTNVIVANTMPTHLSNGQMCEWPRPRGQAAEPEEPQPEPPGGSGSEPYKLLPGAVATIVKPLSAIPQPTITKQEVI

SEQ ID NO: 209 - protein, 437 aa, synthetic construct
  REGION 1..437: note = protein (artificial) from Homo sapiens__NP_000448.3__HNF4A(39-474)(S87A)
MDTSPSEGTNLNAPNSLGVSALCAICGDRATGKHYGASSCDGCKGFFRRAVRKNHMYSCRFSRQCVVDKDKRNQCRYCRLKKCFRAGMKKEAVQNERDRISTRRSSYEDSSLPSINALLQAEVLSRQITSPVSGINGDIRAKKIASIADVCESMKEQLLVLVEWAKYIPAFCELPLDDQVALLRAHAGEHLLLGATKRSMVFKDVLLLGNDYIVPRHCPELAEMSRVSIRILDELVLPFQELQIDDNEYAYLKAIIFFDPDAKGLSDPGKIKRLRSQVQVSLEDYINDRQYDSRGRFGELLLLLPTLQSITWQMIEQIQFIKLFGMAKIDNLLQEMLLGGSPSDAPHAHHPLHPHLMQEHMGTNVIVANTMPTHLSNGQMCEWPRPRGQAATPETPQPSPPGGSGSEPYKLLPGAVATIVKPLSAIPQPTITKQEVI

SEQ ID NO: 210 - protein, 437 aa, synthetic construct
  REGION 1..437: note = protein (artificial) from Homo sapiens__NP_000448.3__HNF4A(39-474)(S87E)
MDTSPSEGTNLNAPNSLGVSALCAICGDRATGKHYGASSCDGCKGFFRREVRKNHMYSCRFSRQCVVDKDKRNQCRYCRLKKCFRAGMKKEAVQNERDRISTRRSSYEDSSLPSINALLQAEVLSRQITSPVSGINGDIRAKKIASIADVCESMKEQLLVLVEWAKYIPAFCELPLDDQVALLRAHAGEHLLLGATKRSMVFKDVLLLGNDYIVPRHCPELAEMSRVSIRILDELVLPFQELQIDDNEYAYLKAIIFFDPDAKGLSDPGKIKRLRSQVQVSLEDYINDRQYDSRGRFGELLLLLPTLQSITWQMIEQIQFIKLFGMAKIDNLLQEMLLGGSPSDAPHAHHPLHPHLMQEHMGTNVIVANTMPTHLSNGQMCEWPRPRGQAATPETPQPSPPGGSGSEPYKLLPGAVATIVKPLSAIPQPTITKQEVI

SEQ ID NO: 211 - protein, 437 aa, synthetic construct; identical to SEQ ID NO: 198
  REGION 1..437: note = protein (artificial) from Homo sapiens__NP_000448.3__HNF4A(39-474)(R2V)

SEQ ID NO: 212 - protein, 437 aa, synthetic construct; identical to SEQ ID NO: 198
  REGION 1..437: note = protein (artificial) from Homo sapiens__NP_000448.3__HNF4A(39-474)(R2V_K5V)

SEQ ID NO: 213 - protein, 437 aa, synthetic construct
  REGION 1..437: note = protein (artificial) from Homo sapiens__NP_000448.3__HNF4A(39-474)(K179R_K180R)
MDTSPSEGTNLNAPNSLGVSALCAICGDRATGKHYGASSCDGCKGFFRRSVRKNHMYSCRFSRQCVVDKDKRNQCRYCRLKKCFRAGMKKEAVQNERDRISTRRSSYEDSSLPSINALLQAEVLSRQITSPVSGINGDIRARRIASIADVCESMKEQLLVLVEWAKYIPAFCELPLDDQVALLRAHAGEHLLLGATKRSMVFKDVLLLGNDYIVPRHCPELAEMSRVSIRILDELVLPFQELQIDDNEYAYLKAIIFFDPDAKGLSDPGKIKRLRSQVQVSLEDYINDRQYDSRGRFGELLLLLPTLQSITWQMIEQIQFIKLFGMAKIDNLLQEMLLGGSPSDAPHAHHPLHPHLMQEHMGTNVIVANTMPTHLSNGQMCEWPRPRGQAATPETPQPSPPGGSGSEPYKLLPGAVATIVKPLSAIPQPTITKQEVI

SEQ ID NO: 214 - protein, 437 aa, synthetic construct
  REGION 1..437: note = protein (artificial) from Homo sapiens__NP_000448.3__HNF4A(39-474)(K234R)
MDTSPSEGTNLNAPNSLGVSALCAICGDRATGKHYGASSCDGCKGFFRRSVRKNHMYSCRFSRQCVVDKDKRNQCRYCRLKKCFRAGMKKEAVQNERDRISTRRSSYEDSSLPSINALLQAEVLSRQITSPVSGINGDIRAKKIASIADVCESMKEQLLVLVEWAKYIPAFCELPLDDQVALLRAHAGEHLLLGATRRSMVFKDVLLLGNDYIVPRHCPELAEMSRVSIRILDELVLPFQELQIDDNEYAYLKAIIFFDPDAKGLSDPGKIKRLRSQVQVSLEDYINDRQYDSRGRFGELLLLLPTLQSITWQMIEQIQFIKLFGMAKIDNLLQEMLLGGSPSDAPHAHHPLHPHLMQEHMGTNVIVANTMPTHLSNGQMCEWPRPRGQAATPETPQPSPPGGSGSEPYKLLPGAVATIVKPLSAIPQPTITKQEVI

SEQ ID NO: 215 - protein, 437 aa, synthetic construct
  REGION 1..437: note = protein (artificial) from Homo sapiens__NP_000448.3__HNF4A(39-474)(K300R)
MDTSPSEGTNLNAPNSLGVSALCAICGDRATGKHYGASSCDGCKGFFRRSVRKNHMYSCRFSRQCVVDKDKRNQCRYCRLKKCFRAGMKKEAVQNERDRISTRRSSYEDSSLPSINALLQAEVLSRQITSPVSGINGDIRAKKIASIADVCESMKEQLLVLVEWAKYIPAFCELPLDDQVALLRAHAGEHLLLGATKRSMVFKDVLLLGNDYIVPRHCPELAEMSRVSIRILDELVLPFQELQIDDNEYAYLKAIIFFDPDARGLSDPGKIKRLRSQVQVSLEDYINDRQYDSRGRFGELLLLLPTLQSITWQMIEQIQFIKLFGMAKIDNLLQEMLLGGSPSDAPHAHHPLHPHLMQEHMGTNVIVANTMPTHLSNGQMCEWPRPRGQAATPETPQPSPPGGSGSEPYKLLPGAVATIVKPLSAIPQPTITKQEVI

SEQ ID NO: 216 - protein, 437 aa, synthetic construct
  REGION 1..437: note = protein (artificial) from Homo sapiens__NP_000448.3__HNF4A(39-474)(K300R_K307R_K309R)
MDTSPSEGTNLNAPNSLGVSALCAICGDRATGKHYGASSCDGCKGFFRRSVRKNHMYSCRFSRQCVVDKDKRNQCRYCRLKKCFRAGMKKEAVQNERDRISTRRSSYEDSSLPSINALLQAEVLSRQITSPVSGINGDIRAKKIASIADVCESMKEQLLVLVEWAKYIPAFCELPLDDQVALLRAHAGEHLLLGATKRSMVFKDVLLLGNDYIVPRHCPELAEMSRVSIRILDELVLPFQELQIDDNEYAYLKAIIFFDPDARGLSDPGRIRRLRSQVQVSLEDYINDRQYDSRGRFGELLLLLPTLQSITWQMIEQIQFIKLFGMAKIDNLLQEMLLGGSPSDAPHAHHPLHPHLMQEHMGTNVIVANTMPTHLSNGQMCEWPRPRGQAATPETPQPSPPGGSGSEPYKLLPGAVATIVKPLSAIPQPTITKQEVI

SEQ ID NO: 217 - protein, 437 aa, synthetic construct
  REGION 1..437: note = protein (artificial) from Homo sapiens__NP_000448.3__HNF4A(39-474)(K447R_K470R)
MDTSPSEGTNLNAPNSLGVSALCAICGDRATGKHYGASSCDGCKGFFRRSVRKNHMYSCRFSRQCVVDKDKRNQCRYCRLKKCFRAGMKKEAVQNERDRISTRRSSYEDSSLPSINALLQAEVLSRQITSPVSGINGDIRAKKIASIADVCESMKEQLLVLVEWAKYIPAFCELPLDDQVALLRAHAGEHLLLGATKRSMVFKDVLLLGNDYIVPRHCPELAEMSRVSIRILDELVLPFQELQIDDNEYAYLKAIIFFDPDAKGLSDPGKIKRLRSQVQVSLEDYINDRQYDSRGRFGELLLLLPTLQSITWQMIEQIQFIKLFGMAKIDNLLQEMLLGGSPSDAPHAHHPLHPHLMQEHMGTNVIVANTMPTHLSNGQMCEWPRPRGQAATPETPQPSPPGGSGSEPYRLLPGAVATIVKPLSAIPQPTITRQEVI

SEQ ID NO: 218 - protein, 437 aa, synthetic construct
  REGION 1..437: note = protein (artificial) from Homo sapiens__NP_000448.3__HNF4A(39-474)(K458R)
MDTSPSEGTNLNAPNSLGVSALCAICGDRATGKHYGASSCDGCKGFFRRSVRKNHMYSCRFSRQCVVDKDKRNQCRYCRLKKCFRAGMKKEAVQNERDRISTRRSSYEDSSLPSINALLQAEVLSRQITSPVSGINGDIRAKKIASIADVCESMKEQLLVLVEWAKYIPAFCELPLDDQVALLRAHAGEHLLLGATKRSMVFKDVLLLGNDYIVPRHCPELAEMSRVSIRILDELVLPFQELQIDDNEYAYLKAIIFFDPDAKGLSDPGKIKRLRSQVQVSLEDYINDRQYDSRGRFGELLLLLPTLQSITWQMIEQIQFIKLFGMAKIDNLLQEMLLGGSPSDAPHAHHPLHPHLMQEHMGTNVIVANTMPTHLSNGQMCEWPRPRGQAATPETPQPSPPGGSGSEPYKLLPGAVATIVRPLSAIPQPTITKQEVI

SEQ ID NO: 219 - protein, 437 aa, synthetic construct
  REGION 1..437: note = protein (artificial) from Homo sapiens__NP_000448.3__HNF4A(39-474)(K106R_K108R_K126R_K127R )
MDTSPSEGTNLNAPNSLGVSALCAICGDRATGKHYGASSCDGCKGFFRRSVRKNHMYSCRFSRQCVVDRDRRNQCRYCRLKKCFRAGMRREAVQNERDRISTRRSSYEDSSLPSINALLQAEVLSRQITSPVSGINGDIRAKKIASIADVCESMKEQLLVLVEWAKYIPAFCELPLDDQVALLRAHAGEHLLLGATKRSMVFKDVLLLGNDYIVPRHCPELAEMSRVSIRILDELVLPFQELQIDDNEYAYLKAIIFFDPDAKGLSDPGKIKRLRSQVQVSLEDYINDRQYDSRGRFGELLLLLPTLQSITWQMIEQIQFIKLFGMAKIDNLLQEMLLGGSPSDAPHAHHPLHPHLMQEHMGTNVIVANTMPTHLSNGQMCEWPRPRGQAATPETPQPSPPGGSGSEPYKLLPGAVATIVKPLSAIPQPTITKQEVI

SEQ ID NO: 220 - protein, 437 aa, synthetic construct
  REGION 1..437: note = protein (artificial) from Homo sapiens__NP_000448.3__HNF4A(39-474)(E285Q)
MDTSPSEGTNLNAPNSLGVSALCAICGDRATGKHYGASSCDGCKGFFRRSVRKNHMYSCRFSRQCVVDKDKRNQCRYCRLKKCFRAGMKKEAVQNERDRISTRRSSYEDSSLPSINALLQAEVLSRQITSPVSGINGDIRAKKIASIADVCESMKEQLLVLVEWAKYIPAFCELPLDDQVALLRAHAGEHLLLGATKRSMVFKDVLLLGNDYIVPRHCPELAEMSRVSIRILDELVLPFQELQIDDNQYAYLKAIIFFDPDAKGLSDPGKIKRLRSQVQVSLEDYINDRQYDSRGRFGELLLLLPTLQSITWQMIEQIQFIKLFGMAKIDNLLQEMLLGGSPSDAPHAHHPLHPHLMQEHMGTNVIVANTMPTHLSNGQMCEWPRPRGQAATPETPQPSPPGGSGSEPYKLLPGAVATIVKPLSAIPQPTITKQEVI

SEQ ID NO: 221 - protein, 437 aa, synthetic construct
  REGION 1..437: note = protein (artificial) from Homo sapiens__NP_000448.3__HNF4A(39-474)(T166E)
MDTSPSEGTNLNAPNSLGVSALCAICGDRATGKHYGASSCDGCKGFFRRSVRKNHMYSCRFSRQCVVDKDKRNQCRYCRLKKCFRAGMKKEAVQNERDRISTRRSSYEDSSLPSINALLQAEVLSRQIESPVSGINGDIRAKKIASIADVCESMKEQLLVLVEWAKYIPAFCELPLDDQVALLRAHAGEHLLLGATKRSMVFKDVLLLGNDYIVPRHCPELAEMSRVSIRILDELVLPFQELQIDDNEYAYLKAIIFFDPDAKGLSDPGKIKRLRSQVQVSLEDYINDRQYDSRGRFGELLLLLPTLQSITWQMIEQIQFIKLFGMAKIDNLLQEMLLGGSPSDAPHAHHPLHPHLMQEHMGTNVIVANTMPTHLSNGQMCEWPRPRGQAATPETPQPSPPGGSGSEPYKLLPGAVATIVKPLSAIPQPTITKQEVI

SEQ ID NO: 222 - protein, 437 aa, synthetic construct
  REGION 1..437: note = protein (artificial) from Homo sapiens__NP_000448.3__HNF4A(39-474)(S148A)
MDTSPSEGTNLNAPNSLGVSALCAICGDRATGKHYGASSCDGCKGFFRRSVRKNHMYSCRFSRQCVVDKDKRNQCRYCRLKKCFRAGMKKEAVQNERDRISTRRSSYEDSALPSINALLQAEVLSRQITSPVSGINGDIRAKKIASIADVCESMKEQLLVLVEWAKYIPAFCELPLDDQVALLRAHAGEHLLLGATKRSMVFKDVLLLGNDYIVPRHCPELAEMSRVSIRILDELVLPFQELQIDDNEYAYLKAIIFFDPDAKGLSDPGKIKRLRSQVQVSLEDYINDRQYDSRGRFGELLLLLPTLQSITWQMIEQIQFIKLFGMAKIDNLLQEMLLGGSPSDAPHAHHPLHPHLMQEHMGTNVIVANTMPTHLSNGQMCEWPRPRGQAATPETPQPSPPGGSGSEPYKLLPGAVATIVKPLSAIPQPTITKQEVI

SEQ ID NO: 223 - protein, 437 aa, synthetic construct
  REGION 1..437: note = protein (artificial) from Homo sapiens__NP_000448.3__HNF4A(39-474)(S148E)
MDTSPSEGTNLNAPNSLGVSALCAICGDRATGKHYGASSCDGCKGFFRRSVRKNHMYSCRFSRQCVVDKDKRNQCRYCRLKKCFRAGMKKEAVQNERDRISTRRSSYEDSELPSINALLQAEVLSRQITSPVSGINGDIRAKKIASIADVCESMKEQLLVLVEWAKYIPAFCELPLDDQVALLRAHAGEHLLLGATKRSMVFKDVLLLGNDYIVPRHCPELAEMSRVSIRILDELVLPFQELQIDDNEYAYLKAIIFFDPDAKGLSDPGKIKRLRSQVQVSLEDYINDRQYDSRGRFGELLLLLPTLQSITWQMIEQIQFIKLFGMAKIDNLLQEMLLGGSPSDAPHAHHPLHPHLMQEHMGTNVIVANTMPTHLSNGQMCEWPRPRGQAATPETPQPSPPGGSGSEPYKLLPGAVATIVKPLSAIPQPTITKQEVI

SEQ ID NO: 224 - protein, 437 aa, synthetic construct
  REGION 1..437: note = protein (artificial) from Homo sapiens__NP_000448.3__HNF4A(39-474)(S183A)
MDTSPSEGTNLNAPNSLGVSALCAICGDRATGKHYGASSCDGCKGFFRRSVRKNHMYSCRFSRQCVVDKDKRNQCRYCRLKKCFRAGMKKEAVQNERDRISTRRSSYEDSSLPSINALLQAEVLSRQITSPVSGINGDIRAKKIAAIADVCESMKEQLLVLVEWAKYIPAFCELPLDDQVALLRAHAGEHLLLGATKRSMVFKDVLLLGNDYIVPRHCPELAEMSRVSIRILDELVLPFQELQIDDNEYAYLKAIIFFDPDAKGLSDPGKIKRLRSQVQVSLEDYINDRQYDSRGRFGELLLLLPTLQSITWQMIEQIQFIKLFGMAKIDNLLQEMLLGGSPSDAPHAHHPLHPHLMQEHMGTNVIVANTMPTHLSNGQMCEWPRPRGQAATPETPQPSPPGGSGSEPYKLLPGAVATIVKPLSAIPQPTITKQEVI

SEQ ID NO: 225 - protein, 437 aa, synthetic construct
  REGION 1..437: note = protein (artificial) from Homo sapiens__NP_000448.3__HNF4A(39-474)(S183E)
MDTSPSEGTNLNAPNSLGVSALCAICGDRATGKHYGASSCDGCKGFFRRSVRKNHMYSCRFSRQCVVDKDKRNQCRYCRLKKCFRAGMKKEAVQNERDRISTRRSSYEDSSLPSINALLQAEVLSRQITSPVSGINGDIRAKKIAEIADVCESMKEQLLVLVEWAKYIPAFCELPLDDQVALLRAHAGEHLLLGATKRSMVFKDVLLLGNDYIVPRHCPELAEMSRVSIRILDELVLPFQELQIDDNEYAYLKAIIFFDPDAKGLSDPGKIKRLRSQVQVSLEDYINDRQYDSRGRFGELLLLLPTLQSITWQMIEQIQFIKLFGMAKIDNLLQEMLLGGSPSDAPHAHHPLHPHLMQEHMGTNVIVANTMPTHLSNGQMCEWPRPRGQAATPETPQPSPPGGSGSEPYKLLPGAVATIVKPLSAIPQPTITKQEVI

SEQ ID NO: 226 - protein, 437 aa, synthetic construct
  REGION 1..437: note = protein (artificial) from Homo sapiens__NP_000448.3__HNF4A(39-474)(S461A)
MDTSPSEGTNLNAPNSLGVSALCAICGDRATGKHYGASSCDGCKGFFRRSVRKNHMYSCRFSRQCVVDKDKRNQCRYCRLKKCFRAGMKKEAVQNERDRISTRRSSYEDSSLPSINALLQAEVLSRQITSPVSGINGDIRAKKIASIADVCESMKEQLLVLVEWAKYIPAFCELPLDDQVALLRAHAGEHLLLGATKRSMVFKDVLLLGNDYIVPRHCPELAEMSRVSIRILDELVLPFQELQIDDNEYAYLKAIIFFDPDAKGLSDPGKIKRLRSQVQVSLEDYINDRQYDSRGRFGELLLLLPTLQSITWQMIEQIQFIKLFGMAKIDNLLQEMLLGGSPSDAPHAHHPLHPHLMQEHMGTNVIVANTMPTHLSNGQMCEWPRPRGQAATPETPQPSPPGGSGSEPYKLLPGAVATIVKPLAAIPQPTITKQEVI

SEQ ID NO: 227 - protein, 437 aa, synthetic construct
  REGION 1..437: note = protein (artificial) from Homo sapiens__NP_000448.3__HNF4A(39-474)(S461E)
MDTSPSEGTNLNAPNSLGVSALCAICGDRATGKHYGASSCDGCKGFFRRSVRKNHMYSCRFSRQCVVDKDKRNQCRYCRLKKCFRAGMKKEAVQNERDRISTRRSSYEDSSLPSINALLQAEVLSRQITSPVSGINGDIRAKKIASIADVCESMKEQLLVLVEWAKYIPAFCELPLDDQVALLRAHAGEHLLLGATKRSMVFKDVLLLGNDYIVPRHCPELAEMSRVSIRILDELVLPFQELQIDDNEYAYLKAIIFFDPDAKGLSDPGKIKRLRSQVQVSLEDYINDRQYDSRGRFGELLLLLPTLQSITWQMIEQIQFIKLFGMAKIDNLLQEMLLGGSPSDAPHAHHPLHPHLMQEHMGTNVIVANTMPTHLSNGQMCEWPRPRGQAATPETPQPSPPGGSGSEPYKLLPGAVATIVKPLEAIPQPTITKQEVI

SEQ ID NO: 228 - protein, 437 aa, synthetic construct
  REGION 1..437: note = protein (artificial) from Homo sapiens__NP_000448.3__HNF4A(39-474)(S142A_S143A_S313A)
MDTSPSEGTNLNAPNSLGVSALCAICGDRATGKHYGASSCDGCKGFFRRSVRKNHMYSCRFSRQCVVDKDKRNQCRYCRLKKCFRAGMKKEAVQNERDRISTRRAAYEDSSLPSINALLQAEVLSRQITSPVSGINGDIRAKKIASIADVCESMKEQLLVLVEWAKYIPAFCELPLDDQVALLRAHAGEHLLLGATKRSMVFKDVLLLGNDYIVPRHCPELAEMSRVSIRILDELVLPFQELQIDDNEYAYLKAIIFFDPDAKGLSDPGKIKRLRAQVQVSLEDYINDRQYDSRGRFGELLLLLPTLQSITWQMIEQIQFIKLFGMAKIDNLLQEMLLGGSPSDAPHAHHPLHPHLMQEHMGTNVIVANTMPTHLSNGQMCEWPRPRGQAATPETPQPSPPGGSGSEPYKLLPGAVATIVKPLSAIPQPTITKQEVI

SEQ ID NO: 229 - protein, 437 aa, synthetic construct
  REGION 1..437: note = protein (artificial) from Homo sapiens__NP_000448.3__HNF4A(39-474)(S142A_S143A_S313A_K458R )
MDTSPSEGTNLNAPNSLGVSALCAICGDRATGKHYGASSCDGCKGFFRRSVRKNHMYSCRFSRQCVVDKDKRNQCRYCRLKKCFRAGMKKEAVQNERDRISTRRAAYEDSSLPSINALLQAEVLSRQITSPVSGINGDIRAKKIASIADVCESMKEQLLVLVEWAKYIPAFCELPLDDQVALLRAHAGEHLLLGATKRSMVFKDVLLLGNDYIVPRHCPELAEMSRVSIRILDELVLPFQELQIDDNEYAYLKAIIFFDPDAKGLSDPGKIKRLRAQVQVSLEDYINDRQYDSRGRFGELLLLLPTLQSITWQMIEQIQFIKLFGMAKIDNLLQEMLLGGSPSDAPHAHHPLHPHLMQEHMGTNVIVANTMPTHLSNGQMCEWPRPRGQAATPETPQPSPPGGSGSEPYKLLPGAVATIVRPLSAIPQPTITKQEVI

SEQ ID NO: 230 - protein, 437 aa, synthetic construct
  REGION 1..437: note = protein (artificial) from Homo sapiens__NP_000448.3__HNF4A(39-474)(S142A_S143A_S167A_S313A _S378A_T429A_T432A_S436A_K458R)
MDTSPSEGTNLNAPNSLGVSALCAICGDRATGKHYGASSCDGCKGFFRRSVRKNHMYSCRFSRQCVVDKDKRNQCRYCRLKKCFRAGMKKEAVQNERDRISTRRAAYEDSSLPSINALLQAEVLSRQITAPVSGINGDIRAKKIASIADVCESMKEQLLVLVEWAKYIPAFCELPLDDQVALLRAHAGEHLLLGATKRSMVFKDVLLLGNDYIVPRHCPELAEMSRVSIRILDELVLPFQELQIDDNEYAYLKAIIFFDPDAKGLSDPGKIKRLRAQVQVSLEDYINDRQYDSRGRFGELLLLLPTLQSITWQMIEQIQFIKLFGMAKIDNLLQEMLLGGAPSDAPHAHHPLHPHLMQEHMGTNVIVANTMPTHLSNGQMCEWPRPRGQAAAPEAPQPAPPGGSGSEPYKLLPGAVATIVRPLSAIPQPTITKQEVI

SEQ ID NO: 231 - protein, 437 aa, synthetic construct
  REGION 1..437: note = protein (artificial) from Homo sapiens__NP_000448.3__HNF4A(39-474)(S142A_S143A_S148A_S167A _S313A_S378A_T429A_T432A_S436A_K458R)
MDTSPSEGTNLNAPNSLGVSALCAICGDRATGKHYGASSCDGCKGFFRRSVRKNHMYSCRFSRQCVVDKDKRNQCRYCRLKKCFRAGMKKEAVQNERDRISTRRAAYEDSALPSINALLQAEVLSRQITAPVSGINGDIRAKKIASIADVCESMKEQLLVLVEWAKYIPAFCELPLDDQVALLRAHAGEHLLLGATKRSMVFKDVLLLGNDYIVPRHCPELAEMSRVSIRILDELVLPFQELQIDDNEYAYLKAIIFFDPDAKGLSDPGKIKRLRAQVQVSLEDYINDRQYDSRGRFGELLLLLPTLQSITWQMIEQIQFIKLFGMAKIDNLLQEMLLGGAPSDAPHAHHPLHPHLMQEHMGTNVIVANTMPTHLSNGQMCEWPRPRGQAAAPEAPQPAPPGGSGSEPYKLLPGAVATIVRPLSAIPQPTITKQEVI

SEQ ID NO: 232 - protein, 437 aa, synthetic construct
  REGION 1..437: note = protein (artificial) from Homo sapiens__NP_000448.3__HNF4A(39-474)(K106R_K108R_K126R_K127R _S142A_S143A_S148A_S167A_S313A_S378A_T429A_T432A_S436A_K458 R)
MDTSPSEGTNLNAPNSLGVSALCAICGDRATGKHYGASSCDGCKGFFRRSVRKNHMYSCRFSRQCVVDRDRRNQCRYCRLKKCFRAGMRREAVQNERDRISTRRAAYEDSALPSINALLQAEVLSRQITAPVSGINGDIRAKKIASIADVCESMKEQLLVLVEWAKYIPAFCELPLDDQVALLRAHAGEHLLLGATKRSMVFKDVLLLGNDYIVPRHCPELAEMSRVSIRILDELVLPFQELQIDDNEYAYLKAIIFFDPDAKGLSDPGKIKRLRAQVQVSLEDYINDRQYDSRGRFGELLLLLPTLQSITWQMIEQIQFIKLFGMAKIDNLLQEMLLGGAPSDAPHAHHPLHPHLMQEHMGTNVIVANTMPTHLSNGQMCEWPRPRGQAAAPEAPQPAPPGGSGSEPYKLLPGAVATIVRPLSAIPQPTITKQEVI

SEQ ID NO: 233 - protein, 437 aa, synthetic construct
  REGION 1..437: note = protein (artificial) from Homo sapiens__NP_000448.3__HNF4A(39-474)(S142A_S143A_S148A_T166A _S167A_S313A_S378A_T429A_T432A_S436A_K458R)
MDTSPSEGTNLNAPNSLGVSALCAICGDRATGKHYGASSCDGCKGFFRRSVRKNHMYSCRFSRQCVVDKDKRNQCRYCRLKKCFRAGMKKEAVQNERDRISTRRAAYEDSALPSINALLQAEVLSRQIAAPVSGINGDIRAKKIASIADVCESMKEQLLVLVEWAKYIPAFCELPLDDQVALLRAHAGEHLLLGATKRSMVFKDVLLLGNDYIVPRHCPELAEMSRVSIRILDELVLPFQELQIDDNEYAYLKAIIFFDPDAKGLSDPGKIKRLRAQVQVSLEDYINDRQYDSRGRFGELLLLLPTLQSITWQMIEQIQFIKLFGMAKIDNLLQEMLLGGAPSDAPHAHHPLHPHLMQEHMGTNVIVANTMPTHLSNGQMCEWPRPRGQAAAPEAPQPAPPGGSGSEPYKLLPGAVATIVRPLSAIPQPTITKQEVI

SEQ ID NO: 234 - protein, 437 aa, synthetic construct
  REGION 1..437: note = protein (artificial) from Homo sapiens__NP_000448.3__HNF4A(39-474)(S87A_S142A_S143A_S148A_ T166A_S167A_S313A_S378A_T429A_T432A_S436A_K458R)
MDTSPSEGTNLNAPNSLGVSALCAICGDRATGKHYGASSCDGCKGFFRRAVRKNHMYSCRFSRQCVVDKDKRNQCRYCRLKKCFRAGMKKEAVQNERDRISTRRAAYEDSALPSINALLQAEVLSRQIAAPVSGINGDIRAKKIASIADVCESMKEQLLVLVEWAKYIPAFCELPLDDQVALLRAHAGEHLLLGATKRSMVFKDVLLLGNDYIVPRHCPELAEMSRVSIRILDELVLPFQELQIDDNEYAYLKAIIFFDPDAKGLSDPGKIKRLRAQVQVSLEDYINDRQYDSRGRFGELLLLLPTLQSITWQMIEQIQFIKLFGMAKIDNLLQEMLLGGAPSDAPHAHHPLHPHLMQEHMGTNVIVANTMPTHLSNGQMCEWPRPRGQAAAPEAPQPAPPGGSGSEPYKLLPGAVATIVRPLSAIPQPTITKQEVI

SEQ ID NO: 235 - protein, 437 aa, synthetic construct
  REGION 1..437: note = protein (artificial) from Homo sapiens__NP_000448.3__HNF4A(39-474)(S87A_K106R_K108R_K126R_ K127R_S142A_S143A_S148A_T166A_S167A_S313A_S378A_T429A_T432A _S436A_K458R)
MDTSPSEGTNLNAPNSLGVSALCAICGDRATGKHYGASSCDGCKGFFRRAVRKNHMYSCRFSRQCVVDRDRRNQCRYCRLKKCFRAGMRREAVQNERDRISTRRAAYEDSALPSINALLQAEVLSRQIAAPVSGINGDIRAKKIASIADVCESMKEQLLVLVEWAKYIPAFCELPLDDQVALLRAHAGEHLLLGATKRSMVFKDVLLLGNDYIVPRHCPELAEMSRVSIRILDELVLPFQELQIDDNEYAYLKAIIFFDPDAKGLSDPGKIKRLRAQVQVSLEDYINDRQYDSRGRFGELLLLLPTLQSITWQMIEQIQFIKLFGMAKIDNLLQEMLLGGAPSDAPHAHHPLHPHLMQEHMGTNVIVANTMPTHLSNGQMCEWPRPRGQAAAPEAPQPAPPGGSGSEPYKLLPGAVATIVRPLSAIPQPTITKQEVI

SEQ ID NO: 236 - protein, 437 aa, synthetic construct
  REGION 1..437: note = protein (artificial) from Homo sapiens__NP_000448.3__HNF4A(39-474)(S87A_K106R_K108R_K126R_ K127R)
MDTSPSEGTNLNAPNSLGVSALCAICGDRATGKHYGASSCDGCKGFFRRAVRKNHMYSCRFSRQCVVDRDRRNQCRYCRLKKCFRAGMRREAVQNERDRISTRRSSYEDSSLPSINALLQAEVLSRQITSPVSGINGDIRAKKIASIADVCESMKEQLLVLVEWAKYIPAFCELPLDDQVALLRAHAGEHLLLGATKRSMVFKDVLLLGNDYIVPRHCPELAEMSRVSIRILDELVLPFQELQIDDNEYAYLKAIIFFDPDAKGLSDPGKIKRLRSQVQVSLEDYINDRQYDSRGRFGELLLLLPTLQSITWQMIEQIQFIKLFGMAKIDNLLQEMLLGGSPSDAPHAHHPLHPHLMQEHMGTNVIVANTMPTHLSNGQMCEWPRPRGQAATPETPQPSPPGGSGSEPYKLLPGAVATIVKPLSAIPQPTITKQEVI

SEQ ID NO: 237 - protein, 437 aa, synthetic construct
  REGION 1..437: note = protein (artificial) from Homo sapiens__NP_000448.3__HNF4A(39-474)(S87A_K106R_K108R_K126R_ K127R_S142A_S143A_S148A_T166A_S167A_S313A_S378A_T429A_T432A _S436A_K458R_S461A)
MDTSPSEGTNLNAPNSLGVSALCAICGDRATGKHYGASSCDGCKGFFRRAVRKNHMYSCRFSRQCVVDRDRRNQCRYCRLKKCFRAGMRREAVQNERDRISTRRAAYEDSALPSINALLQAEVLSRQIAAPVSGINGDIRAKKIASIADVCESMKEQLLVLVEWAKYIPAFCELPLDDQVALLRAHAGEHLLLGATKRSMVFKDVLLLGNDYIVPRHCPELAEMSRVSIRILDELVLPFQELQIDDNEYAYLKAIIFFDPDAKGLSDPGKIKRLRAQVQVSLEDYINDRQYDSRGRFGELLLLLPTLQSITWQMIEQIQFIKLFGMAKIDNLLQEMLLGGAPSDAPHAHHPLHPHLMQEHMGTNVIVANTMPTHLSNGQMCEWPRPRGQAAAPEAPQPAPPGGSGSEPYKLLPGAVATIVRPLAAIPQPTITKQEVI

SEQ ID NO: 238 - protein, 437 aa, synthetic construct
  REGION 1..437: note = protein (artificial) from Homo sapiens__NP_000448.3__HNF4A(39-474)(S87A_K106R_K108R_K126R_ K127R_S142A_S143A_S148A_T166A_S167A_S313A_S378A_T429A_T432A _S436A_K458R_S461E)
MDTSPSEGTNLNAPNSLGVSALCAICGDRATGKHYGASSCDGCKGFFRRAVRKNHMYSCRFSRQCVVDRDRRNQCRYCRLKKCFRAGMRREAVQNERDRISTRRAAYEDSALPSINALLQAEVLSRQIAAPVSGINGDIRAKKIASIADVCESMKEQLLVLVEWAKYIPAFCELPLDDQVALLRAHAGEHLLLGATKRSMVFKDVLLLGNDYIVPRHCPELAEMSRVSIRILDELVLPFQELQIDDNEYAYLKAIIFFDPDAKGLSDPGKIKRLRAQVQVSLEDYINDRQYDSRGRFGELLLLLPTLQSITWQMIEQIQFIKLFGMAKIDNLLQEMLLGGAPSDAPHAHHPLHPHLMQEHMGTNVIVANTMPTHLSNGQMCEWPRPRGQAAAPEAPQPAPPGGSGSEPYKLLPGAVATIVRPLEAIPQPTITKQEVI

SEQ ID NO: 239 - protein, 437 aa, synthetic construct
  REGION 1..437: note = protein (artificial) from Homo sapiens__NP_000448.3__HNF4A(39-474)(S87A_K106R_K108R_K126R_ K127R_S142A_S143A_S148E_T166A_S167E_S313A_S378E_T429E_T432E _S436E_K458R_S461E)
MDTSPSEGTNLNAPNSLGVSALCAICGDRATGKHYGASSCDGCKGFFRRAVRKNHMYSCRFSRQCVVDRDRRNQCRYCRLKKCFRAGMRREAVQNERDRISTRRAAYEDSELPSINALLQAEVLSRQIAEPVSGINGDIRAKKIASIADVCESMKEQLLVLVEWAKYIPAFCELPLDDQVALLRAHAGEHLLLGATKRSMVFKDVLLLGNDYIVPRHCPELAEMSRVSIRILDELVLPFQELQIDDNEYAYLKAIIFFDPDAKGLSDPGKIKRLRAQVQVSLEDYINDRQYDSRGRFGELLLLLPTLQSITWQMIEQIQFIKLFGMAKIDNLLQEMLLGGEPSDAPHAHHPLHPHLMQEHMGTNVIVANTMPTHLSNGQMCEWPRPRGQAAEPEEPQPEPPGGSGSEPYKLLPGAVATIVRPLEAIPQPTITKQEVI

SEQ ID NO: 240 - protein, 437 aa, synthetic construct
  REGION 1..437: note = protein (artificial) from Homo sapiens__NP_000448.3__HNF4A(39-474)(S87A_K106R_K108R_K126R_ K127R_S142A_S143A_S148A_T166A_S167A_K179R_K180R_S313A_S378A _T429A_T432A_S436A_K458R_S461E)
MDTSPSEGTNLNAPNSLGVSALCAICGDRATGKHYGASSCDGCKGFFRRAVRKNHMYSCRFSRQCVVDRDRRNQCRYCRLKKCFRAGMRREAVQNERDRISTRRAAYEDSALPSINALLQAEVLSRQIAAPVSGINGDIRARRIASIADVCESMKEQLLVLVEWAKYIPAFCELPLDDQVALLRAHAGEHLLLGATKRSMVFKDVLLLGNDYIVPRHCPELAEMSRVSIRILDELVLPFQELQIDDNEYAYLKAIIFFDPDAKGLSDPGKIKRLRAQVQVSLEDYINDRQYDSRGRFGELLLLLPTLQSITWQMIEQIQFIKLFGMAKIDNLLQEMLLGGAPSDAPHAHHPLHPHLMQEHMGTNVIVANTMPTHLSNGQMCEWPRPRGQAAAPEAPQPAPPGGSGSEPYKLLPGAVATIVRPLEAIPQPTITKQEVI

SEQ ID NO: 241 - protein, 437 aa, synthetic construct
  REGION 1..437: note = protein (artificial) from Homo sapiens__NP_000448.3__HNF4A(39-474)(S87A_K106R_K108R_K126R_ K127R_S142A_S143A_S148A_T166A_S167A_K300R_K307R_K309R_S313A _S378A_T429A_T432A_S436A_K458R_S461E)
MDTSPSEGTNLNAPNSLGVSALCAICGDRATGKHYGASSCDGCKGFFRRAVRKNHMYSCRFSRQCVVDRDRRNQCRYCRLKKCFRAGMRREAVQNERDRISTRRAAYEDSALPSINALLQAEVLSRQIAAPVSGINGDIRAKKIASIADVCESMKEQLLVLVEWAKYIPAFCELPLDDQVALLRAHAGEHLLLGATKRSMVFKDVLLLGNDYIVPRHCPELAEMSRVSIRILDELVLPFQELQIDDNEYAYLKAIIFFDPDARGLSDPGRIRRLRAQVQVSLEDYINDRQYDSRGRFGELLLLLPTLQSITWQMIEQIQFIKLFGMAKIDNLLQEMLLGGAPSDAPHAHHPLHPHLMQEHMGTNVIVANTMPTHLSNGQMCEWPRPRGQAAAPEAPQPAPPGGSGSEPYKLLPGAVATIVRPLEAIPQPTITKQEVI

SEQ ID NO: 242 - protein, 437 aa, synthetic construct
  REGION 1..437: note = protein (artificial) from Homo sapiens__NP_000448.3__HNF4A(39-474)(S87A_K106R_K108R_K126R_ K127R_S142A_S143A_S148A_T166A_S167A_S313A_S378A_T429A_T432A _S436A_K447R_K458R_S461E_K470R)
MDTSPSEGTNLNAPNSLGVSALCAICGDRATGKHYGASSCDGCKGFFRRAVRKNHMYSCRFSRQCVVDRDRRNQCRYCRLKKCFRAGMRREAVQNERDRISTRRAAYEDSALPSINALLQAEVLSRQIAAPVSGINGDIRAKKIASIADVCESMKEQLLVLVEWAKYIPAFCELPLDDQVALLRAHAGEHLLLGATKRSMVFKDVLLLGNDYIVPRHCPELAEMSRVSIRILDELVLPFQELQIDDNEYAYLKAIIFFDPDAKGLSDPGKIKRLRAQVQVSLEDYINDRQYDSRGRFGELLLLLPTLQSITWQMIEQIQFIKLFGMAKIDNLLQEMLLGGAPSDAPHAHHPLHPHLMQEHMGTNVIVANTMPTHLSNGQMCEWPRPRGQAAAPEAPQPAPPGGSGSEPYRLLPGAVATIVRPLEAIPQPTITRQEVI

SEQ ID NO: 243 - protein, 437 aa, synthetic construct
  REGION 1..437: note = protein (artificial) from Homo sapiens__NP_000448.3__HNF4A(39-474)(S87A_K106R_K108R_K126R_ K127R_S142A_S143A_S148A_T166A_S167A_K179R_K180R_K234R_K300R _K307R_K309R_S313A_S378A_T429A_T432A_S436A_K447R_K458R_S461 E_K470R)
MDTSPSEGTNLNAPNSLGVSALCAICGDRATGKHYGASSCDGCKGFFRRAVRKNHMYSCRFSRQCVVDRDRRNQCRYCRLKKCFRAGMRREAVQNERDRISTRRAAYEDSALPSINALLQAEVLSRQIAAPVSGINGDIRARRIASIADVCESMKEQLLVLVEWAKYIPAFCELPLDDQVALLRAHAGEHLLLGATRRSMVFKDVLLLGNDYIVPRHCPELAEMSRVSIRILDELVLPFQELQIDDNEYAYLKAIIFFDPDARGLSDPGRIRRLRAQVQVSLEDYINDRQYDSRGRFGELLLLLPTLQSITWQMIEQIQFIKLFGMAKIDNLLQEMLLGGAPSDAPHAHHPLHPHLMQEHMGTNVIVANTMPTHLSNGQMCEWPRPRGQAAAPEAPQPAPPGGSGSEPYRLLPGAVATIVRPLEAIPQPTITRQEVI

SEQ ID NO: 244 - protein, 437 aa, synthetic construct
  REGION 1..437: note = protein (artificial) from Homo sapiens__NP_000448.3__HNF4A(39-474)(S87A_S95A_S99A_K106R_K1 08R_K126R_K127R_S142A_S143A_S148A_T166A_S167A_S313A_S378A_T 429A_T432A_S436A_K458R_S461E)
MDTSPSEGTNLNAPNSLGVSALCAICGDRATGKHYGASSCDGCKGFFRRAVRKNHMYACRFARQCVVDRDRRNQCRYCRLKKCFRAGMRREAVQNERDRISTRRAAYEDSALPSINALLQAEVLSRQIAAPVSGINGDIRAKKIASIADVCESMKEQLLVLVEWAKYIPAFCELPLDDQVALLRAHAGEHLLLGATKRSMVFKDVLLLGNDYIVPRHCPELAEMSRVSIRILDELVLPFQELQIDDNEYAYLKAIIFFDPDAKGLSDPGKIKRLRAQVQVSLEDYINDRQYDSRGRFGELLLLLPTLQSITWQMIEQIQFIKLFGMAKIDNLLQEMLLGGAPSDAPHAHHPLHPHLMQEHMGTNVIVANTMPTHLSNGQMCEWPRPRGQAAAPEAPQPAPPGGSGSEPYKLLPGAVATIVRPLEAIPQPTITKQEVI

SEQ ID NO: 245 - protein, 437 aa, synthetic construct
  REGION 1..437: note = protein (artificial) from Homo sapiens__NP_000448.3__HNF4A(39-474)(S87A_K106R_K108R_K126R_ K127R_S138A_T139A_S142A_S143A_S148A_T166A_S167A_S313A_S378A _T429A_T432A_S436A_K458R_S461E)
MDTSPSEGTNLNAPNSLGVSALCAICGDRATGKHYGASSCDGCKGFFRRAVRKNHMYSCRFSRQCVVDRDRRNQCRYCRLKKCFRAGMRREAVQNERDRIAARRAAYEDSALPSINALLQAEVLSRQIAAPVSGINGDIRAKKIASIADVCESMKEQLLVLVEWAKYIPAFCELPLDDQVALLRAHAGEHLLLGATKRSMVFKDVLLLGNDYIVPRHCPELAEMSRVSIRILDELVLPFQELQIDDNEYAYLKAIIFFDPDAKGLSDPGKIKRLRAQVQVSLEDYINDRQYDSRGRFGELLLLLPTLQSITWQMIEQIQFIKLFGMAKIDNLLQEMLLGGAPSDAPHAHHPLHPHLMQEHMGTNVIVANTMPTHLSNGQMCEWPRPRGQAAAPEAPQPAPPGGSGSEPYKLLPGAVATIVRPLEAIPQPTITKQEVI

SEQ ID NO: 246 - protein, 437 aa, synthetic construct
  REGION 1..437: note = protein (artificial) from Homo sapiens__NP_000448.3__HNF4A(39-474)(S87A_S95A_S99A_K106R_K1 08R_K126R_K127R_S138A_T139A_S142A_S143A_S148A_T166A_S167A_S 313A_S378A_T429A_T432A_S436A_K458R_S461E)
MDTSPSEGTNLNAPNSLGVSALCAICGDRATGKHYGASSCDGCKGFFRRAVRKNHMYACRFARQCVVDRDRRNQCRYCRLKKCFRAGMRREAVQNERDRIAARRAAYEDSALPSINALLQAEVLSRQIAAPVSGINGDIRAKKIASIADVCESMKEQLLVLVEWAKYIPAFCELPLDDQVALLRAHAGEHLLLGATKRSMVFKDVLLLGNDYIVPRHCPELAEMSRVSIRILDELVLPFQELQIDDNEYAYLKAIIFFDPDAKGLSDPGKIKRLRAQVQVSLEDYINDRQYDSRGRFGELLLLLPTLQSITWQMIEQIQFIKLFGMAKIDNLLQEMLLGGAPSDAPHAHHPLHPHLMQEHMGTNVIVANTMPTHLSNGQMCEWPRPRGQAAAPEAPQPAPPGGSGSEPYKLLPGAVATIVRPLEAIPQPTITKQEVI

SEQ ID NO: 247 - RNA, 1425 nt, Homo sapiens
  misc_feature 1..1425: note = CDS (wt) from Homo sapiens__NP_000448.3__HNF4A(1-474)
  source 1..1425: mol_type = mRNA
atgcgactctccaaaaccctcgtcgacatggacatggccgactacagtgctgcactggacccagcctacaccaccctggaatttgagaatgtgcaggtgttgacgatgggcaatgacacgtccccatcagaaggcaccaacctcaacgcgcccaacagcctgggtgtcagcgccctgtgtgccatctgcggggaccgggccacgggcaaacactacggtgcctcgagctgtgacggctgcaagggcttcttccggaggagcgtgcggaagaaccacatgtactcctgcagatttagccggcagtgcgtggtggacaaagacaagaggaaccagtgccgctactgcaggctcaagaaatgcttccgggctggcatgaagaaggaagccgtccagaatgagcgggaccggatcagcactcgaaggtcaagctatgaggacagcagcctgccctccatcaatgcgctcctgcaggcggaggtcctgtcccgacagatcacctcccccgtctccgggatcaacggcgacattcgggcgaagaagattgccagcatcgcagatgtgtgtgagtccatgaaggagcagctgctggttctcgttgagtgggccaagtacatcccagctttctgcgagctccccctggacgaccaggtggccctgctcagagcccatgctggcgagcacctgctgctcggagccaccaagagatccatggtgttcaaggacgtgctgctcctaggcaatgactacattgtccctcggcactgcccggagctggcggagatgagccgggtgtccatacgcatccttgacgagctggtgctgcccttccaggagctgcagatcgatgacaatgagtatgcctacctcaaagccatcatcttctttgacccagatgccaaggggctgagcgatccagggaagatcaagcggctgcgttcccaggtgcaggtgagcttggaggactacatcaacgaccgccagtatgactcgcgtggccgctttggagagctgctgctgctgctgcccaccttgcagagcatcacctggcagatgatcgagcagatccagttcatcaagctcttcggcatggccaagattgacaacctgttgcaggagatgctgctgggagggtcccccagcgatgcaccccatgcccaccaccccctgcaccctcacctgatgcaggaacatatgggaaccaacgtcatcgttgccaacacaatgcccactcacctcagcaacggacagatgtgtgagtggccccgacccaggggacaggcagccacccctgagaccccacagccctcaccgccaggtggctcagggtctgagccctataagctcctgccgggagccgtcgccacaatcgtcaagcccctctctgccatcccccagccgaccatcaccaagcaggaagttatctag

SEQ ID NO: 248 - RNA, 1425 nt, synthetic construct
  misc_feature 1..1425: note = CDS (wt mod) from Homo sapiens__NP_000448.3__HNF4A(1-474)
  source 1..1425: mol_type = other RNA
atgcgactctccaaaaccctcgtcgacatggacatggccgactacagtgctgcactggacccagcctacaccaccctggaatttgagaatgtccaggtgttgacgatgggcaatgacacgtccccatcagaaggcaccaacctcaacgcgcccaacagcctgggtgtgagcgccctgtgtgccatctgcggggaccgggccacgggcaaacactacggtgcctcgagctgtgacggctgcaagggcttcttccggaggagcgtgcggaagaaccacatgtactcctgcagatttagccggcagtgcgtggtggacaaagacaagaggaaccagtgccgctactgcaggctcaagaaatgcttccgggctggcatgaagaaggaagccgtccagaatgagcgggaccggatcagcactcgaaggtcaagctatgaggacagcagcctgccctccatcaatgcgctcctgcaggcggaggtcctgtcccgacagatcacctcccccgtctccgggatcaacggcgacattcgggcgaagaagattgccagcatcgcagatgtgtgtgagtccatgaaggagcagctgctggttctcgttgagtgggccaagtacatcccagctttctgcgagctccccctggacgaccaggtggccctgctcagagcccatgctggcgagcacctcctgctcggagccaccaagagatccatggtgttcaaggacgtgctgctcctaggcaatgactacattgtccctcggcactgcccggagctggcggagatgagccgggtgtccatacgcatccttgacgagctggtgctgcccttccaggagctgcagatcgatgacaatgagtatgcctacctcaaagccatcatcttctttgacccagatgccaaggggctgagcgatccagggaagatcaagcggctgcgttcccaggtccaggtgagcttggaggactacatcaacgaccgccagtatgactcgcgtggccgctttggagagctgctgctgctgctgcccaccttgcagagcatcacctggcagatgatcgagcagatccagttcatcaagctgttcggcatggccaagattgacaacctgttgcaggagatgctgctgggagggtcccccagcgatgcaccccatgcccaccaccccctgcaccctcacctgatgcaggaacatatgggaaccaacgtgatcgttgccaacacaatgcccactcacctcagcaacggacagatgtgtgagtggccccgacccaggggacaggcagccacccctgagaccccacagccctcaccgccaggtggctcagggtctgagccctataagctcctgccgggagccgtcgccacaatcgtcaagcccctctctgccatcccccagccgaccatcaccaagcaggaagttatctga

SEQ ID NO: 249 - RNA, 1425 nt, synthetic construct
  misc_feature 1..1425: note = CDS (opt1) from Homo sapiens__NP_000448.3__HNF4A(1-474)
  source 1..1425: mol_type = other RNA
atgcgcctgagcaagaccctcgtggacatggacatggccgactactccgccgcgctggaccccgcctacaccacgctggagttcgagaacgtccaggtgctcaccatgggcaacgacaccagcccgtccgaggggaccaacctgaacgcccccaacagcctgggcgtgtccgccctctgcgccatctgcggggaccgggcgacgggcaagcactacggggccagctcctgcgacggctgcaagggcttcttccgccggagcgtccgcaagaaccacatgtactcctgccggttcagccgccagtgcgtggtggacaaggacaagcggaaccagtgccgctactgccggctgaagaagtgcttccgcgccgggatgaagaaggaggccgtccagaacgagcgggaccgcatctccacccggcgcagctcctacgaggacagctccctgcccagcatcaacgcgctcctgcaggccgaggtgctgtcccggcagatcaccagccccgtgtccggcatcaacggggacatccgcgccaagaagatcgccagcatcgccgacgtctgcgagagcatgaaggagcagctcctggtgctggtggagtgggcgaagtacatcccggccttctgcgagctccccctggacgaccaggtcgccctgctccgggcccacgccggcgagcacctcctgctgggggcgaccaagcgctccatggtgttcaaggacgtgctgctgctcggcaacgactacatcgtcccccggcactgccccgagctggccgagatgagccgcgtgtccatccggatcctggacgagctcgtgctgccgttccaggagctgcagatcgacgacaacgagtacgcctacctcaaggccatcatcttcttcgaccccgacgccaagggcctgagcgaccccgggaagatcaagcgcctgcgctcccaggtccaggtgagcctcgaggactacatcaacgaccggcagtacgactcccgcggccggttcggggagctgctgctcctgctgcccacgctccagagcatcacctggcagatgatcgagcagatccagttcatcaagctgttcggcatggcgaagatcgacaacctgctccaggagatgctgctgggcgggtccccgagcgacgcgccccacgcccaccaccccctccacccccacctgatgcaggagcacatgggcaccaacgtgatcgtcgccaacaccatgccgacgcacctgtccaacgggcagatgtgcgagtggccccgcccccggggccaggccgccacccccgagaccccgcagcccagcccgcccgggggctccggcagcgagccctacaagctgctccccggggccgtggccaccatcgtgaagcccctgtccgccatcccccagccgacgatcaccaagcaggaggtcatctga

SEQ ID NO: 250 - RNA, 1425 nt, synthetic construct
  misc_feature 1..1425: note = CDS (opt1) from Homo sapiens__NP_000448.3__HNF4A(1-474)(S313A)
  source 1..1425: mol_type = other RNA
atgcgcctgagcaagaccctcgtggacatggacatggccgactactccgccgcgctggaccccgcctacaccacgctggagttcgagaacgtccaggtgctcaccatgggcaacgacaccagcccgtccgaggggaccaacctgaacgcccccaacagcctgggcgtgtccgccctctgcgccatctgcggggaccgggcgacgggcaagcactacggggccagctcctgcgacggctgcaagggcttcttccgccggagcgtccgcaagaaccacatgtactcctgccggttcagccgccagtgcgtggtggacaaggacaagcggaaccagtgccgctactgccggctgaagaagtgcttccgcgccgggatgaagaaggaggccgtccagaacgagcgggaccgcatctccacccggcgcagctcctacgaggacagctccctgcccagcatcaacgcgctcctgcaggccgaggtgctgtcccggcagatcaccagccccgtgtccggcatcaacggggacatccgcgccaagaagatcgccagcatcgccgacgtctgcgagagcatgaaggagcagctcctggtgctggtggagtgggcgaagtacatcccggccttctgcgagctccccctggacgaccaggtcgccctgctccgggcccacgccggcgagcacctcctgctgggggcgaccaagcgctccatggtgttcaaggacgtgctgctgctcggcaacgactacatcgtcccccggcactgccccgagctggccgagatgagccgcgtgtccatccggatcctggacgagctcgtgctgccgttccaggagctgcagatcgacgacaacgagtacgcctacctcaaggccatcatcttcttcgaccccgacgccaagggcctgagcgaccccgggaagatcaagcgcctgcgcgcgcaggtccaggtgagcctcgaggactacatcaacgaccggcagtacgactcccgcggccggttcggggagctgctgctcctgctgcccacgctccagagcatcacctggcagatgatcgagcagatccagttcatcaagctgttcggcatggcgaagatcgacaacctgctccaggagatgctgctgggcgggtccccgagcgacgcgccccacgcccaccaccccctccacccccacctgatgcaggagcacatgggcaccaacgtgatcgtcgccaacaccatgccgacgcacctgtccaacgggcagatgtgcgagtggccccgcccccggggccaggccgccacccccgagaccccgcagcccagcccgcccgggggctccggcagcgagccctacaagctgctccccggggccgtggccaccatcgtgaagcccctgtccgccatcccccagccgacgatcaccaagcaggaggtcatctga

SEQ ID NO: 251 - RNA, 1425 nt, synthetic construct
  misc_feature 1..1425: note = CDS (opt1) from Homo sapiens__NP_000448.3__HNF4A(1-474)(S313E)
  source 1..1425: mol_type = other RNA
atgcgcctgagcaagaccctcgtggacatggacatggccgactactccgccgcgctggaccccgcctacaccacgctggagttcgagaacgtccaggtgctcaccatgggcaacgacaccagcccgtccgaggggaccaacctgaacgcccccaacagcctgggcgtgtccgccctctgcgccatctgcggggaccgggcgacgggcaagcactacggggccagctcctgcgacggctgcaagggcttcttccgccggagcgtccgcaagaaccacatgtactcctgccggttcagccgccagtgcgtggtggacaaggacaagcggaaccagtgccgctactgccggctgaagaagtgcttccgcgccgggatgaagaaggaggccgtccagaacgagcgggaccgcatctccacccggcgcagctcctacgaggacagctccctgcccagcatcaacgcgctcctgcaggccgaggtgctgtcccggcagatcaccagccccgtgtccggcatcaacggggacatccgcgccaagaagatcgccagcatcgccgacgtctgcgagagcatgaaggagcagctcctggtgctggtggagtgggcgaagtacatcccggccttctgcgagctccccctggacgaccaggtcgccctgctccgggcccacgccggcgagcacctcctgctgggggcgaccaagcgctccatggtgttcaaggacgtgctgctgctcggcaacgactacatcgtcccccggcactgccccgagctggccgagatgagccgcgtgtccatccggatcctggacgagctcgtgctgccgttccaggagctgcagatcgacgacaacgagtacgcctacctcaaggccatcatcttcttcgaccccgacgccaagggcctgagcgaccccgggaagatcaagcgcctgcgcgagcaggtccaggtgagcctcgaggactacatcaacgaccggcagtacgactcccgcggccggttcggggagctgctgctcctgctgcccacgctccagagcatcacctggcagatgatcgagcagatccagttcatcaagctgttcggcatggcgaagatcgacaacctgctccaggagatgctgctgggcgggtccccgagcgacgcgccccacgcccaccaccccctccacccccacctgatgcaggagcacatgggcaccaacgtgatcgtcgccaacaccatgccgacgcacctgtccaacgggcagatgtgcgagtggccccgcccccggggccaggccgccacccccgagaccccgcagcccagcccgcccgggggctccggcagcgagccctacaagctgctccccggggccgtggccaccatcgtgaagcccctgtccgccatcccccagccgacgatcaccaagcaggaggtcatctga

SEQ ID NO: 252 - RNA, 1425 nt, synthetic construct
  misc_feature 1..1425: note = CDS (opt1) from Homo sapiens__NP_000448.3__HNF4A(1-474)(S142A_S143A)
  source 1..1425: mol_type = other RNA
atgcgcctgagcaagaccctcgtggacatggacatggccgactactccgccgcgctggaccccgcctacaccacgctggagttcgagaacgtccaggtgctcaccatgggcaacgacaccagcccgtccgaggggaccaacctgaacgcccccaacagcctgggcgtgtccgccctctgcgccatctgcggggaccgggcgacgggcaagcactacggggccagctcctgcgacggctgcaagggcttcttccgccggagcgtccgcaagaaccacatgtactcctgccggttcagccgccagtgcgtggtggacaaggacaagcggaaccagtgccgctactgccggctgaagaagtgcttccgcgccgggatgaagaaggaggccgtccagaacgagcgggaccgcatctccacccggcgcgcggcctacgaggacagctccctgcccagcatcaacgcgctcctgcaggccgaggtgctgtcccggcagatcaccagccccgtgtccggcatcaacggggacatccgcgccaagaagatcgccagcatcgccgacgtctgcgagagcatgaaggagcagctcctggtgctggtggagtgggcgaagtacatcccggccttctgcgagctccccctggacgaccaggtcgccctgctccgggcccacgccggcgagcacctcctgctgggggcgaccaagcgctccatggtgttcaaggacgtgctgctgctcggcaacgactacatcgtcccccggcactgccccgagctggccgagatgagccgcgtgtccatccggatcctggacgagctcgtgctgccgttccaggagctgcagatcgacgacaacgagtacgcctacctcaaggccatcatcttcttcgaccccgacgccaagggcctgagcgaccccgggaagatcaagcgcctgcgctcccaggtccaggtgagcctcgaggactacatcaacgaccggcagtacgactcccgcggccggttcggggagctgctgctcctgctgcccacgctccagagcatcacctggcagatgatcgagcagatccagttcatcaagctgttcggcatggcgaagatcgacaacctgctccaggagatgctgctgggcgggtccccgagcgacgcgccccacgcccaccaccccctccacccccacctgatgcaggagcacatgggcaccaacgtgatcgtcgccaacaccatgccgacgcacctgtccaacgggcagatgtgcgagtggccccgcccccggggccaggccgccacccccgagaccccgcagcccagcccgcccgggggctccggcagcgagccctacaagctgctccccggggccgtggccaccatcgtgaagcccctgtccgccatcccccagccgacgatcaccaagcaggaggtcatctga

SEQ ID NO: 253 - RNA, 1425 nt, synthetic construct
  misc_feature 1..1425: note = CDS (opt1) from Homo sapiens__NP_000448.3__HNF4A(1-474)(S142E_S143E)
  source 1..1425: mol_type = other RNA
atgcgcctgagcaagaccctcgtggacatggacatggccgactactccgccgcgctggaccccgcctacaccacgctggagttcgagaacgtccaggtgctcaccatgggcaacgacaccagcccgtccgaggggaccaacctgaacgcccccaacagcctgggcgtgtccgccctctgcgccatctgcggggaccgggcgacgggcaagcactacggggccagctcctgcgacggctgcaagggcttcttccgccggagcgtccgcaagaaccacatgtactcctgccggttcagccgccagtgcgtggtggacaaggacaagcggaaccagtgccgctactgccggctgaagaagtgcttccgcgccgggatgaagaaggaggccgtccagaacgagcgggaccgcatctccacccggcgcgaggagtacgaggacagctccctgcccagcatcaacgcgctcctgcaggccgaggtgctgtcccggcagatcaccagccccgtgtccggcatcaacggggacatccgcgccaagaagatcgccagcatcgccgacgtctgcgagagcatgaaggagcagctcctggtgctggtggagtgggcgaagtacatcccggccttctgcgagctccccctggacgaccaggtcgccctgctccgggcccacgccggcgagcacctcctgctgggggcgaccaagcgctccatggtgttcaaggacgtgctgctgctcggcaacgactacatcgtcccccggcactgccccgagctggccgagatgagccgcgtgtccatccggatcctggacgagctcgtgctgccgttccaggagctgcagatcgacgacaacgagtacgcctacctcaaggccatcatcttcttcgaccccgacgccaagggcctgagcgaccccgggaagatcaagcgcctgcgctcccaggtccaggtgagcctcgaggactacatcaacgaccggcagtacgactcccgcggccggttcggggagctgctgctcctgctgcccacgctccagagcatcacctggcagatgatcgagcagatccagttcatcaagctgttcggcatggcgaagatcgacaacctgctccaggagatgctgctgggcgggtccccgagcgacgcgccccacgcccaccaccccctccacccccacctgatgcaggagcacatgggcaccaacgtgatcgtcgccaacaccatgccgacgcacctgtccaacgggcagatgtgcgagtggccccgcccccggggccaggccgccacccccgagaccccgcagcccagcccgcccgggggctccggcagcgagccctacaagctgctccccggggccgtggccaccatcgtgaagcccctgtccgccatcccccagccgacgatcaccaagcaggaggtcatctga

SEQ ID NO: 254 - RNA, 1425 nt, synthetic construct
  misc_feature 1..1425: note = CDS (opt1) from Homo sapiens__NP_000448.3__HNF4A(1-474)(S143A)
  source 1..1425: mol_type = other RNA
atgcgcctgagcaagaccctcgtggacatggacatggccgactactccgccgcgctggaccccgcctacaccacgctggagttcgagaacgtccaggtgctcaccatgggcaacgacaccagcccgtccgaggggaccaacctgaacgcccccaacagcctgggcgtgtccgccctctgcgccatctgcggggaccgggcgacgggcaagcactacggggccagctcctgcgacggctgcaagggcttcttccgccggagcgtccgcaagaaccacatgtactcctgccggttcagccgccagtgcgtggtggacaaggacaagcggaaccagtgccgctactgccggctgaagaagtgcttccgcgccgggatgaagaaggaggccgtccagaacgagcgggaccgcatctccacccggcgcagcgcgtacgaggacagctccctgcccagcatcaacgcgctcctgcaggccgaggtgctgtcccggcagatcaccagccccgtgtccggcatcaacggggacatccgcgccaagaagatcgccagcatcgccgacgtctgcgagagcatgaaggagcagctcctggtgctggtggagtgggcgaagtacatcccggccttctgcgagctccccctggacgaccaggtcgccctgctccgggcccacgccggcgagcacctcctgctgggggcgaccaagcgctccatggtgttcaaggacgtgctgctgctcggcaacgactacatcgtcccccggcactgccccgagctggccgagatgagccgcgtgtccatccggatcctggacgagctcgtgctgccgttccaggagctgcagatcgacgacaacgagtacgcctacctcaaggccatcatcttcttcgaccccgacgccaagggcctgagcgaccccgggaagatcaagcgcctgcgctcccaggtccaggtgagcctcgaggactacatcaacgaccggcagtacgactcccgcggccggttcggggagctgctgctcctgctgcccacgctccagagcatcacctggcagatgatcgagcagatccagttcatcaagctgttcggcatggcgaagatcgacaacctgctccaggagatgctgctgggcgggtccccgagcgacgcgccccacgcccaccaccccctccacccccacctgatgcaggagcacatgggcaccaacgtgatcgtcgccaacaccatgccgacgcacctgtccaacgggcagatgtgcgagtggccccgcccccggggccaggccgccacccccgagaccccgcagcccagcccgcccgggggctccggcagcgagccctacaagctgctccccggggccgtggccaccatcgtgaagcccctgtccgccatcccccagccgacgatcaccaagcaggaggtcatctga

SEQ ID NO: 255 - RNA, 1425 nt, synthetic construct
  misc_feature 1..1425: note = CDS (opt1) from Homo sapiens__NP_000448.3__HNF4A(1-474)(T166A)
  source 1..1425: mol_type = other RNA
atgcgcctgagcaagaccctcgtggacatggacatggccgactactccgccgcgctggaccccgcctacaccacgctggagttcgagaacgtccaggtgctcaccatgggcaacgacaccagcccgtccgaggggaccaacctgaacgcccccaacagcctgggcgtgtccgccctctgcgccatctgcggggaccgggcgacgggcaagcactacggggccagctcctgcgacggctgcaagggcttcttccgccggagcgtccgcaagaaccacatgtactcctgccggttcagccgccagtgcgtggtggacaaggacaagcggaaccagtgccgctactgccggctgaagaagtgcttccgcgccgggatgaagaaggaggccgtccagaacgagcgggaccgcatctccacccggcgcagctcctacgaggacagctccctgcccagcatcaacgcgctcctgcaggccgaggtgctgtcccggcagatcgcgagccccgtgtccggcatcaacggggacatccgcgccaagaagatcgccagcatcgccgacgtctgcgagagcatgaaggagcagctcctggtgctggtggagtgggcgaagtacatcccggccttctgcgagctccccctggacgaccaggtcgccctgctccgggcccacgccggcgagcacctcctgctgggggcgaccaagcgctccatggtgttcaaggacgtgctgctgctcggcaacgactacatcgtcccccggcactgccccgagctggccgagatgagccgcgtgtccatccggatcctggacgagctcgtgctgccgttccaggagctgcagatcgacgacaacgagtacgcctacctcaaggccatcatcttcttcgaccccgacgccaagggcctgagcgaccccgggaagatcaagcgcctgcgctcccaggtccaggtgagcctcgaggactacatcaacgaccggcagtacgactcccgcggccggttcggggagctgctgctcctgctgcccacgctccagagcatcacctggcagatgatcgagcagatccagttcatcaagctgttcggcatggcgaagatcgacaacctgctccaggagatgctgctgggcgggtccccgagcgacgcgccccacgcccaccaccccctccacccccacctgatgcaggagcacatgggcaccaacgtgatcgtcgccaacaccatgccgacgcacctgtccaacgggcagatgtgcgagtggccccgcccccggggccaggccgccacccccgagaccccgcagcccagcccgcccgggggctccggcagcgagccctacaagctgctccccggggccgtggccaccatcgtgaagcccctgtccgccatcccccagccgacgatcaccaagcaggaggtcatctga

SEQ ID NO: 256 - RNA, 1425 nt, synthetic construct
  misc_feature 1..1425: note = CDS (opt1) from Homo sapiens__NP_000448.3__HNF4A(1-474)(S167E)
  source 1..1425: mol_type = other RNA
atgcgcctgagcaagaccctcgtggacatggacatggccgactactccgccgcgctggaccccgcctacaccacgctggagttcgagaacgtccaggtgctcaccatgggcaacgacaccagcccgtccgaggggaccaacctgaacgcccccaacagcctgggcgtgtccgccctctgcgccatctgcggggaccgggcgacgggcaagcactacggggccagctcctgcgacggctgcaagggcttcttccgccggagcgtccgcaagaaccacatgtactcctgccggttcagccgccagtgcgtggtggacaaggacaagcggaaccagtgccgctactgccggctgaagaagtgcttccgcgccgggatgaagaaggaggccgtccagaacgagcgggaccgcatctccacccggcgcagctcctacgaggacagctccctgcccagcatcaacgcgctcctgcaggccgaggtgctgtcccggcagatcaccgagcccgtgtccggcatcaacggggacatccgcgccaagaagatcgccagcatcgccgacgtctgcgagagcatgaaggagcagctcctggtgctggtggagtgggcgaagtacatcccggccttctgcgagctccccctggacgaccaggtcgccctgctccgggcccacgccggcgagcacctcctgctgggggcgaccaagcgctccatggtgttcaaggacgtgctgctgctcggcaacgactacatcgtcccccggcactgccccgagctggccgagatgagccgcgtgtccatccggatcctggacgagctcgtgctgccgttccaggagctgcagatcgacgacaacgagtacgcctacctcaaggccatcatcttcttcgaccccgacgccaagggcctgagcgaccccgggaagatcaagcgcctgcgctcccaggtccaggtgagcctcgaggactacatcaacgaccggcagtacgactcccgcggccggttcggggagctgctgctcctgctgcccacgctccagagcatcacctggcagatgatcgagcagatccagttcatcaagctgttcggcatggcgaagatcgacaacctgctccaggagatgctgctgggcgggtccccgagcgacgcgccccacgcccaccaccccctccacccccacctgatgcaggagcacatgggcaccaacgtgatcgtcgccaacaccatgccgacgcacctgtccaacgggcagatgtgcgagtggccccgcccccggggccaggccgccacccccgagaccccgcagcccagcccgcccgggggctccggcagcgagccctacaagctgctccccggggccgtggccaccatcgtgaagcccctgtccgccatcccccagccgacgatcaccaagcaggaggtcatctga

SEQ ID NO: 257 - RNA, 1425 nt, synthetic construct
  misc_feature 1..1425: note = CDS (opt1) from Homo sapiens__NP_000448.3__HNF4A(1-474)(S167A)
  source 1..1425: mol_type = other RNA
atgcgcctgagcaagaccctcgtggacatggacatggccgactactccgccgcgctggaccccgcctacaccacgctggagttcgagaacgtccaggtgctcaccatgggcaacgacaccagcccgtccgaggggaccaacctgaacgcccccaacagcctgggcgtgtccgccctctgcgccatctgcggggaccgggcgacgggcaagcactacggggccagctcctgcgacggctgcaagggcttcttccgccggagcgtccgcaagaaccacatgtactcctgccggttcagccgccagtgcgtggtggacaaggacaagcggaaccagtgccgctactgccggctgaagaagtgcttccgcgccgggatgaagaaggaggccgtccagaacgagcgggaccgcatctccacccggcgcagctcctacgaggacagctccctgcccagcatcaacgcgctcctgcaggccgaggtgctgtcccggcagatcaccgcgcccgtgtccggcatcaacggggacatccgcgccaagaagatcgccagcatcgccgacgtctgcgagagcatgaaggagcagctcctggtgctggtggagtgggcgaagtacatcccggccttctgcgagctccccctggacgaccaggtcgccctgctccgggcccacgccggcgagcacctcctgctgggggcgaccaagcgctccatggtgttcaaggacgtgctgctgctcggcaacgactacatcgtcccccggcactgccccgagctggccgagatgagccgcgtgtccatccggatcctggacgagctcgtgctgccgttccaggagctgcagatcgacgacaacgagtacgcctacctcaaggccatcatcttcttcgaccccgacgccaagggcctgagcgaccccgggaagatcaagcgcctgcgctcccaggtccaggtgagcctcgaggactacatcaacgaccggcagtacgactcccgcggccggttcggggagctgctgctcctgctgcccacgctccagagcatcacctggcagatgatcgagcagatccagttcatcaagctgttcggcatggcgaagatcgacaacctgctccaggagatgctgctgggcgggtccccgagcgacgcgccccacgcccaccaccccctccacccccacctgatgcaggagcacatgggcaccaacgtgatcgtcgccaacaccatgccgacgcacctgtccaacgggcagatgtgcgagtggccccgcccccggggccaggccgccacccccgagaccccgcagcccagcccgcccgggggctccggcagcgagccctacaagctgctccccggggccgtggccaccatcgtgaagcccctgtccgccatcccccagccgacgatcaccaagcaggaggtcatctga

SEQ ID NO: 258 - RNA, 1425 nt, synthetic construct
  misc_feature 1..1425: note = CDS (opt1) from Homo sapiens__NP_000448.3__HNF4A(1-474)(S167A_S378A_T429A_T432A_ S436A)
  source 1..1425: mol_type = other RNA
atgcgcctgagcaagaccctcgtggacatggacatggccgactactccgccgcgctggaccccgcctacaccacgctggagttcgagaacgtccaggtgctcaccatgggcaacgacaccagcccgtccgaggggaccaacctgaacgcccccaacagcctgggcgtgtccgccctctgcgccatctgcggggaccgggcgacgggcaagcactacggggccagctcctgcgacggctgcaagggcttcttccgccggagcgtccgcaagaaccacatgtactcctgccggttcagccgccagtgcgtggtggacaaggacaagcggaaccagtgccgctactgccggctgaagaagtgcttccgcgccgggatgaagaaggaggccgtccagaacgagcgggaccgcatctccacccggcgcagctcctacgaggacagctccctgcccagcatcaacgcgctcctgcaggccgaggtgctgtcccggcagatcaccgcgcccgtgtccggcatcaacggggacatccgcgccaagaagatcgccagcatcgccgacgtctgcgagagcatgaaggagcagctcctggtgctggtggagtgggcgaagtacatcccggccttctgcgagctccccctggacgaccaggtcgccctgctccgggcccacgccggcgagcacctcctgctgggggcgaccaagcgctccatggtgttcaaggacgtgctgctgctcggcaacgactacatcgtcccccggcactgccccgagctggccgagatgagccgcgtgtccatccggatcctggacgagctcgtgctgccgttccaggagctgcagatcgacgacaacgagtacgcctacctcaaggccatcatcttcttcgaccccgacgccaagggcctgagcgaccccgggaagatcaagcgcctgcgctcccaggtccaggtgagcctcgaggactacatcaacgaccggcagtacgactcccgcggccggttcggggagctgctgctcctgctgcccacgctccagagcatcacctggcagatgatcgagcagatccagttcatcaagctgttcggcatggcgaagatcgacaacctgctccaggagatgctgctgggcggggcgccgagcgacgcgccccacgcccaccaccccctccacccccacctgatgcaggagcacatgggcaccaacgtgatcgtcgccaacaccatgccgacgcacctgtccaacgggcagatgtgcgagtggccccgcccccggggccaggccgccgcgcccgaggcgccgcagcccgcgccgcccgggggctccggcagcgagccctacaagctgctccccggggccgtggccaccatcgtgaagcccctgtccgccatcccccagccgacgatcaccaagcaggaggtcatctga

SEQ ID NO: 259 - RNA, 1425 nt, synthetic construct
  misc_feature 1..1425: note = CDS (opt1) from Homo sapiens__NP_000448.3__HNF4A(1-474)(S167E_S378E_T429E_T432E_ S436E)
  source 1..1425: mol_type = other RNA
atgcgcctgagcaagaccctcgtggacatggacatggccgactactccgccgcgctggaccccgcctacaccacgctggagttcgagaacgtccaggtgctcaccatgggcaacgacaccagcccgtccgaggggaccaacctgaacgcccccaacagcctgggcgtgtccgccctctgcgccatctgcggggaccgggcgacgggcaagcactacggggccagctcctgcgacggctgcaagggcttcttccgccggagcgtccgcaagaaccacatgtactcctgccggttcagccgccagtgcgtggtggacaaggacaagcggaaccagtgccgctactgccggctgaagaagtgcttccgcgccgggatgaagaaggaggccgtccagaacgagcgggaccgcatctccacccggcgcagctcctacgaggacagctccctgcccagcatcaacgcgctcctgcaggccgaggtgctgtcccggcagatcaccgagcccgtgtccggcatcaacggggacatccgcgccaagaagatcgccagcatcgccgacgtctgcgagagcatgaaggagcagctcctggtgctggtggagtgggcgaagtacatcccggccttctgcgagctccccctggacgaccaggtcgccctgctccgggcccacgccggcgagcacctcctgctgggggcgaccaagcgctccatggtgttcaaggacgtgctgctgctcggcaacgactacatcgtcccccggcactgccccgagctggccgagatgagccgcgtgtccatccggatcctggacgagctcgtgctgccgttccaggagctgcagatcgacgacaacgagtacgcctacctcaaggccatcatcttcttcgaccccgacgccaagggcctgagcgaccccgggaagatcaagcgcctgcgctcccaggtccaggtgagcctcgaggactacatcaacgaccggcagtacgactcccgcggccggttcggggagctgctgctcctgctgcccacgctccagagcatcacctggcagatgatcgagcagatccagttcatcaagctgttcggcatggcgaagatcgacaacctgctccaggagatgctgctgggcggggagccgagcgacgcgccccacgcccaccaccccctccacccccacctgatgcaggagcacatgggcaccaacgtgatcgtcgccaacaccatgccgacgcacctgtccaacgggcagatgtgcgagtggccccgcccccggggccaggccgccgagcccgaggagccgcagcccgagccgcccgggggctccggcagcgagccctacaagctgctccccggggccgtggccaccatcgtgaagcccctgtccgccatcccccagccgacgatcaccaagcaggaggtcatctga

SEQ ID NO: 260 - RNA, 1425 nt, synthetic construct
  misc_feature 1..1425: note = CDS (opt1) from Homo sapiens__NP_000448.3__HNF4A(1-474)(S87A)
  source 1..1425: mol_type = other RNA
atgcgcctgagcaagaccctcgtggacatggacatggccgactactccgccgcgctggaccccgcctacaccacgctggagttcgagaacgtccaggtgctcaccatgggcaacgacaccagcccgtccgaggggaccaacctgaacgcccccaacagcctgggcgtgtccgccctctgcgccatctgcggggaccgggcgacgggcaagcactacggggccagctcctgcgacggctgcaagggcttcttccgccgggcggtccgcaagaaccacatgtactcctgccggttcagccgccagtgcgtggtggacaaggacaagcggaaccagtgccgctactgccggctgaagaagtgcttccgcgccgggatgaagaaggaggccgtccagaacgagcgggaccgcatctccacccggcgcagctcctacgaggacagctccctgcccagcatcaacgcgctcctgcaggccgaggtgctgtcccggcagatcaccagccccgtgtccggcatcaacggggacatccgcgccaagaagatcgccagcatcgccgacgtctgcgagagcatgaaggagcagctcctggtgctggtggagtgggcgaagtacatcccggccttctgcgagctccccctggacgaccaggtcgccctgctccgggcccacgccggcgagcacctcctgctgggggcgaccaagcgctccatggtgttcaaggacgtgctgctgctcggcaacgactacatcgtcccccggcactgccccgagctggccgagatgagccgcgtgtccatccggatcctggacgagctcgtgctgccgttccaggagctgcagatcgacgacaacgagtacgcctacctcaaggccatcatcttcttcgaccccgacgccaagggcctgagcgaccccgggaagatcaagcgcctgcgctcccaggtccaggtgagcctcgaggactacatcaacgaccggcagtacgactcccgcggccggttcggggagctgctgctcctgctgcccacgctccagagcatcacctggcagatgatcgagcagatccagttcatcaagctgttcggcatggcgaagatcgacaacctgctccaggagatgctgctgggcgggtccccgagcgacgcgccccacgcccaccaccccctccacccccacctgatgcaggagcacatgggcaccaacgtgatcgtcgccaacaccatgccgacgcacctgtccaacgggcagatgtgcgagtggccccgcccccggggccaggccgccacccccgagaccccgcagcccagcccgcccgggggctccggcagcgagccctacaagctgctccccggggccgtggccaccatcgtgaagcccctgtccgccatcccccagccgacgatcaccaagcaggaggtcatctga

SEQ ID NO: 261 - RNA, 1425 nt, synthetic construct
  misc_feature 1..1425: note = CDS (opt1) from Homo sapiens__NP_000448.3__HNF4A(1-474)(S87E)
  source 1..1425: mol_type = other RNA
atgcgcctgagcaagaccctcgtggacatggacatggccgactactccgccgcgctggaccccgcctacaccacgctggagttcgagaacgtccaggtgctcaccatgggcaacgacaccagcccgtccgaggggaccaacctgaacgcccccaacagcctgggcgtgtccgccctctgcgccatctgcggggaccgggcgacgggcaagcactacggggccagctcctgcgacggctgcaagggcttcttccgccgggaggtccgcaagaaccacatgtactcctgccggttcagccgccagtgcgtggtggacaaggacaagcggaaccagtgccgctactgccggctgaagaagtgcttccgcgccgggatgaagaaggaggccgtccagaacgagcgggaccgcatctccacccggcgcagctcctacgaggacagctccctgcccagcatcaacgcgctcctgcaggccgaggtgctgtcccggcagatcaccagccccgtgtccggcatcaacggggacatccgcgccaagaagatcgccagcatcgccgacgtctgcgagagcatgaaggagcagctcctggtgctggtggagtgggcgaagtacatcccggccttctgcgagctccccctggacgaccaggtcgccctgctccgggcccacgccggcgagcacctcctgctgggggcgaccaagcgctccatggtgttcaaggacgtgctgctgctcggcaacgactacatcgtcccccggcactgccccgagctggccgagatgagccgcgtgtccatccggatcctggacgagctcgtgctgccgttccaggagctgcagatcgacgacaacgagtacgcctacctcaaggccatcatcttcttcgaccccgacgccaagggcctgagcgaccccgggaagatcaagcgcctgcgctcccaggtccaggtgagcctcgaggactacatcaacgaccggcagtacgactcccgcggccggttcggggagctgctgctcctgctgcccacgctccagagcatcacctggcagatgatcgagcagatccagttcatcaagctgttcggcatggcgaagatcgacaacctgctccaggagatgctgctgggcgggtccccgagcgacgcgccccacgcccaccaccccctccacccccacctgatgcaggagcacatgggcaccaacgtgatcgtcgccaacaccatgccgacgcacctgtccaacgggcagatgtgcgagtggccccgcccccggggccaggccgccacccccgagaccccgcagcccagcccgcccgggggctccggcagcgagccctacaagctgctccccggggccgtggccaccatcgtgaagcccctgtccgccatcccccagccgacgatcaccaagcaggaggtcatctga

SEQ ID NO: 262 - RNA, 1425 nt, synthetic construct
  misc_feature 1..1425: note = CDS (opt1) from Homo sapiens__NP_000448.3__HNF4A(1-474)(R2V)
  source 1..1425: mol_type = other RNA
atggtgctgagcaagaccctcgtggacatggacatggccgactactccgccgcgctggaccccgcctacaccacgctggagttcgagaacgtccaggtgctcaccatgggcaacgacaccagcccgtccgaggggaccaacctgaacgcccccaacagcctgggcgtgtccgccctctgcgccatctgcggggaccgggcgacgggcaagcactacggggccagctcctgcgacggctgcaagggcttcttccgccggagcgtccgcaagaaccacatgtactcctgccggttcagccgccagtgcgtggtggacaaggacaagcggaaccagtgccgctactgccggctgaagaagtgcttccgcgccgggatgaagaaggaggccgtccagaacgagcgggaccgcatctccacccggcgcagctcctacgaggacagctccctgcccagcatcaacgcgctcctgcaggccgaggtgctgtcccggcagatcaccagccccgtgtccggcatcaacggggacatccgcgccaagaagatcgccagcatcgccgacgtctgcgagagcatgaaggagcagctcctggtgctggtggagtgggcgaagtacatcccggccttctgcgagctccccctggacgaccaggtcgccctgctccgggcccacgccggcgagcacctcctgctgggggcgaccaagcgctccatggtgttcaaggacgtgctgctgctcggcaacgactacatcgtcccccggcactgccccgagctggccgagatgagccgcgtgtccatccggatcctggacgagctcgtgctgccgttccaggagctgcagatcgacgacaacgagtacgcctacctcaaggccatcatcttcttcgaccccgacgccaagggcctgagcgaccccgggaagatcaagcgcctgcgctcccaggtccaggtgagcctcgaggactacatcaacgaccggcagtacgactcccgcggccggttcggggagctgctgctcctgctgcccacgctccagagcatcacctggcagatgatcgagcagatccagttcatcaagctgttcggcatggcgaagatcgacaacctgctccaggagatgctgctgggcgggtccccgagcgacgcgccccacgcccaccaccccctccacccccacctgatgcaggagcacatgggcaccaacgtgatcgtcgccaacaccatgccgacgcacctgtccaacgggcagatgtgcgagtggccccgcccccggggccaggccgccacccccgagaccccgcagcccagcccgcccgggggctccggcagcgagccctacaagctgctccccggggccgtggccaccatcgtgaagcccctgtccgccatcccccagccgacgatcaccaagcaggaggtcatctga

SEQ ID NO: 263 - RNA, 1425 nt, synthetic construct
  misc_feature 1..1425: note = CDS (opt1) from Homo sapiens__NP_000448.3__HNF4A(1-474)(R2V_K5V)
  source 1..1425: mol_type = other RNA
atggtgctgagcgtgaccctcgtggacatggacatggccgactactccgccgcgctggaccccgcctacaccacgctggagttcgagaacgtccaggtgctcaccatgggcaacgacaccagcccgtccgaggggaccaacctgaacgcccccaacagcctgggcgtgtccgccctctgcgccatctgcggggaccgggcgacgggcaagcactacggggccagctcctgcgacggctgcaagggcttcttccgccggagcgtccgcaagaaccacatgtactcctgccggttcagccgccagtgcgtggtggacaaggacaagcggaaccagtgccgctactgccggctgaagaagtgcttccgcgccgggatgaagaaggaggccgtccagaacgagcgggaccgcatctccacccggcgcagctcctacgaggacagctccctgcccagcatcaacgcgctcctgcaggccgaggtgctgtcccggcagatcaccagccccgtgtccggcatcaacggggacatccgcgccaagaagatcgccagcatcgccgacgtctgcgagagcatgaaggagcagctcctggtgctggtggagtgggcgaagtacatcccggccttctgcgagctccccctggacgaccaggtcgccctgctccgggcccacgccggcgagcacctcctgctgggggcgaccaagcgctccatggtgttcaaggacgtgctgctgctcggcaacgactacatcgtcccccggcactgccccgagctggccgagatgagccgcgtgtccatccggatcctggacgagctcgtgctgccgttccaggagctgcagatcgacgacaacgagtacgcctacctcaaggccatcatcttcttcgaccccgacgccaagggcctgagcgaccccgggaagatcaagcgcctgcgctcccaggtccaggtgagcctcgaggactacatcaacgaccggcagtacgactcccgcggccggttcggggagctgctgctcctgctgcccacgctccagagcatcacctggcagatgatcgagcagatccagttcatcaagctgttcggcatggcgaagatcgacaacctgctccaggagatgctgctgggcgggtccccgagcgacgcgccccacgcccaccaccccctccacccccacctgatgcaggagcacatgggcaccaacgtgatcgtcgccaacaccatgccgacgcacctgtccaacgggcagatgtgcgagtggccccgcccccggggccaggccgccacccccgagaccccgcagcccagcccgcccgggggctccggcagcgagccctacaagctgctccccggggccgtggccaccatcgtgaagcccctgtccgccatcccccagccgacgatcaccaagcaggaggtcatctga

SEQ ID NO: 264 - RNA, 1425 nt, synthetic construct
  misc_feature 1..1425: note = CDS (opt1) from Homo sapiens__NP_000448.3__HNF4A(1-474)(K179R_K180R)
  source 1..1425: mol_type = other RNA
atgcgcctgagcaagaccctcgtggacatggacatggccgactactccgccgcgctggaccccgcctacaccacgctggagttcgagaacgtccaggtgctcaccatgggcaacgacaccagcccgtccgaggggaccaacctgaacgcccccaacagcctgggcgtgtccgccctctgcgccatctgcggggaccgggcgacgggcaagcactacggggccagctcctgcgacggctgcaagggcttcttccgccggagcgtccgcaagaaccacatgtactcctgccggttcagccgccagtgcgtggtggacaaggacaagcggaaccagtgccgctactgccggctgaagaagtgcttccgcgccgggatgaagaaggaggccgtccagaacgagcgggaccgcatctccacccggcgcagctcctacgaggacagctccctgcccagcatcaacgcgctcctgcaggccgaggtgctgtcccggcagatcaccagccccgtgtccggcatcaacggggacatccgcgcccggcgcatcgccagcatcgccgacgtctgcgagagcatgaaggagcagctcctggtgctggtggagtgggcgaagtacatcccggccttctgcgagctccccctggacgaccaggtcgccctgctccgggcccacgccggcgagcacctcctgctgggggcgaccaagcgctccatggtgttcaaggacgtgctgctgctcggcaacgactacatcgtcccccggcactgccccgagctggccgagatgagccgcgtgtccatccggatcctggacgagctcgtgctgccgttccaggagctgcagatcgacgacaacgagtacgcctacctcaaggccatcatcttcttcgaccccgacgccaagggcctgagcgaccccgggaagatcaagcgcctgcgctcccaggtccaggtgagcctcgaggactacatcaacgaccggcagtacgactcccgcggccggttcggggagctgctgctcctgctgcccacgctccagagcatcacctggcagatgatcgagcagatccagttcatcaagctgttcggcatggcgaagatcgacaacctgctccaggagatgctgctgggcgggtccccgagcgacgcgccccacgcccaccaccccctccacccccacctgatgcaggagcacatgggcaccaacgtgatcgtcgccaacaccatgccgacgcacctgtccaacgggcagatgtgcgagtggccccgcccccggggccaggccgccacccccgagaccccgcagcccagcccgcccgggggctccggcagcgagccctacaagctgctccccggggccgtggccaccatcgtgaagcccctgtccgccatcccccagccgacgatcaccaagcaggaggtcatctga

SEQ ID NO: 265 - RNA, 1425 nt, synthetic construct
  misc_feature 1..1425: note = CDS (opt1) from Homo sapiens__NP_000448.3__HNF4A(1-474)(K234R)
  source 1..1425: mol_type = other RNA
atgcgcctgagcaagaccctcgtggacatggacatggccgactactccgccgcgctggaccccgcctacaccacgctggagttcgagaacgtccaggtgctcaccatgggcaacgacaccagcccgtccgaggggaccaacctgaacgcccccaacagcctgggcgtgtccgccctctgcgccatctgcggggaccgggcgacgggcaagcactacggggccagctcctgcgacggctgcaagggcttcttccgccggagcgtccgcaagaaccacatgtactcctgccggttcagccgccagtgcgtggtggacaaggacaagcggaaccagtgccgctactgccggctgaagaagtgcttccgcgccgggatgaagaaggaggccgtccagaacgagcgggaccgcatctccacccggcgcagctcctacgaggacagctccctgcccagcatcaacgcgctcctgcaggccgaggtgctgtcccggcagatcaccagccccgtgtccggcatcaacggggacatccgcgccaagaagatcgccagcatcgccgacgtctgcgagagcatgaaggagcagctcctggtgctggtggagtgggcgaagtacatcccggccttctgcgagctccccctggacgaccaggtcgccctgctccgggcccacgccggcgagcacctcctgctgggggcgacccgccgctccatggtgttcaaggacgtgctgctgctcggcaacgactacatcgtcccccggcactgccccgagctggccgagatgagccgcgtgtccatccggatcctggacgagctcgtgctgccgttccaggagctgcagatcgacgacaacgagtacgcctacctcaaggccatcatcttcttcgaccccgacgccaagggcctgagcgaccccgggaagatcaagcgcctgcgctcccaggtccaggtgagcctcgaggactacatcaacgaccggcagtacgactcccgcggccggttcggggagctgctgctcctgctgcccacgctccagagcatcacctggcagatgatcgagcagatccagttcatcaagctgttcggcatggcgaagatcgacaacctgctccaggagatgctgctgggcgggtccccgagcgacgcgccccacgcccaccaccccctccacccccacctgatgcaggagcacatgggcaccaacgtgatcgtcgccaacaccatgccgacgcacctgtccaacgggcagatgtgcgagtggccccgcccccggggccaggccgccacccccgagaccccgcagcccagcccgcccgggggctccggcagcgagccctacaagctgctccccggggccgtggccaccatcgtgaagcccctgtccgccatcccccagccgacgatcaccaagcaggaggtcatctga

SEQ ID NO: 266 - RNA, 1425 nt, synthetic construct
  misc_feature 1..1425: note = CDS (opt1) from Homo sapiens__NP_000448.3__HNF4A(1-474)(K300R)
  source 1..1425: mol_type = other RNA
atgcgcctgagcaagaccctcgtggacatggacatggccgactactccgccgcgctggaccccgcctacaccacgctggagttcgagaacgtccaggtgctcaccatgggcaacgacaccagcccgtccgaggggaccaacctgaacgcccccaacagcctgggcgtgtccgccctctgcgccatctgcggggaccgggcgacgggcaagcactacggggccagctcctgcgacggctgcaagggcttcttccgccggagcgtccgcaagaaccacatgtactcctgccggttcagccgccagtgcgtggtggacaaggacaagcggaaccagtgccgctactgccggctgaagaagtgcttccgcgccgggatgaagaaggaggccgtccagaacgagcgggaccgcatctccacccggcgcagctcctacgaggacagctccctgcccagcatcaacgcgctcctgcaggccgaggtgctgtcccggcagatcaccagccccgtgtccggcatcaacggggacatccgcgccaagaagatcgccagcatcgccgacgtctgcgagagcatgaaggagcagctcctggtgctggtggagtgggcgaagtacatcccggccttctgcgagctccccctggacgaccaggtcgccctgctccgggcccacgccggcgagcacctcctgctgggggcgaccaagcgctccatggtgttcaaggacgtgctgctgctcggcaacgactacatcgtcccccggcactgccccgagctggccgagatgagccgcgtgtccatccggatcctggacgagctcgtgctgccgttccaggagctgcagatcgacgacaacgagtacgcctacctcaaggccatcatcttcttcgaccccgacgcccgcggcctgagcgaccccgggaagatcaagcgcctgcgctcccaggtccaggtgagcctcgaggactacatcaacgaccggcagtacgactcccgcggccggttcggggagctgctgctcctgctgcccacgctccagagcatcacctggcagatgatcgagcagatccagttcatcaagctgttcggcatggcgaagatcgacaacctgctccaggagatgctgctgggcgggtccccgagcgacgcgccccacgcccaccaccccctccacccccacctgatgcaggagcacatgggcaccaacgtgatcgtcgccaacaccatgccgacgcacctgtccaacgggcagatgtgcgagtggccccgcccccggggccaggccgccacccccgagaccccgcagcccagcccgcccgggggctccggcagcgagccctacaagctgctccccggggccgtggccaccatcgtgaagcccctgtccgccatcccccagccgacgatcaccaagcaggaggtcatctga

SEQ ID NO: 267 - RNA, 1425 nt, synthetic construct
  misc_feature 1..1425: note = CDS (opt1) from Homo sapiens__NP_000448.3__HNF4A(1-474)(K300R_K307R_K309R)
  source 1..1425: mol_type = other RNA
atgcgcctgagcaagaccctcgtggacatggacatggccgactactccgccgcgctggaccccgcctacaccacgctggagttcgagaacgtccaggtgctcaccatgggcaacgacaccagcccgtccgaggggaccaacctgaacgcccccaacagcctgggcgtgtccgccctctgcgccatctgcggggaccgggcgacgggcaagcactacggggccagctcctgcgacggctgcaagggcttcttccgccggagcgtccgcaagaaccacatgtactcctgccggttcagccgccagtgcgtggtggacaaggacaagcggaaccagtgccgctactgccggctgaagaagtgcttccgcgccgggatgaagaaggaggccgtccagaacgagcgggaccgcatctccacccggcgcagctcctacgaggacagctccctgcccagcatcaacgcgctcctgcaggccgaggtgctgtcccggcagatcaccagccccgtgtccggcatcaacggggacatccgcgccaagaagatcgccagcatcgccgacgtctgcgagagcatgaaggagcagctcctggtgctggtggagtgggcgaagtacatcccggccttctgcgagctccccctggacgaccaggtcgccctgctccgggcccacgccggcgagcacctcctgctgggggcgaccaagcgctccatggtgttcaaggacgtgctgctgctcggcaacgactacatcgtcccccggcactgccccgagctggccgagatgagccgcgtgtccatccggatcctggacgagctcgtgctgccgttccaggagctgcagatcgacgacaacgagtacgcctacctcaaggccatcatcttcttcgaccccgacgcccgcggcctgagcgaccccgggcgcatccggcgcctgcgctcccaggtccaggtgagcctcgaggactacatcaacgaccggcagtacgactcccgcggccggttcggggagctgctgctcctgctgcccacgctccagagcatcacctggcagatgatcgagcagatccagttcatcaagctgttcggcatggcgaagatcgacaacctgctccaggagatgctgctgggcgggtccccgagcgacgcgccccacgcccaccaccccctccacccccacctgatgcaggagcacatgggcaccaacgtgatcgtcgccaacaccatgccgacgcacctgtccaacgggcagatgtgcgagtggccccgcccccggggccaggccgccacccccgagaccccgcagcccagcccgcccgggggctccggcagcgagccctacaagctgctccccggggccgtggccaccatcgtgaagcccctgtccgccatcccccagccgacgatcaccaagcaggaggtcatctga

SEQ ID NO: 268 - RNA, 1425 nt, synthetic construct
  misc_feature 1..1425: note = CDS (opt1) from Homo sapiens__NP_000448.3__HNF4A(1-474)(K447R_K470R)
  source 1..1425: mol_type = other RNA
atgcgcctgagcaagaccctcgtggacatggacatggccgactactccgccgcgctggaccccgcctacaccacgctggagttcgagaacgtccaggtgctcaccatgggcaacgacaccagcccgtccgaggggaccaacctgaacgcccccaacagcctgggcgtgtccgccctctgcgccatctgcggggaccgggcgacgggcaagcactacggggccagctcctgcgacggctgcaagggcttcttccgccggagcgtccgcaagaaccacatgtactcctgccggttcagccgccagtgcgtggtggacaaggacaagcggaaccagtgccgctactgccggctgaagaagtgcttccgcgccgggatgaagaaggaggccgtccagaacgagcgggaccgcatctccacccggcgcagctcctacgaggacagctccctgcccagcatcaacgcgctcctgcaggccgaggtgctgtcccggcagatcaccagccccgtgtccggcatcaacggggacatccgcgccaagaagatcgccagcatcgccgacgtctgcgagagcatgaaggagcagctcctggtgctggtggagtgggcgaagtacatcccggccttctgcgagctccccctggacgaccaggtcgccctgctccgggcccacgccggcgagcacctcctgctgggggcgaccaagcgctccatggtgttcaaggacgtgctgctgctcggcaacgactacatcgtcccccggcactgccccgagctggccgagatgagccgcgtgtccatccggatcctggacgagctcgtgctgccgttccaggagctgcagatcgacgacaacgagtacgcctacctcaaggccatcatcttcttcgaccccgacgccaagggcctgagcgaccccgggaagatcaagcgcctgcgctcccaggtccaggtgagcctcgaggactacatcaacgaccggcagtacgactcccgcggccggttcggggagctgctgctcctgctgcccacgctccagagcatcacctggcagatgatcgagcagatccagttcatcaagctgttcggcatggcgaagatcgacaacctgctccaggagatgctgctgggcgggtccccgagcgacgcgccccacgcccaccaccccctccacccccacctgatgcaggagcacatgggcaccaacgtgatcgtcgccaacaccatgccgacgcacctgtccaacgggcagatgtgcgagtggccccgcccccggggccaggccgccacccccgagaccccgcagcccagcccgcccgggggctccggcagcgagccctaccggctgctccccggggccgtggccaccatcgtgaagcccctgtccgccatcccccagccgacgatcacccggcaggaggtcatctga

SEQ ID NO: 269 - RNA, 1425 nt, synthetic construct
  misc_feature 1..1425: note = CDS (opt1) from Homo sapiens__NP_000448.3__HNF4A(1-474)(K458R)
  source 1..1425: mol_type = other RNA
atgcgcctgagcaagaccctcgtggacatggacatggccgactactccgccgcgctggaccccgcctacaccacgctggagttcgagaacgtccaggtgctcaccatgggcaacgacaccagcccgtccgaggggaccaacctgaacgcccccaacagcctgggcgtgtccgccctctgcgccatctgcggggaccgggcgacgggcaagcactacggggccagctcctgcgacggctgcaagggcttcttccgccggagcgtccgcaagaaccacatgtactcctgccggttcagccgccagtgcgtggtggacaaggacaagcggaaccagtgccgctactgccggctgaagaagtgcttccgcgccgggatgaagaaggaggccgtccagaacgagcgggaccgcatctccacccggcgcagctcctacgaggacagctccctgcccagcatcaacgcgctcctgcaggccgaggtgctgtcccggcagatcaccagccccgtgtccggcatcaacggggacatccgcgccaagaagatcgccagcatcgccgacgtctgcgagagcatgaaggagcagctcctggtgctggtggagtgggcgaagtacatcccggccttctgcgagctccccctggacgaccaggtcgccctgctccgggcccacgccggcgagcacctcctgctgggggcgaccaagcgctccatggtgttcaaggacgtgctgctgctcggcaacgactacatcgtcccccggcactgccccgagctggccgagatgagccgcgtgtccatccggatcctggacgagctcgtgctgccgttccaggagctgcagatcgacgacaacgagtacgcctacctcaaggccatcatcttcttcgaccccgacgccaagggcctgagcgaccccgggaagatcaagcgcctgcgctcccaggtccaggtgagcctcgaggactacatcaacgaccggcagtacgactcccgcggccggttcggggagctgctgctcctgctgcccacgctccagagcatcacctggcagatgatcgagcagatccagttcatcaagctgttcggcatggcgaagatcgacaacctgctccaggagatgctgctgggcgggtccccgagcgacgcgccccacgcccaccaccccctccacccccacctgatgcaggagcacatgggcaccaacgtgatcgtcgccaacaccatgccgacgcacctgtccaacgggcagatgtgcgagtggccccgcccccggggccaggccgccacccccgagaccccgcagcccagcccgcccgggggctccggcagcgagccctacaagctgctccccggggccgtggccaccatcgtgcggcccctgtccgccatcccccagccgacgatcaccaagcaggaggtcatctga

SEQ ID NO: 270 - RNA, 1425 nt, synthetic construct
  misc_feature 1..1425: note = CDS (opt1) from Homo sapiens__NP_000448.3__HNF4A(1-474)(K106R_K108R_K126R_K127R)
  source 1..1425: mol_type = other RNA
atgcgcctgagcaagaccctcgtggacatggacatggccgactactccgccgcgctggaccccgcctacaccacgctggagttcgagaacgtccaggtgctcaccatgggcaacgacaccagcccgtccgaggggaccaacctgaacgcccccaacagcctgggcgtgtccgccctctgcgccatctgcggggaccgggcgacgggcaagcactacggggccagctcctgcgacggctgcaagggcttcttccgccggagcgtccgcaagaaccacatgtactcctgccggttcagccgccagtgcgtggtggaccgcgaccggcggaaccagtgccgctactgccggctgaagaagtgcttccgcgccgggatgcgccgcgaggccgtccagaacgagcgggaccgcatctccacccggcgcagctcctacgaggacagctccctgcccagcatcaacgcgctcctgcaggccgaggtgctgtcccggcagatcaccagccccgtgtccggcatcaacggggacatccgcgccaagaagatcgccagcatcgccgacgtctgcgagagcatgaaggagcagctcctggtgctggtggagtgggcgaagtacatcccggccttctgcgagctccccctggacgaccaggtcgccctgctccgggcccacgccggcgagcacctcctgctgggggcgaccaagcgctccatggtgttcaaggacgtgctgctgctcggcaacgactacatcgtcccccggcactgccccgagctggccgagatgagccgcgtgtccatccggatcctggacgagctcgtgctgccgttccaggagctgcagatcgacgacaacgagtacgcctacctcaaggccatcatcttcttcgaccccgacgccaagggcctgagcgaccccgggaagatcaagcgcctgcgctcccaggtccaggtgagcctcgaggactacatcaacgaccggcagtacgactcccgcggccggttcggggagctgctgctcctgctgcccacgctccagagcatcacctggcagatgatcgagcagatccagttcatcaagctgttcggcatggcgaagatcgacaacctgctccaggagatgctgctgggcgggtccccgagcgacgcgccccacgcccaccaccccctccacccccacctgatgcaggagcacatgggcaccaacgtgatcgtcgccaacaccatgccgacgcacctgtccaacgggcagatgtgcgagtggccccgcccccggggccaggccgccacccccgagaccccgcagcccagcccgcccgggggctccggcagcgagccctacaagctgctccccggggccgtggccaccatcgtgaagcccctgtccgccatcccccagccgacgatcaccaagcaggaggtcatctga

SEQ ID NO: 271 - RNA, 1425 nt, synthetic construct
  misc_feature 1..1425: note = CDS (opt1) from Homo sapiens__NP_000448.3__HNF4A(1-474)(E285Q)
  source 1..1425: mol_type = other RNA
atgcgcctgagcaagaccctcgtggacatggacatggccgactactccgccgcgctggaccccgcctacaccacgctggagttcgagaacgtccaggtgctcaccatgggcaacgacaccagcccgtccgaggggaccaacctgaacgcccccaacagcctgggcgtgtccgccctctgcgccatctgcggggaccgggcgacgggcaagcactacggggccagctcctgcgacggctgcaagggcttcttccgccggagcgtccgcaagaaccacatgtactcctgccggttcagccgccagtgcgtggtggacaaggacaagcggaaccagtgccgctactgccggctgaagaagtgcttccgcgccgggatgaagaaggaggccgtccagaacgagcgggaccgcatctccacccggcgcagctcctacgaggacagctccctgcccagcatcaacgcgctcctgcaggccgaggtgctgtcccggcagatcaccagccccgtgtccggcatcaacggggacatccgcgccaagaagatcgccagcatcgccgacgtctgcgagagcatgaaggagcagctcctggtgctggtggagtgggcgaagtacatcccggccttctgcgagctccccctggacgaccaggtcgccctgctccgggcccacgccggcgagcacctcctgctgggggcgaccaagcgctccatggtgttcaaggacgtgctgctgctcggcaacgactacatcgtcccccggcactgccccgagctggccgagatgagccgcgtgtccatccggatcctggacgagctcgtgctgccgttccaggagctgcagatcgacgacaaccagtacgcctacctcaaggccatcatcttcttcgaccccgacgccaagggcctgagcgaccccgggaagatcaagcgcctgcgctcccaggtccaggtgagcctcgaggactacatcaacgaccggcagtacgactcccgcggccggttcggggagctgctgctcctgctgcccacgctccagagcatcacctggcagatgatcgagcagatccagttcatcaagctgttcggcatggcgaagatcgacaacctgctccaggagatgctgctgggcgggtccccgagcgacgcgccccacgcccaccaccccctccacccccacctgatgcaggagcacatgggcaccaacgtgatcgtcgccaacaccatgccgacgcacctgtccaacgggcagatgtgcgagtggccccgcccccggggccaggccgccacccccgagaccccgcagcccagcccgcccgggggctccggcagcgagccctacaagctgctccccggggccgtggccaccatcgtgaagcccctgtccgccatcccccagccgacgatcaccaagcaggaggtcatctga

SEQ ID NO: 272 - RNA, 1425 nt, synthetic construct
  misc_feature 1..1425: note = CDS (opt1) from Homo sapiens__NP_000448.3__HNF4A(1-474)(T166E)
  source 1..1425: mol_type = other RNA
atgcgcctgagcaagaccctcgtggacatggacatggccgactactccgccgcgctggaccccgcctacaccacgctggagttcgagaacgtccaggtgctcaccatgggcaacgacaccagcccgtccgaggggaccaacctgaacgcccccaacagcctgggcgtgtccgccctctgcgccatctgcggggaccgggcgacgggcaagcactacggggccagctcctgcgacggctgcaagggcttcttccgccggagcgtccgcaagaaccacatgtactcctgccggttcagccgccagtgcgtggtggacaaggacaagcggaaccagtgccgctactgccggctgaagaagtgcttccgcgccgggatgaagaaggaggccgtccagaacgagcgggaccgcatctccacccggcgcagctcctacgaggacagctccctgcccagcatcaacgcgctcctgcaggccgaggtgctgtcccggcagatcgagagccccgtgtccggcatcaacggggacatccgcgccaagaagatcgccagcatcgccgacgtctgcgagagcatgaaggagcagctcctggtgctggtggagtgggcgaagtacatcccggccttctgcgagctccccctggacgaccaggtcgccctgctccgggcccacgccggcgagcacctcctgctgggggcgaccaagcgctccatggtgttcaaggacgtgctgctgctcggcaacgactacatcgtcccccggcactgccccgagctggccgagatgagccgcgtgtccatccggatcctggacgagctcgtgctgccgttccaggagctgcagatcgacgacaacgagtacgcctacctcaaggccatcatcttcttcgaccccgacgccaagggcctgagcgaccccgggaagatcaagcgcctgcgctcccaggtccaggtgagcctcgaggactacatcaacgaccggcagtacgactcccgcggccggttcggggagctgctgctcctgctgcccacgctccagagcatcacctggcagatgatcgagcagatccagttcatcaagctgttcggcatggcgaagatcgacaacctgctccaggagatgctgctgggcgggtccccgagcgacgcgccccacgcccaccaccccctccacccccacctgatgcaggagcacatgggcaccaacgtgatcgtcgccaacaccatgccgacgcacctgtccaacgggcagatgtgcgagtggccccgcccccggggccaggccgccacccccgagaccccgcagcccagcccgcccgggggctccggcagcgagccctacaagctgctccccggggccgtggccaccatcgtgaagcccctgtccgccatcccccagccgacgatcaccaagcaggaggtcatctga

SEQ ID NO: 273 - RNA, 1425 nt, synthetic construct
  misc_feature 1..1425: note = CDS (opt1) from Homo sapiens__NP_000448.3__HNF4A(1-474)(S148A)
  source 1..1425: mol_type = other RNA
atgcgcctgagcaagaccctcgtggacatggacatggccgactactccgccgcgctggaccccgcctacaccacgctggagttcgagaacgtccaggtgctcaccatgggcaacgacaccagcccgtccgaggggaccaacctgaacgcccccaacagcctgggcgtgtccgccctctgcgccatctgcggggaccgggcgacgggcaagcactacggggccagctcctgcgacggctgcaagggcttcttccgccggagcgtccgcaagaaccacatgtactcctgccggttcagccgccagtgcgtggtggacaaggacaagcggaaccagtgccgctactgccggctgaagaagtgcttccgcgccgggatgaagaaggaggccgtccagaacgagcgggaccgcatctccacccggcgcagctcctacgaggacagcgcgctgcccagcatcaacgcgctcctgcaggccgaggtgctgtcccggcagatcaccagccccgtgtccggcatcaacggggacatccgcgccaagaagatcgccagcatcgccgacgtctgcgagagcatgaaggagcagctcctggtgctggtggagtgggcgaagtacatcccggccttctgcgagctccccctggacgaccaggtcgccctgctccgggcccacgccggcgagcacctcctgctgggggcgaccaagcgctccatggtgttcaaggacgtgctgctgctcggcaacgactacatcgtcccccggcactgccccgagctggccgagatgagccgcgtgtccatccggatcctggacgagctcgtgctgccgttccaggagctgcagatcgacgacaacgagtacgcctacctcaaggccatcatcttcttcgaccccgacgccaagggcctgagcgaccccgggaagatcaagcgcctgcgctcccaggtccaggtgagcctcgaggactacatcaacgaccggcagtacgactcccgcggccggttcggggagctgctgctcctgctgcccacgctccagagcatcacctggcagatgatcgagcagatccagttcatcaagctgttcggcatggcgaagatcgacaacctgctccaggagatgctgctgggcgggtccccgagcgacgcgccccacgcccaccaccccctccacccccacctgatgcaggagcacatgggcaccaacgtgatcgtcgccaacaccatgccgacgcacctgtccaacgggcagatgtgcgagtggccccgcccccggggccaggccgccacccccgagaccccgcagcccagcccgcccgggggctccggcagcgagccctacaagctgctccccggggccgtggccaccatcgtgaagcccctgtccgccatcccccagccgacgatcaccaagcaggaggtcatctga

SEQ ID NO: 274 - RNA, 1425 nt, synthetic construct
  misc_feature 1..1425: note = CDS (opt1) from Homo sapiens__NP_000448.3__HNF4A(1-474)(S148E)
  source 1..1425: mol_type = other RNA
atgcgcctgagcaagaccctcgtggacatggacatggccgactactccgccgcgctggaccccgcctacaccacgctggagttcgagaacgtccaggtgctcaccatgggcaacgacaccagcccgtccgaggggaccaacctgaacgcccccaacagcctgggcgtgtccgccctctgcgccatctgcggggaccgggcgacgggcaagcactacggggccagctcctgcgacggctgcaagggcttcttccgccggagcgtccgcaagaaccacatgtactcctgccggttcagccgccagtgcgtggtggacaaggacaagcggaaccagtgccgctactgccggctgaagaagtgcttccgcgccgggatgaagaaggaggccgtccagaacgagcgggaccgcatctccacccggcgcagctcctacgaggacagcgagctgcccagcatcaacgcgctcctgcaggccgaggtgctgtcccggcagatcaccagccccgtgtccggcatcaacggggacatccgcgccaagaagatcgccagcatcgccgacgtctgcgagagcatgaaggagcagctcctggtgctggtggagtgggcgaagtacatcccggccttctgcgagctccccctggacgaccaggtcgccctgctccgggcccacgccggcgagcacctcctgctgggggcgaccaagcgctccatggtgttcaaggacgtgctgctgctcggcaacgactacatcgtcccccggcactgccccgagctggccgagatgagccgcgtgtccatccggatcctggacgagctcgtgctgccgttccaggagctgcagatcgacgacaacgagtacgcctacctcaaggccatcatcttcttcgaccccgacgccaagggcctgagcgaccccgggaagatcaagcgcctgcgctcccaggtccaggtgagcctcgaggactacatcaacgaccggcagtacgactcccgcggccggttcggggagctgctgctcctgctgcccacgctccagagcatcacctggcagatgatcgagcagatccagttcatcaagctgttcggcatggcgaagatcgacaacctgctccaggagatgctgctgggcgggtccccgagcgacgcgccccacgcccaccaccccctccacccccacctgatgcaggagcacatgggcaccaacgtgatcgtcgccaacaccatgccgacgcacctgtccaacgggcagatgtgcgagtggccccgcccccggggccaggccgccacccccgagaccccgcagcccagcccgcccgggggctccggcagcgagccctacaagctgctccccggggccgtggccaccatcgtgaagcccctgtccgccatcccccagccgacgatcaccaagcaggaggtcatctga

SEQ ID NO: 275 - RNA, 1425 nt, synthetic construct
  misc_feature 1..1425: note = CDS (opt1) from Homo sapiens__NP_000448.3__HNF4A(1-474)(S183A)
  source 1..1425: mol_type = other RNA
atgcgcctgagcaagaccctcgtggacatggacatggccgactactccgccgcgctggaccccgcctacaccacgctggagttcgagaacgtccaggtgctcaccatgggcaacgacaccagcccgtccgaggggaccaacctgaacgcccccaacagcctgggcgtgtccgccctctgcgccatctgcggggaccgggcgacgggcaagcactacggggccagctcctgcgacggctgcaagggcttcttccgccggagcgtccgcaagaaccacatgtactcctgccggttcagccgccagtgcgtggtggacaaggacaagcggaaccagtgccgctactgccggctgaagaagtgcttccgcgccgggatgaagaaggaggccgtccagaacgagcgggaccgcatctccacccggcgcagctcctacgaggacagctccctgcccagcatcaacgcgctcctgcaggccgaggtgctgtcccggcagatcaccagccccgtgtccggcatcaacggggacatccgcgccaagaagatcgccgcgatcgccgacgtctgcgagagcatgaaggagcagctcctggtgctggtggagtgggcgaagtacatcccggccttctgcgagctccccctggacgaccaggtcgccctgctccgggcccacgccggcgagcacctcctgctgggggcgaccaagcgctccatggtgttcaaggacgtgctgctgctcggcaacgactacatcgtcccccggcactgccccgagctggccgagatgagccgcgtgtccatccggatcctggacgagctcgtgctgccgttccaggagctgcagatcgacgacaacgagtacgcctacctcaaggccatcatcttcttcgaccccgacgccaagggcctgagcgaccccgggaagatcaagcgcctgcgctcccaggtccaggtgagcctcgaggactacatcaacgaccggcagtacgactcccgcggccggttcggggagctgctgctcctgctgcccacgctccagagcatcacctggcagatgatcgagcagatccagttcatcaagctgttcggcatggcgaagatcgacaacctgctccaggagatgctgctgggcgggtccccgagcgacgcgccccacgcccaccaccccctccacccccacctgatgcaggagcacatgggcaccaacgtgatcgtcgccaacaccatgccgacgcacctgtccaacgggcagatgtgcgagtggccccgcccccggggccaggccgccacccccgagaccccgcagcccagcccgcccgggggctccggcagcgagccctacaagctgctccccggggccgtggccaccatcgtgaagcccctgtccgccatcccccagccgacgatcaccaagcaggaggtcatctga

SEQ ID NO: 276 - RNA, 1425 nt, synthetic construct
  misc_feature 1..1425: note = CDS (opt1) from Homo sapiens__NP_000448.3__HNF4A(1-474)(S183E)
  source 1..1425: mol_type = other RNA
atgcgcctgagcaagaccctcgtggacatggacatggccgactactccgccgcgctggaccccgcctacaccacgctggagttcgagaacgtccaggtgctcaccatgggcaacgacaccagcccgtccgaggggaccaacctgaacgcccccaacagcctgggcgtgtccgccctctgcgccatctgcggggaccgggcgacgggcaagcactacggggccagctcctgcgacggctgcaagggcttcttccgccggagcgtccgcaagaaccacatgtactcctgccggttcagccgccagtgcgtggtggacaaggacaagcggaaccagtgccgctactgccggctgaagaagtgcttccgcgccgggatgaagaaggaggccgtccagaacgagcgggaccgcatctccacccggcgcagctcctacgaggacagctccctgcccagcatcaacgcgctcctgcaggccgaggtgctgtcccggcagatcaccagccccgtgtccggcatcaacggggacatccgcgccaagaagatcgccgagatcgccgacgtctgcgagagcatgaaggagcagctcctggtgctggtggagtgggcgaagtacatcccggccttctgcgagctccccctggacgaccaggtcgccctgctccgggcccacgccggcgagcacctcctgctgggggcgaccaagcgctccatggtgttcaaggacgtgctgctgctcggcaacgactacatcgtcccccggcactgccccgagctggccgagatgagccgcgtgtccatccggatcctggacgagctcgtgctgccgttccaggagctgcagatcgacgacaacgagtacgcctacctcaaggccatcatcttcttcgaccccgacgccaagggcctgagcgaccccgggaagatcaagcgcctgcgctcccaggtccaggtgagcctcgaggactacatcaacgaccggcagtacgactcccgcggccggttcggggagctgctgctcctgctgcccacgctccagagcatcacctggcagatgatcgagcagatccagttcatcaagctgttcggcatggcgaagatcgacaacctgctccaggagatgctgctgggcgggtccccgagcgacgcgccccacgcccaccaccccctccacccccacctgatgcaggagcacatgggcaccaacgtgatcgtcgccaacaccatgccgacgcacctgtccaacgggcagatgtgcgagtggccccgcccccggggccaggccgccacccccgagaccccgcagcccagcccgcccgggggctccggcagcgagccctacaagctgctccccggggccgtggccaccatcgtgaagcccctgtccgccatcccccagccgacgatcaccaagcaggaggtcatctga

SEQ ID NO: 277 - RNA, 1425 nt, synthetic construct
  misc_feature 1..1425: note = CDS (opt1) from Homo sapiens__NP_000448.3__HNF4A(1-474)(S461A)
  source 1..1425: mol_type = other RNA
atgcgcctgagcaagaccctcgtggacatggacatggccgactactccgccgcgctggaccccgcctacaccacgctggagttcgagaacgtccaggtgctcaccatgggcaacgacaccagcccgtccgaggggaccaacctgaacgcccccaacagcctgggcgtgtccgccctctgcgccatctgcggggaccgggcgacgggcaagcactacggggccagctcctgcgacggctgcaagggcttcttccgccggagcgtccgcaagaaccacatgtactcctgccggttcagccgccagtgcgtggtggacaaggacaagcggaaccagtgccgctactgccggctgaagaagtgcttccgcgccgggatgaagaaggaggccgtccagaacgagcgggaccgcatctccacccggcgcagctcctacgaggacagctccctgcccagcatcaacgcgctcctgcaggccgaggtgctgtcccggcagatcaccagccccgtgtccggcatcaacggggacatccgcgccaagaagatcgccagcatcgccgacgtctgcgagagcatgaaggagcagctcctggtgctggtggagtgggcgaagtacatcccggccttctgcgagctccccctggacgaccaggtcgccctgctccgggcccacgccggcgagcacctcctgctgggggcgaccaagcgctccatggtgttcaaggacgtgctgctgctcggcaacgactacatcgtcccccggcactgccccgagctggccgagatgagccgcgtgtccatccggatcctggacgagctcgtgctgccgttccaggagctgcagatcgacgacaacgagtacgcctacctcaaggccatcatcttcttcgaccccgacgccaagggcctgagcgaccccgggaagatcaagcgcctgcgctcccaggtccaggtgagcctcgaggactacatcaacgaccggcagtacgactcccgcggccggttcggggagctgctgctcctgctgcccacgctccagagcatcacctggcagatgatcgagcagatccagttcatcaagctgttcggcatggcgaagatcgacaacctgctccaggagatgctgctgggcgggtccccgagcgacgcgccccacgcccaccaccccctccacccccacctgatgcaggagcacatgggcaccaacgtgatcgtcgccaacaccatgccgacgcacctgtccaacgggcagatgtgcgagtggccccgcccccggggccaggccgccacccccgagaccccgcagcccagcccgcccgggggctccggcagcgagccctacaagctgctccccggggccgtggccaccatcgtgaagcccctggcggccatcccccagccgacgatcaccaagcaggaggtcatctga

SEQ ID NO: 278 - RNA, 1425 nt, synthetic construct
  misc_feature 1..1425: note = CDS (opt1) from Homo sapiens__NP_000448.3__HNF4A(1-474)(S461E)
  source 1..1425: mol_type = other RNA
atgcgcctgagcaagaccctcgtggacatggacatggccgactactccgccgcgctggaccccgcctacaccacgctggagttcgagaacgtccaggtgctcaccatgggcaacgacaccagcccgtccgaggggaccaacctgaacgcccccaacagcctgggcgtgtccgccctctgcgccatctgcggggaccgggcgacgggcaagcactacggggccagctcctgcgacggctgcaagggcttcttccgccggagcgtccgcaagaaccacatgtactcctgccggttcagccgccagtgcgtggtggacaaggacaagcggaaccagtgccgctactgccggctgaagaagtgcttccgcgccgggatgaagaaggaggccgtccagaacgagcgggaccgcatctccacccggcgcagctcctacgaggacagctccctgcccagcatcaacgcgctcctgcaggccgaggtgctgtcccggcagatcaccagccccgtgtccggcatcaacggggacatccgcgccaagaagatcgccagcatcgccgacgtctgcgagagcatgaaggagcagctcctggtgctggtggagtgggcgaagtacatcccggccttctgcgagctccccctggacgaccaggtcgccctgctccgggcccacgccggcgagcacctcctgctgggggcgaccaagcgctccatggtgttcaaggacgtgctgctgctcggcaacgactacatcgtcccccggcactgccccgagctggccgagatgagccgcgtgtccatccggatcctggacgagctcgtgctgccgttccaggagctgcagatcgacgacaacgagtacgcctacctcaaggccatcatcttcttcgaccccgacgccaagggcctgagcgaccccgggaagatcaagcgcctgcgctcccaggtccaggtgagcctcgaggactacatcaacgaccggcagtacgactcccgcggccggttcggggagctgctgctcctgctgcccacgctccagagcatcacctggcagatgatcgagcagatccagttcatcaagctgttcggcatggcgaagatcgacaacctgctccaggagatgctgctgggcgggtccccgagcgacgcgccccacgcccaccaccccctccacccccacctgatgcaggagcacatgggcaccaacgtgatcgtcgccaacaccatgccgacgcacctgtccaacgggcagatgtgcgagtggccccgcccccggggccaggccgccacccccgagaccccgcagcccagcccgcccgggggctccggcagcgagccctacaagctgctccccggggccgtggccaccatcgtgaagcccctggaggccatcccccagccgacgatcaccaagcaggaggtcatctga

SEQ ID NO: 279 - RNA, 1425 nt, synthetic construct
  misc_feature 1..1425: note = CDS (opt1) from Homo sapiens__NP_000448.3__HNF4A(1-474)(S142A_S143A_S313A)
  source 1..1425: mol_type = other RNA
atgcgcctgagcaagaccctcgtggacatggacatggccgactactccgccgcgctggaccccgcctacaccacgctggagttcgagaacgtccaggtgctcaccatgggcaacgacaccagcccgtccgaggggaccaacctgaacgcccccaacagcctgggcgtgtccgccctctgcgccatctgcggggaccgggcgacgggcaagcactacggggccagctcctgcgacggctgcaagggcttcttccgccggagcgtccgcaagaaccacatgtactcctgccggttcagccgccagtgcgtggtggacaaggacaagcggaaccagtgccgctactgccggctgaagaagtgcttccgcgccgggatgaagaaggaggccgtccagaacgagcgggaccgcatctccacccggcgcgcggcctacgaggacagctccctgcccagcatcaacgcgctcctgcaggccgaggtgctgtcccggcagatcaccagccccgtgtccggcatcaacggggacatccgcgccaagaagatcgccagcatcgccgacgtctgcgagagcatgaaggagcagctcctggtgctggtggagtgggcgaagtacatcccggccttctgcgagctccccctggacgaccaggtcgccctgctccgggcccacgccggcgagcacctcctgctgggggcgaccaagcgctccatggtgttcaaggacgtgctgctgctcggcaacgactacatcgtcccccggcactgccccgagctggccgagatgagccgcgtgtccatccggatcctggacgagctcgtgctgccgttccaggagctgcagatcgacgacaacgagtacgcctacctcaaggccatcatcttcttcgaccccgacgccaagggcctgagcgaccccgggaagatcaagcgcctgcgcgcgcaggtccaggtgagcctcgaggactacatcaacgaccggcagtacgactcccgcggccggttcggggagctgctgctcctgctgcccacgctccagagcatcacctggcagatgatcgagcagatccagttcatcaagctgttcggcatggcgaagatcgacaacctgctccaggagatgctgctgggcgggtccccgagcgacgcgccccacgcccaccaccccctccacccccacctgatgcaggagcacatgggcaccaacgtgatcgtcgccaacaccatgccgacgcacctgtccaacgggcagatgtgcgagtggccccgcccccggggccaggccgccacccccgagaccccgcagcccagcccgcccgggggctccggcagcgagccctacaagctgctccccggggccgtggccaccatcgtgaagcccctgtccgccatcccccagccgacgatcaccaagcaggaggtcatctga

SEQ ID NO: 280 - RNA, 1425 nt, synthetic construct
  misc_feature 1..1425: note = CDS (opt1) from Homo sapiens__NP_000448.3__HNF4A(1-474)(S142A_S143A_S313A_K458R)
  source 1..1425: mol_type = other RNA
atgcgcctgagcaagaccctcgtggacatggacatggccgactactccgccgcgctggaccccgcctacaccacgctggagttcgagaacgtccaggtgctcaccatgggcaacgacaccagcccgtccgaggggaccaacctgaacgcccccaacagcctgggcgtgtccgccctctgcgccatctgcggggaccgggcgacgggcaagcactacggggccagctcctgcgacggctgcaagggcttcttccgccggagcgtccgcaagaaccacatgtactcctgccggttcagccgccagtgcgtggtggacaaggacaagcggaaccagtgccgctactgccggctgaagaagtgcttccgcgccgggatgaagaaggaggccgtccagaacgagcgggaccgcatctccacccggcgcgcggcctacgaggacagctccctgcccagcatcaacgcgctcctgcaggccgaggtgctgtcccggcagatcaccagccccgtgtccggcatcaacggggacatccgcgccaagaagatcgccagcatcgccgacgtctgcgagagcatgaaggagcagctcctggtgctggtggagtgggcgaagtacatcccggccttctgcgagctccccctggacgaccaggtcgccctgctccgggcccacgccggcgagcacctcctgctgggggcgaccaagcgctccatggtgttcaaggacgtgctgctgctcggcaacgactacatcgtcccccggcactgccccgagctggccgagatgagccgcgtgtccatccggatcctggacgagctcgtgctgccgttccaggagctgcagatcgacgacaacgagtacgcctacctcaaggccatcatcttcttcgaccccgacgccaagggcctgagcgaccccgggaagatcaagcgcctgcgcgcgcaggtccaggtgagcctcgaggactacatcaacgaccggcagtacgactcccgcggccggttcggggagctgctgctcctgctgcccacgctccagagcatcacctggcagatgatcgagcagatccagttcatcaagctgttcggcatggcgaagatcgacaacctgctccaggagatgctgctgggcgggtccccgagcgacgcgccccacgcccaccaccccctccacccccacctgatgcaggagcacatgggcaccaacgtgatcgtcgccaacaccatgccgacgcacctgtccaacgggcagatgtgcgagtggccccgcccccggggccaggccgccacccccgagaccccgcagcccagcccgcccgggggctccggcagcgagccctacaagctgctccccggggccgtggccaccatcgtgcggcccctgtccgccatcccccagccgacgatcaccaagcaggaggtcatctga

SEQ ID NO: 281 - RNA, 1425 nt, synthetic construct
  misc_feature 1..1425: note = CDS (opt1) from Homo sapiens__NP_000448.3__HNF4A(1-474)(S142A_S143A_S167A_S313A_ S378A_T429A_T432A_S436A_K458R)
  source 1..1425: mol_type = other RNA
atgcgcctgagcaagaccctcgtggacatggacatggccgactactccgccgcgctggaccccgcctacaccacgctggagttcgagaacgtccaggtgctcaccatgggcaacgacaccagcccgtccgaggggaccaacctgaacgcccccaacagcctgggcgtgtccgccctctgcgccatctgcggggaccgggcgacgggcaagcactacggggccagctcctgcgacggctgcaagggcttcttccgccggagcgtccgcaagaaccacatgtactcctgccggttcagccgccagtgcgtggtggacaaggacaagcggaaccagtgccgctactgccggctgaagaagtgcttccgcgccgggatgaagaaggaggccgtccagaacgagcgggaccgcatctccacccggcgcgcggcctacgaggacagctccctgcccagcatcaacgcgctcctgcaggccgaggtgctgtcccggcagatcaccgcgcccgtgtccggcatcaacggggacatccgcgccaagaagatcgccagcatcgccgacgtctgcgagagcatgaaggagcagctcctggtgctggtggagtgggcgaagtacatcccggccttctgcgagctccccctggacgaccaggtcgccctgctccgggcccacgccggcgagcacctcctgctgggggcgaccaagcgctccatggtgttcaaggacgtgctgctgctcggcaacgactacatcgtcccccggcactgccccgagctggccgagatgagccgcgtgtccatccggatcctggacgagctcgtgctgccgttccaggagctgcagatcgacgacaacgagtacgcctacctcaaggccatcatcttcttcgaccccgacgccaagggcctgagcgaccccgggaagatcaagcgcctgcgcgcgcaggtccaggtgagcctcgaggactacatcaacgaccggcagtacgactcccgcggccggttcggggagctgctgctcctgctgcccacgctccagagcatcacctggcagatgatcgagcagatccagttcatcaagctgttcggcatggcgaagatcgacaacctgctccaggagatgctgctgggcggggcgccgagcgacgcgccccacgcccaccaccccctccacccccacctgatgcaggagcacatgggcaccaacgtgatcgtcgccaacaccatgccgacgcacctgtccaacgggcagatgtgcgagtggccccgcccccggggccaggccgccgcgcccgaggcgccgcagcccgcgccgcccgggggctccggcagcgagccctacaagctgctccccggggccgtggccaccatcgtgcggcccctgtccgccatcccccagccgacgatcaccaagcaggaggtcatctga

SEQ ID NO: 282 - RNA, 1425 nt, synthetic construct
  misc_feature 1..1425: note = CDS (opt1) from Homo sapiens__NP_000448.3__HNF4A(1-474)(S142A_S143A_S148A_S167A_ S313A_S378A_T429A_T432A_S436A_K458R)
  source 1..1425: mol_type = other RNA
atgcgcctgagcaagaccctcgtggacatggacatggccgactactccgccgcgctggaccccgcctacaccacgctggagttcgagaacgtccaggtgctcaccatgggcaacgacaccagcccgtccgaggggaccaacctgaacgcccccaacagcctgggcgtgtccgccctctgcgccatctgcggggaccgggcgacgggcaagcactacggggccagctcctgcgacggctgcaagggcttcttccgccggagcgtccgcaagaaccacatgtactcctgccggttcagccgccagtgcgtggtggacaaggacaagcggaaccagtgccgctactgccggctgaagaagtgcttccgcgccgggatgaagaaggaggccgtccagaacgagcgggaccgcatctccacccggcgcgcggcctacgaggacagcgcgctgcccagcatcaacgcgctcctgcaggccgaggtgctgtcccggcagatcaccgcgcccgtgtccggcatcaacggggacatccgcgccaagaagatcgccagcatcgccgacgtctgcgagagcatgaaggagcagctcctggtgctggtggagtgggcgaagtacatcccggccttctgcgagctccccctggacgaccaggtcgccctgctccgggcccacgccggcgagcacctcctgctgggggcgaccaagcgctccatggtgttcaaggacgtgctgctgctcggcaacgactacatcgtcccccggcactgccccgagctggccgagatgagccgcgtgtccatccggatcctggacgagctcgtgctgccgttccaggagctgcagatcgacgacaacgagtacgcctacctcaaggccatcatcttcttcgaccccgacgccaagggcctgagcgaccccgggaagatcaagcgcctgcgcgcgcaggtccaggtgagcctcgaggactacatcaacgaccggcagtacgactcccgcggccggttcggggagctgctgctcctgctgcccacgctccagagcatcacctggcagatgatcgagcagatccagttcatcaagctgttcggcatggcgaagatcgacaacctgctccaggagatgctgctgggcggggcgccgagcgacgcgccccacgcccaccaccccctccacccccacctgatgcaggagcacatgggcaccaacgtgatcgtcgccaacaccatgccgacgcacctgtccaacgggcagatgtgcgagtggccccgcccccggggccaggccgccgcgcccgaggcgccgcagcccgcgccgcccgggggctccggcagcgagccctacaagctgctccccggggccgtggccaccatcgtgcggcccctgtccgccatcccccagccgacgatcaccaagcaggaggtcatctga

SEQ ID NO: 283 - RNA, 1425 nt, synthetic construct
  misc_feature 1..1425: note = CDS (opt1) from Homo sapiens__NP_000448.3__HNF4A(1-474)(K106R_K108R_K126R_K127R_ S142A_S143A_S148A_S167A_S313A_S378A_T429A_T432A_S436A_K458R )
  source 1..1425: mol_type = other RNA
atgcgcctgagcaagaccctcgtggacatggacatggccgactactccgccgcgctggaccccgcctacaccacgctggagttcgagaacgtccaggtgctcaccatgggcaacgacaccagcccgtccgaggggaccaacctgaacgcccccaacagcctgggcgtgtccgccctctgcgccatctgcggggaccgggcgacgggcaagcactacggggccagctcctgcgacggctgcaagggcttcttccgccggagcgtccgcaagaaccacatgtactcctgccggttcagccgccagtgcgtggtggaccgcgaccggcggaaccagtgccgctactgccggctgaagaagtgcttccgcgccgggatgcgccgcgaggccgtccagaacgagcgggaccgcatctccacccggcgcgcggcctacgaggacagcgcgctgcccagcatcaacgcgctcctgcaggccgaggtgctgtcccggcagatcaccgcgcccgtgtccggcatcaacggggacatccgcgccaagaagatcgccagcatcgccgacgtctgcgagagcatgaaggagcagctcctggtgctggtggagtgggcgaagtacatcccggccttctgcgagctccccctggacgaccaggtcgccctgctccgggcccacgccggcgagcacctcctgctgggggcgaccaagcgctccatggtgttcaaggacgtgctgctgctcggcaacgactacatcgtcccccggcactgccccgagctggccgagatgagccgcgtgtccatccggatcctggacgagctcgtgctgccgttccaggagctgcagatcgacgacaacgagtacgcctacctcaaggccatcatcttcttcgaccccgacgccaagggcctgagcgaccccgggaagatcaagcgcctgcgcgcgcaggtccaggtgagcctcgaggactacatcaacgaccggcagtacgactcccgcggccggttcggggagctgctgctcctgctgcccacgctccagagcatcacctggcagatgatcgagcagatccagttcatcaagctgttcggcatggcgaagatcgacaacctgctccaggagatgctgctgggcggggcgccgagcgacgcgccccacgcccaccaccccctccacccccacctgatgcaggagcacatgggcaccaacgtgatcgtcgccaacaccatgccgacgcacctgtccaacgggcagatgtgcgagtggccccgcccccggggccaggccgccgcgcccgaggcgccgcagcccgcgccgcccgggggctccggcagcgagccctacaagctgctccccggggccgtggccaccatcgtgcggcccctgtccgccatcccccagccgacgatcaccaagcaggaggtcatctga

SEQ ID NO: 284 - RNA, 1425 nt, synthetic construct
  misc_feature 1..1425: note = CDS (opt1) from Homo sapiens__NP_000448.3__HNF4A(1-474)(S142A_S143A_S148A_T166A_ S167A_S313A_S378A_T429A_T432A_S436A_K458R)
  source 1..1425: mol_type = other RNA
atgcgcctgagcaagaccctcgtggacatggacatggccgactactccgccgcgctggaccccgcctacaccacgctggagttcgagaacgtccaggtgctcaccatgggcaacgacaccagcccgtccgaggggaccaacctgaacgcccccaacagcctgggcgtgtccgccctctgcgccatctgcggggaccgggcgacgggcaagcactacggggccagctcctgcgacggctgcaagggcttcttccgccggagcgtccgcaagaaccacatgtactcctgccggttcagccgccagtgcgtggtggacaaggacaagcggaaccagtgccgctactgccggctgaagaagtgcttccgcgccgggatgaagaaggaggccgtccagaacgagcgggaccgcatctccacccggcgcgcggcctacgaggacagcgcgctgcccagcatcaacgcgctcctgcaggccgaggtgctgtcccggcagatcgcggcgcccgtgtccggcatcaacggggacatccgcgccaagaagatcgccagcatcgccgacgtctgcgagagcatgaaggagcagctcctggtgctggtggagtgggcgaagtacatcccggccttctgcgagctccccctggacgaccaggtcgccctgctccgggcccacgccggcgagcacctcctgctgggggcgaccaagcgctccatggtgttcaaggacgtgctgctgctcggcaacgactacatcgtcccccggcactgccccgagctggccgagatgagccgcgtgtccatccggatcctggacgagctcgtgctgccgttccaggagctgcagatcgacgacaacgagtacgcctacctcaaggccatcatcttcttcgaccccgacgccaagggcctgagcgaccccgggaagatcaagcgcctgcgcgcgcaggtccaggtgagcctcgaggactacatcaacgaccggcagtacgactcccgcggccggttcggggagctgctgctcctgctgcccacgctccagagcatcacctggcagatgatcgagcagatccagttcatcaagctgttcggcatggcgaagatcgacaacctgctccaggagatgctgctgggcggggcgccgagcgacgcgccccacgcccaccaccccctccacccccacctgatgcaggagcacatgggcaccaacgtgatcgtcgccaacaccatgccgacgcacctgtccaacgggcagatgtgcgagtggccccgcccccggggccaggccgccgcgcccgaggcgccgcagcccgcgccgcccgggggctccggcagcgagccctacaagctgctccccggggccgtggccaccatcgtgcggcccctgtccgccatcccccagccgacgatcaccaagcaggaggtcatctga

SEQ ID NO: 285 - RNA, 1425 nt, synthetic construct
  misc_feature 1..1425: note = CDS (opt1) from Homo sapiens__NP_000448.3__HNF4A(1-474)(S87A_S142A_S143A_S148A_T 166A_S167A_S313A_S378A_T429A_T432A_S436A_K458R)
  source 1..1425: mol_type = other RNA
atgcgcctgagcaagaccctcgtggacatggacatggccgactactccgccgcgctggaccccgcctacaccacgctggagttcgagaacgtccaggtgctcaccatgggcaacgacaccagcccgtccgaggggaccaacctgaacgcccccaacagcctgggcgtgtccgccctctgcgccatctgcggggaccgggcgacgggcaagcactacggggccagctcctgcgacggctgcaagggcttcttccgccgggcggtccgcaagaaccacatgtactcctgccggttcagccgccagtgcgtggtggacaaggacaagcggaaccagtgccgctactgccggctgaagaagtgcttccgcgccgggatgaagaaggaggccgtccagaacgagcgggaccgcatctccacccggcgcgcggcctacgaggacagcgcgctgcccagcatcaacgcgctcctgcaggccgaggtgctgtcccggcagatcgcggcgcccgtgtccggcatcaacggggacatccgcgccaagaagatcgccagcatcgccgacgtctgcgagagcatgaaggagcagctcctggtgctggtggagtgggcgaagtacatcccggccttctgcgagctccccctggacgaccaggtcgccctgctccgggcccacgccggcgagcacctcctgctgggggcgaccaagcgctccatggtgttcaaggacgtgctgctgctcggcaacgactacatcgtcccccggcactgccccgagctggccgagatgagccgcgtgtccatccggatcctggacgagctcgtgctgccgttccaggagctgcagatcgacgacaacgagtacgcctacctcaaggccatcatcttcttcgaccccgacgccaagggcctgagcgaccccgggaagatcaagcgcctgcgcgcgcaggtccaggtgagcctcgaggactacatcaacgaccggcagtacgactcccgcggccggttcggggagctgctgctcctgctgcccacgctccagagcatcacctggcagatgatcgagcagatccagttcatcaagctgttcggcatggcgaagatcgacaacctgctccaggagatgctgctgggcggggcgccgagcgacgcgccccacgcccaccaccccctccacccccacctgatgcaggagcacatgggcaccaacgtgatcgtcgccaacaccatgccgacgcacctgtccaacgggcagatgtgcgagtggccccgcccccggggccaggccgccgcgcccgaggcgccgcagcccgcgccgcccgggggctccggcagcgagccctacaagctgctccccggggccgtggccaccatcgtgcggcccctgtccgccatcccccagccgacgatcaccaagcaggaggtcatctga

SEQ ID NO: 286 - RNA, 1425 nt, synthetic construct
  misc_feature 1..1425: note = CDS (opt1) from Homo sapiens__NP_000448.3__HNF4A(1-474)(S87A_K106R_K108R_K126R_K 127R_S142A_S143A_S148A_T166A_S167A_S313A_S378A_T429A_T432A_ S436A_K458R)
  source 1..1425: mol_type = other RNA
atgcgcctgagcaagaccctcgtggacatggacatggccgactactccgccgcgctggaccccgcctacaccacgctggagttcgagaacgtccaggtgctcaccatgggcaacgacaccagcccgtccgaggggaccaacctgaacgcccccaacagcctgggcgtgtccgccctctgcgccatctgcggggaccgggcgacgggcaagcactacggggccagctcctgcgacggctgcaagggcttcttccgccgggcggtccgcaagaaccacatgtactcctgccggttcagccgccagtgcgtggtggaccgcgaccggcggaaccagtgccgctactgccggctgaagaagtgcttccgcgccgggatgcgccgcgaggccgtccagaacgagcgggaccgcatctccacccggcgcgcggcctacgaggacagcgcgctgcccagcatcaacgcgctcctgcaggccgaggtgctgtcccggcagatcgcggcgcccgtgtccggcatcaacggggacatccgcgccaagaagatcgccagcatcgccgacgtctgcgagagcatgaaggagcagctcctggtgctggtggagtgggcgaagtacatcccggccttctgcgagctccccctggacgaccaggtcgccctgctccgggcccacgccggcgagcacctcctgctgggggcgaccaagcgctccatggtgttcaaggacgtgctgctgctcggcaacgactacatcgtcccccggcactgccccgagctggccgagatgagccgcgtgtccatccggatcctggacgagctcgtgctgccgttccaggagctgcagatcgacgacaacgagtacgcctacctcaaggccatcatcttcttcgaccccgacgccaagggcctgagcgaccccgggaagatcaagcgcctgcgcgcgcaggtccaggtgagcctcgaggactacatcaacgaccggcagtacgactcccgcggccggttcggggagctgctgctcctgctgcccacgctccagagcatcacctggcagatgatcgagcagatccagttcatcaagctgttcggcatggcgaagatcgacaacctgctccaggagatgctgctgggcggggcgccgagcgacgcgccccacgcccaccaccccctccacccccacctgatgcaggagcacatgggcaccaacgtgatcgtcgccaacaccatgccgacgcacctgtccaacgggcagatgtgcgagtggccccgcccccggggccaggccgccgcgcccgaggcgccgcagcccgcgccgcccgggggctccggcagcgagccctacaagctgctccccggggccgtggccaccatcgtgcggcccctgtccgccatcccccagccgacgatcaccaagcaggaggtcatctga

SEQ ID NO: 287 - RNA, 1425 nt, synthetic construct
  misc_feature 1..1425: note = CDS (opt1) from Homo sapiens__NP_000448.3__HNF4A(1-474)(S87A_K106R_K108R_K126R_K 127R)
  source 1..1425: mol_type = other RNA
atgcgcctgagcaagaccctcgtggacatggacatggccgactactccgccgcgctggaccccgcctacaccacgctggagttcgagaacgtccaggtgctcaccatgggcaacgacaccagcccgtccgaggggaccaacctgaacgcccccaacagcctgggcgtgtccgccctctgcgccatctgcggggaccgggcgacgggcaagcactacggggccagctcctgcgacggctgcaagggcttcttccgccgggcggtccgcaagaaccacatgtactcctgccggttcagccgccagtgcgtggtggaccgcgaccggcggaaccagtgccgctactgccggctgaagaagtgcttccgcgccgggatgcgccgggaggccgtccagaacgagcgggaccgcatctccacccggcgcagctcctacgaggacagctccctgcccagcatcaacgcgctcctgcaggccgaggtgctgtcccggcagatcaccagccccgtgtccggcatcaacggggacatccgcgccaagaagatcgccagcatcgccgacgtctgcgagagcatgaaggagcagctcctggtgctggtggagtgggcgaagtacatcccggccttctgcgagctccccctggacgaccaggtcgccctgctccgggcccacgccggcgagcacctcctgctgggggcgaccaagcgctccatggtgttcaaggacgtgctgctgctcggcaacgactacatcgtcccccggcactgccccgagctggccgagatgagccgcgtgtccatccggatcctggacgagctcgtgctgccgttccaggagctgcagatcgacgacaacgagtacgcctacctcaaggccatcatcttcttcgaccccgacgccaagggcctgagcgaccccgggaagatcaagcgcctgcgctcccaggtccaggtgagcctcgaggactacatcaacgaccggcagtacgactcccgcggccggttcggggagctgctgctcctgctgcccacgctccagagcatcacctggcagatgatcgagcagatccagttcatcaagctgttcggcatggcgaagatcgacaacctgctccaggagatgctgctgggcgggtccccgagcgacgcgccccacgcccaccaccccctccacccccacctgatgcaggagcacatgggcaccaacgtgatcgtcgccaacaccatgccgacgcacctgtccaacgggcagatgtgcgagtggccccgcccccggggccaggccgccacccccgagaccccgcagcccagcccgcccgggggctccggcagcgagccctacaagctgctccccggggccgtggccaccatcgtgaagcccctgtccgccatcccccagccgacgatcaccaagcaggaggtcatctga

SEQ ID NO: 288 - RNA, 1425 nt, synthetic construct
  misc_feature 1..1425: note = CDS (opt1) from Homo sapiens__NP_000448.3__HNF4A(1-474)(S87A_K106R_K108R_K126R_K 127R_S142A_S143A_S148A_T166A_S167A_S313A_S378A_T429A_T432A_ S436A_K458R_S461A)
  source 1..1425: mol_type = other RNA
atgcgcctgagcaagaccctcgtggacatggacatggccgactactccgccgcgctggaccccgcctacaccacgctggagttcgagaacgtccaggtgctcaccatgggcaacgacaccagcccgtccgaggggaccaacctgaacgcccccaacagcctgggcgtgtccgccctctgcgccatctgcggggaccgggcgacgggcaagcactacggggccagctcctgcgacggctgcaagggcttcttccgccgggcggtccgcaagaaccacatgtactcctgccggttcagccgccagtgcgtggtggaccgcgaccggcggaaccagtgccgctactgccggctgaagaagtgcttccgcgccgggatgcgccgggaggccgtccagaacgagcgggaccgcatctccacccggcgcgccgcctacgaggacagcgccctgcccagcatcaacgcgctcctgcaggccgaggtgctgtcccggcagatcgccgcgcccgtgtccggcatcaacggggacatccgcgccaagaagatcgccagcatcgccgacgtctgcgagagcatgaaggagcagctcctggtgctggtggagtgggcgaagtacatcccggccttctgcgagctccccctggacgaccaggtcgccctgctccgggcccacgccggcgagcacctcctgctgggggcgaccaagcgctccatggtgttcaaggacgtgctgctgctcggcaacgactacatcgtcccccggcactgccccgagctggccgagatgagccgcgtgtccatccggatcctggacgagctcgtgctgccgttccaggagctgcagatcgacgacaacgagtacgcctacctcaaggccatcatcttcttcgaccccgacgccaagggcctgagcgaccccgggaagatcaagcgcctgcgcgcccaggtccaggtgagcctcgaggactacatcaacgaccggcagtacgactcccgcggccggttcggggagctgctgctcctgctgcccacgctccagagcatcacctggcagatgatcgagcagatccagttcatcaagctgttcggcatggcgaagatcgacaacctgctccaggagatgctgctgggcggggccccgagcgacgcgccccacgcccaccaccccctccacccccacctgatgcaggagcacatgggcaccaacgtgatcgtcgccaacaccatgccgacgcacctgtccaacgggcagatgtgcgagtggccccgcccccggggccaggccgccgcccccgaggccccgcagcccgcgccgcccgggggctccggcagcgagccctacaagctgctccccggggccgtggccaccatcgtgcggcccctggccgccatcccccagccgacgatcaccaagcaggaggtcatctga

SEQ ID NO: 289 - RNA, 1425 nt, synthetic construct
  misc_feature 1..1425: note = CDS (opt1) from Homo sapiens__NP_000448.3__HNF4A(1-474)(S87A_K106R_K108R_K126R_K 127R_S142A_S143A_S148A_T166A_S167A_S313A_S378A_T429A_T432A_ S436A_K458R_S461E)
  source 1..1425: mol_type = other RNA
atgcgcctgagcaagaccctcgtggacatggacatggccgactactccgccgcgctggaccccgcctacaccacgctggagttcgagaacgtccaggtgctcaccatgggcaacgacaccagcccgtccgaggggaccaacctgaacgcccccaacagcctgggcgtgtccgccctctgcgccatctgcggggaccgggcgacgggcaagcactacggggccagctcctgcgacggctgcaagggcttcttccgccgggcggtccgcaagaaccacatgtactcctgccggttcagccgccagtgcgtggtggaccgcgaccggcggaaccagtgccgctactgccggctgaagaagtgcttccgcgccgggatgcgccgggaggccgtccagaacgagcgggaccgcatctccacccggcgcgccgcctacgaggacagcgccctgcccagcatcaacgcgctcctgcaggccgaggtgctgtcccggcagatcgccgcgcccgtgtccggcatcaacggggacatccgcgccaagaagatcgccagcatcgccgacgtctgcgagagcatgaaggagcagctcctggtgctggtggagtgggcgaagtacatcccggccttctgcgagctccccctggacgaccaggtcgccctgctccgggcccacgccggcgagcacctcctgctgggggcgaccaagcgctccatggtgttcaaggacgtgctgctgctcggcaacgactacatcgtcccccggcactgccccgagctggccgagatgagccgcgtgtccatccggatcctggacgagctcgtgctgccgttccaggagctgcagatcgacgacaacgagtacgcctacctcaaggccatcatcttcttcgaccccgacgccaagggcctgagcgaccccgggaagatcaagcgcctgcgcgcccaggtccaggtgagcctcgaggactacatcaacgaccggcagtacgactcccgcggccggttcggggagctgctgctcctgctgcccacgctccagagcatcacctggcagatgatcgagcagatccagttcatcaagctgttcggcatggcgaagatcgacaacctgctccaggagatgctgctgggcggggccccgagcgacgcgccccacgcccaccaccccctccacccccacctgatgcaggagcacatgggcaccaacgtgatcgtcgccaacaccatgccgacgcacctgtccaacgggcagatgtgcgagtggccccgcccccggggccaggccgccgcccccgaggccccgcagcccgcgccgcccgggggctccggcagcgagccctacaagctgctccccggggccgtggccaccatcgtgcggcccctggaggccatcccccagccgacgatcaccaagcaggaggtcatctga

SEQ ID NO: 290 - RNA, 1425 nt, synthetic construct
  misc_feature 1..1425: note = CDS (opt1) from Homo sapiens__NP_000448.3__HNF4A(1-474)(S87A_K106R_K108R_K126R_K 127R_S142A_S143A_S148E_T166A_S167E_S313A_S378E_T429E_T432E_ S436E_K458R_S461E)
  source 1..1425: mol_type = other RNA
atgcgcctgagcaagaccctcgtggacatggacatggccgactactccgccgcgctggaccccgcctacaccacgctggagttcgagaacgtccaggtgctcaccatgggcaacgacaccagcccgtccgaggggaccaacctgaacgcccccaacagcctgggcgtgtccgccctctgcgccatctgcggggaccgggcgacgggcaagcactacggggccagctcctgcgacggctgcaagggcttcttccgccgggcggtccgcaagaaccacatgtactcctgccggttcagccgccagtgcgtggtggaccgcgaccggcggaaccagtgccgctactgccggctgaagaagtgcttccgcgccgggatgcgccgggaggccgtccagaacgagcgggaccgcatctccacccggcgcgccgcctacgaggacagcgagctgcccagcatcaacgcgctcctgcaggccgaggtgctgtcccggcagatcgccgagcccgtgtccggcatcaacggggacatccgcgccaagaagatcgccagcatcgccgacgtctgcgagagcatgaaggagcagctcctggtgctggtggagtgggcgaagtacatcccggccttctgcgagctccccctggacgaccaggtcgccctgctccgggcccacgccggcgagcacctcctgctgggggcgaccaagcgctccatggtgttcaaggacgtgctgctgctcggcaacgactacatcgtcccccggcactgccccgagctggccgagatgagccgcgtgtccatccggatcctggacgagctcgtgctgccgttccaggagctgcagatcgacgacaacgagtacgcctacctcaaggccatcatcttcttcgaccccgacgccaagggcctgagcgaccccgggaagatcaagcgcctgcgcgcccaggtccaggtgagcctcgaggactacatcaacgaccggcagtacgactcccgcggccggttcggggagctgctgctcctgctgcccacgctccagagcatcacctggcagatgatcgagcagatccagttcatcaagctgttcggcatggcgaagatcgacaacctgctccaggagatgctgctgggcggggagccgagcgacgcgccccacgcccaccaccccctccacccccacctgatgcaggagcacatgggcaccaacgtgatcgtcgccaacaccatgccgacgcacctgtccaacgggcagatgtgcgagtggccccgcccccggggccaggccgccgagcccgaggagccgcagcccgagccgcccgggggctccggcagcgagccctacaagctgctccccggggccgtggccaccatcgtgcggcccctggaggccatcccccagccgacgatcaccaagcaggaggtcatctga

SEQ ID NO: 291 - RNA, 1425 nt, synthetic construct
  misc_feature 1..1425: note = CDS (opt1) from Homo sapiens__NP_000448.3__HNF4A(1-474)(S87A_K106R_K108R_K126R_K 127R_S142A_S143A_S148A_T166A_S167A_K179R_K180R_S313A_S378A_ T429A_T432A_S436A_K458R_S461E)
  source 1..1425: mol_type = other RNA
atgcgcctgagcaagaccctcgtggacatggacatggccgactactccgccgcgctggaccccgcctacaccacgctggagttcgagaacgtccaggtgctcaccatgggcaacgacaccagcccgtccgaggggaccaacctgaacgcccccaacagcctgggcgtgtccgccctctgcgccatctgcggggaccgggcgacgggcaagcactacggggccagctcctgcgacggctgcaagggcttcttccgccgggcggtccgcaagaaccacatgtactcctgccggttcagccgccagtgcgtggtggaccgcgaccggcggaaccagtgccgctactgccggctgaagaagtgcttccgcgccgggatgcgccgggaggccgtccagaacgagcgggaccgcatctccacccggcgcgccgcctacgaggacagcgccctgcccagcatcaacgcgctcctgcaggccgaggtgctgtcccggcagatcgccgcgcccgtgtccggcatcaacggggacatccgcgcccgccggatcgccagcatcgccgacgtctgcgagagcatgaaggagcagctcctggtgctggtggagtgggcgaagtacatcccggccttctgcgagctccccctggacgaccaggtcgccctgctccgggcccacgccggcgagcacctcctgctgggggcgaccaagcgctccatggtgttcaaggacgtgctgctgctcggcaacgactacatcgtcccccggcactgccccgagctggccgagatgagccgcgtgtccatccggatcctggacgagctcgtgctgccgttccaggagctgcagatcgacgacaacgagtacgcctacctcaaggccatcatcttcttcgaccccgacgccaagggcctgagcgaccccgggaagatcaagcgcctgcgcgcccaggtccaggtgagcctcgaggactacatcaacgaccggcagtacgactcccgcggccggttcggggagctgctgctcctgctgcccacgctccagagcatcacctggcagatgatcgagcagatccagttcatcaagctgttcggcatggcgaagatcgacaacctgctccaggagatgctgctgggcggggccccgagcgacgcgccccacgcccaccaccccctccacccccacctgatgcaggagcacatgggcaccaacgtgatcgtcgccaacaccatgccgacgcacctgtccaacgggcagatgtgcgagtggccccgcccccggggccaggccgccgcccccgaggccccgcagcccgcgccgcccgggggctccggcagcgagccctacaagctgctccccggggccgtggccaccatcgtgcggcccctggaggccatcccccagccgacgatcaccaagcaggaggtcatctga

SEQ ID NO: 292 - RNA, 1425 nt, synthetic construct
  misc_feature 1..1425: note = CDS (opt1) from Homo sapiens__NP_000448.3__HNF4A(1-474)(S87A_K106R_K108R_K126R_K 127R_S142A_S143A_S148A_T166A_S167A_K300R_K307R_K309R_S313A_ S378A_T429A_T432A_S436A_K458R_S461E)
  source 1..1425: mol_type = other RNA
atgcgcctgagcaagaccctcgtggacatggacatggccgactactccgccgcgctggaccccgcctacaccacgctggagttcgagaacgtccaggtgctcaccatgggcaacgacaccagcccgtccgaggggaccaacctgaacgcccccaacagcctgggcgtgtccgccctctgcgccatctgcggggaccgggcgacgggcaagcactacggggccagctcctgcgacggctgcaagggcttcttccgccgggcggtccgcaagaaccacatgtactcctgccggttcagccgccagtgcgtggtggaccgcgaccggcggaaccagtgccgctactgccggctgaagaagtgcttccgcgccgggatgcgccgggaggccgtccagaacgagcgggaccgcatctccacccggcgcgccgcctacgaggacagcgccctgcccagcatcaacgcgctcctgcaggccgaggtgctgtcccggcagatcgccgcgcccgtgtccggcatcaacggggacatccgcgccaagaagatcgccagcatcgccgacgtctgcgagagcatgaaggagcagctcctggtgctggtggagtgggcgaagtacatcccggccttctgcgagctccccctggacgaccaggtcgccctgctccgggcccacgccggcgagcacctcctgctgggggcgaccaagcgctccatggtgttcaaggacgtgctgctgctcggcaacgactacatcgtcccccggcactgccccgagctggccgagatgagccgcgtgtccatccggatcctggacgagctcgtgctgccgttccaggagctgcagatcgacgacaacgagtacgcctacctcaaggccatcatcttcttcgaccccgacgcccgcggcctgagcgaccccgggcggatccgccgcctgcgcgcccaggtccaggtgagcctcgaggactacatcaacgaccggcagtacgactcccgcggccggttcggggagctgctgctcctgctgcccacgctccagagcatcacctggcagatgatcgagcagatccagttcatcaagctgttcggcatggcgaagatcgacaacctgctccaggagatgctgctgggcggggccccgagcgacgcgccccacgcccaccaccccctccacccccacctgatgcaggagcacatgggcaccaacgtgatcgtcgccaacaccatgccgacgcacctgtccaacgggcagatgtgcgagtggccccgcccccggggccaggccgccgcccccgaggccccgcagcccgcgccgcccgggggctccggcagcgagccctacaagctgctccccggggccgtggccaccatcgtgcggcccctggaggccatcccccagccgacgatcaccaagcaggaggtcatctga

SEQ ID NO: 293 - RNA, 1425 nt, synthetic construct
  misc_feature 1..1425: note = CDS (opt1) from Homo sapiens__NP_000448.3__HNF4A(1-474)(S87A_K106R_K108R_K126R_K 127R_S142A_S143A_S148A_T166A_S167A_S313A_S378A_T429A_T432A_ S436A_K447R_K458R_S461E_K470R)
  source 1..1425: mol_type = other RNA
atgcgcctgagcaagaccctcgtggacatggacatggccgactactccgccgcgctggaccccgcctacaccacgctggagttcgagaacgtccaggtgctcaccatgggcaacgacaccagcccgtccgaggggaccaacctgaacgcccccaacagcctgggcgtgtccgccctctgcgccatctgcggggaccgggcgacgggcaagcactacggggccagctcctgcgacggctgcaagggcttcttccgccgggcggtccgcaagaaccacatgtactcctgccggttcagccgccagtgcgtggtggaccgcgaccggcggaaccagtgccgctactgccggctgaagaagtgcttccgcgccgggatgcgccgggaggccgtccagaacgagcgggaccgcatctccacccggcgcgccgcctacgaggacagcgccctgcccagcatcaacgcgctcctgcaggccgaggtgctgtcccggcagatcgccgcgcccgtgtccggcatcaacggggacatccgcgccaagaagatcgccagcatcgccgacgtctgcgagagcatgaaggagcagctcctggtgctggtggagtgggcgaagtacatcccggccttctgcgagctccccctggacgaccaggtcgccctgctccgggcccacgccggcgagcacctcctgctgggggcgaccaagcgctccatggtgttcaaggacgtgctgctgctcggcaacgactacatcgtcccccggcactgccccgagctggccgagatgagccgcgtgtccatccggatcctggacgagctcgtgctgccgttccaggagctgcagatcgacgacaacgagtacgcctacctcaaggccatcatcttcttcgaccccgacgccaagggcctgagcgaccccgggaagatcaagcgcctgcgcgcccaggtccaggtgagcctcgaggactacatcaacgaccggcagtacgactcccgcggccggttcggggagctgctgctcctgctgcccacgctccagagcatcacctggcagatgatcgagcagatccagttcatcaagctgttcggcatggcgaagatcgacaacctgctccaggagatgctgctgggcggggccccgagcgacgcgccccacgcccaccaccccctccacccccacctgatgcaggagcacatgggcaccaacgtgatcgtcgccaacaccatgccgacgcacctgtccaacgggcagatgtgcgagtggccccgcccccggggccaggccgccgcccccgaggccccgcagcccgcgccgcccgggggctccggcagcgagccctaccgcctgctccccggggccgtggccaccatcgtgcggcccctggaggccatcccccagccgacgatcacccggcaggaggtcatctga

SEQ ID NO: 294 - RNA, 1425 nt, synthetic construct
  misc_feature 1..1425: note = CDS (opt1) from Homo sapiens__NP_000448.3__HNF4A(1-474)(S87A_K106R_K108R_K126R_K 127R_S142A_S143A_S148A_T166A_S167A_K179R_K180R_K234R_K300R_ K307R_K309R_S313A_S378A_T429A_T432A_S436A_K447R_K458R_S461E _K470R)
  source 1..1425: mol_type = other RNA
atgcgcctgagcaagaccctcgtggacatggacatggccgactactccgccgcgctggaccccgcctacaccacgctggagttcgagaacgtccaggtgctcaccatgggcaacgacaccagcccgtccgaggggaccaacctgaacgcccccaacagcctgggcgtgtccgccctctgcgccatctgcggggaccgggcgacgggcaagcactacggggccagctcctgcgacggctgcaagggcttcttccgccgggcggtccgcaagaaccacatgtactcctgccggttcagccgccagtgcgtggtggaccgcgaccggcggaaccagtgccgctactgccggctgaagaagtgcttccgcgccgggatgcgccgggaggccgtccagaacgagcgggaccgcatctccacccggcgcgccgcctacgaggacagcgccctgcccagcatcaacgcgctcctgcaggccgaggtgctgtcccggcagatcgccgcgcccgtgtccggcatcaacggggacatccgcgcccgccggatcgccagcatcgccgacgtctgcgagagcatgaaggagcagctcctggtgctggtggagtgggcgaagtacatcccggccttctgcgagctccccctggacgaccaggtcgccctgctccgggcccacgccggcgagcacctcctgctgggggcgacccggcgctccatggtgttcaaggacgtgctgctgctcggcaacgactacatcgtcccccggcactgccccgagctggccgagatgagccgcgtgtccatccggatcctggacgagctcgtgctgccgttccaggagctgcagatcgacgacaacgagtacgcctacctcaaggccatcatcttcttcgaccccgacgcccgcggcctgagcgaccccgggcggatccgccgcctgcgcgcccaggtccaggtgagcctcgaggactacatcaacgaccggcagtacgactcccgcggccggttcggggagctgctgctcctgctgcccacgctccagagcatcacctggcagatgatcgagcagatccagttcatcaagctgttcggcatggcgaagatcgacaacctgctccaggagatgctgctgggcggggccccgagcgacgcgccccacgcccaccaccccctccacccccacctgatgcaggagcacatgggcaccaacgtgatcgtcgccaacaccatgccgacgcacctgtccaacgggcagatgtgcgagtggccccgcccccggggccaggccgccgcccccgaggccccgcagcccgcgccgcccgggggctccggcagcgagccctaccgcctgctccccggggccgtggccaccatcgtgcggcccctggaggccatcccccagccgacgatcacccggcaggaggtcatctga

SEQ ID NO: 295 - RNA, 1425 nt, synthetic construct
  misc_feature 1..1425: note = CDS (opt1) from Homo sapiens__NP_000448.3__HNF4A(1-474)(S87A_S95A_S99A_K106R_K10 8R_K126R_K127R_S142A_S143A_S148A_T166A_S167A_S313A_S378A_T4 29A_T432A_S436A_K458R_S461E)
  source 1..1425: mol_type = other RNA
atgcgcctgagcaagaccctcgtggacatggacatggccgactactccgccgcgctggaccccgcctacaccacgctggagttcgagaacgtccaggtgctcaccatgggcaacgacaccagcccgtccgaggggaccaacctgaacgcccccaacagcctgggcgtgtccgccctctgcgccatctgcggggaccgggcgacgggcaagcactacggggccagctcctgcgacggctgcaagggcttcttccgccgggcggtccgcaagaaccacatgtacgcctgccggttcgcccgccagtgcgtggtggaccgcgaccggcggaaccagtgccgctactgccggctgaagaagtgcttccgcgccgggatgcgccgggaggccgtccagaacgagcgggaccgcatctccacccggcgcgccgcctacgaggacagcgccctgcccagcatcaacgcgctcctgcaggccgaggtgctgtcccggcagatcgccgcgcccgtgtccggcatcaacggggacatccgcgccaagaagatcgccagcatcgccgacgtctgcgagagcatgaaggagcagctcctggtgctggtggagtgggcgaagtacatcccggccttctgcgagctccccctggacgaccaggtcgccctgctccgggcccacgccggcgagcacctcctgctgggggcgaccaagcgctccatggtgttcaaggacgtgctgctgctcggcaacgactacatcgtcccccggcactgccccgagctggccgagatgagccgcgtgtccatccggatcctggacgagctcgtgctgccgttccaggagctgcagatcgacgacaacgagtacgcctacctcaaggccatcatcttcttcgaccccgacgccaagggcctgagcgaccccgggaagatcaagcgcctgcgcgcccaggtccaggtgagcctcgaggactacatcaacgaccggcagtacgactcccgcggccggttcggggagctgctgctcctgctgcccacgctccagagcatcacctggcagatgatcgagcagatccagttcatcaagctgttcggcatggcgaagatcgacaacctgctccaggagatgctgctgggcggggccccgagcgacgcgccccacgcccaccaccccctccacccccacctgatgcaggagcacatgggcaccaacgtgatcgtcgccaacaccatgccgacgcacctgtccaacgggcagatgtgcgagtggccccgcccccggggccaggccgccgcccccgaggccccgcagcccgcgccgcccgggggctccggcagcgagccctacaagctgctccccggggccgtggccaccatcgtgcggcccctggaggccatcccccagccgacgatcaccaagcaggaggtcatctga

SEQ ID NO: 296 - RNA, 1425 nt, synthetic construct
  misc_feature 1..1425: note = CDS (opt1) from Homo sapiens__NP_000448.3__HNF4A(1-474)(S87A_K106R_K108R_K126R_K 127R_S138A_T139A_S142A_S143A_S148A_T166A_S167A_S313A_S378A_ T429A_T432A_S436A_K458R_S461E)
  source 1..1425: mol_type = other RNA
atgcgcctgagcaagaccctcgtggacatggacatggccgactactccgccgcgctggaccccgcctacaccacgctggagttcgagaacgtccaggtgctcaccatgggcaacgacaccagcccgtccgaggggaccaacctgaacgcccccaacagcctgggcgtgtccgccctctgcgccatctgcggggaccgggcgacgggcaagcactacggggccagctcctgcgacggctgcaagggcttcttccgccgggcggtccgcaagaaccacatgtactcctgccggttcagccgccagtgcgtggtggaccgcgaccggcggaaccagtgccgctactgccggctgaagaagtgcttccgcgccgggatgcgccgggaggccgtccagaacgagcgggaccgcatcgccgcccggcgcgccgcctacgaggacagcgccctgcccagcatcaacgcgctcctgcaggccgaggtgctgtcccggcagatcgccgcgcccgtgtccggcatcaacggggacatccgcgccaagaagatcgccagcatcgccgacgtctgcgagagcatgaaggagcagctcctggtgctggtggagtgggcgaagtacatcccggccttctgcgagctccccctggacgaccaggtcgccctgctccgggcccacgccggcgagcacctcctgctgggggcgaccaagcgctccatggtgttcaaggacgtgctgctgctcggcaacgactacatcgtcccccggcactgccccgagctggccgagatgagccgcgtgtccatccggatcctggacgagctcgtgctgccgttccaggagctgcagatcgacgacaacgagtacgcctacctcaaggccatcatcttcttcgaccccgacgccaagggcctgagcgaccccgggaagatcaagcgcctgcgcgcccaggtccaggtgagcctcgaggactacatcaacgaccggcagtacgactcccgcggccggttcggggagctgctgctcctgctgcccacgctccagagcatcacctggcagatgatcgagcagatccagttcatcaagctgttcggcatggcgaagatcgacaacctgctccaggagatgctgctgggcggggccccgagcgacgcgccccacgcccaccaccccctccacccccacctgatgcaggagcacatgggcaccaacgtgatcgtcgccaacaccatgccgacgcacctgtccaacgggcagatgtgcgagtggccccgcccccggggccaggccgccgcccccgaggccccgcagcccgcgccgcccgggggctccggcagcgagccctacaagctgctccccggggccgtggccaccatcgtgcggcccctggaggccatcccccagccgacgatcaccaagcaggaggtcatctga

SEQ ID NO: 297 - RNA, 1425 nt, synthetic construct
  misc_feature 1..1425: note = CDS (opt1) from Homo sapiens__NP_000448.3__HNF4A(1-474)(S87A_S95A_S99A_K106R_K10 8R_K126R_K127R_S138A_T139A_S142A_S143A_S148A_T166A_S167A_S3 13A_S378A_T429A_T432A_S436A_K458R_S461E)
  source 1..1425: mol_type = other RNA
atgcgcctgagcaagaccctcgtggacatggacatggccgactactccgccgcgctggaccccgcctacaccacgctggagttcgagaacgtccaggtgctcaccatgggcaacgacaccagcccgtccgaggggaccaacctgaacgcccccaacagcctgggcgtgtccgccctctgcgccatctgcggggaccgggcgacgggcaagcactacggggccagctcctgcgacggctgcaagggcttcttccgccgggcggtccgcaagaaccacatgtacgcctgccggttcgcccgccagtgcgtggtggaccgcgaccggcggaaccagtgccgctactgccggctgaagaagtgcttccgcgccgggatgcgccgggaggccgtccagaacgagcgggaccgcatcgccgcccggcgcgccgcctacgaggacagcgccctgcccagcatcaacgcgctcctgcaggccgaggtgctgtcccggcagatcgccgcgcccgtgtccggcatcaacggggacatccgcgccaagaagatcgccagcatcgccgacgtctgcgagagcatgaaggagcagctcctggtgctggtggagtgggcgaagtacatcccggccttctgcgagctccccctggacgaccaggtcgccctgctccgggcccacgccggcgagcacctcctgctgggggcgaccaagcgctccatggtgttcaaggacgtgctgctgctcggcaacgactacatcgtcccccggcactgccccgagctggccgagatgagccgcgtgtccatccggatcctggacgagctcgtgctgccgttccaggagctgcagatcgacgacaacgagtacgcctacctcaaggccatcatcttcttcgaccccgacgccaagggcctgagcgaccccgggaagatcaagcgcctgcgcgcccaggtccaggtgagcctcgaggactacatcaacgaccggcagtacgactcccgcggccggttcggggagctgctgctcctgctgcccacgctccagagcatcacctggcagatgatcgagcagatccagttcatcaagctgttcggcatggcgaagatcgacaacctgctccaggagatgctgctgggcggggccccgagcgacgcgccccacgcccaccaccccctccacccccacctgatgcaggagcacatgggcaccaacgtgatcgtcgccaacaccatgccgacgcacctgtccaacgggcagatgtgcgagtggccccgcccccggggccaggccgccgcccccgaggccccgcagcccgcgccgcccgggggctccggcagcgagccctacaagctgctccccggggccgtggccaccatcgtgcggcccctggaggccatcccccagccgacgatcaccaagcaggaggtcatctga

SEQ ID NO: 298 - RNA, 1425 nt, synthetic construct
  misc_feature 1..1425: note = CDS (opt1) from Homo sapiens__NP_000448.3__HNF4A(1-474)
  source 1..1425: mol_type = other RNA
atgcgcctgagcaagaccctcgtggacatggacatggccgactactccgccgcgctggaccccgcctacaccacgctggagttcgagaacgtccaggtgctcaccatgggcaacgacaccagcccgtccgaggggaccaacctgaacgcccccaacagcctgggcgtgtccgccctctgcgccatctgcggggaccgggcgacgggcaagcactacggggccagctcctgcgacggctgcaagggcttcttccgccggagcgtccgcaagaaccacatgtactcctgccggttcagccgccagtgcgtggtggacaaggacaagcggaaccagtgccgctactgccggctgaagaagtgcttccgcgccgggatgaagaaggaggccgtccagaacgagcgggaccgcatctccacccggcgcagctcctacgaggacagctccctgcccagcatcaacgcgctcctgcaggccgaggtgctgtcccggcagatcaccagccccgtgtccggcatcaacggggacatccgcgccaagaagatcgccagcatcgccgacgtctgcgagagcatgaaggagcagctcctggtgctggtggagtgggcgaagtacatcccggccttctgcgagctccccctggacgaccaggtcgccctgctccgggcccacgccggcgagcacctcctgctgggggcgaccaagcgctccatggtgttcaaggacgtgctgctgctcggcaacgactacatcgtcccccggcactgccccgagctggccgagatgagccgcgtgtccatccggatcctggacgagctcgtgctgccgttccaggagctgcagatcgacgacaacgagtacgcctacctcaaggccatcatcttcttcgaccccgacgccaagggcctgagcgaccccgggaagatcaagcgcctgcgctcccaggtccaggtgagcctcgaggactacatcaacgaccggcagtacgactcccgcggccggttcggggagctgctgctcctgctgcccacgctccagagcatcacctggcagatgatcgagcagatccagttcatcaagctgttcggcatggcgaagatcgacaacctgctccaggagatgctgctgggcgggtccccgagcgacgcgccccacgcccaccaccccctccacccccacctgatgcaggagcacatgggcaccaacgtgatcgtcgccaacaccatgccgacgcacctgtccaacgggcagatgtgcgagtggccccgcccccggggccaggccgccacccccgagaccccgcagcccagcccgcccgggggctccggcagcgagccctacaagctcctgcccggggccgtggccaccatcgtgaagcccctgtccgccatcccccagccgacgatcaccaagcaggaggtcatctga

SEQ ID NO: 299 - RNA, 1425 nt, synthetic construct
  misc_feature 1..1425: note = CDS (opt1) from Homo sapiens__NP_000448.3__HNF4A(1-474)(S313A)
  source 1..1425: mol_type = other RNA
atgcgcctgagcaagaccctcgtggacatggacatggccgactactccgccgcgctggaccccgcctacaccacgctggagttcgagaacgtccaggtgctcaccatgggcaacgacaccagcccgtccgaggggaccaacctgaacgcccccaacagcctgggcgtgtccgccctctgcgccatctgcggggaccgggcgacgggcaagcactacggggccagctcctgcgacggctgcaagggcttcttccgccggagcgtccgcaagaaccacatgtactcctgccggttcagccgccagtgcgtggtggacaaggacaagcggaaccagtgccgctactgccggctgaagaagtgcttccgcgccgggatgaagaaggaggccgtccagaacgagcgggaccgcatctccacccggcgcagctcctacgaggacagctccctgcccagcatcaacgcgctcctgcaggccgaggtgctgtcccggcagatcaccagccccgtgtccggcatcaacggggacatccgcgccaagaagatcgccagcatcgccgacgtctgcgagagcatgaaggagcagctcctggtgctggtggagtgggcgaagtacatcccggccttctgcgagctccccctggacgaccaggtcgccctgctccgggcccacgccggcgagcacctcctgctgggggcgaccaagcgctccatggtgttcaaggacgtgctgctgctcggcaacgactacatcgtcccccggcactgccccgagctggccgagatgagccgcgtgtccatccggatcctggacgagctcgtgctgccgttccaggagctgcagatcgacgacaacgagtacgcctacctcaaggccatcatcttcttcgaccccgacgccaagggcctgagcgaccccgggaagatcaagcgcctgcgcgcgcaggtccaggtgtccctcgaggactacatcaacgaccggcagtacgacagccgcggccggttcggggagctgctgctcctgctgcccacgctccagtccatcacctggcagatgatcgagcagatccagttcatcaagctgttcggcatggccaagatcgacaacctgctccaggagatgctgctgggcgggagcccgtccgacgcgccccacgcccaccaccccctccacccccacctgatgcaggagcacatgggcaccaacgtgatcgtcgccaacaccatgccgacgcacctgagcaacgggcagatgtgcgagtggccccgcccccggggccaggccgccacccccgagaccccgcagccctccccgcccgggggcagcggctccgagccctacaagctgctccccggggccgtggccaccatcgtgaagcccctgagcgcgatcccccagccgacgatcaccaagcaggaggtcatctga

SEQ ID NO: 300 - RNA, 1425 nt, synthetic construct
  misc_feature 1..1425: note = CDS (opt1) from Homo sapiens__NP_000448.3__HNF4A(1-474)(S313E)
  source 1..1425: mol_type = other RNA
atgcgcctgagcaagaccctcgtggacatggacatggccgactactccgccgcgctggaccccgcctacaccacgctggagttcgagaacgtccaggtgctcaccatgggcaacgacaccagcccgtccgaggggaccaacctgaacgcccccaacagcctgggcgtgtccgccctctgcgccatctgcggggaccgggcgacgggcaagcactacggggccagctcctgcgacggctgcaagggcttcttccgccggagcgtccgcaagaaccacatgtactcctgccggttcagccgccagtgcgtggtggacaaggacaagcggaaccagtgccgctactgccggctgaagaagtgcttccgcgccgggatgaagaaggaggccgtccagaacgagcgggaccgcatctccacccggcgcagctcctacgaggacagctccctgcccagcatcaacgcgctcctgcaggccgaggtgctgtcccggcagatcaccagccccgtgtccggcatcaacggggacatccgcgccaagaagatcgccagcatcgccgacgtctgcgagagcatgaaggagcagctcctggtgctggtggagtgggcgaagtacatcccggccttctgcgagctccccctggacgaccaggtcgccctgctccgggcccacgccggcgagcacctcctgctgggggcgaccaagcgctccatggtgttcaaggacgtgctgctgctcggcaacgactacatcgtcccccggcactgccccgagctggccgagatgagccgcgtgtccatccggatcctggacgagctcgtgctgccgttccaggagctgcagatcgacgacaacgagtacgcctacctcaaggccatcatcttcttcgaccccgacgccaagggcctgagcgaccccgggaagatcaagcgcctgcgcgagcaggtccaggtgtccctcgaggactacatcaacgaccggcagtacgacagccgcggccggttcggggagctgctgctcctgctgcccacgctccagtccatcacctggcagatgatcgagcagatccagttcatcaagctgttcggcatggcgaagatcgacaacctgctccaggagatgctgctgggcgggagcccgtccgacgcgccccacgcccaccaccccctccacccccacctgatgcaggagcacatgggcaccaacgtgatcgtcgccaacaccatgccgacgcacctgagcaacgggcagatgtgcgagtggccccgcccccggggccaggccgccacccccgagaccccgcagccctccccgcccgggggcagcggctccgagccctacaagctgctccccggggccgtggccaccatcgtgaagcccctgagcgccatcccccagccgacgatcaccaagcaggaggtcatctga

SEQ ID NO: 301 - RNA, 1425 nt, synthetic construct
  misc_feature 1..1425: note = CDS (opt1) from Homo sapiens__NP_000448.3__HNF4A(1-474)(S142A_S143A)
  source 1..1425: mol_type = other RNA
atgcgcctgagcaagaccctcgtggacatggacatggccgactactccgccgcgctggaccccgcctacaccacgctggagttcgagaacgtccaggtgctcaccatgggcaacgacaccagcccgtccgaggggaccaacctgaacgcccccaacagcctgggcgtgtccgccctctgcgccatctgcggggaccgggcgacgggcaagcactacggggccagctcctgcgacggctgcaagggcttcttccgccggagcgtccgcaagaaccacatgtactcctgccggttcagccgccagtgcgtggtggacaaggacaagcggaaccagtgccgctactgccggctgaagaagtgcttccgcgccgggatgaagaaggaggccgtccagaacgagcgggaccgcatctccacccggcgcgcggcctacgaggacagctccctgcccagcatcaacgccctcctgcaggccgaggtgctgtcccggcagatcaccagccccgtgtccggcatcaacggggacatccgcgccaagaagatcgcgagcatcgccgacgtctgcgagtccatgaaggagcagctcctggtgctggtggagtgggccaagtacatcccggccttctgcgagctccccctggacgaccaggtcgccctgctccgggcgcacgccggcgagcacctcctgctgggggccaccaagcgcagcatggtgttcaaggacgtgctgctgctcggcaacgactacatcgtcccccggcactgccccgagctggccgagatgagccgcgtgtccatccggatcctggacgagctcgtgctgccgttccaggagctgcagatcgacgacaacgagtacgcctacctcaaggcgatcatcttcttcgaccccgacgccaagggcctgagcgaccccgggaagatcaagcgcctgcgctcccaggtccaggtgagcctcgaggactacatcaacgaccggcagtacgactcccgcggccggttcggggagctgctgctcctgctgcccacgctccagagcatcacctggcagatgatcgagcagatccagttcatcaagctgttcggcatggccaagatcgacaacctgctccaggagatgctgctgggcgggtccccgagcgacgcgccccacgcccaccaccccctccacccccacctgatgcaggagcacatgggcaccaacgtgatcgtcgccaacaccatgccgacgcacctgtccaacgggcagatgtgcgagtggccccgcccccggggccaggccgccacccccgagaccccgcagcccagcccgcccgggggctccggcagcgagccctacaagctgctccccggggccgtggcgaccatcgtgaagcccctgtccgccatcccccagccgacgatcaccaagcaggaggtcatctga

SEQ ID NO: 302 - RNA, 1425 nt, synthetic construct
  misc_feature 1..1425: note = CDS (opt1) from Homo sapiens__NP_000448.3__HNF4A(1-474)(S142E_S143E)
  source 1..1425: mol_type = other RNA
atgcgcctgagcaagaccctcgtggacatggacatggccgactactccgccgcgctggaccccgcctacaccacgctggagttcgagaacgtccaggtgctcaccatgggcaacgacaccagcccgtccgaggggaccaacctgaacgcccccaacagcctgggcgtgtccgccctctgcgccatctgcggggaccgggcgacgggcaagcactacggggccagctcctgcgacggctgcaagggcttcttccgccggagcgtccgcaagaaccacatgtactcctgccggttcagccgccagtgcgtggtggacaaggacaagcggaaccagtgccgctactgccggctgaagaagtgcttccgcgccgggatgaagaaggaggccgtccagaacgagcgggaccgcatctccacccggcgcgaggagtacgaggacagctccctgcccagcatcaacgcgctcctgcaggccgaggtgctgtcccggcagatcaccagccccgtgtccggcatcaacggggacatccgcgccaagaagatcgccagcatcgccgacgtctgcgagtccatgaaggagcagctcctggtgctggtggagtgggcgaagtacatcccggccttctgcgagctccccctggacgaccaggtcgccctgctccgggcccacgccggcgagcacctcctgctgggggcgaccaagcgcagcatggtgttcaaggacgtgctgctgctcggcaacgactacatcgtcccccggcactgccccgagctggccgagatgagccgcgtgtccatccggatcctggacgagctcgtgctgccgttccaggagctgcagatcgacgacaacgagtacgcctacctcaaggccatcatcttcttcgaccccgacgccaagggcctgagcgaccccgggaagatcaagcgcctgcgctcccaggtccaggtgagcctcgaggactacatcaacgaccggcagtacgactcccgcggccggttcggggagctgctgctcctgctgcccacgctccagagcatcacctggcagatgatcgagcagatccagttcatcaagctgttcggcatggcgaagatcgacaacctgctccaggagatgctgctgggcgggtccccgagcgacgcgccccacgcccaccaccccctccacccccacctgatgcaggagcacatgggcaccaacgtgatcgtcgccaacaccatgccgacgcacctgtccaacgggcagatgtgcgagtggccccgcccccggggccaggccgccacccccgagaccccgcagcccagcccgcccgggggctccggcagcgagccctacaagctgctccccggggccgtggccaccatcgtgaagcccctgtccgccatcccccagccgacgatcaccaagcaggaggtcatctga

SEQ ID NO: 303 - RNA, 1425 nt, synthetic construct
  misc_feature 1..1425: note = CDS (opt1) from Homo sapiens__NP_000448.3__HNF4A(1-474)(S143A)
  source 1..1425: mol_type = other RNA
atgcgcctgagcaagaccctcgtggacatggacatggccgactactccgccgcgctggaccccgcctacaccacgctggagttcgagaacgtccaggtgctcaccatgggcaacgacaccagcccgtccgaggggaccaacctgaacgcccccaacagcctgggcgtgtccgccctctgcgccatctgcggggaccgggcgacgggcaagcactacggggccagctcctgcgacggctgcaagggcttcttccgccggagcgtccgcaagaaccacatgtactcctgccggttcagccgccagtgcgtggtggacaaggacaagcggaaccagtgccgctactgccggctgaagaagtgcttccgcgccgggatgaagaaggaggccgtccagaacgagcgggaccgcatctccacccggcgcagcgcgtacgaggactccagcctgccctccatcaacgccctcctgcaggccgaggtgctgagccggcagatcacctcccccgtgagcggcatcaacggggacatccgcgccaagaagatcgcctccatcgcggacgtctgcgagagcatgaaggagcagctcctggtgctggtggagtgggccaagtacatcccggccttctgcgagctccccctggacgaccaggtcgccctgctccgggcccacgcgggcgagcacctcctgctgggggccaccaagcgcagcatggtgttcaaggacgtgctgctgctcggcaacgactacatcgtcccccggcactgccccgagctggccgagatgtcccgcgtgagcatccggatcctggacgagctcgtgctgccgttccaggagctgcagatcgacgacaacgagtacgcctacctcaaggccatcatcttcttcgaccccgacgcgaagggcctgtccgaccccgggaagatcaagcgcctgcgcagccaggtccaggtgtccctcgaggactacatcaacgaccggcagtacgacagccgcggccggttcggggagctgctgctcctgctgcccacgctccagtccatcacctggcagatgatcgagcagatccagttcatcaagctgttcggcatggccaagatcgacaacctgctccaggagatgctgctgggcgggagcccgtccgacgcgccccacgcccaccaccccctccacccccacctgatgcaggagcacatgggcaccaacgtgatcgtcgccaacaccatgccgacgcacctgagcaacgggcagatgtgcgagtggccccgcccccggggccaggccgccacccccgagaccccgcagccctccccgcccgggggcagcggctccgagccctacaagctgctccccggggccgtggccaccatcgtgaagcccctgagcgcgatcccccagccgacgatcaccaagcaggaggtcatctga

SEQ ID NO: 304 - RNA, 1425 nt, synthetic construct
  misc_feature 1..1425: note = CDS (opt1) from Homo sapiens__NP_000448.3__HNF4A(1-474)(T166A)
  source 1..1425: mol_type = other RNA
atgcgcctgagcaagaccctcgtggacatggacatggccgactactccgccgcgctggaccccgcctacaccacgctggagttcgagaacgtccaggtgctcaccatgggcaacgacaccagcccgtccgaggggaccaacctgaacgcccccaacagcctgggcgtgtccgccctctgcgccatctgcggggaccgggcgacgggcaagcactacggggccagctcctgcgacggctgcaagggcttcttccgccggagcgtccgcaagaaccacatgtactcctgccggttcagccgccagtgcgtggtggacaaggacaagcggaaccagtgccgctactgccggctgaagaagtgcttccgcgccgggatgaagaaggaggccgtccagaacgagcgggaccgcatctccacccggcgcagctcctacgaggacagctccctgcccagcatcaacgcgctcctgcaggccgaggtgctgtcccggcagatcgccagccccgtgtccggcatcaacggggacatccgcgccaagaagatcgccagcatcgcggacgtctgcgagagcatgaaggagcagctcctggtgctggtggagtgggccaagtacatcccggccttctgcgagctccccctggacgaccaggtcgccctgctccgggcccacgcgggcgagcacctcctgctgggggccaccaagcgctccatggtgttcaaggacgtgctgctgctcggcaacgactacatcgtcccccggcactgccccgagctggccgagatgagccgcgtgtccatccggatcctggacgagctcgtgctgccgttccaggagctgcagatcgacgacaacgagtacgcctacctcaaggccatcatcttcttcgaccccgacgcgaagggcctgagcgaccccgggaagatcaagcgcctgcgctcccaggtccaggtgagcctcgaggactacatcaacgaccggcagtacgactcccgcggccggttcggggagctgctgctcctgctgcccaccctccagagcatcacgtggcagatgatcgagcagatccagttcatcaagctgttcggcatggccaagatcgacaacctgctccaggagatgctgctgggcgggtccccgagcgacgcgccccacgcccaccaccccctccacccccacctgatgcaggagcacatgggcaccaacgtgatcgtcgccaacaccatgccgacccacctgtccaacgggcagatgtgcgagtggccccgcccccggggccaggccgccacgcccgagaccccgcagcccagcccgcccgggggctccggcagcgagccctacaagctgctccccggggccgtggccaccatcgtgaagcccctgtccgcgatcccccagccgaccatcacgaagcaggaggtcatctga

SEQ ID NO: 305 - RNA, 1425 nt, synthetic construct
  misc_feature 1..1425: note = CDS (opt1) from Homo sapiens__NP_000448.3__HNF4A(1-474)(S167E)
  source 1..1425: mol_type = other RNA
atgcgcctgagcaagaccctcgtggacatggacatggccgactactccgccgcgctggaccccgcctacaccacgctggagttcgagaacgtccaggtgctcaccatgggcaacgacaccagcccgtccgaggggaccaacctgaacgcccccaacagcctgggcgtgtccgccctctgcgccatctgcggggaccgggcgacgggcaagcactacggggccagctcctgcgacggctgcaagggcttcttccgccggagcgtccgcaagaaccacatgtactcctgccggttcagccgccagtgcgtggtggacaaggacaagcggaaccagtgccgctactgccggctgaagaagtgcttccgcgccgggatgaagaaggaggccgtccagaacgagcgggaccgcatctccacccggcgcagctcctacgaggacagctccctgcccagcatcaacgcgctcctgcaggccgaggtgctgtcccggcagatcaccgagcccgtgagcggcatcaacggggacatccgcgccaagaagatcgcctccatcgccgacgtctgcgagagcatgaaggagcagctcctggtgctggtggagtgggcgaagtacatcccggccttctgcgagctccccctggacgaccaggtcgccctgctccgggcccacgccggcgagcacctcctgctgggggcgaccaagcgcagcatggtgttcaaggacgtgctgctgctcggcaacgactacatcgtcccccggcactgccccgagctggccgagatgtcccgcgtgagcatccggatcctggacgagctcgtgctgccgttccaggagctgcagatcgacgacaacgagtacgcctacctcaaggccatcatcttcttcgaccccgacgccaagggcctgtccgaccccgggaagatcaagcgcctgcgcagccaggtccaggtgtccctcgaggactacatcaacgaccggcagtacgacagccgcggccggttcggggagctgctgctcctgctgcccacgctccagtccatcacctggcagatgatcgagcagatccagttcatcaagctgttcggcatggcgaagatcgacaacctgctccaggagatgctgctgggcgggagcccgtccgacgcgccccacgcccaccaccccctccacccccacctgatgcaggagcacatgggcaccaacgtgatcgtcgccaacaccatgccgacgcacctgagcaacgggcagatgtgcgagtggccccgcccccggggccaggccgccacccccgagaccccgcagccctccccgcccgggggcagcggctccgagccctacaagctgctccccggggccgtggccaccatcgtgaagcccctgagcgccatcccccagccgacgatcaccaagcaggaggtcatctga

SEQ ID NO: 306 - RNA, 1425 nt, synthetic construct
  misc_feature 1..1425: note = CDS (opt1) from Homo sapiens__NP_000448.3__HNF4A(1-474)(S167A)
  source 1..1425: mol_type = other RNA
atgcgcctgagcaagaccctcgtggacatggacatggccgactactccgccgcgctggaccccgcctacaccacgctggagttcgagaacgtccaggtgctcaccatgggcaacgacaccagcccgtccgaggggaccaacctgaacgcccccaacagcctgggcgtgtccgccctctgcgccatctgcggggaccgggcgacgggcaagcactacggggccagctcctgcgacggctgcaagggcttcttccgccggagcgtccgcaagaaccacatgtactcctgccggttcagccgccagtgcgtggtggacaaggacaagcggaaccagtgccgctactgccggctgaagaagtgcttccgcgccgggatgaagaaggaggccgtccagaacgagcgggaccgcatctccacccggcgcagctcctacgaggacagctccctgcccagcatcaacgcgctcctgcaggccgaggtgctgtcccggcagatcaccgcccccgtgagcggcatcaacggggacatccgcgccaagaagatcgcctccatcgcggacgtctgcgagagcatgaaggagcagctcctggtgctggtggagtgggccaagtacatcccggccttctgcgagctccccctggacgaccaggtcgccctgctccgggcccacgcgggcgagcacctcctgctgggggccaccaagcgcagcatggtgttcaaggacgtgctgctgctcggcaacgactacatcgtcccccggcactgccccgagctggccgagatgtcccgcgtgagcatccggatcctggacgagctcgtgctgccgttccaggagctgcagatcgacgacaacgagtacgcctacctcaaggccatcatcttcttcgaccccgacgcgaagggcctgtccgaccccgggaagatcaagcgcctgcgcagccaggtccaggtgtccctcgaggactacatcaacgaccggcagtacgacagccgcggccggttcggggagctgctgctcctgctgcccacgctccagtccatcacctggcagatgatcgagcagatccagttcatcaagctgttcggcatggccaagatcgacaacctgctccaggagatgctgctgggcgggagcccgtccgacgcgccccacgcccaccaccccctccacccccacctgatgcaggagcacatgggcaccaacgtgatcgtcgccaacaccatgccgacgcacctgagcaacgggcagatgtgcgagtggccccgcccccggggccaggccgccacccccgagaccccgcagccctccccgcccgggggcagcggctccgagccctacaagctgctccccggggccgtggccaccatcgtgaagcccctgagcgcgatcccccagccgacgatcaccaagcaggaggtcatctga

SEQ ID NO: 307 - RNA, 1425 nt, synthetic construct
  misc_feature 1..1425: note = CDS (opt1) from Homo sapiens__NP_000448.3__HNF4A(1-474)(S167A_S378A_T429A_T432A_ S436A)
  source 1..1425: mol_type = other RNA
atgcgcctgagcaagaccctcgtggacatggacatggccgactactccgccgcgctggaccccgcctacaccacgctggagttcgagaacgtccaggtgctcaccatgggcaacgacaccagcccgtccgaggggaccaacctgaacgcccccaacagcctgggcgtgtccgccctctgcgccatctgcggggaccgggcgacgggcaagcactacggggccagctcctgcgacggctgcaagggcttcttccgccggagcgtccgcaagaaccacatgtactcctgccggttcagccgccagtgcgtggtggacaaggacaagcggaaccagtgccgctactgccggctgaagaagtgcttccgcgccgggatgaagaaggaggccgtccagaacgagcgggaccgcatctccacccggcgcagctcctacgaggacagctccctgcccagcatcaacgcgctcctgcaggccgaggtgctgtcccggcagatcaccgcccccgtgagcggcatcaacggggacatccgcgccaagaagatcgcctccatcgcggacgtctgcgagagcatgaaggagcagctcctggtgctggtggagtgggccaagtacatcccggccttctgcgagctccccctggacgaccaggtcgccctgctccgggcccacgcgggcgagcacctcctgctgggggccaccaagcgcagcatggtgttcaaggacgtgctgctgctcggcaacgactacatcgtcccccggcactgccccgagctggccgagatgtcccgcgtgagcatccggatcctggacgagctcgtgctgccgttccaggagctgcagatcgacgacaacgagtacgcctacctcaaggccatcatcttcttcgaccccgacgcgaagggcctgtccgaccccgggaagatcaagcgcctgcgcagccaggtccaggtgtccctcgaggactacatcaacgaccggcagtacgacagccgcggccggttcggggagctgctgctcctgctgcccacgctccagtccatcacctggcagatgatcgagcagatccagttcatcaagctgttcggcatggccaagatcgacaacctgctccaggagatgctgctgggcggggccccgagcgacgcgccccacgcccaccaccccctccacccccacctgatgcaggagcacatgggcaccaacgtgatcgtcgccaacaccatgccgacgcacctgtccaacgggcagatgtgcgagtggccccgcccccggggccaggccgccgcccccgaggcgccgcagcccgccccgcccgggggcagcggctccgagccctacaagctgctccccggggccgtggccaccatcgtgaagcccctgagcgccatcccccagccgaccatcaccaagcaggaggtcatctga

SEQ ID NO: 308 - RNA, 1425 nt, synthetic construct
  misc_feature 1..1425: note = CDS (opt1) from Homo sapiens__NP_000448.3__HNF4A(1-474)(S167E_S378E_T429E_T432E_ S436E)
  source 1..1425: mol_type = other RNA
atgcgcctgagcaagaccctcgtggacatggacatggccgactactccgccgcgctggaccccgcctacaccacgctggagttcgagaacgtccaggtgctcaccatgggcaacgacaccagcccgtccgaggggaccaacctgaacgcccccaacagcctgggcgtgtccgccctctgcgccatctgcggggaccgggcgacgggcaagcactacggggccagctcctgcgacggctgcaagggcttcttccgccggagcgtccgcaagaaccacatgtactcctgccggttcagccgccagtgcgtggtggacaaggacaagcggaaccagtgccgctactgccggctgaagaagtgcttccgcgccgggatgaagaaggaggccgtccagaacgagcgggaccgcatctccacccggcgcagctcctacgaggacagctccctgcccagcatcaacgcgctcctgcaggccgaggtgctgtcccggcagatcaccgagcccgtgagcggcatcaacggggacatccgcgccaagaagatcgcctccatcgccgacgtctgcgagagcatgaaggagcagctcctggtgctggtggagtgggcgaagtacatcccggccttctgcgagctccccctggacgaccaggtcgccctgctccgggcccacgccggcgagcacctcctgctgggggcgaccaagcgcagcatggtgttcaaggacgtgctgctgctcggcaacgactacatcgtcccccggcactgccccgagctggccgagatgtcccgcgtgagcatccggatcctggacgagctcgtgctgccgttccaggagctgcagatcgacgacaacgagtacgcctacctcaaggccatcatcttcttcgaccccgacgccaagggcctgtccgaccccgggaagatcaagcgcctgcgcagccaggtccaggtgtccctcgaggactacatcaacgaccggcagtacgacagccgcggccggttcggggagctgctgctcctgctgcccacgctccagtccatcacctggcagatgatcgagcagatccagttcatcaagctgttcggcatggcgaagatcgacaacctgctccaggagatgctgctgggcggggagccgagcgacgcgccccacgcccaccaccccctccacccccacctgatgcaggagcacatgggcaccaacgtgatcgtcgccaacaccatgccgacgcacctgtccaacgggcagatgtgcgagtggccccgcccccggggccaggccgccgagcccgaggagccgcagcccgagccgcccgggggcagcggctccgagccctacaagctgctccccggggccgtggccaccatcgtgaagcccctgagcgccatcccccagccgaccatcaccaagcaggaggtcatctga

SEQ ID NO: 309 - RNA, 1425 nt, synthetic construct
  misc_feature 1..1425: note = CDS (opt1) from Homo sapiens__NP_000448.3__HNF4A(1-474)(S87A)
  source 1..1425: mol_type = other RNA
atgcgcctgagcaagaccctcgtggacatggacatggccgactactccgccgcgctggaccccgcctacaccacgctggagttcgagaacgtccaggtgctcaccatgggcaacgacaccagcccgtccgaggggaccaacctgaacgcccccaacagcctgggcgtgtccgccctctgcgccatctgcggggaccgggcgacgggcaagcactacggggccagctcctgcgacggctgcaagggcttcttccgccgggccgtccgcaagaaccacatgtacagctgccggttctcccgccagtgcgtggtggacaaggacaagcggaaccagtgccgctactgccggctgaagaagtgcttccgcgccgggatgaagaaggaggcggtccagaacgagcgggaccgcatcagcacccggcgctccagctacgaggactccagcctgccctccatcaacgccctcctgcaggccgaggtgctgagccggcagatcacctcccccgtgagcggcatcaacggggacatccgcgccaagaagatcgcctccatcgcggacgtctgcgagagcatgaaggagcagctcctggtgctggtggagtgggccaagtacatcccggccttctgcgagctccccctggacgaccaggtcgccctgctccgggcccacgcgggcgagcacctcctgctgggggccaccaagcgcagcatggtgttcaaggacgtgctgctgctcggcaacgactacatcgtcccccggcactgccccgagctggccgagatgtcccgcgtgagcatccggatcctggacgagctcgtgctgccgttccaggagctgcagatcgacgacaacgagtacgcctacctcaaggccatcatcttcttcgaccccgacgcgaagggcctgtccgaccccgggaagatcaagcgcctgcgcagccaggtccaggtgtccctcgaggactacatcaacgaccggcagtacgacagccgcggccggttcggggagctgctgctcctgctgcccacgctccagtccatcacctggcagatgatcgagcagatccagttcatcaagctgttcggcatggccaagatcgacaacctgctccaggagatgctgctgggcgggagcccgtccgacgcgccccacgcccaccaccccctccacccccacctgatgcaggagcacatgggcaccaacgtgatcgtcgccaacaccatgccgacgcacctgagcaacgggcagatgtgcgagtggccccgcccccggggccaggccgccacccccgagaccccgcagccctccccgcccgggggcagcggctccgagccctacaagctgctccccggggccgtggccaccatcgtgaagcccctgagcgcgatcccccagccgacgatcaccaagcaggaggtcatctga

SEQ ID NO: 310 - RNA, 1425 nt, synthetic construct
  misc_feature 1..1425: note = CDS (opt1) from Homo sapiens__NP_000448.3__HNF4A(1-474)(S87E)
  source 1..1425: mol_type = other RNA
atgcgcctgagcaagaccctcgtggacatggacatggccgactactccgccgcgctggaccccgcctacaccacgctggagttcgagaacgtccaggtgctcaccatgggcaacgacaccagcccgtccgaggggaccaacctgaacgcccccaacagcctgggcgtgtccgccctctgcgccatctgcggggaccgggcgacgggcaagcactacggggccagctcctgcgacggctgcaagggcttcttccgccgggaggtccgcaagaaccacatgtacagctgccggttctcccgccagtgcgtggtggacaaggacaagcggaaccagtgccgctactgccggctgaagaagtgcttccgcgccgggatgaagaaggaggccgtccagaacgagcgggaccgcatcagcacccggcgctccagctacgaggactccagcctgccctccatcaacgcgctcctgcaggccgaggtgctgagccggcagatcacctcccccgtgagcggcatcaacggggacatccgcgccaagaagatcgcctccatcgccgacgtctgcgagagcatgaaggagcagctcctggtgctggtggagtgggcgaagtacatcccggccttctgcgagctccccctggacgaccaggtcgccctgctccgggcccacgccggcgagcacctcctgctgggggcgaccaagcgcagcatggtgttcaaggacgtgctgctgctcggcaacgactacatcgtcccccggcactgccccgagctggccgagatgtcccgcgtgagcatccggatcctggacgagctcgtgctgccgttccaggagctgcagatcgacgacaacgagtacgcctacctcaaggccatcatcttcttcgaccccgacgccaagggcctgtccgaccccgggaagatcaagcgcctgcgcagccaggtccaggtgtccctcgaggactacatcaacgaccggcagtacgacagccgcggccggttcggggagctgctgctcctgctgcccacgctccagtccatcacctggcagatgatcgagcagatccagttcatcaagctgttcggcatggcgaagatcgacaacctgctccaggagatgctgctgggcgggagcccgtccgacgcgccccacgcccaccaccccctccacccccacctgatgcaggagcacatgggcaccaacgtgatcgtcgccaacaccatgccgacgcacctgagcaacgggcagatgtgcgagtggccccgcccccggggccaggccgccacccccgagaccccgcagccctccccgcccgggggcagcggctccgagccctacaagctgctccccggggccgtggccaccatcgtgaagcccctgagcgccatcccccagccgacgatcaccaagcaggaggtcatctga

SEQ ID NO: 311 - RNA, 1425 nt, synthetic construct
  misc_feature 1..1425: note = CDS (opt1) from Homo sapiens__NP_000448.3__HNF4A(1-474)(R2V)
  source 1..1425: mol_type = other RNA
atggtgctgagcaagaccctcgtcgacatggacatggccgactactccgccgcgctggaccccgcctacaccacgctggagttcgagaacgtccaggtgctcaccatgggcaacgacaccagcccgtccgaggggaccaacctgaacgcccccaacagcctgggcgtgtccgccctctgcgccatctgcggggaccgcgcgacgggcaagcactacggggccagctcctgcgacggctgcaagggcttcttccggcgcagcgtgcggaagaaccacatgtactcctgccgcttcagccggcagtgcgtggtcgacaaggacaagcgcaaccagtgccggtactgccgcctgaagaagtgcttccgggccgggatgaagaaggaggccgtgcagaacgagcgcgaccggatctccacccgccggagctcctacgaggacagctccctgcccagcatcaacgcgctcctgcaggccgaggtgctgtcccgccagatcaccagccccgtctccggcatcaacggggacatccgggccaagaagatcgccagcatcgccgacgtgtgcgagagcatgaaggagcagctcctggtgctggtcgagtgggcgaagtacatcccggccttctgcgagctccccctggacgaccaggtggccctgctccgcgcccacgccggcgagcacctcctgctgggggcgaccaagcggtccatggtgttcaaggacgtcctgctgctcggcaacgactacatcgtgccccgccactgccccgagctggccgagatgagccgggtgtccatccgcatcctggacgagctcgtcctgccgttccaggagctgcagatcgacgacaacgagtacgcctacctcaaggccatcatcttcttcgaccccgacgccaagggcctgagcgaccccgggaagatcaagcggctgcgctcccaggtccaggtgagcctcgaggactacatcaacgaccgccagtacgactcccggggccgcttcggggagctgctgctcctgctgcccacgctccagagcatcacctggcagatgatcgagcagatccagttcatcaagctgttcggcatggcgaagatcgacaacctgctccaggagatgctgctgggcgggtccccgagcgacgcgccccacgcccaccaccccctccacccccacctgatgcaggagcacatgggcaccaacgtgatcgtggccaacaccatgccgacgcacctgtccaacgggcagatgtgcgagtggccccggccccgcggccaggccgccacccccgagaccccgcagcccagcccgcccgggggctccggcagcgagccctacaagctgctccccggggccgtggccaccatcgtcaagcccctgtccgccatcccccagccgacgatcaccaagcaggaggtgatctga

SEQ ID NO: 312 - RNA, 1425 nt, synthetic construct
  misc_feature 1..1425: note = CDS (opt1) from Homo sapiens__NP_000448.3__HNF4A(1-474)(R2V_K5V)
  source 1..1425: mol_type = other RNA
atggtgctgagcgtcaccctcgtggacatggacatggccgactactccgccgcgctggaccccgcctacaccacgctggagttcgagaacgtgcaggtcctcaccatgggcaacgacaccagcccgtccgaggggaccaacctgaacgcccccaacagcctgggcgtgtccgccctctgcgccatctgcggggaccgcgcgacgggcaagcactacggggccagctcctgcgacggctgcaagggcttcttccggcgcagcgtgcggaagaaccacatgtactcctgccgcttcagccggcagtgcgtcgtggacaaggacaagcgcaaccagtgccggtactgccgcctgaagaagtgcttccgggccgggatgaagaaggaggccgtgcagaacgagcgcgaccggatctccacccgccggagctcctacgaggacagctccctgcccagcatcaacgcgctcctgcaggccgaggtcctgtcccgccagatcaccagccccgtgtccggcatcaacggggacatccgggccaagaagatcgccagcatcgccgacgtgtgcgagagcatgaaggagcagctcctggtcctggtggagtgggcgaagtacatcccggccttctgcgagctccccctggacgaccaggtggccctgctccgcgcccacgccggcgagcacctcctgctgggggcgaccaagcggtccatggtcttcaaggacgtgctgctgctcggcaacgactacatcgtgccccgccactgccccgagctggccgagatgagccgggtctccatccgcatcctggacgagctcgtgctgccgttccaggagctgcagatcgacgacaacgagtacgcctacctcaaggccatcatcttcttcgaccccgacgccaagggcctgagcgaccccgggaagatcaagcggctgcgctcccaggtgcaggtcagcctcgaggactacatcaacgaccgccagtacgactcccggggccgcttcggggagctgctgctcctgctgcccacgctccagagcatcacctggcagatgatcgagcagatccagttcatcaagctgttcggcatggcgaagatcgacaacctgctccaggagatgctgctgggcgggtccccgagcgacgcgccccacgcccaccaccccctccacccccacctgatgcaggagcacatgggcaccaacgtgatcgtggccaacaccatgccgacgcacctgtccaacgggcagatgtgcgagtggccccggccccgcggccaggccgccacccccgagaccccgcagcccagcccgcccgggggctccggcagcgagccctacaagctgctccccggggccgtcgccaccatcgtgaagcccctgtccgccatcccccagccgacgatcaccaagcaggaggtcatctga

SEQ ID NO: 313 - RNA, 1425 nt, synthetic construct
  misc_feature 1..1425: note = CDS (opt1) from Homo sapiens__NP_000448.3__HNF4A(1-474)(K179R_K180R)
  source 1..1425: mol_type = other RNA
atgcgcctgagcaagaccctcgtggacatggacatggccgactactccgccgcgctggaccccgcctacaccacgctggagttcgagaacgtccaggtgctcaccatgggcaacgacaccagcccgtccgaggggaccaacctgaacgcccccaacagcctgggcgtgtccgccctctgcgccatctgcggggaccgggcgacgggcaagcactacggggccagctcctgcgacggctgcaagggcttcttccgccggagcgtccgcaagaaccacatgtactcctgccggttcagccgccagtgcgtggtggacaaggacaagcggaaccagtgccgctactgccggctgaagaagtgcttccgcgccgggatgaagaaggaggccgtccagaacgagcgggaccgcatctccacccggcgcagctcctacgaggacagctccctgcccagcatcaacgcgctcctgcaggccgaggtgctgtcccggcagatcaccagccccgtgtccggcatcaacggggacatccgcgcccggcgcatcgccagcatcgccgacgtctgcgagagcatgaaggagcagctcctggtgctggtggagtgggcgaagtacatcccggccttctgcgagctccccctggacgaccaggtcgccctgctccgggcccacgccggcgagcacctcctgctgggggcgaccaagcgctccatggtgttcaaggacgtgctgctgctcggcaacgactacatcgtcccccggcactgccccgagctggccgagatgagccgcgtgtccatccgcatcctggacgagctcgtgctgccgttccaggagctgcagatcgacgacaacgagtacgcctacctcaaggccatcatcttcttcgaccccgacgccaagggcctgagcgaccccgggaagatcaagcggctgcgctcccaggtccaggtgagcctcgaggactacatcaacgaccggcagtacgactcccgcggccggttcggggagctgctgctcctgctgcccacgctccagagcatcacctggcagatgatcgagcagatccagttcatcaagctgttcggcatggcgaagatcgacaacctgctccaggagatgctgctgggcgggtccccgagcgacgcgccccacgcccaccaccccctccacccccacctgatgcaggagcacatgggcaccaacgtgatcgtcgccaacaccatgccgacgcacctgtccaacgggcagatgtgcgagtggccccgcccccggggccaggccgccacccccgagaccccgcagcccagcccgcccgggggctccggcagcgagccctacaagctgctccccggggccgtggccaccatcgtgaagcccctgtccgccatcccccagccgacgatcaccaagcaggaggtcatctga

SEQ ID NO: 314 - RNA, 1425 nt, synthetic construct
  misc_feature 1..1425: note = CDS (opt1) from Homo sapiens__NP_000448.3__HNF4A(1-474)(K234R)
  source 1..1425: mol_type = other RNA
atgcgcctgagcaagaccctcgtggacatggacatggccgactactccgccgcgctggaccccgcctacaccacgctggagttcgagaacgtccaggtgctcaccatgggcaacgacaccagcccgtccgaggggaccaacctgaacgcccccaacagcctgggcgtgtccgccctctgcgccatctgcggggaccgggcgacgggcaagcactacggggccagctcctgcgacggctgcaagggcttcttccgccggagcgtccgcaagaaccacatgtactcctgccggttcagccgccagtgcgtggtggacaaggacaagcggaaccagtgccgctactgccggctgaagaagtgcttccgcgccgggatgaagaaggaggccgtccagaacgagcgggaccgcatctccacccggcgcagctcctacgaggacagctccctgcccagcatcaacgcgctcctgcaggccgaggtgctgtcccggcagatcaccagccccgtgtccggcatcaacggggacatccgcgccaagaagatcgccagcatcgccgacgtctgcgagagcatgaaggagcagctcctggtgctggtggagtgggcgaagtacatcccggccttctgcgagctccccctggacgaccaggtcgccctgctccgggcccacgccggcgagcacctcctgctgggggcgacccgccggtccatggtgttcaaggacgtgctgctgctcggcaacgactacatcgtcccccgccactgccccgagctggccgagatgagccgggtgtccatccgcatcctggacgagctcgtgctgccgttccaggagctgcagatcgacgacaacgagtacgcctacctcaaggccatcatcttcttcgaccccgacgccaagggcctgagcgaccccgggaagatcaagcgcctgcggtcccaggtccaggtgagcctcgaggactacatcaacgaccgccagtacgactcccggggccgcttcggggagctgctgctcctgctgcccacgctccagagcatcacctggcagatgatcgagcagatccagttcatcaagctgttcggcatggcgaagatcgacaacctgctccaggagatgctgctgggcgggtccccgagcgacgcgccccacgcccaccaccccctccacccccacctgatgcaggagcacatgggcaccaacgtgatcgtcgccaacaccatgccgacgcacctgtccaacgggcagatgtgcgagtggccccggccccgcggccaggccgccacccccgagaccccgcagcccagcccgcccgggggctccggcagcgagccctacaagctgctccccggggccgtggccaccatcgtgaagcccctgtccgccatcccccagccgacgatcaccaagcaggaggtcatctga

SEQ ID NO: 315 - RNA, 1425 nt, synthetic construct
  misc_feature 1..1425: note = CDS (opt1) from Homo sapiens__NP_000448.3__HNF4A(1-474)(K300R)
  source 1..1425: mol_type = other RNA
atgcgcctgagcaagaccctcgtggacatggacatggccgactactccgccgcgctggaccccgcctacaccacgctggagttcgagaacgtccaggtgctcaccatgggcaacgacaccagcccgtccgaggggaccaacctgaacgcccccaacagcctgggcgtgtccgccctctgcgccatctgcggggaccgggcgacgggcaagcactacggggccagctcctgcgacggctgcaagggcttcttccgccggagcgtccgcaagaaccacatgtactcctgccggttcagccgccagtgcgtggtggacaaggacaagcggaaccagtgccgctactgccggctgaagaagtgcttccgcgccgggatgaagaaggaggccgtccagaacgagcgggaccgcatctccacccggcgcagctcctacgaggacagctccctgcccagcatcaacgcgctcctgcaggccgaggtgctgtcccggcagatcaccagccccgtgtccggcatcaacggggacatccgcgccaagaagatcgccagcatcgccgacgtctgcgagagcatgaaggagcagctcctggtgctggtggagtgggcgaagtacatcccggccttctgcgagctccccctggacgaccaggtcgccctgctccgggcccacgccggcgagcacctcctgctgggggcgaccaagcgctccatggtgttcaaggacgtgctgctgctcggcaacgactacatcgtcccccggcactgccccgagctggccgagatgagccgcgtgtccatccggatcctggacgagctcgtgctgccgttccaggagctgcagatcgacgacaacgagtacgcctacctcaaggccatcatcttcttcgaccccgacgcccgcggcctgagcgaccccgggaagatcaagcgcctgcggtcccaggtccaggtgagcctcgaggactacatcaacgaccgccagtacgactcccggggccgcttcggggagctgctgctcctgctgcccacgctccagagcatcacctggcagatgatcgagcagatccagttcatcaagctgttcggcatggcgaagatcgacaacctgctccaggagatgctgctgggcgggtccccgagcgacgcgccccacgcccaccaccccctccacccccacctgatgcaggagcacatgggcaccaacgtgatcgtcgccaacaccatgccgacgcacctgtccaacgggcagatgtgcgagtggccccggccccgcggccaggccgccacccccgagaccccgcagcccagcccgcccgggggctccggcagcgagccctacaagctgctccccggggccgtggccaccatcgtgaagcccctgtccgccatcccccagccgacgatcaccaagcaggaggtcatctga

SEQ ID NO: 316 - RNA, 1425 nt, synthetic construct
  misc_feature 1..1425: note = CDS (opt1) from Homo sapiens__NP_000448.3__HNF4A(1-474)(K300R_K307R_K309R)
  source 1..1425: mol_type = other RNA
atgcgcctgagcaagaccctcgtggacatggacatggccgactactccgccgcgctggaccccgcctacaccacgctggagttcgagaacgtccaggtgctcaccatgggcaacgacaccagcccgtccgaggggaccaacctgaacgcccccaacagcctgggcgtgtccgccctctgcgccatctgcggggaccgggcgacgggcaagcactacggggccagctcctgcgacggctgcaagggcttcttccgccggagcgtccgcaagaaccacatgtactcctgccggttcagccgccagtgcgtggtggacaaggacaagcggaaccagtgccgctactgccggctgaagaagtgcttccgcgccgggatgaagaaggaggccgtccagaacgagcgggaccgcatctccacccggcgcagctcctacgaggacagctccctgcccagcatcaacgcgctcctgcaggccgaggtgctgtcccggcagatcaccagccccgtgtccggcatcaacggggacatccgcgccaagaagatcgccagcatcgccgacgtctgcgagagcatgaaggagcagctcctggtgctggtggagtgggcgaagtacatcccggccttctgcgagctccccctggacgaccaggtcgccctgctccgggcccacgccggcgagcacctcctgctgggggcgaccaagcgctccatggtgttcaaggacgtgctgctgctcggcaacgactacatcgtcccccggcactgccccgagctggccgagatgagccgcgtgtccatccggatcctggacgagctcgtgctgccgttccaggagctgcagatcgacgacaacgagtacgcctacctcaaggccatcatcttcttcgaccccgacgcccgcggcctgagcgaccccgggcgcatccggcgcctgcggtcccaggtccaggtgagcctcgaggactacatcaacgaccgccagtacgactcccggggccgcttcggggagctgctgctcctgctgcccacgctccagagcatcacctggcagatgatcgagcagatccagttcatcaagctgttcggcatggcgaagatcgacaacctgctccaggagatgctgctgggcgggtccccgagcgacgcgccccacgcccaccaccccctccacccccacctgatgcaggagcacatgggcaccaacgtgatcgtcgccaacaccatgccgacgcacctgtccaacgggcagatgtgcgagtggccccggccccgcggccaggccgccacccccgagaccccgcagcccagcccgcccgggggctccggcagcgagccctacaagctgctccccggggccgtggccaccatcgtgaagcccctgtccgccatcccccagccgacgatcaccaagcaggaggtcatctga

SEQ ID NO: 317 - RNA, 1425 nt, synthetic construct
  misc_feature 1..1425: note = CDS (opt1) from Homo sapiens__NP_000448.3__HNF4A(1-474)(K447R_K470R)
  source 1..1425: mol_type = other RNA
atgcgcctgagcaagaccctcgtggacatggacatggccgactactccgccgcgctggaccccgcctacaccacgctggagttcgagaacgtccaggtgctcaccatgggcaacgacaccagcccgtccgaggggaccaacctgaacgcccccaacagcctgggcgtgtccgccctctgcgccatctgcggggaccgggcgacgggcaagcactacggggccagctcctgcgacggctgcaagggcttcttccgccggagcgtccgcaagaaccacatgtactcctgccggttcagccgccagtgcgtggtggacaaggacaagcggaaccagtgccgctactgccggctgaagaagtgcttccgcgccgggatgaagaaggaggccgtccagaacgagcgggaccgcatctccacccggcgcagctcctacgaggacagctccctgcccagcatcaacgcgctcctgcaggccgaggtgctgtcccggcagatcaccagccccgtgtccggcatcaacggggacatccgcgccaagaagatcgccagcatcgccgacgtctgcgagagcatgaaggagcagctcctggtgctggtggagtgggcgaagtacatcccggccttctgcgagctccccctggacgaccaggtcgccctgctccgggcccacgccggcgagcacctcctgctgggggcgaccaagcgctccatggtgttcaaggacgtgctgctgctcggcaacgactacatcgtcccccggcactgccccgagctggccgagatgagccgcgtgtccatccggatcctggacgagctcgtgctgccgttccaggagctgcagatcgacgacaacgagtacgcctacctcaaggccatcatcttcttcgaccccgacgccaagggcctgagcgaccccgggaagatcaagcgcctgcgctcccaggtccaggtgagcctcgaggactacatcaacgaccggcagtacgactcccgcggccggttcggggagctgctgctcctgctgcccacgctccagagcatcacctggcagatgatcgagcagatccagttcatcaagctgttcggcatggcgaagatcgacaacctgctccaggagatgctgctgggcgggtccccgagcgacgcgccccacgcccaccaccccctccacccccacctgatgcaggagcacatgggcaccaacgtgatcgtcgccaacaccatgccgacgcacctgtccaacgggcagatgtgcgagtggccccgcccccggggccaggccgccacccccgagaccccgcagcccagcccgcccgggggctccggcagcgagccctaccgcctgctccccggggccgtggccaccatcgtgaagcccctgtccgccatcccccagccgacgatcacccggcaggaggtcatctga

SEQ ID NO: 318 - RNA, 1425 nt, synthetic construct
  misc_feature 1..1425: note = CDS (opt1) from Homo sapiens__NP_000448.3__HNF4A(1-474)(K458R)
  source 1..1425: mol_type = other RNA
atgcgcctgagcaagaccctcgtggacatggacatggccgactactccgccgcgctggaccccgcctacaccacgctggagttcgagaacgtccaggtgctcaccatgggcaacgacaccagcccgtccgaggggaccaacctgaacgcccccaacagcctgggcgtgtccgccctctgcgccatctgcggggaccgggcgacgggcaagcactacggggccagctcctgcgacggctgcaagggcttcttccgccggagcgtccgcaagaaccacatgtactcctgccggttcagccgccagtgcgtggtggacaaggacaagcggaaccagtgccgctactgccggctgaagaagtgcttccgcgccgggatgaagaaggaggccgtccagaacgagcgggaccgcatctccacccggcgcagctcctacgaggacagctccctgcccagcatcaacgcgctcctgcaggccgaggtgctgtcccggcagatcaccagccccgtgtccggcatcaacggggacatccgcgccaagaagatcgccagcatcgccgacgtctgcgagagcatgaaggagcagctcctggtgctggtggagtgggcgaagtacatcccggccttctgcgagctccccctggacgaccaggtcgccctgctccgggcccacgccggcgagcacctcctgctgggggcgaccaagcgctccatggtgttcaaggacgtgctgctgctcggcaacgactacatcgtcccccggcactgccccgagctggccgagatgagccgcgtgtccatccggatcctggacgagctcgtgctgccgttccaggagctgcagatcgacgacaacgagtacgcctacctcaaggccatcatcttcttcgaccccgacgccaagggcctgagcgaccccgggaagatcaagcgcctgcgctcccaggtccaggtgagcctcgaggactacatcaacgaccggcagtacgactcccgcggccggttcggggagctgctgctcctgctgcccacgctccagagcatcacctggcagatgatcgagcagatccagttcatcaagctgttcggcatggcgaagatcgacaacctgctccaggagatgctgctgggcgggtccccgagcgacgcgccccacgcccaccaccccctccacccccacctgatgcaggagcacatgggcaccaacgtgatcgtcgccaacaccatgccgacgcacctgtccaacgggcagatgtgcgagtggccccgcccccggggccaggccgccacccccgagaccccgcagcccagcccgcccgggggctccggcagcgagccctacaagctgctccccggggccgtggccaccatcgtgcgccccctgtccgccatcccccagccgacgatcaccaagcaggaggtcatctga

SEQ ID NO: 319 - RNA, 1425 nt, synthetic construct
  misc_feature 1..1425: note = CDS (opt1) from Homo sapiens__NP_000448.3__HNF4A(1-474)(K106R_K108R_K126R_K127R)
  source 1..1425: mol_type = other RNA
atgcgcctgagcaagaccctcgtggacatggacatggccgactactccgccgcgctggaccccgcctacaccacgctggagttcgagaacgtccaggtgctcaccatgggcaacgacaccagcccgtccgaggggaccaacctgaacgcccccaacagcctgggcgtgtccgccctctgcgccatctgcggggaccgggcgacgggcaagcactacggggccagctcctgcgacggctgcaagggcttcttccgccggagcgtccgcaagaaccacatgtactcctgccggttcagccgccagtgcgtggtggaccgggaccgccggaaccagtgccgctactgccggctgaagaagtgcttccgcgccgggatgcggcgcgaggccgtccagaacgagcgggaccgcatctccacccggcgcagctcctacgaggacagctccctgcccagcatcaacgcgctcctgcaggccgaggtgctgtcccggcagatcaccagccccgtgtccggcatcaacggggacatccgcgccaagaagatcgccagcatcgccgacgtctgcgagagcatgaaggagcagctcctggtgctggtggagtgggcgaagtacatcccggccttctgcgagctccccctggacgaccaggtcgccctgctccgggcccacgccggcgagcacctcctgctgggggcgaccaagcgctccatggtgttcaaggacgtgctgctgctcggcaacgactacatcgtcccccgccactgccccgagctggccgagatgagccgggtgtccatccgcatcctggacgagctcgtgctgccgttccaggagctgcagatcgacgacaacgagtacgcctacctcaaggccatcatcttcttcgaccccgacgccaagggcctgagcgaccccgggaagatcaagcggctgcgctcccaggtccaggtgagcctcgaggactacatcaacgaccggcagtacgactcccgcggccggttcggggagctgctgctcctgctgcccacgctccagagcatcacctggcagatgatcgagcagatccagttcatcaagctgttcggcatggcgaagatcgacaacctgctccaggagatgctgctgggcgggtccccgagcgacgcgccccacgcccaccaccccctccacccccacctgatgcaggagcacatgggcaccaacgtgatcgtcgccaacaccatgccgacgcacctgtccaacgggcagatgtgcgagtggccccgcccccggggccaggccgccacccccgagaccccgcagcccagcccgcccgggggctccggcagcgagccctacaagctgctccccggggccgtggccaccatcgtgaagcccctgtccgccatcccccagccgacgatcaccaagcaggaggtcatctga

SEQ ID NO: 320 - RNA, 1425 nt, synthetic construct; identical to SEQ ID NO: 271
  misc_feature 1..1425: note = CDS (opt1) from Homo sapiens__NP_000448.3__HNF4A(1-474)(E285Q)
  source 1..1425: mol_type = other RNA

SEQ ID NO: 321 - RNA, 1425 nt, synthetic construct
  misc_feature 1..1425: note = CDS (opt1) from Homo sapiens__NP_000448.3__HNF4A(1-474)(T166E)
  source 1..1425: mol_type = other RNA
atgcgcctgagcaagaccctcgtggacatggacatggccgactactccgccgcgctggaccccgcctacaccacgctggagttcgagaacgtccaggtgctcaccatgggcaacgacaccagcccgtccgaggggaccaacctgaacgcccccaacagcctgggcgtgtccgccctctgcgccatctgcggggaccgggcgacgggcaagcactacggggccagctcctgcgacggctgcaagggcttcttccgccggagcgtccgcaagaaccacatgtactcctgccggttcagccgccagtgcgtggtggacaaggacaagcggaaccagtgccgctactgccggctgaagaagtgcttccgcgccgggatgaagaaggaggccgtccagaacgagcgggaccgcatctccacccggcgcagctcctacgaggacagctccctgcccagcatcaacgcgctcctgcaggccgaggtgctgtcccggcagatcgagagccccgtgtccggcatcaacggggacatccgcgccaagaagatcgccagcatcgccgacgtctgcgagagcatgaaggagcagctcctggtgctggtggagtgggcgaagtacatcccggccttctgcgagctccccctggacgaccaggtcgccctgctccgggcccacgccggcgagcacctcctgctgggggcgaccaagcgctccatggtgttcaaggacgtgctgctgctcggcaacgactacatcgtcccccggcactgccccgagctggccgagatgagccgcgtgtccatccggatcctggacgagctcgtgctgccgttccaggagctgcagatcgacgacaacgagtacgcctacctcaaggccatcatcttcttcgaccccgacgccaagggcctgagcgaccccgggaagatcaagcgcctgcgctcccaggtccaggtgagcctcgaggactacatcaacgaccggcagtacgactcccgcggccggttcggggagctgctgctcctgctgcccaccctccagagcatcacgtggcagatgatcgagcagatccagttcatcaagctgttcggcatggcgaagatcgacaacctgctccaggagatgctgctgggcgggtccccgagcgacgcgccccacgcccaccaccccctccacccccacctgatgcaggagcacatgggcaccaacgtgatcgtcgccaacaccatgccgacccacctgtccaacgggcagatgtgcgagtggccccgcccccggggccaggccgccacgcccgagaccccgcagcccagcccgcccgggggctccggcagcgagccctacaagctgctccccggggccgtggccaccatcgtgaagcccctgtccgccatcccccagccgaccatcacgaagcaggaggtcatctga

SEQ ID NO: 322 - RNA, 1425 nt, synthetic construct
  misc_feature 1..1425: note = CDS (opt1) from Homo sapiens__NP_000448.3__HNF4A(1-474)(S148A)
  source 1..1425: mol_type = other RNA
atgcgcctgagcaagaccctcgtggacatggacatggccgactactccgccgcgctggaccccgcctacaccacgctggagttcgagaacgtccaggtgctcaccatgggcaacgacaccagcccgtccgaggggaccaacctgaacgcccccaacagcctgggcgtgtccgccctctgcgccatctgcggggaccgggcgacgggcaagcactacggggccagctcctgcgacggctgcaagggcttcttccgccggagcgtccgcaagaaccacatgtactcctgccggttcagccgccagtgcgtggtggacaaggacaagcggaaccagtgccgctactgccggctgaagaagtgcttccgcgccgggatgaagaaggaggccgtccagaacgagcgggaccgcatctccacccggcgcagctcctacgaggacagcgcgctgccctccatcaacgccctcctgcaggccgaggtgctgagccggcagatcacctcccccgtgagcggcatcaacggggacatccgcgccaagaagatcgcctccatcgcggacgtctgcgagagcatgaaggagcagctcctggtgctggtggagtgggccaagtacatcccggccttctgcgagctccccctggacgaccaggtcgccctgctccgggcccacgcgggcgagcacctcctgctgggggccaccaagcgcagcatggtgttcaaggacgtgctgctgctcggcaacgactacatcgtcccccggcactgccccgagctggccgagatgtcccgcgtgagcatccggatcctggacgagctcgtgctgccgttccaggagctgcagatcgacgacaacgagtacgcctacctcaaggccatcatcttcttcgaccccgacgcgaagggcctgtccgaccccgggaagatcaagcgcctgcgcagccaggtccaggtgtccctcgaggactacatcaacgaccggcagtacgacagccgcggccggttcggggagctgctgctcctgctgcccacgctccagtccatcacctggcagatgatcgagcagatccagttcatcaagctgttcggcatggccaagatcgacaacctgctccaggagatgctgctgggcgggagcccgtccgacgcgccccacgcccaccaccccctccacccccacctgatgcaggagcacatgggcaccaacgtgatcgtcgccaacaccatgccgacgcacctgagcaacgggcagatgtgcgagtggccccgcccccggggccaggccgccacccccgagaccccgcagccctccccgcccgggggcagcggctccgagccctacaagctgctccccggggccgtggccaccatcgtgaagcccctgagcgcgatcccccagccgacgatcaccaagcaggaggtcatctga

SEQ ID NO: 323 - RNA, 1425 nt, synthetic construct
  misc_feature 1..1425: note = CDS (opt1) from Homo sapiens__NP_000448.3__HNF4A(1-474)(S148E)
  source 1..1425: mol_type = other RNA
atgcgcctgagcaagaccctcgtggacatggacatggccgactactccgccgcgctggaccccgcctacaccacgctggagttcgagaacgtccaggtgctcaccatgggcaacgacaccagcccgtccgaggggaccaacctgaacgcccccaacagcctgggcgtgtccgccctctgcgccatctgcggggaccgggcgacgggcaagcactacggggccagctcctgcgacggctgcaagggcttcttccgccggagcgtccgcaagaaccacatgtactcctgccggttcagccgccagtgcgtggtggacaaggacaagcggaaccagtgccgctactgccggctgaagaagtgcttccgcgccgggatgaagaaggaggccgtccagaacgagcgggaccgcatctccacccggcgcagctcctacgaggacagcgagctgccctccatcaacgcgctcctgcaggccgaggtgctgagccggcagatcacctcccccgtgagcggcatcaacggggacatccgcgccaagaagatcgcctccatcgccgacgtctgcgagagcatgaaggagcagctcctggtgctggtggagtgggcgaagtacatcccggccttctgcgagctccccctggacgaccaggtcgccctgctccgggcccacgccggcgagcacctcctgctgggggcgaccaagcgcagcatggtgttcaaggacgtgctgctgctcggcaacgactacatcgtcccccggcactgccccgagctggccgagatgtcccgcgtgagcatccggatcctggacgagctcgtgctgccgttccaggagctgcagatcgacgacaacgagtacgcctacctcaaggccatcatcttcttcgaccccgacgccaagggcctgtccgaccccgggaagatcaagcgcctgcgcagccaggtccaggtgtccctcgaggactacatcaacgaccggcagtacgacagccgcggccggttcggggagctgctgctcctgctgcccacgctccagtccatcacctggcagatgatcgagcagatccagttcatcaagctgttcggcatggcgaagatcgacaacctgctccaggagatgctgctgggcgggagcccgtccgacgcgccccacgcccaccaccccctccacccccacctgatgcaggagcacatgggcaccaacgtgatcgtcgccaacaccatgccgacgcacctgagcaacgggcagatgtgcgagtggccccgcccccggggccaggccgccacccccgagaccccgcagccctccccgcccgggggcagcggctccgagccctacaagctgctccccggggccgtggccaccatcgtgaagcccctgagcgccatcccccagccgacgatcaccaagcaggaggtcatctga

SEQ ID NO: 324 - RNA, 1425 nt, synthetic construct
  misc_feature 1..1425: note = CDS (opt1) from Homo sapiens__NP_000448.3__HNF4A(1-474)(S183A)
  source 1..1425: mol_type = other RNA
atgcgcctgagcaagaccctcgtggacatggacatggccgactactccgccgcgctggaccccgcctacaccacgctggagttcgagaacgtccaggtgctcaccatgggcaacgacaccagcccgtccgaggggaccaacctgaacgcccccaacagcctgggcgtgtccgccctctgcgccatctgcggggaccgggcgacgggcaagcactacggggccagctcctgcgacggctgcaagggcttcttccgccggagcgtccgcaagaaccacatgtactcctgccggttcagccgccagtgcgtggtggacaaggacaagcggaaccagtgccgctactgccggctgaagaagtgcttccgcgccgggatgaagaaggaggccgtccagaacgagcgggaccgcatctccacccggcgcagctcctacgaggacagctccctgcccagcatcaacgcgctcctgcaggccgaggtgctgtcccggcagatcaccagccccgtgtccggcatcaacggggacatccgcgccaagaagatcgccgccatcgcggacgtctgcgagagcatgaaggagcagctcctggtgctggtggagtgggccaagtacatcccggccttctgcgagctccccctggacgaccaggtcgccctgctccgggcccacgcgggcgagcacctcctgctgggggccaccaagcgcagcatggtgttcaaggacgtgctgctgctcggcaacgactacatcgtcccccggcactgccccgagctggccgagatgtcccgcgtgagcatccggatcctggacgagctcgtgctgccgttccaggagctgcagatcgacgacaacgagtacgcctacctcaaggccatcatcttcttcgaccccgacgcgaagggcctgtccgaccccgggaagatcaagcgcctgcgcagccaggtccaggtgtccctcgaggactacatcaacgaccggcagtacgacagccgcggccggttcggggagctgctgctcctgctgcccacgctccagtccatcacctggcagatgatcgagcagatccagttcatcaagctgttcggcatggccaagatcgacaacctgctccaggagatgctgctgggcgggagcccgtccgacgcgccccacgcccaccaccccctccacccccacctgatgcaggagcacatgggcaccaacgtgatcgtcgccaacaccatgccgacgcacctgagcaacgggcagatgtgcgagtggccccgcccccggggccaggccgccacccccgagaccccgcagccctccccgcccgggggcagcggctccgagccctacaagctgctccccggggccgtggccaccatcgtgaagcccctgagcgcgatcccccagccgacgatcaccaagcaggaggtcatctga

SEQ ID NO: 325 - RNA, 1425 nt, synthetic construct
  misc_feature 1..1425: note = CDS (opt1) from Homo sapiens__NP_000448.3__HNF4A(1-474)(S183E)
  source 1..1425: mol_type = other RNA
atgcgcctgagcaagaccctcgtggacatggacatggccgactactccgccgcgctggaccccgcctacaccacgctggagttcgagaacgtccaggtgctcaccatgggcaacgacaccagcccgtccgaggggaccaacctgaacgcccccaacagcctgggcgtgtccgccctctgcgccatctgcggggaccgggcgacgggcaagcactacggggccagctcctgcgacggctgcaagggcttcttccgccggagcgtccgcaagaaccacatgtactcctgccggttcagccgccagtgcgtggtggacaaggacaagcggaaccagtgccgctactgccggctgaagaagtgcttccgcgccgggatgaagaaggaggccgtccagaacgagcgggaccgcatctccacccggcgcagctcctacgaggacagctccctgcccagcatcaacgcgctcctgcaggccgaggtgctgtcccggcagatcaccagccccgtgtccggcatcaacggggacatccgcgccaagaagatcgccgagatcgccgacgtctgcgagagcatgaaggagcagctcctggtgctggtggagtgggcgaagtacatcccggccttctgcgagctccccctggacgaccaggtcgccctgctccgggcccacgccggcgagcacctcctgctgggggcgaccaagcgcagcatggtgttcaaggacgtgctgctgctcggcaacgactacatcgtcccccggcactgccccgagctggccgagatgtcccgcgtgagcatccggatcctggacgagctcgtgctgccgttccaggagctgcagatcgacgacaacgagtacgcctacctcaaggccatcatcttcttcgaccccgacgccaagggcctgtccgaccccgggaagatcaagcgcctgcgcagccaggtccaggtgtccctcgaggactacatcaacgaccggcagtacgacagccgcggccggttcggggagctgctgctcctgctgcccacgctccagtccatcacctggcagatgatcgagcagatccagttcatcaagctgttcggcatggcgaagatcgacaacctgctccaggagatgctgctgggcgggagcccgtccgacgcgccccacgcccaccaccccctccacccccacctgatgcaggagcacatgggcaccaacgtgatcgtcgccaacaccatgccgacgcacctgagcaacgggcagatgtgcgagtggccccgcccccggggccaggccgccacccccgagaccccgcagccctccccgcccgggggcagcggctccgagccctacaagctgctccccggggccgtggccaccatcgtgaagcccctgagcgccatcccccagccgacgatcaccaagcaggaggtcatctga

SEQ ID NO: 326 - RNA, 1425 nt, synthetic construct
  misc_feature 1..1425: note = CDS (opt1) from Homo sapiens__NP_000448.3__HNF4A(1-474)(S461A)
  source 1..1425: mol_type = other RNA
atgcgcctgagcaagaccctcgtggacatggacatggccgactactccgccgcgctggaccccgcctacaccacgctggagttcgagaacgtccaggtgctcaccatgggcaacgacaccagcccgtccgaggggaccaacctgaacgcccccaacagcctgggcgtgtccgccctctgcgccatctgcggggaccgggcgacgggcaagcactacggggccagctcctgcgacggctgcaagggcttcttccgccggagcgtccgcaagaaccacatgtactcctgccggttcagccgccagtgcgtggtggacaaggacaagcggaaccagtgccgctactgccggctgaagaagtgcttccgcgccgggatgaagaaggaggccgtccagaacgagcgggaccgcatctccacccggcgcagctcctacgaggacagctccctgcccagcatcaacgcgctcctgcaggccgaggtgctgtcccggcagatcaccagccccgtgtccggcatcaacggggacatccgcgccaagaagatcgccagcatcgccgacgtctgcgagagcatgaaggagcagctcctggtgctggtggagtgggcgaagtacatcccggccttctgcgagctccccctggacgaccaggtcgccctgctccgggcccacgccggcgagcacctcctgctgggggcgaccaagcgctccatggtgttcaaggacgtgctgctgctcggcaacgactacatcgtcccccggcactgccccgagctggccgagatgagccgcgtgtccatccggatcctggacgagctcgtgctgccgttccaggagctgcagatcgacgacaacgagtacgcctacctcaaggccatcatcttcttcgaccccgacgccaagggcctgagcgaccccgggaagatcaagcgcctgcgctcccaggtccaggtgagcctcgaggactacatcaacgaccggcagtacgactcccgcggccggttcggggagctgctgctcctgctgcccacgctccagagcatcacctggcagatgatcgagcagatccagttcatcaagctgttcggcatggcgaagatcgacaacctgctccaggagatgctgctgggcgggtccccgagcgacgcgccccacgcccaccaccccctccacccccacctgatgcaggagcacatgggcaccaacgtgatcgtcgccaacaccatgccgacgcacctgtccaacgggcagatgtgcgagtggccccgcccccggggccaggccgccacccccgagaccccgcagcccagcccgcccgggggctccggcagcgagccctacaagctgctccccggggccgtggccaccatcgtgaagcccctggccgcgatcccccagccgacgatcaccaagcaggaggtcatctga

SEQ ID NO: 327 - RNA, 1425 nt, synthetic construct; identical to SEQ ID NO: 278
  misc_feature 1..1425: note = CDS (opt1) from Homo sapiens__NP_000448.3__HNF4A(1-474)(S461E)
  source 1..1425: mol_type = other RNA

SEQ ID NO: 328 - RNA, 1425 nt, synthetic construct
  misc_feature 1..1425: note = CDS (opt1) from Homo sapiens__NP_000448.3__HNF4A(1-474)(S142A_S143A_S313A)
  source 1..1425: mol_type = other RNA
atgcgcctgagcaagaccctcgtggacatggacatggccgactactccgccgcgctggaccccgcctacaccacgctggagttcgagaacgtccaggtgctcaccatgggcaacgacaccagcccgtccgaggggaccaacctgaacgcccccaacagcctgggcgtgtccgccctctgcgccatctgcggggaccgggcgacgggcaagcactacggggccagctcctgcgacggctgcaagggcttcttccgccggagcgtccgcaagaaccacatgtactcctgccggttcagccgccagtgcgtggtggacaaggacaagcggaaccagtgccgctactgccggctgaagaagtgcttccgcgccgggatgaagaaggaggccgtccagaacgagcgggaccgcatctccacccggcgcgcggcctacgaggacagctccctgcccagcatcaacgccctcctgcaggccgaggtgctgtcccggcagatcaccagccccgtgtccggcatcaacggggacatccgcgccaagaagatcgcgagcatcgccgacgtctgcgagtccatgaaggagcagctcctggtgctggtggagtgggccaagtacatcccggccttctgcgagctccccctggacgaccaggtcgccctgctccgggcgcacgccggcgagcacctcctgctgggggccaccaagcgcagcatggtgttcaaggacgtgctgctgctcggcaacgactacatcgtcccccggcactgccccgagctggccgagatgagccgcgtgtccatccggatcctggacgagctcgtgctgccgttccaggagctgcagatcgacgacaacgagtacgcctacctcaaggcgatcatcttcttcgaccccgacgccaagggcctgagcgaccccgggaagatcaagcgcctgcgcgcccaggtccaggtgtccctcgaggactacatcaacgaccggcagtacgacagccgcggccggttcggggagctgctgctcctgctgcccacgctccagtccatcacctggcagatgatcgagcagatccagttcatcaagctgttcggcatggccaagatcgacaacctgctccaggagatgctgctgggcgggagcccgtccgacgcgccccacgcccaccaccccctccacccccacctgatgcaggagcacatgggcaccaacgtgatcgtcgccaacaccatgccgacgcacctgagcaacgggcagatgtgcgagtggccccgcccccggggccaggccgccacccccgagaccccgcagccctccccgcccgggggcagcggctccgagccctacaagctgctccccggggcggtggccaccatcgtgaagcccctgagcgccatcccccagccgacgatcaccaagcaggaggtcatctga

SEQ ID NO: 329 - RNA, 1425 nt, synthetic construct
  misc_feature 1..1425: note = CDS (opt1) from Homo sapiens__NP_000448.3__HNF4A(1-474)(S142A_S143A_S313A_K458R)
  source 1..1425: mol_type = other RNA
atgcgcctgagcaagaccctcgtggacatggacatggccgactactccgccgcgctggaccccgcctacaccacgctggagttcgagaacgtccaggtgctcaccatgggcaacgacaccagcccgtccgaggggaccaacctgaacgcccccaacagcctgggcgtgtccgccctctgcgccatctgcggggaccgggcgacgggcaagcactacggggccagctcctgcgacggctgcaagggcttcttccgccggagcgtccgcaagaaccacatgtactcctgccggttcagccgccagtgcgtggtggacaaggacaagcggaaccagtgccgctactgccggctgaagaagtgcttccgcgccgggatgaagaaggaggccgtccagaacgagcgggaccgcatctccacccggcgcgcggcctacgaggacagctccctgcccagcatcaacgccctcctgcaggccgaggtgctgtcccggcagatcaccagccccgtgtccggcatcaacggggacatccgcgccaagaagatcgcgagcatcgccgacgtctgcgagtccatgaaggagcagctcctggtgctggtggagtgggccaagtacatcccggccttctgcgagctccccctggacgaccaggtcgccctgctccgggcgcacgccggcgagcacctcctgctgggggccaccaagcgcagcatggtgttcaaggacgtgctgctgctcggcaacgactacatcgtcccccggcactgccccgagctggccgagatgagccgcgtgtccatccggatcctggacgagctcgtgctgccgttccaggagctgcagatcgacgacaacgagtacgcctacctcaaggcgatcatcttcttcgaccccgacgccaagggcctgagcgaccccgggaagatcaagcgcctgcgcgcccaggtccaggtgtccctcgaggactacatcaacgaccggcagtacgacagccgcggccggttcggggagctgctgctcctgctgcccacgctccagtccatcacctggcagatgatcgagcagatccagttcatcaagctgttcggcatggccaagatcgacaacctgctccaggagatgctgctgggcgggagcccgtccgacgcgccccacgcccaccaccccctccacccccacctgatgcaggagcacatgggcaccaacgtgatcgtcgccaacaccatgccgacgcacctgagcaacgggcagatgtgcgagtggccccgcccccggggccaggccgccacccccgagaccccgcagccctccccgcccgggggcagcggctccgagccctacaagctgctccccggggcggtggccaccatcgtgcgccccctgagcgccatcccccagccgacgatcaccaagcaggaggtcatctga

SEQ ID NO: 330 - RNA, 1425 nt, synthetic construct
  misc_feature 1..1425: note = CDS (opt1) from Homo sapiens__NP_000448.3__HNF4A(1-474)(S142A_S143A_S167A_S313A_ S378A_T429A_T432A_S436A_K458R)
  source 1..1425: mol_type = other RNA
atgcgcctgagcaagaccctcgtggacatggacatggccgactactccgccgcgctggaccccgcctacaccacgctggagttcgagaacgtccaggtgctcaccatgggcaacgacaccagcccgtccgaggggaccaacctgaacgcccccaacagcctgggcgtgtccgccctctgcgccatctgcggggaccgggcgacgggcaagcactacggggccagctcctgcgacggctgcaagggcttcttccgccggagcgtccgcaagaaccacatgtactcctgccggttcagccgccagtgcgtggtggacaaggacaagcggaaccagtgccgctactgccggctgaagaagtgcttccgcgccgggatgaagaaggaggccgtccagaacgagcgggaccgcatctccacccggcgcgcggcctacgaggacagctccctgcccagcatcaacgccctcctgcaggccgaggtgctgtcccggcagatcaccgcccccgtgagcggcatcaacggggacatccgcgcgaagaagatcgcctccatcgccgacgtctgcgagagcatgaaggagcagctcctggtgctggtggagtgggccaagtacatcccggccttctgcgagctccccctggacgaccaggtcgcgctgctccgggcccacgccggcgagcacctcctgctgggggccaccaagcgctccatggtgttcaaggacgtgctgctgctcggcaacgactacatcgtcccccggcactgccccgagctggccgagatgagccgcgtgagcatccggatcctggacgagctcgtgctgccgttccaggagctgcagatcgacgacaacgagtacgcgtacctcaaggccatcatcttcttcgaccccgacgccaagggcctgtccgaccccgggaagatcaagcgcctgcgcgcccaggtccaggtgagcctcgaggactacatcaacgaccggcagtacgactcccgcggccggttcggggagctgctgctcctgctgcccacgctccagagcatcacctggcagatgatcgagcagatccagttcatcaagctgttcggcatggccaagatcgacaacctgctccaggagatgctgctgggcggggcgccgtccgacgcgccccacgcccaccaccccctccacccccacctgatgcaggagcacatgggcaccaacgtgatcgtcgccaacaccatgccgacgcacctgagcaacgggcagatgtgcgagtggccccgcccccggggccaggccgccgcccccgaggccccgcagcccgccccgcccgggggctccggcagcgagccctacaagctgctccccggggcggtggccaccatcgtgcgccccctgtccgccatcccccagccgaccatcaccaagcaggaggtcatctga

SEQ ID NO: 331 - RNA, 1425 nt, synthetic construct
  misc_feature 1..1425: note = CDS (opt1) from Homo sapiens__NP_000448.3__HNF4A(1-474)(S142A_S143A_S148A_S167A_ S313A_S378A_T429A_T432A_S436A_K458R)
  source 1..1425: mol_type = other RNA
atgcgcctgagcaagaccctcgtggacatggacatggccgactactccgccgcgctggaccccgcctacaccacgctggagttcgagaacgtccaggtgctcaccatgggcaacgacaccagcccgtccgaggggaccaacctgaacgcccccaacagcctgggcgtgtccgccctctgcgccatctgcggggaccgggcgacgggcaagcactacggggccagctcctgcgacggctgcaagggcttcttccgccggagcgtccgcaagaaccacatgtactcctgccggttcagccgccagtgcgtggtggacaaggacaagcggaaccagtgccgctactgccggctgaagaagtgcttccgcgccgggatgaagaaggaggccgtccagaacgagcgggaccgcatctccacccggcgcgcggcctacgaggacagcgccctgccctccatcaacgccctcctgcaggccgaggtgctgagccggcagatcaccgcgcccgtgtccggcatcaacggggacatccgcgccaagaagatcgccagcatcgccgacgtctgcgagtccatgaaggagcagctcctggtgctggtggagtgggccaagtacatcccggcgttctgcgagctccccctggacgaccaggtcgccctgctccgggcccacgccggcgagcacctcctgctgggggccaccaagcgcagcatggtgttcaaggacgtgctgctgctcggcaacgactacatcgtcccccggcactgccccgagctggcggagatgtcccgcgtgagcatccggatcctggacgagctcgtgctgccgttccaggagctgcagatcgacgacaacgagtacgcctacctcaaggccatcatcttcttcgaccccgacgccaagggcctgagcgaccccgggaagatcaagcgcctgcgcgcccaggtccaggtgtccctcgaggactacatcaacgaccggcagtacgacagccgcggccggttcggggagctgctgctcctgctgcccacgctccagtccatcacctggcagatgatcgagcagatccagttcatcaagctgttcggcatggcgaagatcgacaacctgctccaggagatgctgctgggcggggccccgagcgacgcgccccacgcccaccaccccctccacccccacctgatgcaggagcacatgggcaccaacgtgatcgtcgccaacaccatgccgacgcacctgtccaacgggcagatgtgcgagtggccccgcccccggggccaggccgccgcccccgaggccccgcagcccgcgccgcccgggggcagcggctccgagccctacaagctgctccccggggccgtggccaccatcgtgcgccccctgagcgccatcccccagccgaccatcaccaagcaggaggtcatctga

SEQ ID NO: 332 - RNA, 1425 nt, synthetic construct
  misc_feature 1..1425: note = CDS (opt1) from Homo sapiens__NP_000448.3__HNF4A(1-474)(K106R_K108R_K126R_K127R_ S142A_S143A_S148A_S167A_S313A_S378A_T429A_T432A_S436A_K458R )
  source 1..1425: mol_type = other RNA
atgcgcctgagcaagaccctcgtggacatggacatggccgactactccgccgcgctggaccccgcctacaccacgctggagttcgagaacgtccaggtgctcaccatgggcaacgacaccagcccgtccgaggggaccaacctgaacgcccccaacagcctgggcgtgtccgccctctgcgccatctgcggggaccgggcgacgggcaagcactacggggccagctcctgcgacggctgcaagggcttcttccgccggagcgtccgcaagaaccacatgtactcctgccggttcagccgccagtgcgtggtggaccgggaccgccggaaccagtgccgctactgccggctgaagaagtgcttccgcgccgggatgcggcgcgaggccgtccagaacgagcgggaccgcatctccacccggcgcgcggcctacgaggacagcgccctgccctccatcaacgccctcctgcaggccgaggtgctgagccggcagatcaccgcgcccgtgtccggcatcaacggggacatccgcgccaagaagatcgccagcatcgccgacgtctgcgagtccatgaaggagcagctcctggtgctggtggagtgggccaagtacatcccggcgttctgcgagctccccctggacgaccaggtcgccctgctccgggcccacgccggcgagcacctcctgctgggggccaccaagcgcagcatggtgttcaaggacgtgctgctgctcggcaacgactacatcgtcccccgccactgccccgagctggcggagatgtcccgggtgagcatccgcatcctggacgagctcgtgctgccgttccaggagctgcagatcgacgacaacgagtacgcctacctcaaggccatcatcttcttcgaccccgacgccaagggcctgagcgaccccgggaagatcaagcggctgcgcgcccaggtccaggtgtccctcgaggactacatcaacgaccggcagtacgacagccgcggccggttcggggagctgctgctcctgctgcccacgctccagtccatcacctggcagatgatcgagcagatccagttcatcaagctgttcggcatggcgaagatcgacaacctgctccaggagatgctgctgggcggggccccgagcgacgcgccccacgcccaccaccccctccacccccacctgatgcaggagcacatgggcaccaacgtgatcgtcgccaacaccatgccgacgcacctgtccaacgggcagatgtgcgagtggccccgcccccggggccaggccgccgcccccgaggccccgcagcccgcgccgcccgggggcagcggctccgagccctacaagctgctccccggggccgtggccaccatcgtgcgccccctgagcgccatcccccagccgaccatcaccaagcaggaggtcatctga

SEQ ID NO: 333 - RNA, 1425 nt, synthetic construct
  misc_feature 1..1425: note = CDS (opt1) from Homo sapiens__NP_000448.3__HNF4A(1-474)(S142A_S143A_S148A_T166A_ S167A_S313A_S378A_T429A_T432A_S436A_K458R)
  source 1..1425: mol_type = other RNA
atgcgcctgagcaagaccctcgtggacatggacatggccgactactccgccgcgctggaccccgcctacaccacgctggagttcgagaacgtccaggtgctcaccatgggcaacgacaccagcccgtccgaggggaccaacctgaacgcccccaacagcctgggcgtgtccgccctctgcgccatctgcggggaccgggcgacgggcaagcactacggggccagctcctgcgacggctgcaagggcttcttccgccggagcgtccgcaagaaccacatgtactcctgccggttcagccgccagtgcgtggtggacaaggacaagcggaaccagtgccgctactgccggctgaagaagtgcttccgcgccgggatgaagaaggaggccgtccagaacgagcgggaccgcatctccacccggcgcgcggcctacgaggacagcgccctgccctccatcaacgccctcctgcaggccgaggtgctgagccggcagatcgcggcccccgtgtccggcatcaacggggacatccgcgccaagaagatcgccagcatcgccgacgtctgcgagtccatgaaggagcagctcctggtgctggtggagtgggcgaagtacatcccggccttctgcgagctccccctggacgaccaggtcgccctgctccgggcccacgccggcgagcacctcctgctgggggcgaccaagcgcagcatggtgttcaaggacgtgctgctgctcggcaacgactacatcgtcccccggcactgccccgagctggccgagatgtcccgcgtgagcatccggatcctggacgagctcgtgctgccgttccaggagctgcagatcgacgacaacgagtacgcctacctcaaggccatcatcttcttcgaccccgacgccaagggcctgagcgaccccgggaagatcaagcgcctgcgcgcgcaggtccaggtgtccctcgaggactacatcaacgaccggcagtacgacagccgcggccggttcggggagctgctgctcctgctgcccaccctccagtccatcacgtggcagatgatcgagcagatccagttcatcaagctgttcggcatggccaagatcgacaacctgctccaggagatgctgctgggcggggccccgagcgacgcgccccacgcccaccaccccctccacccccacctgatgcaggagcacatgggcaccaacgtgatcgtcgccaacaccatgccgacccacctgtccaacgggcagatgtgcgagtggccccgcccccggggccaggccgccgcccccgaggcgccgcagcccgccccgcccgggggcagcggctccgagccctacaagctgctccccggggccgtggccacgatcgtgcgccccctgagcgccatcccccagccgaccatcaccaagcaggaggtcatctga

SEQ ID NO: 334 - RNA, 1425 nt, synthetic construct
  misc_feature 1..1425: note = CDS (opt1) from Homo sapiens__NP_000448.3__HNF4A(1-474)(S87A_S142A_S143A_S148A_T 166A_S167A_S313A_S378A_T429A_T432A_S436A_K458R)
  source 1..1425: mol_type = other RNA
atgcgcctgagcaagaccctcgtggacatggacatggccgactactccgccgcgctggaccccgcctacaccacgctggagttcgagaacgtccaggtgctcaccatgggcaacgacaccagcccgtccgaggggaccaacctgaacgcccccaacagcctgggcgtgtccgccctctgcgccatctgcggggaccgggcgacgggcaagcactacggggccagctcctgcgacggctgcaagggcttcttccgccgggccgtccgcaagaaccacatgtacagctgccggttctcccgccagtgcgtggtggacaaggacaagcggaaccagtgccgctactgccggctgaagaagtgcttccgcgccgggatgaagaaggaggcggtccagaacgagcgggaccgcatcagcacccggcgcgccgcctacgaggactccgccctgcccagcatcaacgccctcctgcaggcggaggtgctgtcccggcagatcgccgcccccgtgagcggcatcaacggggacatccgcgccaagaagatcgcctccatcgcggacgtctgcgagagcatgaaggagcagctcctggtgctggtggagtgggccaagtacatcccggccttctgcgagctccccctggacgaccaggtcgccctgctccgggcccacgcgggcgagcacctcctgctgggggccaccaagcgctccatggtgttcaaggacgtgctgctgctcggcaacgactacatcgtcccccggcactgccccgagctggccgagatgagccgcgtgtccatccggatcctggacgagctcgtgctgccgttccaggagctgcagatcgacgacaacgagtacgcctacctcaaggccatcatcttcttcgaccccgacgcgaagggcctgagcgaccccgggaagatcaagcgcctgcgcgcccaggtccaggtgagcctcgaggactacatcaacgaccggcagtacgactcccgcggccggttcggggagctgctgctcctgctgcccaccctccagagcatcacgtggcagatgatcgagcagatccagttcatcaagctgttcggcatggccaagatcgacaacctgctccaggagatgctgctgggcggggccccgtccgacgcgccccacgcccaccaccccctccacccccacctgatgcaggagcacatgggcaccaacgtgatcgtcgccaacaccatgccgacccacctgagcaacgggcagatgtgcgagtggccccgcccccggggccaggccgccgcgcccgaggccccgcagcccgccccgcccgggggctccggcagcgagccctacaagctgctccccggggccgtggccacgatcgtgcgccccctgtccgcgatcccccagccgaccatcaccaagcaggaggtcatctga

SEQ ID NO: 335 - RNA, 1425 nt, synthetic construct
  misc_feature 1..1425: note = CDS (opt1) from Homo sapiens__NP_000448.3__HNF4A(1-474)(S87A_K106R_K108R_K126R_K 127R_S142A_S143A_S148A_T166A_S167A_S313A_S378A_T429A_T432A_ S436A_K458R)
  source 1..1425: mol_type = other RNA
atgcgcctgagcaagaccctcgtggacatggacatggccgactactccgccgcgctggaccccgcctacaccacgctggagttcgagaacgtccaggtgctcaccatgggcaacgacaccagcccgtccgaggggaccaacctgaacgcccccaacagcctgggcgtgtccgccctctgcgccatctgcggggaccgggcgacgggcaagcactacggggccagctcctgcgacggctgcaagggcttcttccgccgggccgtccgcaagaaccacatgtacagctgccggttctcccgccagtgcgtggtggaccgggaccgccggaaccagtgccgctactgccggctgaagaagtgcttccgcgccgggatgcggcgcgaggcggtccagaacgagcgggaccgcatcagcacccggcgcgccgcctacgaggactccgccctgcccagcatcaacgccctcctgcaggcggaggtgctgtcccggcagatcgccgcccccgtgagcggcatcaacggggacatccgcgccaagaagatcgcctccatcgcggacgtctgcgagagcatgaaggagcagctcctggtgctggtggagtgggccaagtacatcccggccttctgcgagctccccctggacgaccaggtcgccctgctccgggcccacgcgggcgagcacctcctgctgggggccaccaagcgctccatggtgttcaaggacgtgctgctgctcggcaacgactacatcgtcccccgccactgccccgagctggccgagatgagccgggtgtccatccgcatcctggacgagctcgtgctgccgttccaggagctgcagatcgacgacaacgagtacgcctacctcaaggccatcatcttcttcgaccccgacgcgaagggcctgagcgaccccgggaagatcaagcggctgcgcgcccaggtccaggtgagcctcgaggactacatcaacgaccggcagtacgactcccgcggccggttcggggagctgctgctcctgctgcccaccctccagagcatcacgtggcagatgatcgagcagatccagttcatcaagctgttcggcatggccaagatcgacaacctgctccaggagatgctgctgggcggggccccgtccgacgcgccccacgcccaccaccccctccacccccacctgatgcaggagcacatgggcaccaacgtgatcgtcgccaacaccatgccgacccacctgagcaacgggcagatgtgcgagtggccccgcccccggggccaggccgccgcgcccgaggccccgcagcccgccccgcccgggggctccggcagcgagccctacaagctgctccccggggccgtggccacgatcgtgcgccccctgtccgcgatcccccagccgaccatcaccaagcaggaggtcatctga

SEQ ID NO: 336 - RNA, 1425 nt, synthetic construct
  misc_feature 1..1425: note = CDS (opt1) from Homo sapiens__NP_000448.3__HNF4A(1-474)(S87A_K106R_K108R_K126R_K 127R)
  source 1..1425: mol_type = other RNA
atgcgcctgagcaagaccctcgtggacatggacatggccgactactccgccgcgctggaccccgcctacaccacgctggagttcgagaacgtccaggtgctcaccatgggcaacgacaccagcccgtccgaggggaccaacctgaacgcccccaacagcctgggcgtgtccgccctctgcgccatctgcggggaccgggcgacgggcaagcactacggggccagctcctgcgacggctgcaagggcttcttccgccgggccgtccgcaagaaccacatgtacagctgccggttctcccgccagtgcgtggtggaccgggaccgccggaaccagtgccgctactgccggctgaagaagtgcttccgcgccgggatgcggcgcgaggcggtccagaacgagcgggaccgcatcagcacccggcgctccagctacgaggactccagcctgccctccatcaacgccctcctgcaggccgaggtgctgagccggcagatcacctcccccgtgagcggcatcaacggggacatccgcgccaagaagatcgcctccatcgcggacgtctgcgagagcatgaaggagcagctcctggtgctggtggagtgggccaagtacatcccggccttctgcgagctccccctggacgaccaggtcgccctgctccgggcccacgcgggcgagcacctcctgctgggggccaccaagcgcagcatggtgttcaaggacgtgctgctgctcggcaacgactacatcgtcccccgccactgccccgagctggccgagatgtcccgggtgagcatccgcatcctggacgagctcgtgctgccgttccaggagctgcagatcgacgacaacgagtacgcctacctcaaggccatcatcttcttcgaccccgacgcgaagggcctgtccgaccccgggaagatcaagcggctgcgcagccaggtccaggtgtccctcgaggactacatcaacgaccggcagtacgacagccgcggccggttcggggagctgctgctcctgctgcccacgctccagtccatcacctggcagatgatcgagcagatccagttcatcaagctgttcggcatggccaagatcgacaacctgctccaggagatgctgctgggcgggagcccgtccgacgcgccccacgcccaccaccccctccacccccacctgatgcaggagcacatgggcaccaacgtgatcgtcgccaacaccatgccgacgcacctgagcaacgggcagatgtgcgagtggccccgcccccggggccaggccgccacccccgagaccccgcagccctccccgcccgggggcagcggctccgagccctacaagctgctccccggggccgtggccaccatcgtgaagcccctgagcgcgatcccccagccgacgatcaccaagcaggaggtcatctga

SEQ ID NO: 337 - RNA, 1425 nt, synthetic construct
  misc_feature 1..1425: note = CDS (opt1) from Homo sapiens__NP_000448.3__HNF4A(1-474)(S87A_K106R_K108R_K126R_K 127R_S142A_S143A_S148A_T166A_S167A_S313A_S378A_T429A_T432A_ S436A_K458R_S461A)
  source 1..1425: mol_type = other RNA
atgcgcctgagcaagaccctcgtggacatggacatggccgactactccgccgcgctggaccccgcctacaccacgctggagttcgagaacgtccaggtgctcaccatgggcaacgacaccagcccgtccgaggggaccaacctgaacgcccccaacagcctgggcgtgtccgccctctgcgccatctgcggggaccgggcgacgggcaagcactacggggccagctcctgcgacggctgcaagggcttcttccgccgggccgtccgcaagaaccacatgtacagctgccggttctcccgccagtgcgtggtggaccgggaccgccggaaccagtgccgctactgccggctgaagaagtgcttccgcgccgggatgcggcgcgaggcggtccagaacgagcgggaccgcatcagcacccggcgcgccgcctacgaggactccgccctgcccagcatcaacgccctcctgcaggcggaggtgctgtcccggcagatcgccgcccccgtgagcggcatcaacggggacatccgcgccaagaagatcgcctccatcgcggacgtctgcgagagcatgaaggagcagctcctggtgctggtggagtgggccaagtacatcccggccttctgcgagctccccctggacgaccaggtcgccctgctccgggcccacgcgggcgagcacctcctgctgggggccaccaagcgctccatggtgttcaaggacgtgctgctgctcggcaacgactacatcgtcccccgccactgccccgagctggccgagatgagccgggtgtccatccgcatcctggacgagctcgtgctgccgttccaggagctgcagatcgacgacaacgagtacgcctacctcaaggccatcatcttcttcgaccccgacgcgaagggcctgagcgaccccgggaagatcaagcggctgcgcgcccaggtccaggtgagcctcgaggactacatcaacgaccggcagtacgactcccgcggccggttcggggagctgctgctcctgctgcccaccctccagagcatcacgtggcagatgatcgagcagatccagttcatcaagctgttcggcatggccaagatcgacaacctgctccaggagatgctgctgggcggggccccgtccgacgcgccccacgcccaccaccccctccacccccacctgatgcaggagcacatgggcaccaacgtgatcgtcgccaacaccatgccgacccacctgagcaacgggcagatgtgcgagtggccccgcccccggggccaggccgccgcgcccgaggccccgcagcccgccccgcccgggggctccggcagcgagccctacaagctgctccccggggccgtggccacgatcgtgcgccccctggcggccatcccccagccgaccatcaccaagcaggaggtcatctga

SEQ ID NO: 338 - RNA, 1425 nt, synthetic construct
  misc_feature 1..1425: note = CDS (opt1) from Homo sapiens__NP_000448.3__HNF4A(1-474)(S87A_K106R_K108R_K126R_K 127R_S142A_S143A_S148A_T166A_S167A_S313A_S378A_T429A_T432A_ S436A_K458R_S461E)
  source 1..1425: mol_type = other RNA
atgcgcctgagcaagaccctcgtggacatggacatggccgactactccgccgcgctggaccccgcctacaccacgctggagttcgagaacgtccaggtgctcaccatgggcaacgacaccagcccgtccgaggggaccaacctgaacgcccccaacagcctgggcgtgtccgccctctgcgccatctgcggggaccgggcgacgggcaagcactacggggccagctcctgcgacggctgcaagggcttcttccgccgggccgtccgcaagaaccacatgtacagctgccggttctcccgccagtgcgtggtggaccgggaccgccggaaccagtgccgctactgccggctgaagaagtgcttccgcgccgggatgcggcgcgaggcggtccagaacgagcgggaccgcatcagcacccggcgcgccgcctacgaggactccgccctgcccagcatcaacgccctcctgcaggcggaggtgctgtcccggcagatcgccgcccccgtgagcggcatcaacggggacatccgcgccaagaagatcgcctccatcgcggacgtctgcgagagcatgaaggagcagctcctggtgctggtggagtgggccaagtacatcccggccttctgcgagctccccctggacgaccaggtcgccctgctccgggcccacgcgggcgagcacctcctgctgggggccaccaagcgctccatggtgttcaaggacgtgctgctgctcggcaacgactacatcgtcccccgccactgccccgagctggccgagatgagccgggtgtccatccgcatcctggacgagctcgtgctgccgttccaggagctgcagatcgacgacaacgagtacgcctacctcaaggccatcatcttcttcgaccccgacgcgaagggcctgagcgaccccgggaagatcaagcggctgcgcgcccaggtccaggtgagcctcgaggactacatcaacgaccggcagtacgactcccgcggccggttcggggagctgctgctcctgctgcccaccctccagagcatcacgtggcagatgatcgagcagatccagttcatcaagctgttcggcatggccaagatcgacaacctgctccaggagatgctgctgggcggggccccgtccgacgcgccccacgcccaccaccccctccacccccacctgatgcaggagcacatgggcaccaacgtgatcgtcgccaacaccatgccgacccacctgagcaacgggcagatgtgcgagtggccccgcccccggggccaggccgccgcgcccgaggccccgcagcccgccccgcccgggggctccggcagcgagccctacaagctgctccccggggccgtggccacgatcgtgcgccccctggaggcgatcccccagccgaccatcaccaagcaggaggtcatctga

SEQ ID NO: 339 - RNA, 1425 nt, synthetic construct
  misc_feature 1..1425: note = CDS (opt1) from Homo sapiens__NP_000448.3__HNF4A(1-474)(S87A_K106R_K108R_K126R_K 127R_S142A_S143A_S148E_T166A_S167E_S313A_S378E_T429E_T432E_ S436E_K458R_S461E)
  source 1..1425: mol_type = other RNA
atgcgcctgagcaagaccctcgtggacatggacatggccgactactccgccgcgctggaccccgcctacaccacgctggagttcgagaacgtccaggtgctcaccatgggcaacgacaccagcccgtccgaggggaccaacctgaacgcccccaacagcctgggcgtgtccgccctctgcgccatctgcggggaccgggcgacgggcaagcactacggggccagctcctgcgacggctgcaagggcttcttccgccgggccgtccgcaagaaccacatgtacagctgccggttctcccgccagtgcgtggtggaccgggaccgccggaaccagtgccgctactgccggctgaagaagtgcttccgcgccgggatgcggcgcgaggcggtccagaacgagcgggaccgcatcagcacccggcgcgccgcctacgaggactccgagctgcccagcatcaacgccctcctgcaggccgaggtgctgtcccggcagatcgcggagcccgtgagcggcatcaacggggacatccgcgccaagaagatcgcctccatcgccgacgtctgcgagagcatgaaggagcagctcctggtgctggtggagtgggccaagtacatcccggcgttctgcgagctccccctggacgaccaggtcgccctgctccgggcccacgccggcgagcacctcctgctgggggccaccaagcgctccatggtgttcaaggacgtgctgctgctcggcaacgactacatcgtcccccgccactgccccgagctggcggagatgagccgggtgtccatccgcatcctggacgagctcgtgctgccgttccaggagctgcagatcgacgacaacgagtacgcctacctcaaggccatcatcttcttcgaccccgacgccaagggcctgagcgaccccgggaagatcaagcggctgcgcgcccaggtccaggtgagcctcgaggactacatcaacgaccggcagtacgactcccgcggccggttcggggagctgctgctcctgctgcccaccctccagagcatcacgtggcagatgatcgagcagatccagttcatcaagctgttcggcatggcgaagatcgacaacctgctccaggagatgctgctgggcggggagccgtccgacgcgccccacgcccaccaccccctccacccccacctgatgcaggagcacatgggcaccaacgtgatcgtcgccaacaccatgccgacccacctgagcaacgggcagatgtgcgagtggccccgcccccggggccaggccgccgagcccgaggagccgcagcccgagccgcccgggggctccggcagcgagccctacaagctgctccccggggccgtggccacgatcgtgcgccccctggaggccatcccccagccgaccatcaccaagcaggaggtcatctga

SEQ ID NO: 340 - RNA, 1425 nt, synthetic construct
  misc_feature 1..1425: note = CDS (opt1) from Homo sapiens__NP_000448.3__HNF4A(1-474)(S87A_K106R_K108R_K126R_K 127R_S142A_S143A_S148A_T166A_S167A_K179R_K180R_S313A_S378A_ T429A_T432A_S436A_K458R_S461E)
  source 1..1425: mol_type = other RNA
atgcgcctgagcaagaccctcgtggacatggacatggccgactactccgccgcgctggaccccgcctacaccacgctggagttcgagaacgtccaggtgctcaccatgggcaacgacaccagcccgtccgaggggaccaacctgaacgcccccaacagcctgggcgtgtccgccctctgcgccatctgcggggaccgggcgacgggcaagcactacggggccagctcctgcgacggctgcaagggcttcttccgccgggccgtccgcaagaaccacatgtacagctgccggttctcccgccagtgcgtggtggaccgggaccgccggaaccagtgccgctactgccggctgaagaagtgcttccgcgccgggatgcggcgcgaggcggtccagaacgagcgggaccgcatcagcacccggcgcgccgcctacgaggactccgccctgcccagcatcaacgccctcctgcaggcggaggtgctgtcccggcagatcgccgcccccgtgagcggcatcaacggggacatccgcgcccggcgcatcgcctccatcgcggacgtctgcgagagcatgaaggagcagctcctggtgctggtggagtgggccaagtacatcccggccttctgcgagctccccctggacgaccaggtcgccctgctccgcgcccacgcgggcgagcacctcctgctgggggccaccaagcggtccatggtgttcaaggacgtgctgctgctcggcaacgactacatcgtcccccgccactgccccgagctggccgagatgagccgggtgtccatccgcatcctggacgagctcgtgctgccgttccaggagctgcagatcgacgacaacgagtacgcctacctcaaggccatcatcttcttcgaccccgacgcgaagggcctgagcgaccccgggaagatcaagcggctgcgcgcccaggtccaggtgagcctcgaggactacatcaacgaccggcagtacgactcccgcggccggttcggggagctgctgctcctgctgcccaccctccagagcatcacgtggcagatgatcgagcagatccagttcatcaagctgttcggcatggccaagatcgacaacctgctccaggagatgctgctgggcggggccccgtccgacgcgccccacgcccaccaccccctccacccccacctgatgcaggagcacatgggcaccaacgtgatcgtcgccaacaccatgccgacccacctgagcaacgggcagatgtgcgagtggccccgcccccggggccaggccgccgcgcccgaggccccgcagcccgccccgcccgggggctccggcagcgagccctacaagctgctccccggggccgtggccacgatcgtgcgccccctggaggcgatcccccagccgaccatcaccaagcaggaggtcatctga

SEQ ID NO: 341 - RNA, 1425 nt, synthetic construct
  misc_feature 1..1425: note = CDS (opt1) from Homo sapiens__NP_000448.3__HNF4A(1-474)(S87A_K106R_K108R_K126R_K 127R_S142A_S143A_S148A_T166A_S167A_K300R_K307R_K309R_S313A_ S378A_T429A_T432A_S436A_K458R_S461E)
  source 1..1425: mol_type = other RNA
atgcgcctgagcaagaccctcgtggacatggacatggccgactactccgccgcgctggaccccgcctacaccacgctggagttcgagaacgtccaggtgctcaccatgggcaacgacaccagcccgtccgaggggaccaacctgaacgcccccaacagcctgggcgtgtccgccctctgcgccatctgcggggaccgggcgacgggcaagcactacggggccagctcctgcgacggctgcaagggcttcttccgccgggccgtccgcaagaaccacatgtacagctgccggttctcccgccagtgcgtggtggaccgggaccgccggaaccagtgccgctactgccggctgaagaagtgcttccgcgccgggatgcggcgcgaggcggtccagaacgagcgggaccgcatcagcacccggcgcgccgcctacgaggactccgccctgcccagcatcaacgccctcctgcaggcggaggtgctgtcccggcagatcgccgcccccgtgagcggcatcaacggggacatccgcgccaagaagatcgcctccatcgcggacgtctgcgagagcatgaaggagcagctcctggtgctggtggagtgggccaagtacatcccggccttctgcgagctccccctggacgaccaggtcgccctgctccgggcccacgcgggcgagcacctcctgctgggggccaccaagcgctccatggtgttcaaggacgtgctgctgctcggcaacgactacatcgtcccccgccactgccccgagctggccgagatgagccgggtgtccatccgcatcctggacgagctcgtgctgccgttccaggagctgcagatcgacgacaacgagtacgcctacctcaaggccatcatcttcttcgaccccgacgcgcggggcctgagcgaccccgggcgcatccggcgcctgcgggcccaggtccaggtgagcctcgaggactacatcaacgaccgccagtacgactcccggggccgcttcggggagctgctgctcctgctgcccaccctccagagcatcacgtggcagatgatcgagcagatccagttcatcaagctgttcggcatggccaagatcgacaacctgctccaggagatgctgctgggcggggccccgtccgacgcgccccacgcccaccaccccctccacccccacctgatgcaggagcacatgggcaccaacgtgatcgtcgccaacaccatgccgacccacctgagcaacgggcagatgtgcgagtggccccggccccgcggccaggccgccgcgcccgaggccccgcagcccgccccgcccgggggctccggcagcgagccctacaagctgctccccggggccgtggccacgatcgtgcggcccctggaggcgatcccccagccgaccatcaccaagcaggaggtcatctga

SEQ ID NO: 342 - RNA, 1425 nt, synthetic construct
  misc_feature 1..1425: note = CDS (opt1) from Homo sapiens__NP_000448.3__HNF4A(1-474)(S87A_K106R_K108R_K126R_K 127R_S142A_S143A_S148A_T166A_S167A_S313A_S378A_T429A_T432A_ S436A_K447R_K458R_S461E_K470R)
  source 1..1425: mol_type = other RNA
atgcgcctgagcaagaccctcgtggacatggacatggccgactactccgccgcgctggaccccgcctacaccacgctggagttcgagaacgtccaggtgctcaccatgggcaacgacaccagcccgtccgaggggaccaacctgaacgcccccaacagcctgggcgtgtccgccctctgcgccatctgcggggaccgggcgacgggcaagcactacggggccagctcctgcgacggctgcaagggcttcttccgccgggccgtccgcaagaaccacatgtacagctgccggttctcccgccagtgcgtggtggaccgggaccgccggaaccagtgccgctactgccggctgaagaagtgcttccgcgccgggatgcggcgcgaggcggtccagaacgagcgggaccgcatcagcacccggcgcgccgcctacgaggactccgccctgcccagcatcaacgccctcctgcaggcggaggtgctgtcccggcagatcgccgcccccgtgagcggcatcaacggggacatccgcgccaagaagatcgcctccatcgcggacgtctgcgagagcatgaaggagcagctcctggtgctggtggagtgggccaagtacatcccggccttctgcgagctccccctggacgaccaggtcgccctgctccgggcccacgcgggcgagcacctcctgctgggggccaccaagcgctccatggtgttcaaggacgtgctgctgctcggcaacgactacatcgtcccccgccactgccccgagctggccgagatgagccgggtgtccatccgcatcctggacgagctcgtgctgccgttccaggagctgcagatcgacgacaacgagtacgcctacctcaaggccatcatcttcttcgaccccgacgcgaagggcctgagcgaccccgggaagatcaagcggctgcgcgcccaggtccaggtgagcctcgaggactacatcaacgaccggcagtacgactcccgcggccggttcggggagctgctgctcctgctgcccaccctccagagcatcacgtggcagatgatcgagcagatccagttcatcaagctgttcggcatggccaagatcgacaacctgctccaggagatgctgctgggcggggccccgtccgacgcgccccacgcccaccaccccctccacccccacctgatgcaggagcacatgggcaccaacgtgatcgtcgccaacaccatgccgacccacctgagcaacgggcagatgtgcgagtggccccgcccccggggccaggccgccgcgcccgaggccccgcagcccgccccgcccgggggctccggcagcgagccctaccgcctgctccccggggccgtggccacgatcgtgcggcccctggaggcgatcccccagccgaccatcacccgccaggaggtcatctga

SEQ ID NO: 343 - RNA, 1425 nt, synthetic construct
  misc_feature 1..1425: note = CDS (opt1) from Homo sapiens__NP_000448.3__HNF4A(1-474)(S87A_K106R_K108R_K126R_K 127R_S142A_S143A_S148A_T166A_S167A_K179R_K180R_K234R_K300R_ K307R_K309R_S313A_S378A_T429A_T432A_S436A_K447R_K458R_S461E _K470R)
  source 1..1425: mol_type = other RNA
atgcgcctgagcaagaccctcgtggacatggacatggccgactactccgccgcgctggaccccgcctacaccacgctggagttcgagaacgtccaggtgctcaccatgggcaacgacaccagcccgtccgaggggaccaacctgaacgcccccaacagcctgggcgtgtccgccctctgcgccatctgcggggaccgggcgacgggcaagcactacggggccagctcctgcgacggctgcaagggcttcttccgccgggccgtccgcaagaaccacatgtacagctgccggttctcccgccagtgcgtggtggaccgggaccgccggaaccagtgccgctactgccggctgaagaagtgcttccgcgccgggatgcggcgcgaggcggtccagaacgagcgggaccgcatcagcacccggcgcgccgcctacgaggactccgccctgcccagcatcaacgccctcctgcaggcggaggtgctgtcccggcagatcgccgcccccgtgagcggcatcaacggggacatccgcgcccggcgcatcgcctccatcgcggacgtctgcgagagcatgaaggagcagctcctggtgctggtggagtgggccaagtacatcccggccttctgcgagctccccctggacgaccaggtcgccctgctccgcgcccacgcgggcgagcacctcctgctgggggccacccggcgctccatggtgttcaaggacgtgctgctgctcggcaacgactacatcgtcccccggcactgccccgagctggccgagatgagccgcgtgtccatccggatcctggacgagctcgtgctgccgttccaggagctgcagatcgacgacaacgagtacgcctacctcaaggccatcatcttcttcgaccccgacgcgcgcggcctgagcgaccccgggcggatccgccggctgcgcgcccaggtccaggtgagcctcgaggactacatcaacgaccggcagtacgactcccgcggccggttcggggagctgctgctcctgctgcccaccctccagagcatcacgtggcagatgatcgagcagatccagttcatcaagctgttcggcatggccaagatcgacaacctgctccaggagatgctgctgggcggggccccgtccgacgcgccccacgcccaccaccccctccacccccacctgatgcaggagcacatgggcaccaacgtgatcgtcgccaacaccatgccgacccacctgagcaacgggcagatgtgcgagtggccccgcccccggggccaggccgccgcgcccgaggccccgcagcccgccccgcccgggggctccggcagcgagccctaccgcctgctccccggggccgtggccacgatcgtgcggcccctggaggcgatcccccagccgaccatcacccgccaggaggtcatctga

SEQ ID NO: 344 - RNA, 1425 nt, synthetic construct
  misc_feature 1..1425: note = CDS (opt1) from Homo sapiens__NP_000448.3__HNF4A(1-474)(S87A_S95A_S99A_K106R_K10 8R_K126R_K127R_S142A_S143A_S148A_T166A_S167A_S313A_S378A_T4 29A_T432A_S436A_K458R_S461E)
  source 1..1425: mol_type = other RNA
atgcgcctgagcaagaccctcgtggacatggacatggccgactactccgccgcgctggaccccgcctacaccacgctggagttcgagaacgtccaggtgctcaccatgggcaacgacaccagcccgtccgaggggaccaacctgaacgcccccaacagcctgggcgtgtccgccctctgcgccatctgcggggaccgggcgacgggcaagcactacggggccagctcctgcgacggctgcaagggcttcttccgccgggccgtccgcaagaaccacatgtacgcctgccggttcgcgcgccagtgcgtggtggaccgggaccgccggaaccagtgccgctactgccggctgaagaagtgcttccgcgccgggatgcggcgcgaggccgtccagaacgagcgggaccgcatcagcacccggcgcgccgcctacgaggactccgcgctgcccagcatcaacgccctcctgcaggccgaggtgctgtcccggcagatcgccgcccccgtgagcggcatcaacggggacatccgcgcgaagaagatcgcctccatcgccgacgtctgcgagagcatgaaggagcagctcctggtgctggtggagtgggccaagtacatcccggccttctgcgagctccccctggacgaccaggtcgcgctgctccgggcccacgccggcgagcacctcctgctgggggccaccaagcgctccatggtgttcaaggacgtgctgctgctcggcaacgactacatcgtcccccgccactgccccgagctggccgagatgagccgggtgtccatccgcatcctggacgagctcgtgctgccgttccaggagctgcagatcgacgacaacgagtacgcgtacctcaaggccatcatcttcttcgaccccgacgccaagggcctgagcgaccccgggaagatcaagcggctgcgcgcccaggtccaggtgtccctcgaggactacatcaacgaccggcagtacgacagccgcggccggttcggggagctgctgctcctgctgcccaccctccagagcatcacgtggcagatgatcgagcagatccagttcatcaagctgttcggcatggcgaagatcgacaacctgctccaggagatgctgctgggcggggccccgtccgacgcgccccacgcccaccaccccctccacccccacctgatgcaggagcacatgggcaccaacgtgatcgtcgccaacaccatgccgacccacctgagcaacgggcagatgtgcgagtggccccgcccccggggccaggccgccgcccccgaggccccgcagcccgccccgcccgggggctccggcagcgagccctacaagctgctccccggggcggtggccacgatcgtgcgccccctggaggccatcccccagccgaccatcaccaagcaggaggtcatctga

SEQ ID NO: 345 - RNA, 1425 nt, synthetic construct
  misc_feature 1..1425: note = CDS (opt1) from Homo sapiens__NP_000448.3__HNF4A(1-474)(S87A_K106R_K108R_K126R_K 127R_S138A_T139A_S142A_S143A_S148A_T166A_S167A_S313A_S378A_ T429A_T432A_S436A_K458R_S461E)
  source 1..1425: mol_type = other RNA
atgcgcctgagcaagaccctcgtggacatggacatggccgactactccgccgcgctggaccccgcctacaccacgctggagttcgagaacgtccaggtgctcaccatgggcaacgacaccagcccgtccgaggggaccaacctgaacgcccccaacagcctgggcgtgtccgccctctgcgccatctgcggggaccgggcgacgggcaagcactacggggccagctcctgcgacggctgcaagggcttcttccgccgggccgtccgcaagaaccacatgtacagctgccggttctcccgccagtgcgtggtggaccgggaccgccggaaccagtgccgctactgccggctgaagaagtgcttccgcgccgggatgcggcgcgaggcggtccagaacgagcgggaccgcatcgccgcccggcgcgccgcctacgaggacagcgcgctgccctccatcaacgccctcctgcaggccgaggtgctgagccggcagatcgccgcccccgtgtccggcatcaacggggacatccgcgcgaagaagatcgccagcatcgccgacgtctgcgagtccatgaaggagcagctcctggtgctggtggagtgggccaagtacatcccggccttctgcgagctccccctggacgaccaggtcgcgctgctccgggcccacgccggcgagcacctcctgctgggggccaccaagcgcagcatggtgttcaaggacgtgctgctgctcggcaacgactacatcgtcccccgccactgccccgagctggccgagatgtcccgggtgagcatccgcatcctggacgagctcgtgctgccgttccaggagctgcagatcgacgacaacgagtacgcgtacctcaaggccatcatcttcttcgaccccgacgccaagggcctgtccgaccccgggaagatcaagcggctgcgcgcccaggtccaggtgagcctcgaggactacatcaacgaccggcagtacgacagccgcggccggttcggggagctgctgctcctgctgcccaccctccagtccatcacctggcagatgatcgagcagatccagttcatcaagctgttcggcatggcgaagatcgacaacctgctccaggagatgctgctgggcggggccccgagcgacgcgccccacgcccaccaccccctccacccccacctgatgcaggagcacatgggcacgaacgtgatcgtcgccaacaccatgccgacccacctgtccaacgggcagatgtgcgagtggccccgcccccggggccaggccgccgcccccgaggccccgcagcccgccccgcccgggggcagcggctccgagccctacaagctgctccccggggcggtggccaccatcgtgcgccccctggaggccatcccccagccgacgatcaccaagcaggaggtcatctga

SEQ ID NO: 346 - RNA, 1425 nt, synthetic construct
  misc_feature 1..1425: note = CDS (opt1) from Homo sapiens__NP_000448.3__HNF4A(1-474)(S87A_S95A_S99A_K106R_K10 8R_K126R_K127R_S138A_T139A_S142A_S143A_S148A_T166A_S167A_S3 13A_S378A_T429A_T432A_S436A_K458R_S461E)
  source 1..1425: mol_type = other RNA
atgcgcctgagcaagaccctcgtggacatggacatggccgactactccgccgcgctggaccccgcctacaccacgctggagttcgagaacgtccaggtgctcaccatgggcaacgacaccagcccgtccgaggggaccaacctgaacgcccccaacagcctgggcgtgtccgccctctgcgccatctgcggggaccgggcgacgggcaagcactacggggccagctcctgcgacggctgcaagggcttcttccgccgggccgtccgcaagaaccacatgtacgcctgccggttcgcgcgccagtgcgtggtggaccgggaccgccggaaccagtgccgctactgccggctgaagaagtgcttccgcgccgggatgcggcgcgaggccgtccagaacgagcgggaccgcatcgccgcccggcgcgcggcctacgaggacagcgccctgccctccatcaacgccctcctgcaggccgaggtgctgagccggcagatcgcggcccccgtgtccggcatcaacggggacatccgcgccaagaagatcgccagcatcgccgacgtctgcgagtccatgaaggagcagctcctggtgctggtggagtgggcgaagtacatcccggccttctgcgagctccccctggacgaccaggtcgccctgctccgggcccacgccggcgagcacctcctgctgggggcgaccaagcgcagcatggtgttcaaggacgtgctgctgctcggcaacgactacatcgtcccccgccactgccccgagctggccgagatgtcccgggtgagcatccgcatcctggacgagctcgtgctgccgttccaggagctgcagatcgacgacaacgagtacgcctacctcaaggccatcatcttcttcgaccccgacgcgaagggcctgtccgaccccgggaagatcaagcggctgcgcgcccaggtccaggtgagcctcgaggactacatcaacgaccggcagtacgactcccgcggccggttcggggagctgctgctcctgctgcccaccctccagagcatcacctggcagatgatcgagcagatccagttcatcaagctgttcggcatggccaagatcgacaacctgctccaggagatgctgctgggcggggccccgagcgacgcgccccacgcccaccaccccctccacccccacctgatgcaggagcacatgggcacgaacgtgatcgtcgccaacaccatgccgacccacctgtccaacgggcagatgtgcgagtggccccgcccccggggccaggccgccgcccccgaggcgccgcagcccgccccgcccgggggcagcggctccgagccctacaagctgctccccggggccgtggccaccatcgtgcgccccctggaggccatcccccagccgacgatcaccaagcaggaggtcatctga

SEQ ID NO: 347 - RNA, 1425 nt, synthetic construct
  misc_feature 1..1425: note = CDS (opt2) from Homo sapiens__NP_000448.3__HNF4A(1-474)
  source 1..1425: mol_type = other RNA
atgcgcctctccaagaccctcgtcgacatggacatggccgactactccgccgccctcgaccccgcctacaccaccctcgagttcgagaacgtccaggtcctcaccatgggcaacgacacctccccctccgagggcaccaacctcaacgcccccaactccctcggcgtctccgccctctgcgccatctgcggcgaccgcgccaccggcaagcactacggcgcctcctcctgcgacggctgcaagggcttcttccgccgctccgtccgcaagaaccacatgtactcctgccgcttctcccgccagtgcgtcgtcgacaaggacaagcgcaaccagtgccgctactgccgcctcaagaagtgcttccgcgccggcatgaagaaggaggccgtccagaacgagcgcgaccgcatctccacccgccgctcctcctacgaggactcctccctcccctccatcaacgccctcctccaggccgaggtcctctcccgccagatcacctcccccgtctccggcatcaacggcgacatccgcgccaagaagatcgcctccatcgccgacgtctgcgagtccatgaaggagcagctcctcgtcctcgtcgagtgggccaagtacatccccgccttctgcgagctccccctcgacgaccaggtcgccctcctccgcgcccacgccggcgagcacctcctcctcggcgccaccaagcgctccatggtcttcaaggacgtcctcctcctcggcaacgactacatcgtcccccgccactgccccgagctcgccgagatgtcccgcgtctccatccgcatcctcgacgagctcgtcctccccttccaggagctccagatcgacgacaacgagtacgcctacctcaaggccatcatcttcttcgaccccgacgccaagggcctctccgaccccggcaagatcaagcgcctccgctcccaggtccaggtctccctcgaggactacatcaacgaccgccagtacgactcgcgcgggcgcttcggcgagctcctcctcctcctccccaccctccagtccatcacctggcagatgatcgagcagatccagttcatcaagctgttcggcatggccaagatcgacaacctcctccaggagatgctcctcggcggctccccctccgacgccccccacgcccaccaccccctccacccccacctcatgcaggagcacatgggcaccaacgtcatcgtcgccaacaccatgcccacccacctctccaacggccagatgtgcgagtggccccgcccgcgcggccaggccgccacccccgagaccccccagccctccccccccggcggctccggctccgagccctacaagctcctccccggcgccgtcgccaccatcgtcaagcccctctccgccatcccccagcccaccatcaccaagcaggaggtcatctga

SEQ ID NO: 348 - RNA, 1425 nt, synthetic construct
  misc_feature 1..1425: note = CDS (opt2) from Homo sapiens__NP_000448.3__HNF4A(1-474)(S313A)
  source 1..1425: mol_type = other RNA
atgcgcctctccaagaccctcgtcgacatggacatggccgactactccgccgccctcgaccccgcctacaccaccctcgagttcgagaacgtccaggtcctcaccatgggcaacgacacctccccctccgagggcaccaacctcaacgcccccaactccctcggcgtctccgccctctgcgccatctgcggcgaccgcgccaccggcaagcactacggcgcctcctcctgcgacggctgcaagggcttcttccgccgctccgtccgcaagaaccacatgtactcctgccgcttctcccgccagtgcgtcgtcgacaaggacaagcgcaaccagtgccgctactgccgcctcaagaagtgcttccgcgccggcatgaagaaggaggccgtccagaacgagcgcgaccgcatctccacccgccgctcctcctacgaggactcctccctcccctccatcaacgccctcctccaggccgaggtcctctcccgccagatcacctcccccgtctccggcatcaacggcgacatccgcgccaagaagatcgcctccatcgccgacgtctgcgagtccatgaaggagcagctcctcgtcctcgtcgagtgggccaagtacatccccgccttctgcgagctccccctcgacgaccaggtcgccctcctccgcgcccacgccggcgagcacctcctcctcggcgccaccaagcgctccatggtcttcaaggacgtcctcctcctcggcaacgactacatcgtcccccgccactgccccgagctcgccgagatgtcccgcgtctccatccgcatcctcgacgagctcgtcctccccttccaggagctccagatcgacgacaacgagtacgcctacctcaaggccatcatcttcttcgaccccgacgccaagggcctctccgaccccggcaagatcaagcgcctccgcgcccaggtccaggtctccctcgaggactacatcaacgaccgccagtacgactcccgcggccgcttcggcgagctcctcctcctcctccccaccctccagtccatcacctggcagatgatcgagcagatccagttcatcaagctcttcggcatggccaagatcgacaacctcctccaggagatgctcctcggcggctccccctccgacgccccccacgcccaccaccccctccacccccacctcatgcaggagcacatgggcaccaacgtcatcgtcgccaacaccatgcccacccacctctccaacggccagatgtgcgagtggccccgcccccgcggccaggccgccacccccgagaccccccagccctccccccccggcggctccggctccgagccctacaagctcctccccggcgccgtcgccaccatcgtcaagcccctctccgccatcccccagcccaccatcaccaagcaggaggtcatctga

SEQ ID NO: 349 - RNA, 1425 nt, synthetic construct
  misc_feature 1..1425: note = CDS (opt2) from Homo sapiens__NP_000448.3__HNF4A(1-474)(S313E)
  source 1..1425: mol_type = other RNA
atgcgcctctccaagaccctcgtcgacatggacatggccgactactccgccgccctcgaccccgcctacaccaccctcgagttcgagaacgtccaggtcctcaccatgggcaacgacacctccccctccgagggcaccaacctcaacgcccccaactccctcggcgtctccgccctctgcgccatctgcggcgaccgcgccaccggcaagcactacggcgcctcctcctgcgacggctgcaagggcttcttccgccgctccgtccgcaagaaccacatgtactcctgccgcttctcccgccagtgcgtcgtcgacaaggacaagcgcaaccagtgccgctactgccgcctcaagaagtgcttccgcgccggcatgaagaaggaggccgtccagaacgagcgcgaccgcatctccacccgccgctcctcctacgaggactcctccctcccctccatcaacgccctcctccaggccgaggtcctctcccgccagatcacctcccccgtctccggcatcaacggcgacatccgcgccaagaagatcgcctccatcgccgacgtctgcgagtccatgaaggagcagctcctcgtcctcgtcgagtgggccaagtacatccccgccttctgcgagctccccctcgacgaccaggtcgccctcctccgcgcccacgccggcgagcacctcctcctcggcgccaccaagcgctccatggtcttcaaggacgtcctcctcctcggcaacgactacatcgtcccccgccactgccccgagctcgccgagatgtcccgcgtctccatccgcatcctcgacgagctcgtcctccccttccaggagctccagatcgacgacaacgagtacgcctacctcaaggccatcatcttcttcgaccccgacgccaagggcctctccgaccccggcaagatcaagcgcctccgcgagcaggtccaggtctccctcgaggactacatcaacgaccgccagtacgactcccgcggccgcttcggcgagctcctcctcctcctccccaccctccagtccatcacctggcagatgatcgagcagatccagttcatcaagctcttcggcatggccaagatcgacaacctcctccaggagatgctcctcggcggctccccctccgacgccccccacgcccaccaccccctccacccccacctcatgcaggagcacatgggcaccaacgtcatcgtcgccaacaccatgcccacccacctctccaacggccagatgtgcgagtggccccgcccccgcggccaggccgccacccccgagaccccccagccctccccccccggcggctccggctccgagccctacaagctcctccccggcgccgtcgccaccatcgtcaagcccctctccgccatcccccagcccaccatcaccaagcaggaggtcatctga

SEQ ID NO: 350 - RNA, 1425 nt, synthetic construct
  misc_feature 1..1425: note = CDS (opt2) from Homo sapiens__NP_000448.3__HNF4A(1-474)(S142A_S143A)
  source 1..1425: mol_type = other RNA
atgcgcctctccaagaccctcgtcgacatggacatggccgactactccgccgccctcgaccccgcctacaccaccctcgagttcgagaacgtccaggtcctcaccatgggcaacgacacctccccctccgagggcaccaacctcaacgcccccaactccctcggcgtctccgccctctgcgccatctgcggcgaccgcgccaccggcaagcactacggcgcctcctcctgcgacggctgcaagggcttcttccgccgctccgtccgcaagaaccacatgtactcctgccgcttctcccgccagtgcgtcgtcgacaaggacaagcgcaaccagtgccgctactgccgcctcaagaagtgcttccgcgccggcatgaagaaggaggccgtccagaacgagcgcgaccgcatctccacccgccgcgccgcctacgaggactcctccctcccctccatcaacgccctcctccaggccgaggtcctctcccgccagatcacctcccccgtctccggcatcaacggcgacatccgcgccaagaagatcgcctccatcgccgacgtctgcgagtccatgaaggagcagctcctcgtcctcgtcgagtgggccaagtacatccccgccttctgcgagctccccctcgacgaccaggtcgccctcctccgcgcccacgccggcgagcacctcctcctcggcgccaccaagcgctccatggtcttcaaggacgtcctcctcctcggcaacgactacatcgtcccccgccactgccccgagctcgccgagatgtcccgcgtctccatccgcatcctcgacgagctcgtcctccccttccaggagctccagatcgacgacaacgagtacgcctacctcaaggccatcatcttcttcgaccccgacgccaagggcctctccgaccccggcaagatcaagcgcctccgctcccaggtccaggtctccctcgaggactacatcaacgaccgccagtacgactcccgcggccgcttcggcgagctcctcctcctcctccccaccctccagtccatcacctggcagatgatcgagcagatccagttcatcaagctcttcggcatggccaagatcgacaacctcctccaggagatgctcctcggcggctccccctccgacgccccccacgcccaccaccccctccacccccacctcatgcaggagcacatgggcaccaacgtcatcgtcgccaacaccatgcccacccacctctccaacggccagatgtgcgagtggccccgcccccgcggccaggccgccacccccgagaccccccagccctccccccccggcggctccggctccgagccctacaagctcctccccggcgccgtcgccaccatcgtcaagcccctctccgccatcccccagcccaccatcaccaagcaggaggtcatctga

SEQ ID NO: 351 - RNA, 1425 nt, synthetic construct
  misc_feature 1..1425: note = CDS (opt2) from Homo sapiens__NP_000448.3__HNF4A(1-474)(S142E_S143E)
  source 1..1425: mol_type = other RNA
atgcgcctctccaagaccctcgtcgacatggacatggccgactactccgccgccctcgaccccgcctacaccaccctcgagttcgagaacgtccaggtcctcaccatgggcaacgacacctccccctccgagggcaccaacctcaacgcccccaactccctcggcgtctccgccctctgcgccatctgcggcgaccgcgccaccggcaagcactacggcgcctcctcctgcgacggctgcaagggcttcttccgccgctccgtccgcaagaaccacatgtactcctgccgcttctcccgccagtgcgtcgtcgacaaggacaagcgcaaccagtgccgctactgccgcctcaagaagtgcttccgcgccggcatgaagaaggaggccgtccagaacgagcgcgaccgcatctccacccgccgcgaggagtacgaggactcctccctcccctccatcaacgccctcctccaggccgaggtcctctcccgccagatcacctcccccgtctccggcatcaacggcgacatccgcgccaagaagatcgcctccatcgccgacgtctgcgagtccatgaaggagcagctcctcgtcctcgtcgagtgggccaagtacatccccgccttctgcgagctccccctcgacgaccaggtcgccctcctccgcgcccacgccggcgagcacctcctcctcggcgccaccaagcgctccatggtcttcaaggacgtcctcctcctcggcaacgactacatcgtcccccgccactgccccgagctcgccgagatgtcccgcgtctccatccgcatcctcgacgagctcgtcctccccttccaggagctccagatcgacgacaacgagtacgcctacctcaaggccatcatcttcttcgaccccgacgccaagggcctctccgaccccggcaagatcaagcgcctccgctcccaggtccaggtctccctcgaggactacatcaacgaccgccagtacgactcccgcggccgcttcggcgagctcctcctcctcctccccaccctccagtccatcacctggcagatgatcgagcagatccagttcatcaagctcttcggcatggccaagatcgacaacctcctccaggagatgctcctcggcggctccccctccgacgccccccacgcccaccaccccctccacccccacctcatgcaggagcacatgggcaccaacgtcatcgtcgccaacaccatgcccacccacctctccaacggccagatgtgcgagtggccccgcccccgcggccaggccgccacccccgagaccccccagccctccccccccggcggctccggctccgagccctacaagctcctccccggcgccgtcgccaccatcgtcaagcccctctccgccatcccccagcccaccatcaccaagcaggaggtcatctga

SEQ ID NO: 352 - RNA, 1425 nt, synthetic construct
  misc_feature 1..1425: note = CDS (opt2) from Homo sapiens__NP_000448.3__HNF4A(1-474)(S143A)
  source 1..1425: mol_type = other RNA
atgcgcctctccaagaccctcgtcgacatggacatggccgactactccgccgccctcgaccccgcctacaccaccctcgagttcgagaacgtccaggtcctcaccatgggcaacgacacctccccctccgagggcaccaacctcaacgcccccaactccctcggcgtctccgccctctgcgccatctgcggcgaccgcgccaccggcaagcactacggcgcctcctcctgcgacggctgcaagggcttcttccgccgctccgtccgcaagaaccacatgtactcctgccgcttctcccgccagtgcgtcgtcgacaaggacaagcgcaaccagtgccgctactgccgcctcaagaagtgcttccgcgccggcatgaagaaggaggccgtccagaacgagcgcgaccgcatctccacccgccgctccgcctacgaggactcctccctcccctccatcaacgccctcctccaggccgaggtcctctcccgccagatcacctcccccgtctccggcatcaacggcgacatccgcgccaagaagatcgcctccatcgccgacgtctgcgagtccatgaaggagcagctcctcgtcctcgtcgagtgggccaagtacatccccgccttctgcgagctccccctcgacgaccaggtcgccctcctccgcgcccacgccggcgagcacctcctcctcggcgccaccaagcgctccatggtcttcaaggacgtcctcctcctcggcaacgactacatcgtcccccgccactgccccgagctcgccgagatgtcccgcgtctccatccgcatcctcgacgagctcgtcctccccttccaggagctccagatcgacgacaacgagtacgcctacctcaaggccatcatcttcttcgaccccgacgccaagggcctctccgaccccggcaagatcaagcgcctccgctcccaggtccaggtctccctcgaggactacatcaacgaccgccagtacgactcccgcggccgcttcggcgagctcctcctcctcctccccaccctccagtccatcacctggcagatgatcgagcagatccagttcatcaagctcttcggcatggccaagatcgacaacctcctccaggagatgctcctcggcggctccccctccgacgccccccacgcccaccaccccctccacccccacctcatgcaggagcacatgggcaccaacgtcatcgtcgccaacaccatgcccacccacctctccaacggccagatgtgcgagtggccccgcccccgcggccaggccgccacccccgagaccccccagccctccccccccggcggctccggctccgagccctacaagctcctccccggcgccgtcgccaccatcgtcaagcccctctccgccatcccccagcccaccatcaccaagcaggaggtcatctga

SEQ ID NO: 353 - RNA, 1425 nt, synthetic construct
  misc_feature 1..1425: note = CDS (opt2) from Homo sapiens__NP_000448.3__HNF4A(1-474)(T166A)
  source 1..1425: mol_type = other RNA
atgcgcctctccaagaccctcgtcgacatggacatggccgactactccgccgccctcgaccccgcctacaccaccctcgagttcgagaacgtccaggtcctcaccatgggcaacgacacctccccctccgagggcaccaacctcaacgcccccaactccctcggcgtctccgccctctgcgccatctgcggcgaccgcgccaccggcaagcactacggcgcctcctcctgcgacggctgcaagggcttcttccgccgctccgtccgcaagaaccacatgtactcctgccgcttctcccgccagtgcgtcgtcgacaaggacaagcgcaaccagtgccgctactgccgcctcaagaagtgcttccgcgccggcatgaagaaggaggccgtccagaacgagcgcgaccgcatctccacccgccgctcctcctacgaggactcctccctcccctccatcaacgccctcctccaggccgaggtcctctcccgccagatcgcctcccccgtctccggcatcaacggcgacatccgcgccaagaagatcgcctccatcgccgacgtctgcgagtccatgaaggagcagctcctcgtcctcgtcgagtgggccaagtacatccccgccttctgcgagctccccctcgacgaccaggtcgccctcctccgcgcccacgccggcgagcacctcctcctcggcgccaccaagcgctccatggtcttcaaggacgtcctcctcctcggcaacgactacatcgtcccccgccactgccccgagctcgccgagatgtcccgcgtctccatccgcatcctcgacgagctcgtcctccccttccaggagctccagatcgacgacaacgagtacgcctacctcaaggccatcatcttcttcgaccccgacgccaagggcctctccgaccccggcaagatcaagcgcctccgctcccaggtccaggtctccctcgaggactacatcaacgaccgccagtacgactcccgcggccgcttcggcgagctcctcctcctcctccccaccctccagtccatcacctggcagatgatcgagcagatccagttcatcaagctcttcggcatggccaagatcgacaacctcctccaggagatgctcctcggcggctccccctccgacgccccccacgcccaccaccccctccacccccacctcatgcaggagcacatgggcaccaacgtcatcgtcgccaacaccatgcccacccacctctccaacggccagatgtgcgagtggccccgcccccgcggccaggccgccacccccgagaccccccagccctccccccccggcggctccggctccgagccctacaagctcctccccggcgccgtcgccaccatcgtcaagcccctctccgccatcccccagcccaccatcaccaagcaggaggtcatctga

SEQ ID NO: 354 - RNA, 1425 nt, synthetic construct
  misc_feature 1..1425: note = CDS (opt2) from Homo sapiens__NP_000448.3__HNF4A(1-474)(S167E)
  source 1..1425: mol_type = other RNA
atgcgcctctccaagaccctcgtcgacatggacatggccgactactccgccgccctcgaccccgcctacaccaccctcgagttcgagaacgtccaggtcctcaccatgggcaacgacacctccccctccgagggcaccaacctcaacgcccccaactccctcggcgtctccgccctctgcgccatctgcggcgaccgcgccaccggcaagcactacggcgcctcctcctgcgacggctgcaagggcttcttccgccgctccgtccgcaagaaccacatgtactcctgccgcttctcccgccagtgcgtcgtcgacaaggacaagcgcaaccagtgccgctactgccgcctcaagaagtgcttccgcgccggcatgaagaaggaggccgtccagaacgagcgcgaccgcatctccacccgccgctcctcctacgaggactcctccctcccctccatcaacgccctcctccaggccgaggtcctctcccgccagatcaccgagcccgtctccggcatcaacggcgacatccgcgccaagaagatcgcctccatcgccgacgtctgcgagtccatgaaggagcagctcctcgtcctcgtcgagtgggccaagtacatccccgccttctgcgagctccccctcgacgaccaggtcgccctcctccgcgcccacgccggcgagcacctcctcctcggcgccaccaagcgctccatggtcttcaaggacgtcctcctcctcggcaacgactacatcgtcccccgccactgccccgagctcgccgagatgtcccgcgtctccatccgcatcctcgacgagctcgtcctccccttccaggagctccagatcgacgacaacgagtacgcctacctcaaggccatcatcttcttcgaccccgacgccaagggcctctccgaccccggcaagatcaagcgcctccgctcccaggtccaggtctccctcgaggactacatcaacgaccgccagtacgactcccgcggccgcttcggcgagctcctcctcctcctccccaccctccagtccatcacctggcagatgatcgagcagatccagttcatcaagctcttcggcatggccaagatcgacaacctcctccaggagatgctcctcggcggctccccctccgacgccccccacgcccaccaccccctccacccccacctcatgcaggagcacatgggcaccaacgtcatcgtcgccaacaccatgcccacccacctctccaacggccagatgtgcgagtggccccgcccccgcggccaggccgccacccccgagaccccccagccctccccccccggcggctccggctccgagccctacaagctcctccccggcgccgtcgccaccatcgtcaagcccctctccgccatcccccagcccaccatcaccaagcaggaggtcatctga

SEQ ID NO: 355 - RNA, 1425 nt, synthetic construct
  misc_feature 1..1425: note = CDS (opt2) from Homo sapiens__NP_000448.3__HNF4A(1-474)(S167A)
  source 1..1425: mol_type = other RNA
atgcgcctctccaagaccctcgtcgacatggacatggccgactactccgccgccctcgaccccgcctacaccaccctcgagttcgagaacgtccaggtcctcaccatgggcaacgacacctccccctccgagggcaccaacctcaacgcccccaactccctcggcgtctccgccctctgcgccatctgcggcgaccgcgccaccggcaagcactacggcgcctcctcctgcgacggctgcaagggcttcttccgccgctccgtccgcaagaaccacatgtactcctgccgcttctcccgccagtgcgtcgtcgacaaggacaagcgcaaccagtgccgctactgccgcctcaagaagtgcttccgcgccggcatgaagaaggaggccgtccagaacgagcgcgaccgcatctccacccgccgctcctcctacgaggactcctccctcccctccatcaacgccctcctccaggccgaggtcctctcccgccagatcaccgcccccgtctccggcatcaacggcgacatccgcgccaagaagatcgcctccatcgccgacgtctgcgagtccatgaaggagcagctcctcgtcctcgtcgagtgggccaagtacatccccgccttctgcgagctccccctcgacgaccaggtcgccctcctccgcgcccacgccggcgagcacctcctcctcggcgccaccaagcgctccatggtcttcaaggacgtcctcctcctcggcaacgactacatcgtcccccgccactgccccgagctcgccgagatgtcccgcgtctccatccgcatcctcgacgagctcgtcctccccttccaggagctccagatcgacgacaacgagtacgcctacctcaaggccatcatcttcttcgaccccgacgccaagggcctctccgaccccggcaagatcaagcgcctccgctcccaggtccaggtctccctcgaggactacatcaacgaccgccagtacgactcccgcggccgcttcggcgagctcctcctcctcctccccaccctccagtccatcacctggcagatgatcgagcagatccagttcatcaagctcttcggcatggccaagatcgacaacctcctccaggagatgctcctcggcggctccccctccgacgccccccacgcccaccaccccctccacccccacctcatgcaggagcacatgggcaccaacgtcatcgtcgccaacaccatgcccacccacctctccaacggccagatgtgcgagtggccccgcccccgcggccaggccgccacccccgagaccccccagccctccccccccggcggctccggctccgagccctacaagctcctccccggcgccgtcgccaccatcgtcaagcccctctccgccatcccccagcccaccatcaccaagcaggaggtcatctga

SEQ ID NO: 356 - RNA, 1425 nt, synthetic construct
  misc_feature 1..1425: note = CDS (opt2) from Homo sapiens__NP_000448.3__HNF4A(1-474)(S167A_S378A_T429A_T432A_ S436A)
  source 1..1425: mol_type = other RNA
atgcgcctctccaagaccctcgtcgacatggacatggccgactactccgccgccctcgaccccgcctacaccaccctcgagttcgagaacgtccaggtcctcaccatgggcaacgacacctccccctccgagggcaccaacctcaacgcccccaactccctcggcgtctccgccctctgcgccatctgcggcgaccgcgccaccggcaagcactacggcgcctcctcctgcgacggctgcaagggcttcttccgccgctccgtccgcaagaaccacatgtactcctgccgcttctcccgccagtgcgtcgtcgacaaggacaagcgcaaccagtgccgctactgccgcctcaagaagtgcttccgcgccggcatgaagaaggaggccgtccagaacgagcgcgaccgcatctccacccgccgctcctcctacgaggactcctccctcccctccatcaacgccctcctccaggccgaggtcctctcccgccagatcaccgcccccgtctccggcatcaacggcgacatccgcgccaagaagatcgcctccatcgccgacgtctgcgagtccatgaaggagcagctcctcgtcctcgtcgagtgggccaagtacatccccgccttctgcgagctccccctcgacgaccaggtcgccctcctccgcgcccacgccggcgagcacctcctcctcggcgccaccaagcgctccatggtcttcaaggacgtcctcctcctcggcaacgactacatcgtcccccgccactgccccgagctcgccgagatgtcccgcgtctccatccgcatcctcgacgagctcgtcctccccttccaggagctccagatcgacgacaacgagtacgcctacctcaaggccatcatcttcttcgaccccgacgccaagggcctctccgaccccggcaagatcaagcgcctccgctcccaggtccaggtctccctcgaggactacatcaacgaccgccagtacgactcccgcggccgcttcggcgagctcctcctcctcctccccaccctccagtccatcacctggcagatgatcgagcagatccagttcatcaagctcttcggcatggccaagatcgacaacctcctccaggagatgctcctcggcggcgccccctccgacgccccccacgcccaccaccccctccacccccacctcatgcaggagcacatgggcaccaacgtcatcgtcgccaacaccatgcccacccacctctccaacggccagatgtgcgagtggccccgcccccgcggccaggccgccgcccccgaggccccccagcccgccccccccggcggctccggctccgagccctacaagctcctccccggcgccgtcgccaccatcgtcaagcccctctccgccatcccccagcccaccatcaccaagcaggaggtcatctga

SEQ ID NO: 357 - RNA, 1425 nt, synthetic construct
  misc_feature 1..1425: note = CDS (opt2) from Homo sapiens__NP_000448.3__HNF4A(1-474)(S167E_S378E_T429E_T432E_ S436E)
  source 1..1425: mol_type = other RNA
atgcgcctctccaagaccctcgtcgacatggacatggccgactactccgccgccctcgaccccgcctacaccaccctcgagttcgagaacgtccaggtcctcaccatgggcaacgacacctccccctccgagggcaccaacctcaacgcccccaactccctcggcgtctccgccctctgcgccatctgcggcgaccgcgccaccggcaagcactacggcgcctcctcctgcgacggctgcaagggcttcttccgccgctccgtccgcaagaaccacatgtactcctgccgcttctcccgccagtgcgtcgtcgacaaggacaagcgcaaccagtgccgctactgccgcctcaagaagtgcttccgcgccggcatgaagaaggaggccgtccagaacgagcgcgaccgcatctccacccgccgctcctcctacgaggactcctccctcccctccatcaacgccctcctccaggccgaggtcctctcccgccagatcaccgagcccgtctccggcatcaacggcgacatccgcgccaagaagatcgcctccatcgccgacgtctgcgagtccatgaaggagcagctcctcgtcctcgtcgagtgggccaagtacatccccgccttctgcgagctccccctcgacgaccaggtcgccctcctccgcgcccacgccggcgagcacctcctcctcggcgccaccaagcgctccatggtcttcaaggacgtcctcctcctcggcaacgactacatcgtcccccgccactgccccgagctcgccgagatgtcccgcgtctccatccgcatcctcgacgagctcgtcctccccttccaggagctccagatcgacgacaacgagtacgcctacctcaaggccatcatcttcttcgaccccgacgccaagggcctctccgaccccggcaagatcaagcgcctccgctcccaggtccaggtctccctcgaggactacatcaacgaccgccagtacgactcccgcggccgcttcggcgagctcctcctcctcctccccaccctccagtccatcacctggcagatgatcgagcagatccagttcatcaagctcttcggcatggccaagatcgacaacctcctccaggagatgctcctcggcggcgagccctccgacgccccccacgcccaccaccccctccacccccacctcatgcaggagcacatgggcaccaacgtcatcgtcgccaacaccatgcccacccacctctccaacggccagatgtgcgagtggccccgcccccgcggccaggccgccgagcccgaggagccccagcccgagccccccggcggctccggctccgagccctacaagctcctccccggcgccgtcgccaccatcgtcaagcccctctccgccatcccccagcccaccatcaccaagcaggaggtcatctga

SEQ ID NO: 358 - RNA, 1425 nt, synthetic construct
  misc_feature 1..1425: note = CDS (opt2) from Homo sapiens__NP_000448.3__HNF4A(1-474)(S87A)
  source 1..1425: mol_type = other RNA
atgcgcctctccaagaccctcgtcgacatggacatggccgactactccgccgccctcgaccccgcctacaccaccctcgagttcgagaacgtccaggtcctcaccatgggcaacgacacctccccctccgagggcaccaacctcaacgcccccaactccctcggcgtctccgccctctgcgccatctgcggcgaccgcgccaccggcaagcactacggcgcctcctcctgcgacggctgcaagggcttcttccgccgcgccgtccgcaagaaccacatgtactcctgccgcttctcccgccagtgcgtcgtcgacaaggacaagcgcaaccagtgccgctactgccgcctcaagaagtgcttccgcgccggcatgaagaaggaggccgtccagaacgagcgcgaccgcatctccacccgccgctcctcctacgaggactcctccctcccctccatcaacgccctcctccaggccgaggtcctctcccgccagatcacctcccccgtctccggcatcaacggcgacatccgcgccaagaagatcgcctccatcgccgacgtctgcgagtccatgaaggagcagctcctcgtcctcgtcgagtgggccaagtacatccccgccttctgcgagctccccctcgacgaccaggtcgccctcctccgcgcccacgccggcgagcacctcctcctcggcgccaccaagcgctccatggtcttcaaggacgtcctcctcctcggcaacgactacatcgtcccccgccactgccccgagctcgccgagatgtcccgcgtctccatccgcatcctcgacgagctcgtcctccccttccaggagctccagatcgacgacaacgagtacgcctacctcaaggccatcatcttcttcgaccccgacgccaagggcctctccgaccccggcaagatcaagcgcctccgctcccaggtccaggtctccctcgaggactacatcaacgaccgccagtacgactcccgcggccgcttcggcgagctcctcctcctcctccccaccctccagtccatcacctggcagatgatcgagcagatccagttcatcaagctcttcggcatggccaagatcgacaacctcctccaggagatgctcctcggcggctccccctccgacgccccccacgcccaccaccccctccacccccacctcatgcaggagcacatgggcaccaacgtcatcgtcgccaacaccatgcccacccacctctccaacggccagatgtgcgagtggccccgcccccgcggccaggccgccacccccgagaccccccagccctccccccccggcggctccggctccgagccctacaagctcctccccggcgccgtcgccaccatcgtcaagcccctctccgccatcccccagcccaccatcaccaagcaggaggtcatctga

SEQ ID NO: 359 - RNA, 1425 nt, synthetic construct
  misc_feature 1..1425: note = CDS (opt2) from Homo sapiens__NP_000448.3__HNF4A(1-474)(S87E)
  source 1..1425: mol_type = other RNA
atgcgcctctccaagaccctcgtcgacatggacatggccgactactccgccgccctcgaccccgcctacaccaccctcgagttcgagaacgtccaggtcctcaccatgggcaacgacacctccccctccgagggcaccaacctcaacgcccccaactccctcggcgtctccgccctctgcgccatctgcggcgaccgcgccaccggcaagcactacggcgcctcctcctgcgacggctgcaagggcttcttccgccgcgaggtccgcaagaaccacatgtactcctgccgcttctcccgccagtgcgtcgtcgacaaggacaagcgcaaccagtgccgctactgccgcctcaagaagtgcttccgcgccggcatgaagaaggaggccgtccagaacgagcgcgaccgcatctccacccgccgctcctcctacgaggactcctccctcccctccatcaacgccctcctccaggccgaggtcctctcccgccagatcacctcccccgtctccggcatcaacggcgacatccgcgccaagaagatcgcctccatcgccgacgtctgcgagtccatgaaggagcagctcctcgtcctcgtcgagtgggccaagtacatccccgccttctgcgagctccccctcgacgaccaggtcgccctcctccgcgcccacgccggcgagcacctcctcctcggcgccaccaagcgctccatggtcttcaaggacgtcctcctcctcggcaacgactacatcgtcccccgccactgccccgagctcgccgagatgtcccgcgtctccatccgcatcctcgacgagctcgtcctccccttccaggagctccagatcgacgacaacgagtacgcctacctcaaggccatcatcttcttcgaccccgacgccaagggcctctccgaccccggcaagatcaagcgcctccgctcccaggtccaggtctccctcgaggactacatcaacgaccgccagtacgactcccgcggccgcttcggcgagctcctcctcctcctccccaccctccagtccatcacctggcagatgatcgagcagatccagttcatcaagctcttcggcatggccaagatcgacaacctcctccaggagatgctcctcggcggctccccctccgacgccccccacgcccaccaccccctccacccccacctcatgcaggagcacatgggcaccaacgtcatcgtcgccaacaccatgcccacccacctctccaacggccagatgtgcgagtggccccgcccccgcggccaggccgccacccccgagaccccccagccctccccccccggcggctccggctccgagccctacaagctcctccccggcgccgtcgccaccatcgtcaagcccctctccgccatcccccagcccaccatcaccaagcaggaggtcatctga

SEQ ID NO: 360 - RNA, 1425 nt, synthetic construct
  misc_feature 1..1425: note = CDS (opt2) from Homo sapiens__NP_000448.3__HNF4A(1-474)(R2V)
  source 1..1425: mol_type = other RNA
atggtcctctccaagaccctcgtcgacatggacatggccgactactccgccgccctcgaccccgcctacaccaccctcgagttcgagaacgtccaggtcctcaccatgggcaacgacacctccccctccgagggcaccaacctcaacgcccccaactccctcggcgtctccgccctctgcgccatctgcggcgaccgcgccaccggcaagcactacggcgcctcctcctgcgacggctgcaagggcttcttccgccgctccgtccgcaagaaccacatgtactcctgccgcttctcccgccagtgcgtcgtcgacaaggacaagcgcaaccagtgccgctactgccgcctcaagaagtgcttccgcgccggcatgaagaaggaggccgtccagaacgagcgcgaccgcatctccacccgccgctcctcctacgaggactcctccctcccctccatcaacgccctcctccaggccgaggtcctctcccgccagatcacctcccccgtctccggcatcaacggcgacatccgcgccaagaagatcgcctccatcgccgacgtctgcgagtccatgaaggagcagctcctcgtcctcgtcgagtgggccaagtacatccccgccttctgcgagctccccctcgacgaccaggtcgccctcctccgcgcccacgccggcgagcacctcctcctcggcgccaccaagcgctccatggtcttcaaggacgtcctcctcctcggcaacgactacatcgtcccccgccactgccccgagctcgccgagatgtcccgcgtctccatccgcatcctcgacgagctcgtcctccccttccaggagctccagatcgacgacaacgagtacgcctacctcaaggccatcatcttcttcgaccccgacgccaagggcctctccgaccccggcaagatcaagcgcctccgctcccaggtccaggtctccctcgaggactacatcaacgaccgccagtacgactcccgcggccgcttcggcgagctcctcctcctcctccccaccctccagtccatcacctggcagatgatcgagcagatccagttcatcaagctcttcggcatggccaagatcgacaacctcctccaggagatgctcctcggcggctccccctccgacgccccccacgcccaccaccccctccacccccacctcatgcaggagcacatgggcaccaacgtcatcgtcgccaacaccatgcccacccacctctccaacggccagatgtgcgagtggccccgcccccgcggccaggccgccacccccgagaccccccagccctccccccccggcggctccggctccgagccctacaagctcctccccggcgccgtcgccaccatcgtcaagcccctctccgccatcccccagcccaccatcaccaagcaggaggtcatctga

SEQ ID NO: 361 - RNA, 1425 nt, synthetic construct
  misc_feature 1..1425: note = CDS (opt2) from Homo sapiens__NP_000448.3__HNF4A(1-474)(R2V_K5V)
  source 1..1425: mol_type = other RNA
atggtcctctccgtcaccctcgtcgacatggacatggccgactactccgccgccctcgaccccgcctacaccaccctcgagttcgagaacgtccaggtcctcaccatgggcaacgacacctccccctccgagggcaccaacctcaacgcccccaactccctcggcgtctccgccctctgcgccatctgcggcgaccgcgccaccggcaagcactacggcgcctcctcctgcgacggctgcaagggcttcttccgccgctccgtccgcaagaaccacatgtactcctgccgcttctcccgccagtgcgtcgtcgacaaggacaagcgcaaccagtgccgctactgccgcctcaagaagtgcttccgcgccggcatgaagaaggaggccgtccagaacgagcgcgaccgcatctccacccgccgctcctcctacgaggactcctccctcccctccatcaacgccctcctccaggccgaggtcctctcccgccagatcacctcccccgtctccggcatcaacggcgacatccgcgccaagaagatcgcctccatcgccgacgtctgcgagtccatgaaggagcagctcctcgtcctcgtcgagtgggccaagtacatccccgccttctgcgagctccccctcgacgaccaggtcgccctcctccgcgcccacgccggcgagcacctcctcctcggcgccaccaagcgctccatggtcttcaaggacgtcctcctcctcggcaacgactacatcgtcccccgccactgccccgagctcgccgagatgtcccgcgtctccatccgcatcctcgacgagctcgtcctccccttccaggagctccagatcgacgacaacgagtacgcctacctcaaggccatcatcttcttcgaccccgacgccaagggcctctccgaccccggcaagatcaagcgcctccgctcccaggtccaggtctccctcgaggactacatcaacgaccgccagtacgactcccgcggccgcttcggcgagctcctcctcctcctccccaccctccagtccatcacctggcagatgatcgagcagatccagttcatcaagctcttcggcatggccaagatcgacaacctcctccaggagatgctcctcggcggctccccctccgacgccccccacgcccaccaccccctccacccccacctcatgcaggagcacatgggcaccaacgtcatcgtcgccaacaccatgcccacccacctctccaacggccagatgtgcgagtggccccgcccccgcggccaggccgccacccccgagaccccccagccctccccccccggcggctccggctccgagccctacaagctcctccccggcgccgtcgccaccatcgtcaagcccctctccgccatcccccagcccaccatcaccaagcaggaggtcatctga

SEQ ID NO: 362 - RNA, 1425 nt, synthetic construct
  misc_feature 1..1425: note = CDS (opt2) from Homo sapiens__NP_000448.3__HNF4A(1-474)(K179R_K180R)
  source 1..1425: mol_type = other RNA
atgcgcctctccaagaccctcgtcgacatggacatggccgactactccgccgccctcgaccccgcctacaccaccctcgagttcgagaacgtccaggtcctcaccatgggcaacgacacctccccctccgagggcaccaacctcaacgcccccaactccctcggcgtctccgccctctgcgccatctgcggcgaccgcgccaccggcaagcactacggcgcctcctcctgcgacggctgcaagggcttcttccgccgctccgtccgcaagaaccacatgtactcctgccgcttctcccgccagtgcgtcgtcgacaaggacaagcgcaaccagtgccgctactgccgcctcaagaagtgcttccgcgccggcatgaagaaggaggccgtccagaacgagcgcgaccgcatctccacccgccgctcctcctacgaggactcctccctcccctccatcaacgccctcctccaggccgaggtcctctcccgccagatcacctcccccgtctccggcatcaacggcgacatccgcgcccgccgcatcgcctccatcgccgacgtctgcgagtccatgaaggagcagctcctcgtcctcgtcgagtgggccaagtacatccccgccttctgcgagctccccctcgacgaccaggtcgccctcctccgcgcccacgccggcgagcacctcctcctcggcgccaccaagcgctccatggtcttcaaggacgtcctcctcctcggcaacgactacatcgtcccccgccactgccccgagctcgccgagatgtcccgcgtctccatccgcatcctcgacgagctcgtcctccccttccaggagctccagatcgacgacaacgagtacgcctacctcaaggccatcatcttcttcgaccccgacgccaagggcctctccgaccccggcaagatcaagcgcctccgctcccaggtccaggtctccctcgaggactacatcaacgaccgccagtacgactcccgcggccgcttcggcgagctcctcctcctcctccccaccctccagtccatcacctggcagatgatcgagcagatccagttcatcaagctcttcggcatggccaagatcgacaacctcctccaggagatgctcctcggcggctccccctccgacgccccccacgcccaccaccccctccacccccacctcatgcaggagcacatgggcaccaacgtcatcgtcgccaacaccatgcccacccacctctccaacggccagatgtgcgagtggccccgcccccgcggccaggccgccacccccgagaccccccagccctccccccccggcggctccggctccgagccctacaagctcctccccggcgccgtcgccaccatcgtcaagcccctctccgccatcccccagcccaccatcaccaagcaggaggtcatctga

SEQ ID NO: 363 - RNA, 1425 nt, synthetic construct
  misc_feature 1..1425: note = CDS (opt2) from Homo sapiens__NP_000448.3__HNF4A(1-474)(K234R)
  source 1..1425: mol_type = other RNA
atgcgcctctccaagaccctcgtcgacatggacatggccgactactccgccgccctcgaccccgcctacaccaccctcgagttcgagaacgtccaggtcctcaccatgggcaacgacacctccccctccgagggcaccaacctcaacgcccccaactccctcggcgtctccgccctctgcgccatctgcggcgaccgcgccaccggcaagcactacggcgcctcctcctgcgacggctgcaagggcttcttccgccgctccgtccgcaagaaccacatgtactcctgccgcttctcccgccagtgcgtcgtcgacaaggacaagcgcaaccagtgccgctactgccgcctcaagaagtgcttccgcgccggcatgaagaaggaggccgtccagaacgagcgcgaccgcatctccacccgccgctcctcctacgaggactcctccctcccctccatcaacgccctcctccaggccgaggtcctctcccgccagatcacctcccccgtctccggcatcaacggcgacatccgcgccaagaagatcgcctccatcgccgacgtctgcgagtccatgaaggagcagctcctcgtcctcgtcgagtgggccaagtacatccccgccttctgcgagctccccctcgacgaccaggtcgccctcctccgcgcccacgccggcgagcacctcctcctcggcgccacccgccgctccatggtcttcaaggacgtcctcctcctcggcaacgactacatcgtcccccgccactgccccgagctcgccgagatgtcccgcgtctccatccgcatcctcgacgagctcgtcctccccttccaggagctccagatcgacgacaacgagtacgcctacctcaaggccatcatcttcttcgaccccgacgccaagggcctctccgaccccggcaagatcaagcgcctccgctcccaggtccaggtctccctcgaggactacatcaacgaccgccagtacgactcccgcggccgcttcggcgagctcctcctcctcctccccaccctccagtccatcacctggcagatgatcgagcagatccagttcatcaagctcttcggcatggccaagatcgacaacctcctccaggagatgctcctcggcggctccccctccgacgccccccacgcccaccaccccctccacccccacctcatgcaggagcacatgggcaccaacgtcatcgtcgccaacaccatgcccacccacctctccaacggccagatgtgcgagtggccccgcccccgcggccaggccgccacccccgagaccccccagccctccccccccggcggctccggctccgagccctacaagctcctccccggcgccgtcgccaccatcgtcaagcccctctccgccatcccccagcccaccatcaccaagcaggaggtcatctga

SEQ ID NO: 364 - RNA, 1425 nt, synthetic construct
  misc_feature 1..1425: note = CDS (opt2) from Homo sapiens__NP_000448.3__HNF4A(1-474)(K300R)
  source 1..1425: mol_type = other RNA
atgcgcctctccaagaccctcgtcgacatggacatggccgactactccgccgccctcgaccccgcctacaccaccctcgagttcgagaacgtccaggtcctcaccatgggcaacgacacctccccctccgagggcaccaacctcaacgcccccaactccctcggcgtctccgccctctgcgccatctgcggcgaccgcgccaccggcaagcactacggcgcctcctcctgcgacggctgcaagggcttcttccgccgctccgtccgcaagaaccacatgtactcctgccgcttctcccgccagtgcgtcgtcgacaaggacaagcgcaaccagtgccgctactgccgcctcaagaagtgcttccgcgccggcatgaagaaggaggccgtccagaacgagcgcgaccgcatctccacccgccgctcctcctacgaggactcctccctcccctccatcaacgccctcctccaggccgaggtcctctcccgccagatcacctcccccgtctccggcatcaacggcgacatccgcgccaagaagatcgcctccatcgccgacgtctgcgagtccatgaaggagcagctcctcgtcctcgtcgagtgggccaagtacatccccgccttctgcgagctccccctcgacgaccaggtcgccctcctccgcgcccacgccggcgagcacctcctcctcggcgccaccaagcgctccatggtcttcaaggacgtcctcctcctcggcaacgactacatcgtcccccgccactgccccgagctcgccgagatgtcccgcgtctccatccgcatcctcgacgagctcgtcctccccttccaggagctccagatcgacgacaacgagtacgcctacctcaaggccatcatcttcttcgaccccgacgcccgcggcctctccgaccccggcaagatcaagcgcctccgctcccaggtccaggtctccctcgaggactacatcaacgaccgccagtacgactcccgcggccgcttcggcgagctcctcctcctcctccccaccctccagtccatcacctggcagatgatcgagcagatccagttcatcaagctcttcggcatggccaagatcgacaacctcctccaggagatgctcctcggcggctccccctccgacgccccccacgcccaccaccccctccacccccacctcatgcaggagcacatgggcaccaacgtcatcgtcgccaacaccatgcccacccacctctccaacggccagatgtgcgagtggccccgcccccgcggccaggccgccacccccgagaccccccagccctccccccccggcggctccggctccgagccctacaagctcctccccggcgccgtcgccaccatcgtcaagcccctctccgccatcccccagcccaccatcaccaagcaggaggtcatctga

SEQ ID NO: 365 - RNA, 1425 nt, synthetic construct
  misc_feature 1..1425: note = CDS (opt2) from Homo sapiens__NP_000448.3__HNF4A(1-474)(K300R_K307R_K309R)
  source 1..1425: mol_type = other RNA
atgcgcctctccaagaccctcgtcgacatggacatggccgactactccgccgccctcgaccccgcctacaccaccctcgagttcgagaacgtccaggtcctcaccatgggcaacgacacctccccctccgagggcaccaacctcaacgcccccaactccctcggcgtctccgccctctgcgccatctgcggcgaccgcgccaccggcaagcactacggcgcctcctcctgcgacggctgcaagggcttcttccgccgctccgtccgcaagaaccacatgtactcctgccgcttctcccgccagtgcgtcgtcgacaaggacaagcgcaaccagtgccgctactgccgcctcaagaagtgcttccgcgccggcatgaagaaggaggccgtccagaacgagcgcgaccgcatctccacccgccgctcctcctacgaggactcctccctcccctccatcaacgccctcctccaggccgaggtcctctcccgccagatcacctcccccgtctccggcatcaacggcgacatccgcgccaagaagatcgcctccatcgccgacgtctgcgagtccatgaaggagcagctcctcgtcctcgtcgagtgggccaagtacatccccgccttctgcgagctccccctcgacgaccaggtcgccctcctccgcgcccacgccggcgagcacctcctcctcggcgccaccaagcgctccatggtcttcaaggacgtcctcctcctcggcaacgactacatcgtcccccgccactgccccgagctcgccgagatgtcccgcgtctccatccgcatcctcgacgagctcgtcctccccttccaggagctccagatcgacgacaacgagtacgcctacctcaaggccatcatcttcttcgaccccgacgcccgcggcctctccgaccccggccgcatccgccgcctccgctcccaggtccaggtctccctcgaggactacatcaacgaccgccagtacgactcccgcggccgcttcggcgagctcctcctcctcctccccaccctccagtccatcacctggcagatgatcgagcagatccagttcatcaagctcttcggcatggccaagatcgacaacctcctccaggagatgctcctcggcggctccccctccgacgccccccacgcccaccaccccctccacccccacctcatgcaggagcacatgggcaccaacgtcatcgtcgccaacaccatgcccacccacctctccaacggccagatgtgcgagtggccccgcccccgcggccaggccgccacccccgagaccccccagccctccccccccggcggctccggctccgagccctacaagctcctccccggcgccgtcgccaccatcgtcaagcccctctccgccatcccccagcccaccatcaccaagcaggaggtcatctga

SEQ ID NO: 366 - RNA, 1425 nt, synthetic construct
  misc_feature 1..1425: note = CDS (opt2) from Homo sapiens__NP_000448.3__HNF4A(1-474)(K447R_K470R)
  source 1..1425: mol_type = other RNA
atgcgcctctccaagaccctcgtcgacatggacatggccgactactccgccgccctcgaccccgcctacaccaccctcgagttcgagaacgtccaggtcctcaccatgggcaacgacacctccccctccgagggcaccaacctcaacgcccccaactccctcggcgtctccgccctctgcgccatctgcggcgaccgcgccaccggcaagcactacggcgcctcctcctgcgacggctgcaagggcttcttccgccgctccgtccgcaagaaccacatgtactcctgccgcttctcccgccagtgcgtcgtcgacaaggacaagcgcaaccagtgccgctactgccgcctcaagaagtgcttccgcgccggcatgaagaaggaggccgtccagaacgagcgcgaccgcatctccacccgccgctcctcctacgaggactcctccctcccctccatcaacgccctcctccaggccgaggtcctctcccgccagatcacctcccccgtctccggcatcaacggcgacatccgcgccaagaagatcgcctccatcgccgacgtctgcgagtccatgaaggagcagctcctcgtcctcgtcgagtgggccaagtacatccccgccttctgcgagctccccctcgacgaccaggtcgccctcctccgcgcccacgccggcgagcacctcctcctcggcgccaccaagcgctccatggtcttcaaggacgtcctcctcctcggcaacgactacatcgtcccccgccactgccccgagctcgccgagatgtcccgcgtctccatccgcatcctcgacgagctcgtcctccccttccaggagctccagatcgacgacaacgagtacgcctacctcaaggccatcatcttcttcgaccccgacgccaagggcctctccgaccccggcaagatcaagcgcctccgctcccaggtccaggtctccctcgaggactacatcaacgaccgccagtacgactcccgcggccgcttcggcgagctcctcctcctcctccccaccctccagtccatcacctggcagatgatcgagcagatccagttcatcaagctcttcggcatggccaagatcgacaacctcctccaggagatgctcctcggcggctccccctccgacgccccccacgcccaccaccccctccacccccacctcatgcaggagcacatgggcaccaacgtcatcgtcgccaacaccatgcccacccacctctccaacggccagatgtgcgagtggccccgcccccgcggccaggccgccacccccgagaccccccagccctccccccccggcggctccggctccgagccctaccgcctcctccccggcgccgtcgccaccatcgtcaagcccctctccgccatcccccagcccaccatcacccgccaggaggtcatctga

SEQ ID NO: 367 - RNA, 1425 nt, synthetic construct
  misc_feature 1..1425: note = CDS (opt2) from Homo sapiens__NP_000448.3__HNF4A(1-474)(K458R)
  source 1..1425: mol_type = other RNA
atgcgcctctccaagaccctcgtcgacatggacatggccgactactccgccgccctcgaccccgcctacaccaccctcgagttcgagaacgtccaggtcctcaccatgggcaacgacacctccccctccgagggcaccaacctcaacgcccccaactccctcggcgtctccgccctctgcgccatctgcggcgaccgcgccaccggcaagcactacggcgcctcctcctgcgacggctgcaagggcttcttccgccgctccgtccgcaagaaccacatgtactcctgccgcttctcccgccagtgcgtcgtcgacaaggacaagcgcaaccagtgccgctactgccgcctcaagaagtgcttccgcgccggcatgaagaaggaggccgtccagaacgagcgcgaccgcatctccacccgccgctcctcctacgaggactcctccctcccctccatcaacgccctcctccaggccgaggtcctctcccgccagatcacctcccccgtctccggcatcaacggcgacatccgcgccaagaagatcgcctccatcgccgacgtctgcgagtccatgaaggagcagctcctcgtcctcgtcgagtgggccaagtacatccccgccttctgcgagctccccctcgacgaccaggtcgccctcctccgcgcccacgccggcgagcacctcctcctcggcgccaccaagcgctccatggtcttcaaggacgtcctcctcctcggcaacgactacatcgtcccccgccactgccccgagctcgccgagatgtcccgcgtctccatccgcatcctcgacgagctcgtcctccccttccaggagctccagatcgacgacaacgagtacgcctacctcaaggccatcatcttcttcgaccccgacgccaagggcctctccgaccccggcaagatcaagcgcctccgctcccaggtccaggtctccctcgaggactacatcaacgaccgccagtacgactcccgcggccgcttcggcgagctcctcctcctcctccccaccctccagtccatcacctggcagatgatcgagcagatccagttcatcaagctcttcggcatggccaagatcgacaacctcctccaggagatgctcctcggcggctccccctccgacgccccccacgcccaccaccccctccacccccacctcatgcaggagcacatgggcaccaacgtcatcgtcgccaacaccatgcccacccacctctccaacggccagatgtgcgagtggccccgcccccgcggccaggccgccacccccgagaccccccagccctccccccccggcggctccggctccgagccctacaagctcctccccggcgccgtcgccaccatcgtccgccccctctccgccatcccccagcccaccatcaccaagcaggaggtcatctga

SEQ ID NO: 368 - RNA, 1425 nt, synthetic construct
  misc_feature 1..1425: note = CDS (opt2) from Homo sapiens__NP_000448.3__HNF4A(1-474)(K106R_K108R_K126R_K127R)
  source 1..1425: mol_type = other RNA
atgcgcctctccaagaccctcgtcgacatggacatggccgactactccgccgccctcgaccccgcctacaccaccctcgagttcgagaacgtccaggtcctcaccatgggcaacgacacctccccctccgagggcaccaacctcaacgcccccaactccctcggcgtctccgccctctgcgccatctgcggcgaccgcgccaccggcaagcactacggcgcctcctcctgcgacggctgcaagggcttcttccgccgctccgtccgcaagaaccacatgtactcctgccgcttctcccgccagtgcgtcgtcgaccgcgaccgccgcaaccagtgccgctactgccgcctcaagaagtgcttccgcgccggcatgcgccgcgaggccgtccagaacgagcgcgaccgcatctccacccgccgctcctcctacgaggactcctccctcccctccatcaacgccctcctccaggccgaggtcctctcccgccagatcacctcccccgtctccggcatcaacggcgacatccgcgccaagaagatcgcctccatcgccgacgtctgcgagtccatgaaggagcagctcctcgtcctcgtcgagtgggccaagtacatccccgccttctgcgagctccccctcgacgaccaggtcgccctcctccgcgcccacgccggcgagcacctcctcctcggcgccaccaagcgctccatggtcttcaaggacgtcctcctcctcggcaacgactacatcgtcccccgccactgccccgagctcgccgagatgtcccgcgtctccatccgcatcctcgacgagctcgtcctccccttccaggagctccagatcgacgacaacgagtacgcctacctcaaggccatcatcttcttcgaccccgacgccaagggcctctccgaccccggcaagatcaagcgcctccgctcccaggtccaggtctccctcgaggactacatcaacgaccgccagtacgactcccgcggccgcttcggcgagctcctcctcctcctccccaccctccagtccatcacctggcagatgatcgagcagatccagttcatcaagctcttcggcatggccaagatcgacaacctcctccaggagatgctcctcggcggctccccctccgacgccccccacgcccaccaccccctccacccccacctcatgcaggagcacatgggcaccaacgtcatcgtcgccaacaccatgcccacccacctctccaacggccagatgtgcgagtggccccgcccccgcggccaggccgccacccccgagaccccccagccctccccccccggcggctccggctccgagccctacaagctcctccccggcgccgtcgccaccatcgtcaagcccctctccgccatcccccagcccaccatcaccaagcaggaggtcatctga

SEQ ID NO: 369 - RNA, 1425 nt, synthetic construct
  misc_feature 1..1425: note = CDS (opt2) from Homo sapiens__NP_000448.3__HNF4A(1-474)(E285Q)
  source 1..1425: mol_type = other RNA
atgcgcctctccaagaccctcgtcgacatggacatggccgactactccgccgccctcgaccccgcctacaccaccctcgagttcgagaacgtccaggtcctcaccatgggcaacgacacctccccctccgagggcaccaacctcaacgcccccaactccctcggcgtctccgccctctgcgccatctgcggcgaccgcgccaccggcaagcactacggcgcctcctcctgcgacggctgcaagggcttcttccgccgctccgtccgcaagaaccacatgtactcctgccgcttctcccgccagtgcgtcgtcgacaaggacaagcgcaaccagtgccgctactgccgcctcaagaagtgcttccgcgccggcatgaagaaggaggccgtccagaacgagcgcgaccgcatctccacccgccgctcctcctacgaggactcctccctcccctccatcaacgccctcctccaggccgaggtcctctcccgccagatcacctcccccgtctccggcatcaacggcgacatccgcgccaagaagatcgcctccatcgccgacgtctgcgagtccatgaaggagcagctcctcgtcctcgtcgagtgggccaagtacatccccgccttctgcgagctccccctcgacgaccaggtcgccctcctccgcgcccacgccggcgagcacctcctcctcggcgccaccaagcgctccatggtcttcaaggacgtcctcctcctcggcaacgactacatcgtcccccgccactgccccgagctcgccgagatgtcccgcgtctccatccgcatcctcgacgagctcgtcctccccttccaggagctccagatcgacgacaaccagtacgcctacctcaaggccatcatcttcttcgaccccgacgccaagggcctctccgaccccggcaagatcaagcgcctccgctcccaggtccaggtctccctcgaggactacatcaacgaccgccagtacgactcccgcggccgcttcggcgagctcctcctcctcctccccaccctccagtccatcacctggcagatgatcgagcagatccagttcatcaagctcttcggcatggccaagatcgacaacctcctccaggagatgctcctcggcggctccccctccgacgccccccacgcccaccaccccctccacccccacctcatgcaggagcacatgggcaccaacgtcatcgtcgccaacaccatgcccacccacctctccaacggccagatgtgcgagtggccccgcccccgcggccaggccgccacccccgagaccccccagccctccccccccggcggctccggctccgagccctacaagctcctccccggcgccgtcgccaccatcgtcaagcccctctccgccatcccccagcccaccatcaccaagcaggaggtcatctga

SEQ ID NO: 370 - RNA, 1425 nt, synthetic construct
  misc_feature 1..1425: note = CDS (opt2) from Homo sapiens__NP_000448.3__HNF4A(1-474)(T166E)
  source 1..1425: mol_type = other RNA
atgcgcctctccaagaccctcgtcgacatggacatggccgactactccgccgccctcgaccccgcctacaccaccctcgagttcgagaacgtccaggtcctcaccatgggcaacgacacctccccctccgagggcaccaacctcaacgcccccaactccctcggcgtctccgccctctgcgccatctgcggcgaccgcgccaccggcaagcactacggcgcctcctcctgcgacggctgcaagggcttcttccgccgctccgtccgcaagaaccacatgtactcctgccgcttctcccgccagtgcgtcgtcgacaaggacaagcgcaaccagtgccgctactgccgcctcaagaagtgcttccgcgccggcatgaagaaggaggccgtccagaacgagcgcgaccgcatctccacccgccgctcctcctacgaggactcctccctcccctccatcaacgccctcctccaggccgaggtcctctcccgccagatcgagtcccccgtctccggcatcaacggcgacatccgcgccaagaagatcgcctccatcgccgacgtctgcgagtccatgaaggagcagctcctcgtcctcgtcgagtgggccaagtacatccccgccttctgcgagctccccctcgacgaccaggtcgccctcctccgcgcccacgccggcgagcacctcctcctcggcgccaccaagcgctccatggtcttcaaggacgtcctcctcctcggcaacgactacatcgtcccccgccactgccccgagctcgccgagatgtcccgcgtctccatccgcatcctcgacgagctcgtcctccccttccaggagctccagatcgacgacaacgagtacgcctacctcaaggccatcatcttcttcgaccccgacgccaagggcctctccgaccccggcaagatcaagcgcctccgctcccaggtccaggtctccctcgaggactacatcaacgaccgccagtacgactcccgcggccgcttcggcgagctcctcctcctcctccccaccctccagtccatcacctggcagatgatcgagcagatccagttcatcaagctcttcggcatggccaagatcgacaacctcctccaggagatgctcctcggcggctccccctccgacgccccccacgcccaccaccccctccacccccacctcatgcaggagcacatgggcaccaacgtcatcgtcgccaacaccatgcccacccacctctccaacggccagatgtgcgagtggccccgcccccgcggccaggccgccacccccgagaccccccagccctccccccccggcggctccggctccgagccctacaagctcctccccggcgccgtcgccaccatcgtcaagcccctctccgccatcccccagcccaccatcaccaagcaggaggtcatctga

SEQ ID NO: 371 - RNA, 1425 nt, synthetic construct
  misc_feature 1..1425: note = CDS (opt2) from Homo sapiens__NP_000448.3__HNF4A(1-474)(S148A)
  source 1..1425: mol_type = other RNA
atgcgcctctccaagaccctcgtcgacatggacatggccgactactccgccgccctcgaccccgcctacaccaccctcgagttcgagaacgtccaggtcctcaccatgggcaacgacacctccccctccgagggcaccaacctcaacgcccccaactccctcggcgtctccgccctctgcgccatctgcggcgaccgcgccaccggcaagcactacggcgcctcctcctgcgacggctgcaagggcttcttccgccgctccgtccgcaagaaccacatgtactcctgccgcttctcccgccagtgcgtcgtcgacaaggacaagcgcaaccagtgccgctactgccgcctcaagaagtgcttccgcgccggcatgaagaaggaggccgtccagaacgagcgcgaccgcatctccacccgccgctcctcctacgaggactccgccctcccctccatcaacgccctcctccaggccgaggtcctctcccgccagatcacctcccccgtctccggcatcaacggcgacatccgcgccaagaagatcgcctccatcgccgacgtctgcgagtccatgaaggagcagctcctcgtcctcgtcgagtgggccaagtacatccccgccttctgcgagctccccctcgacgaccaggtcgccctcctccgcgcccacgccggcgagcacctcctcctcggcgccaccaagcgctccatggtcttcaaggacgtcctcctcctcggcaacgactacatcgtcccccgccactgccccgagctcgccgagatgtcccgcgtctccatccgcatcctcgacgagctcgtcctccccttccaggagctccagatcgacgacaacgagtacgcctacctcaaggccatcatcttcttcgaccccgacgccaagggcctctccgaccccggcaagatcaagcgcctccgctcccaggtccaggtctccctcgaggactacatcaacgaccgccagtacgactcccgcggccgcttcggcgagctcctcctcctcctccccaccctccagtccatcacctggcagatgatcgagcagatccagttcatcaagctcttcggcatggccaagatcgacaacctcctccaggagatgctcctcggcggctccccctccgacgccccccacgcccaccaccccctccacccccacctcatgcaggagcacatgggcaccaacgtcatcgtcgccaacaccatgcccacccacctctccaacggccagatgtgcgagtggccccgcccccgcggccaggccgccacccccgagaccccccagccctccccccccggcggctccggctccgagccctacaagctcctccccggcgccgtcgccaccatcgtcaagcccctctccgccatcccccagcccaccatcaccaagcaggaggtcatctga

SEQ ID NO: 372 - RNA, 1425 nt, synthetic construct
  misc_feature 1..1425: note = CDS (opt2) from Homo sapiens__NP_000448.3__HNF4A(1-474)(S148E)
  source 1..1425: mol_type = other RNA
atgcgcctctccaagaccctcgtcgacatggacatggccgactactccgccgccctcgaccccgcctacaccaccctcgagttcgagaacgtccaggtcctcaccatgggcaacgacacctccccctccgagggcaccaacctcaacgcccccaactccctcggcgtctccgccctctgcgccatctgcggcgaccgcgccaccggcaagcactacggcgcctcctcctgcgacggctgcaagggcttcttccgccgctccgtccgcaagaaccacatgtactcctgccgcttctcccgccagtgcgtcgtcgacaaggacaagcgcaaccagtgccgctactgccgcctcaagaagtgcttccgcgccggcatgaagaaggaggccgtccagaacgagcgcgaccgcatctccacccgccgctcctcctacgaggactccgagctcccctccatcaacgccctcctccaggccgaggtcctctcccgccagatcacctcccccgtctccggcatcaacggcgacatccgcgccaagaagatcgcctccatcgccgacgtctgcgagtccatgaaggagcagctcctcgtcctcgtcgagtgggccaagtacatccccgccttctgcgagctccccctcgacgaccaggtcgccctcctccgcgcccacgccggcgagcacctcctcctcggcgccaccaagcgctccatggtcttcaaggacgtcctcctcctcggcaacgactacatcgtcccccgccactgccccgagctcgccgagatgtcccgcgtctccatccgcatcctcgacgagctcgtcctccccttccaggagctccagatcgacgacaacgagtacgcctacctcaaggccatcatcttcttcgaccccgacgccaagggcctctccgaccccggcaagatcaagcgcctccgctcccaggtccaggtctccctcgaggactacatcaacgaccgccagtacgactcccgcggccgcttcggcgagctcctcctcctcctccccaccctccagtccatcacctggcagatgatcgagcagatccagttcatcaagctcttcggcatggccaagatcgacaacctcctccaggagatgctcctcggcggctccccctccgacgccccccacgcccaccaccccctccacccccacctcatgcaggagcacatgggcaccaacgtcatcgtcgccaacaccatgcccacccacctctccaacggccagatgtgcgagtggccccgcccccgcggccaggccgccacccccgagaccccccagccctccccccccggcggctccggctccgagccctacaagctcctccccggcgccgtcgccaccatcgtcaagcccctctccgccatcccccagcccaccatcaccaagcaggaggtcatctga

SEQ ID NO: 373 - RNA, 1425 nt, synthetic construct
  misc_feature 1..1425: note = CDS (opt2) from Homo sapiens__NP_000448.3__HNF4A(1-474)(S183A)
  source 1..1425: mol_type = other RNA
atgcgcctctccaagaccctcgtcgacatggacatggccgactactccgccgccctcgaccccgcctacaccaccctcgagttcgagaacgtccaggtcctcaccatgggcaacgacacctccccctccgagggcaccaacctcaacgcccccaactccctcggcgtctccgccctctgcgccatctgcggcgaccgcgccaccggcaagcactacggcgcctcctcctgcgacggctgcaagggcttcttccgccgctccgtccgcaagaaccacatgtactcctgccgcttctcccgccagtgcgtcgtcgacaaggacaagcgcaaccagtgccgctactgccgcctcaagaagtgcttccgcgccggcatgaagaaggaggccgtccagaacgagcgcgaccgcatctccacccgccgctcctcctacgaggactcctccctcccctccatcaacgccctcctccaggccgaggtcctctcccgccagatcacctcccccgtctccggcatcaacggcgacatccgcgccaagaagatcgccgccatcgccgacgtctgcgagtccatgaaggagcagctcctcgtcctcgtcgagtgggccaagtacatccccgccttctgcgagctccccctcgacgaccaggtcgccctcctccgcgcccacgccggcgagcacctcctcctcggcgccaccaagcgctccatggtcttcaaggacgtcctcctcctcggcaacgactacatcgtcccccgccactgccccgagctcgccgagatgtcccgcgtctccatccgcatcctcgacgagctcgtcctccccttccaggagctccagatcgacgacaacgagtacgcctacctcaaggccatcatcttcttcgaccccgacgccaagggcctctccgaccccggcaagatcaagcgcctccgctcccaggtccaggtctccctcgaggactacatcaacgaccgccagtacgactcccgcggccgcttcggcgagctcctcctcctcctccccaccctccagtccatcacctggcagatgatcgagcagatccagttcatcaagctcttcggcatggccaagatcgacaacctcctccaggagatgctcctcggcggctccccctccgacgccccccacgcccaccaccccctccacccccacctcatgcaggagcacatgggcaccaacgtcatcgtcgccaacaccatgcccacccacctctccaacggccagatgtgcgagtggccccgcccccgcggccaggccgccacccccgagaccccccagccctccccccccggcggctccggctccgagccctacaagctcctccccggcgccgtcgccaccatcgtcaagcccctctccgccatcccccagcccaccatcaccaagcaggaggtcatctga

SEQ ID NO: 374 - RNA, 1425 nt, synthetic construct
  misc_feature 1..1425: note = CDS (opt2) from Homo sapiens__NP_000448.3__HNF4A(1-474)(S183E)
  source 1..1425: mol_type = other RNA
atgcgcctctccaagaccctcgtcgacatggacatggccgactactccgccgccctcgaccccgcctacaccaccctcgagttcgagaacgtccaggtcctcaccatgggcaacgacacctccccctccgagggcaccaacctcaacgcccccaactccctcggcgtctccgccctctgcgccatctgcggcgaccgcgccaccggcaagcactacggcgcctcctcctgcgacggctgcaagggcttcttccgccgctccgtccgcaagaaccacatgtactcctgccgcttctcccgccagtgcgtcgtcgacaaggacaagcgcaaccagtgccgctactgccgcctcaagaagtgcttccgcgccggcatgaagaaggaggccgtccagaacgagcgcgaccgcatctccacccgccgctcctcctacgaggactcctccctcccctccatcaacgccctcctccaggccgaggtcctctcccgccagatcacctcccccgtctccggcatcaacggcgacatccgcgccaagaagatcgccgagatcgccgacgtctgcgagtccatgaaggagcagctcctcgtcctcgtcgagtgggccaagtacatccccgccttctgcgagctccccctcgacgaccaggtcgccctcctccgcgcccacgccggcgagcacctcctcctcggcgccaccaagcgctccatggtcttcaaggacgtcctcctcctcggcaacgactacatcgtcccccgccactgccccgagctcgccgagatgtcccgcgtctccatccgcatcctcgacgagctcgtcctccccttccaggagctccagatcgacgacaacgagtacgcctacctcaaggccatcatcttcttcgaccccgacgccaagggcctctccgaccccggcaagatcaagcgcctccgctcccaggtccaggtctccctcgaggactacatcaacgaccgccagtacgactcccgcggccgcttcggcgagctcctcctcctcctccccaccctccagtccatcacctggcagatgatcgagcagatccagttcatcaagctcttcggcatggccaagatcgacaacctcctccaggagatgctcctcggcggctccccctccgacgccccccacgcccaccaccccctccacccccacctcatgcaggagcacatgggcaccaacgtcatcgtcgccaacaccatgcccacccacctctccaacggccagatgtgcgagtggccccgcccccgcggccaggccgccacccccgagaccccccagccctccccccccggcggctccggctccgagccctacaagctcctccccggcgccgtcgccaccatcgtcaagcccctctccgccatcccccagcccaccatcaccaagcaggaggtcatctga

SEQ ID NO: 375 - RNA, 1425 nt, synthetic construct
  misc_feature 1..1425: note = CDS (opt2) from Homo sapiens__NP_000448.3__HNF4A(1-474)(S461A)
  source 1..1425: mol_type = other RNA
atgcgcctctccaagaccctcgtcgacatggacatggccgactactccgccgccctcgaccccgcctacaccaccctcgagttcgagaacgtccaggtcctcaccatgggcaacgacacctccccctccgagggcaccaacctcaacgcccccaactccctcggcgtctccgccctctgcgccatctgcggcgaccgcgccaccggcaagcactacggcgcctcctcctgcgacggctgcaagggcttcttccgccgctccgtccgcaagaaccacatgtactcctgccgcttctcccgccagtgcgtcgtcgacaaggacaagcgcaaccagtgccgctactgccgcctcaagaagtgcttccgcgccggcatgaagaaggaggccgtccagaacgagcgcgaccgcatctccacccgccgctcctcctacgaggactcctccctcccctccatcaacgccctcctccaggccgaggtcctctcccgccagatcacctcccccgtctccggcatcaacggcgacatccgcgccaagaagatcgcctccatcgccgacgtctgcgagtccatgaaggagcagctcctcgtcctcgtcgagtgggccaagtacatccccgccttctgcgagctccccctcgacgaccaggtcgccctcctccgcgcccacgccggcgagcacctcctcctcggcgccaccaagcgctccatggtcttcaaggacgtcctcctcctcggcaacgactacatcgtcccccgccactgccccgagctcgccgagatgtcccgcgtctccatccgcatcctcgacgagctcgtcctccccttccaggagctccagatcgacgacaacgagtacgcctacctcaaggccatcatcttcttcgaccccgacgccaagggcctctccgaccccggcaagatcaagcgcctccgctcccaggtccaggtctccctcgaggactacatcaacgaccgccagtacgactcccgcggccgcttcggcgagctcctcctcctcctccccaccctccagtccatcacctggcagatgatcgagcagatccagttcatcaagctcttcggcatggccaagatcgacaacctcctccaggagatgctcctcggcggctccccctccgacgccccccacgcccaccaccccctccacccccacctcatgcaggagcacatgggcaccaacgtcatcgtcgccaacaccatgcccacccacctctccaacggccagatgtgcgagtggccccgcccccgcggccaggccgccacccccgagaccccccagccctccccccccggcggctccggctccgagccctacaagctcctccccggcgccgtcgccaccatcgtcaagcccctcgccgccatcccccagcccaccatcaccaagcaggaggtcatctga

SEQ ID NO: 376 - RNA, 1425 nt, synthetic construct
  misc_feature 1..1425: note = CDS (opt2) from Homo sapiens__NP_000448.3__HNF4A(1-474)(S461E)
  source 1..1425: mol_type = other RNA
atgcgcctctccaagaccctcgtcgacatggacatggccgactactccgccgccctcgaccccgcctacaccaccctcgagttcgagaacgtccaggtcctcaccatgggcaacgacacctccccctccgagggcaccaacctcaacgcccccaactccctcggcgtctccgccctctgcgccatctgcggcgaccgcgccaccggcaagcactacggcgcctcctcctgcgacggctgcaagggcttcttccgccgctccgtccgcaagaaccacatgtactcctgccgcttctcccgccagtgcgtcgtcgacaaggacaagcgcaaccagtgccgctactgccgcctcaagaagtgcttccgcgccggcatgaagaaggaggccgtccagaacgagcgcgaccgcatctccacccgccgctcctcctacgaggactcctccctcccctccatcaacgccctcctccaggccgaggtcctctcccgccagatcacctcccccgtctccggcatcaacggcgacatccgcgccaagaagatcgcctccatcgccgacgtctgcgagtccatgaaggagcagctcctcgtcctcgtcgagtgggccaagtacatccccgccttctgcgagctccccctcgacgaccaggtcgccctcctccgcgcccacgccggcgagcacctcctcctcggcgccaccaagcgctccatggtcttcaaggacgtcctcctcctcggcaacgactacatcgtcccccgccactgccccgagctcgccgagatgtcccgcgtctccatccgcatcctcgacgagctcgtcctccccttccaggagctccagatcgacgacaacgagtacgcctacctcaaggccatcatcttcttcgaccccgacgccaagggcctctccgaccccggcaagatcaagcgcctccgctcccaggtccaggtctccctcgaggactacatcaacgaccgccagtacgactcccgcggccgcttcggcgagctcctcctcctcctccccaccctccagtccatcacctggcagatgatcgagcagatccagttcatcaagctcttcggcatggccaagatcgacaacctcctccaggagatgctcctcggcggctccccctccgacgccccccacgcccaccaccccctccacccccacctcatgcaggagcacatgggcaccaacgtcatcgtcgccaacaccatgcccacccacctctccaacggccagatgtgcgagtggccccgcccccgcggccaggccgccacccccgagaccccccagccctccccccccggcggctccggctccgagccctacaagctcctccccggcgccgtcgccaccatcgtcaagcccctcgaggccatcccccagcccaccatcaccaagcaggaggtcatctga

SEQ ID NO: 377 - RNA, 1425 nt, synthetic construct
  misc_feature 1..1425: note = CDS (opt2) from Homo sapiens__NP_000448.3__HNF4A(1-474)(S142A_S143A_S313A)
  source 1..1425: mol_type = other RNA
atgcgcctctccaagaccctcgtcgacatggacatggccgactactccgccgccctcgaccccgcctacaccaccctcgagttcgagaacgtccaggtcctcaccatgggcaacgacacctccccctccgagggcaccaacctcaacgcccccaactccctcggcgtctccgccctctgcgccatctgcggcgaccgcgccaccggcaagcactacggcgcctcctcctgcgacggctgcaagggcttcttccgccgctccgtccgcaagaaccacatgtactcctgccgcttctcccgccagtgcgtcgtcgacaaggacaagcgcaaccagtgccgctactgccgcctcaagaagtgcttccgcgccggcatgaagaaggaggccgtccagaacgagcgcgaccgcatctccacccgccgcgccgcctacgaggactcctccctcccctccatcaacgccctcctccaggccgaggtcctctcccgccagatcacctcccccgtctccggcatcaacggcgacatccgcgccaagaagatcgcctccatcgccgacgtctgcgagtccatgaaggagcagctcctcgtcctcgtcgagtgggccaagtacatccccgccttctgcgagctccccctcgacgaccaggtcgccctcctccgcgcccacgccggcgagcacctcctcctcggcgccaccaagcgctccatggtcttcaaggacgtcctcctcctcggcaacgactacatcgtcccccgccactgccccgagctcgccgagatgtcccgcgtctccatccgcatcctcgacgagctcgtcctccccttccaggagctccagatcgacgacaacgagtacgcctacctcaaggccatcatcttcttcgaccccgacgccaagggcctctccgaccccggcaagatcaagcgcctccgcgcccaggtccaggtctccctcgaggactacatcaacgaccgccagtacgactcccgcggccgcttcggcgagctcctcctcctcctccccaccctccagtccatcacctggcagatgatcgagcagatccagttcatcaagctcttcggcatggccaagatcgacaacctcctccaggagatgctcctcggcggctccccctccgacgccccccacgcccaccaccccctccacccccacctcatgcaggagcacatgggcaccaacgtcatcgtcgccaacaccatgcccacccacctctccaacggccagatgtgcgagtggccccgcccccgcggccaggccgccacccccgagaccccccagccctccccccccggcggctccggctccgagccctacaagctcctccccggcgccgtcgccaccatcgtcaagcccctctccgccatcccccagcccaccatcaccaagcaggaggtcatctga

SEQ ID NO: 378 - RNA, 1425 nt, synthetic construct
  misc_feature 1..1425: note = CDS (opt2) from Homo sapiens__NP_000448.3__HNF4A(1-474)(S142A_S143A_S313A_K458R)
  source 1..1425: mol_type = other RNA
atgcgcctctccaagaccctcgtcgacatggacatggccgactactccgccgccctcgaccccgcctacaccaccctcgagttcgagaacgtccaggtcctcaccatgggcaacgacacctccccctccgagggcaccaacctcaacgcccccaactccctcggcgtctccgccctctgcgccatctgcggcgaccgcgccaccggcaagcactacggcgcctcctcctgcgacggctgcaagggcttcttccgccgctccgtccgcaagaaccacatgtactcctgccgcttctcccgccagtgcgtcgtcgacaaggacaagcgcaaccagtgccgctactgccgcctcaagaagtgcttccgcgccggcatgaagaaggaggccgtccagaacgagcgcgaccgcatctccacccgccgcgccgcctacgaggactcctccctcccctccatcaacgccctcctccaggccgaggtcctctcccgccagatcacctcccccgtctccggcatcaacggcgacatccgcgccaagaagatcgcctccatcgccgacgtctgcgagtccatgaaggagcagctcctcgtcctcgtcgagtgggccaagtacatccccgccttctgcgagctccccctcgacgaccaggtcgccctcctccgcgcccacgccggcgagcacctcctcctcggcgccaccaagcgctccatggtcttcaaggacgtcctcctcctcggcaacgactacatcgtcccccgccactgccccgagctcgccgagatgtcccgcgtctccatccgcatcctcgacgagctcgtcctccccttccaggagctccagatcgacgacaacgagtacgcctacctcaaggccatcatcttcttcgaccccgacgccaagggcctctccgaccccggcaagatcaagcgcctccgcgcccaggtccaggtctccctcgaggactacatcaacgaccgccagtacgactcccgcggccgcttcggcgagctcctcctcctcctccccaccctccagtccatcacctggcagatgatcgagcagatccagttcatcaagctcttcggcatggccaagatcgacaacctcctccaggagatgctcctcggcggctccccctccgacgccccccacgcccaccaccccctccacccccacctcatgcaggagcacatgggcaccaacgtcatcgtcgccaacaccatgcccacccacctctccaacggccagatgtgcgagtggccccgcccccgcggccaggccgccacccccgagaccccccagccctccccccccggcggctccggctccgagccctacaagctcctccccggcgccgtcgccaccatcgtccgccccctctccgccatcccccagcccaccatcaccaagcaggaggtcatctga

SEQ ID NO: 379 - RNA, 1425 nt, synthetic construct
  misc_feature 1..1425: note = CDS (opt2) from Homo sapiens__NP_000448.3__HNF4A(1-474)(S142A_S143A_S167A_S313A_ S378A_T429A_T432A_S436A_K458R)
  source 1..1425: mol_type = other RNA
atgcgcctctccaagaccctcgtcgacatggacatggccgactactccgccgccctcgaccccgcctacaccaccctcgagttcgagaacgtccaggtcctcaccatgggcaacgacacctccccctccgagggcaccaacctcaacgcccccaactccctcggcgtctccgccctctgcgccatctgcggcgaccgcgccaccggcaagcactacggcgcctcctcctgcgacggctgcaagggcttcttccgccgctccgtccgcaagaaccacatgtactcctgccgcttctcccgccagtgcgtcgtcgacaaggacaagcgcaaccagtgccgctactgccgcctcaagaagtgcttccgcgccggcatgaagaaggaggccgtccagaacgagcgcgaccgcatctccacccgccgcgccgcctacgaggactcctccctcccctccatcaacgccctcctccaggccgaggtcctctcccgccagatcaccgcccccgtctccggcatcaacggcgacatccgcgccaagaagatcgcctccatcgccgacgtctgcgagtccatgaaggagcagctcctcgtcctcgtcgagtgggccaagtacatccccgccttctgcgagctccccctcgacgaccaggtcgccctcctccgcgcccacgccggcgagcacctcctcctcggcgccaccaagcgctccatggtcttcaaggacgtcctcctcctcggcaacgactacatcgtcccccgccactgccccgagctcgccgagatgtcccgcgtctccatccgcatcctcgacgagctcgtcctccccttccaggagctccagatcgacgacaacgagtacgcctacctcaaggccatcatcttcttcgaccccgacgccaagggcctctccgaccccggcaagatcaagcgcctccgcgcccaggtccaggtctccctcgaggactacatcaacgaccgccagtacgactcccgcggccgcttcggcgagctcctcctcctcctccccaccctccagtccatcacctggcagatgatcgagcagatccagttcatcaagctcttcggcatggccaagatcgacaacctcctccaggagatgctcctcggcggcgccccctccgacgccccccacgcccaccaccccctccacccccacctcatgcaggagcacatgggcaccaacgtcatcgtcgccaacaccatgcccacccacctctccaacggccagatgtgcgagtggccccgcccccgcggccaggccgccgcccccgaggccccccagcccgccccccccggcggctccggctccgagccctacaagctcctccccggcgccgtcgccaccatcgtccgccccctctccgccatcccccagcccaccatcaccaagcaggaggtcatctga

SEQ ID NO: 380 - RNA, 1425 nt, synthetic construct
  misc_feature 1..1425: note = CDS (opt2) from Homo sapiens__NP_000448.3__HNF4A(1-474)(S142A_S143A_S148A_S167A_ S313A_S378A_T429A_T432A_S436A_K458R)
  source 1..1425: mol_type = other RNA
atgcgcctctccaagaccctcgtcgacatggacatggccgactactccgccgccctcgaccccgcctacaccaccctcgagttcgagaacgtccaggtcctcaccatgggcaacgacacctccccctccgagggcaccaacctcaacgcccccaactccctcggcgtctccgccctctgcgccatctgcggcgaccgcgccaccggcaagcactacggcgcctcctcctgcgacggctgcaagggcttcttccgccgctccgtccgcaagaaccacatgtactcctgccgcttctcccgccagtgcgtcgtcgacaaggacaagcgcaaccagtgccgctactgccgcctcaagaagtgcttccgcgccggcatgaagaaggaggccgtccagaacgagcgcgaccgcatctccacccgccgcgccgcctacgaggactccgccctcccctccatcaacgccctcctccaggccgaggtcctctcccgccagatcaccgcccccgtctccggcatcaacggcgacatccgcgccaagaagatcgcctccatcgccgacgtctgcgagtccatgaaggagcagctcctcgtcctcgtcgagtgggccaagtacatccccgccttctgcgagctccccctcgacgaccaggtcgccctcctccgcgcccacgccggcgagcacctcctcctcggcgccaccaagcgctccatggtcttcaaggacgtcctcctcctcggcaacgactacatcgtcccccgccactgccccgagctcgccgagatgtcccgcgtctccatccgcatcctcgacgagctcgtcctccccttccaggagctccagatcgacgacaacgagtacgcctacctcaaggccatcatcttcttcgaccccgacgccaagggcctctccgaccccggcaagatcaagcgcctccgcgcccaggtccaggtctccctcgaggactacatcaacgaccgccagtacgactcccgcggccgcttcggcgagctcctcctcctcctccccaccctccagtccatcacctggcagatgatcgagcagatccagttcatcaagctcttcggcatggccaagatcgacaacctcctccaggagatgctcctcggcggcgccccctccgacgccccccacgcccaccaccccctccacccccacctcatgcaggagcacatgggcaccaacgtcatcgtcgccaacaccatgcccacccacctctccaacggccagatgtgcgagtggccccgcccccgcggccaggccgccgcccccgaggccccccagcccgccccccccggcggctccggctccgagccctacaagctcctccccggcgccgtcgccaccatcgtccgccccctctccgccatcccccagcccaccatcaccaagcaggaggtcatctga

SEQ ID NO: 381 - RNA, 1425 nt, synthetic construct
  misc_feature 1..1425: note = CDS (opt2) from Homo sapiens__NP_000448.3__HNF4A(1-474)(K106R_K108R_K126R_K127R_ S142A_S143A_S148A_S167A_S313A_S378A_T429A_T432A_S436A_K458R )
  source 1..1425: mol_type = other RNA
atgcgcctctccaagaccctcgtcgacatggacatggccgactactccgccgccctcgaccccgcctacaccaccctcgagttcgagaacgtccaggtcctcaccatgggcaacgacacctccccctccgagggcaccaacctcaacgcccccaactccctcggcgtctccgccctctgcgccatctgcggcgaccgcgccaccggcaagcactacggcgcctcctcctgcgacggctgcaagggcttcttccgccgctccgtccgcaagaaccacatgtactcctgccgcttctcccgccagtgcgtcgtcgaccgcgaccgccgcaaccagtgccgctactgccgcctcaagaagtgcttccgcgccggcatgcgccgcgaggccgtccagaacgagcgcgaccgcatctccacccgccgcgccgcctacgaggactccgccctcccctccatcaacgccctcctccaggccgaggtcctctcccgccagatcaccgcccccgtctccggcatcaacggcgacatccgcgccaagaagatcgcctccatcgccgacgtctgcgagtccatgaaggagcagctcctcgtcctcgtcgagtgggccaagtacatccccgccttctgcgagctccccctcgacgaccaggtcgccctcctccgcgcccacgccggcgagcacctcctcctcggcgccaccaagcgctccatggtcttcaaggacgtcctcctcctcggcaacgactacatcgtcccccgccactgccccgagctcgccgagatgtcccgcgtctccatccgcatcctcgacgagctcgtcctccccttccaggagctccagatcgacgacaacgagtacgcctacctcaaggccatcatcttcttcgaccccgacgccaagggcctctccgaccccggcaagatcaagcgcctccgcgcccaggtccaggtctccctcgaggactacatcaacgaccgccagtacgactcccgcggccgcttcggcgagctcctcctcctcctccccaccctccagtccatcacctggcagatgatcgagcagatccagttcatcaagctcttcggcatggccaagatcgacaacctcctccaggagatgctcctcggcggcgccccctccgacgccccccacgcccaccaccccctccacccccacctcatgcaggagcacatgggcaccaacgtcatcgtcgccaacaccatgcccacccacctctccaacggccagatgtgcgagtggccccgcccccgcggccaggccgccgcccccgaggccccccagcccgccccccccggcggctccggctccgagccctacaagctcctccccggcgccgtcgccaccatcgtccgccccctctccgccatcccccagcccaccatcaccaagcaggaggtcatctga

SEQ ID NO: 382 - RNA, 1425 nt, synthetic construct
  misc_feature 1..1425: note = CDS (opt2) from Homo sapiens__NP_000448.3__HNF4A(1-474)(S142A_S143A_S148A_T166A_ S167A_S313A_S378A_T429A_T432A_S436A_K458R)
  source 1..1425: mol_type = other RNA
atgcgcctctccaagaccctcgtcgacatggacatggccgactactccgccgccctcgaccccgcctacaccaccctcgagttcgagaacgtccaggtcctcaccatgggcaacgacacctccccctccgagggcaccaacctcaacgcccccaactccctcggcgtctccgccctctgcgccatctgcggcgaccgcgccaccggcaagcactacggcgcctcctcctgcgacggctgcaagggcttcttccgccgctccgtccgcaagaaccacatgtactcctgccgcttctcccgccagtgcgtcgtcgacaaggacaagcgcaaccagtgccgctactgccgcctcaagaagtgcttccgcgccggcatgaagaaggaggccgtccagaacgagcgcgaccgcatctccacccgccgcgccgcctacgaggactccgccctcccctccatcaacgccctcctccaggccgaggtcctctcccgccagatcgccgcccccgtctccggcatcaacggcgacatccgcgccaagaagatcgcctccatcgccgacgtctgcgagtccatgaaggagcagctcctcgtcctcgtcgagtgggccaagtacatccccgccttctgcgagctccccctcgacgaccaggtcgccctcctccgcgcccacgccggcgagcacctcctcctcggcgccaccaagcgctccatggtcttcaaggacgtcctcctcctcggcaacgactacatcgtcccccgccactgccccgagctcgccgagatgtcccgcgtctccatccgcatcctcgacgagctcgtcctccccttccaggagctccagatcgacgacaacgagtacgcctacctcaaggccatcatcttcttcgaccccgacgccaagggcctctccgaccccggcaagatcaagcgcctccgcgcccaggtccaggtctccctcgaggactacatcaacgaccgccagtacgactcccgcggccgcttcggcgagctcctcctcctcctccccaccctccagtccatcacctggcagatgatcgagcagatccagttcatcaagctcttcggcatggccaagatcgacaacctcctccaggagatgctcctcggcggcgccccctccgacgccccccacgcccaccaccccctccacccccacctcatgcaggagcacatgggcaccaacgtcatcgtcgccaacaccatgcccacccacctctccaacggccagatgtgcgagtggccccgcccccgcggccaggccgccgcccccgaggccccccagcccgccccccccggcggctccggctccgagccctacaagctcctccccggcgccgtcgccaccatcgtccgccccctctccgccatcccccagcccaccatcaccaagcaggaggtcatctga

SEQ ID NO: 383 - RNA, 1425 nt, synthetic construct
  misc_feature 1..1425: note = CDS (opt2) from Homo sapiens__NP_000448.3__HNF4A(1-474)(S87A_S142A_S143A_S148A_T 166A_S167A_S313A_S378A_T429A_T432A_S436A_K458R)
  source 1..1425: mol_type = other RNA
atgcgcctctccaagaccctcgtcgacatggacatggccgactactccgccgccctcgaccccgcctacaccaccctcgagttcgagaacgtccaggtcctcaccatgggcaacgacacctccccctccgagggcaccaacctcaacgcccccaactccctcggcgtctccgccctctgcgccatctgcggcgaccgcgccaccggcaagcactacggcgcctcctcctgcgacggctgcaagggcttcttccgccgcgccgtccgcaagaaccacatgtactcctgccgcttctcccgccagtgcgtcgtcgacaaggacaagcgcaaccagtgccgctactgccgcctcaagaagtgcttccgcgccggcatgaagaaggaggccgtccagaacgagcgcgaccgcatctccacccgccgcgccgcctacgaggactccgccctcccctccatcaacgccctcctccaggccgaggtcctctcccgccagatcgccgcccccgtctccggcatcaacggcgacatccgcgccaagaagatcgcctccatcgccgacgtctgcgagtccatgaaggagcagctcctcgtcctcgtcgagtgggccaagtacatccccgccttctgcgagctccccctcgacgaccaggtcgccctcctccgcgcccacgccggcgagcacctcctcctcggcgccaccaagcgctccatggtcttcaaggacgtcctcctcctcggcaacgactacatcgtcccccgccactgccccgagctcgccgagatgtcccgcgtctccatccgcatcctcgacgagctcgtcctccccttccaggagctccagatcgacgacaacgagtacgcctacctcaaggccatcatcttcttcgaccccgacgccaagggcctctccgaccccggcaagatcaagcgcctccgcgcccaggtccaggtctccctcgaggactacatcaacgaccgccagtacgactcccgcggccgcttcggcgagctcctcctcctcctccccaccctccagtccatcacctggcagatgatcgagcagatccagttcatcaagctcttcggcatggccaagatcgacaacctcctccaggagatgctcctcggcggcgccccctccgacgccccccacgcccaccaccccctccacccccacctcatgcaggagcacatgggcaccaacgtcatcgtcgccaacaccatgcccacccacctctccaacggccagatgtgcgagtggccccgcccccgcggccaggccgccgcccccgaggccccccagcccgccccccccggcggctccggctccgagccctacaagctcctccccggcgccgtcgccaccatcgtccgccccctctccgccatcccccagcccaccatcaccaagcaggaggtcatctga

SEQ ID NO: 384 - RNA, 1425 nt, synthetic construct
  misc_feature 1..1425: note = CDS (opt2) from Homo sapiens__NP_000448.3__HNF4A(1-474)(S87A_K106R_K108R_K126R_K 127R_S142A_S143A_S148A_T166A_S167A_S313A_S378A_T429A_T432A_ S436A_K458R)
  source 1..1425: mol_type = other RNA
atgcgcctctccaagaccctcgtcgacatggacatggccgactactccgccgccctcgaccccgcctacaccaccctcgagttcgagaacgtccaggtcctcaccatgggcaacgacacctccccctccgagggcaccaacctcaacgcccccaactccctcggcgtctccgccctctgcgccatctgcggcgaccgcgccaccggcaagcactacggcgcctcctcctgcgacggctgcaagggcttcttccgccgcgccgtccgcaagaaccacatgtactcctgccgcttctcccgccagtgcgtcgtcgaccgcgaccgccgcaaccagtgccgctactgccgcctcaagaagtgcttccgcgccggcatgcgccgcgaggccgtccagaacgagcgcgaccgcatctccacccgccgcgccgcctacgaggactccgccctcccctccatcaacgccctcctccaggccgaggtcctctcccgccagatcgccgcccccgtctccggcatcaacggcgacatccgcgccaagaagatcgcctccatcgccgacgtctgcgagtccatgaaggagcagctcctcgtcctcgtcgagtgggccaagtacatccccgccttctgcgagctccccctcgacgaccaggtcgccctcctccgcgcccacgccggcgagcacctcctcctcggcgccaccaagcgctccatggtcttcaaggacgtcctcctcctcggcaacgactacatcgtcccccgccactgccccgagctcgccgagatgtcccgcgtctccatccgcatcctcgacgagctcgtcctccccttccaggagctccagatcgacgacaacgagtacgcctacctcaaggccatcatcttcttcgaccccgacgccaagggcctctccgaccccggcaagatcaagcgcctccgcgcccaggtccaggtctccctcgaggactacatcaacgaccgccagtacgactcccgcggccgcttcggcgagctcctcctcctcctccccaccctccagtccatcacctggcagatgatcgagcagatccagttcatcaagctcttcggcatggccaagatcgacaacctcctccaggagatgctcctcggcggcgccccctccgacgccccccacgcccaccaccccctccacccccacctcatgcaggagcacatgggcaccaacgtcatcgtcgccaacaccatgcccacccacctctccaacggccagatgtgcgagtggccccgcccccgcggccaggccgccgcccccgaggccccccagcccgccccccccggcggctccggctccgagccctacaagctcctccccggcgccgtcgccaccatcgtccgccccctctccgccatcccccagcccaccatcaccaagcaggaggtcatctga

SEQ ID NO: 385 - RNA, 1425 nt, synthetic construct
  misc_feature 1..1425: note = CDS (opt2) from Homo sapiens__NP_000448.3__HNF4A(1-474)(S87A_K106R_K108R_K126R_K 127R)
  source 1..1425: mol_type = other RNA
atgcgcctctccaagaccctcgtcgacatggacatggccgactactccgccgccctcgaccccgcctacaccaccctcgagttcgagaacgtccaggtcctcaccatgggcaacgacacctccccctccgagggcaccaacctcaacgcccccaactccctcggcgtctccgccctctgcgccatctgcggcgaccgcgccaccggcaagcactacggcgcctcctcctgcgacggctgcaagggcttcttccgccgcgccgtccgcaagaaccacatgtactcctgccgcttctcccgccagtgcgtcgtcgaccgcgaccgccgcaaccagtgccgctactgccgcctcaagaagtgcttccgcgccggcatgcgccgcgaggccgtccagaacgagcgcgaccgcatctccacccgccgctcctcctacgaggactcctccctcccctccatcaacgccctcctccaggccgaggtcctctcccgccagatcacctcccccgtctccggcatcaacggcgacatccgcgccaagaagatcgcctccatcgccgacgtctgcgagtccatgaaggagcagctcctcgtcctcgtcgagtgggccaagtacatccccgccttctgcgagctccccctcgacgaccaggtcgccctcctccgcgcccacgccggcgagcacctcctcctcggcgccaccaagcgctccatggtcttcaaggacgtcctcctcctcggcaacgactacatcgtcccccgccactgccccgagctcgccgagatgtcccgcgtctccatccgcatcctcgacgagctcgtcctccccttccaggagctccagatcgacgacaacgagtacgcctacctcaaggccatcatcttcttcgaccccgacgccaagggcctctccgaccccggcaagatcaagcgcctccgctcccaggtccaggtctccctcgaggactacatcaacgaccgccagtacgactcccgcggccgcttcggcgagctcctcctcctcctccccaccctccagtccatcacctggcagatgatcgagcagatccagttcatcaagctcttcggcatggccaagatcgacaacctcctccaggagatgctcctcggcggctccccctccgacgccccccacgcccaccaccccctccacccccacctcatgcaggagcacatgggcaccaacgtcatcgtcgccaacaccatgcccacccacctctccaacggccagatgtgcgagtggccccgcccccgcggccaggccgccacccccgagaccccccagccctccccccccggcggctccggctccgagccctacaagctcctccccggcgccgtcgccaccatcgtcaagcccctctccgccatcccccagcccaccatcaccaagcaggaggtcatctga

SEQ ID NO: 386 - RNA, 1425 nt, synthetic construct
  misc_feature 1..1425: note = CDS (opt2) from Homo sapiens__NP_000448.3__HNF4A(1-474)(S87A_K106R_K108R_K126R_K 127R_S142A_S143A_S148A_T166A_S167A_S313A_S378A_T429A_T432A_ S436A_K458R_S461A)
  source 1..1425: mol_type = other RNA
atgcgcctctccaagaccctcgtcgacatggacatggccgactactccgccgccctcgaccccgcctacaccaccctcgagttcgagaacgtccaggtcctcaccatgggcaacgacacctccccctccgagggcaccaacctcaacgcccccaactccctcggcgtctccgccctctgcgccatctgcggcgaccgcgccaccggcaagcactacggcgcctcctcctgcgacggctgcaagggcttcttccgccgcgccgtccgcaagaaccacatgtactcctgccgcttctcccgccagtgcgtcgtcgaccgcgaccgccgcaaccagtgccgctactgccgcctcaagaagtgcttccgcgccggcatgcgccgcgaggccgtccagaacgagcgcgaccgcatctccacccgccgcgccgcctacgaggactccgccctcccctccatcaacgccctcctccaggccgaggtcctctcccgccagatcgccgcccccgtctccggcatcaacggcgacatccgcgccaagaagatcgcctccatcgccgacgtctgcgagtccatgaaggagcagctcctcgtcctcgtcgagtgggccaagtacatccccgccttctgcgagctccccctcgacgaccaggtcgccctcctccgcgcccacgccggcgagcacctcctcctcggcgccaccaagcgctccatggtcttcaaggacgtcctcctcctcggcaacgactacatcgtcccccgccactgccccgagctcgccgagatgtcccgcgtctccatccgcatcctcgacgagctcgtcctccccttccaggagctccagatcgacgacaacgagtacgcctacctcaaggccatcatcttcttcgaccccgacgccaagggcctctccgaccccggcaagatcaagcgcctccgcgcccaggtccaggtctccctcgaggactacatcaacgaccgccagtacgactcccgcggccgcttcggcgagctcctcctcctcctccccaccctccagtccatcacctggcagatgatcgagcagatccagttcatcaagctcttcggcatggccaagatcgacaacctcctccaggagatgctcctcggcggcgccccctccgacgccccccacgcccaccaccccctccacccccacctcatgcaggagcacatgggcaccaacgtcatcgtcgccaacaccatgcccacccacctctccaacggccagatgtgcgagtggccccgcccccgcggccaggccgccgcccccgaggccccccagcccgccccccccggcggctccggctccgagccctacaagctcctccccggcgccgtcgccaccatcgtccgccccctcgccgccatcccccagcccaccatcaccaagcaggaggtcatctga

SEQ ID NO: 387 - RNA, 1425 nt, synthetic construct
  misc_feature 1..1425: note = CDS (opt2) from Homo sapiens__NP_000448.3__HNF4A(1-474)(S87A_K106R_K108R_K126R_K 127R_S142A_S143A_S148A_T166A_S167A_S313A_S378A_T429A_T432A_ S436A_K458R_S461E)
  source 1..1425: mol_type = other RNA
atgcgcctctccaagaccctcgtcgacatggacatggccgactactccgccgccctcgaccccgcctacaccaccctcgagttcgagaacgtccaggtcctcaccatgggcaacgacacctccccctccgagggcaccaacctcaacgcccccaactccctcggcgtctccgccctctgcgccatctgcggcgaccgcgccaccggcaagcactacggcgcctcctcctgcgacggctgcaagggcttcttccgccgcgccgtccgcaagaaccacatgtactcctgccgcttctcccgccagtgcgtcgtcgaccgcgaccgccgcaaccagtgccgctactgccgcctcaagaagtgcttccgcgccggcatgcgccgcgaggccgtccagaacgagcgcgaccgcatctccacccgccgcgccgcctacgaggactccgccctcccctccatcaacgccctcctccaggccgaggtcctctcccgccagatcgccgcccccgtctccggcatcaacggcgacatccgcgccaagaagatcgcctccatcgccgacgtctgcgagtccatgaaggagcagctcctcgtcctcgtcgagtgggccaagtacatccccgccttctgcgagctccccctcgacgaccaggtcgccctcctccgcgcccacgccggcgagcacctcctcctcggcgccaccaagcgctccatggtcttcaaggacgtcctcctcctcggcaacgactacatcgtcccccgccactgccccgagctcgccgagatgtcccgcgtctccatccgcatcctcgacgagctcgtcctccccttccaggagctccagatcgacgacaacgagtacgcctacctcaaggccatcatcttcttcgaccccgacgccaagggcctctccgaccccggcaagatcaagcgcctccgcgcccaggtccaggtctccctcgaggactacatcaacgaccgccagtacgactcccgcggccgcttcggcgagctcctcctcctcctccccaccctccagtccatcacctggcagatgatcgagcagatccagttcatcaagctcttcggcatggccaagatcgacaacctcctccaggagatgctcctcggcggcgccccctccgacgccccccacgcccaccaccccctccacccccacctcatgcaggagcacatgggcaccaacgtcatcgtcgccaacaccatgcccacccacctctccaacggccagatgtgcgagtggccccgcccccgcggccaggccgccgcccccgaggccccccagcccgccccccccggcggctccggctccgagccctacaagctcctccccggcgccgtcgccaccatcgtccgccccctcgaggccatcccccagcccaccatcaccaagcaggaggtcatctga

SEQ ID NO: 388 - RNA, 1425 nt, synthetic construct
  misc_feature 1..1425: note = CDS (opt2) from Homo sapiens__NP_000448.3__HNF4A(1-474)(S87A_K106R_K108R_K126R_K 127R_S142A_S143A_S148E_T166A_S167E_S313A_S378E_T429E_T432E_ S436E_K458R_S461E)
  source 1..1425: mol_type = other RNA
atgcgcctctccaagaccctcgtcgacatggacatggccgactactccgccgccctcgaccccgcctacaccaccctcgagttcgagaacgtccaggtcctcaccatgggcaacgacacctccccctccgagggcaccaacctcaacgcccccaactccctcggcgtctccgccctctgcgccatctgcggcgaccgcgccaccggcaagcactacggcgcctcctcctgcgacggctgcaagggcttcttccgccgcgccgtccgcaagaaccacatgtactcctgccgcttctcccgccagtgcgtcgtcgaccgcgaccgccgcaaccagtgccgctactgccgcctcaagaagtgcttccgcgccggcatgcgccgcgaggccgtccagaacgagcgcgaccgcatctccacccgccgcgccgcctacgaggactccgagctcccctccatcaacgccctcctccaggccgaggtcctctcccgccagatcgccgagcccgtctccggcatcaacggcgacatccgcgccaagaagatcgcctccatcgccgacgtctgcgagtccatgaaggagcagctcctcgtcctcgtcgagtgggccaagtacatccccgccttctgcgagctccccctcgacgaccaggtcgccctcctccgcgcccacgccggcgagcacctcctcctcggcgccaccaagcgctccatggtcttcaaggacgtcctcctcctcggcaacgactacatcgtcccccgccactgccccgagctcgccgagatgtcccgcgtctccatccgcatcctcgacgagctcgtcctccccttccaggagctccagatcgacgacaacgagtacgcctacctcaaggccatcatcttcttcgaccccgacgccaagggcctctccgaccccggcaagatcaagcgcctccgcgcccaggtccaggtctccctcgaggactacatcaacgaccgccagtacgactcccgcggccgcttcggcgagctcctcctcctcctccccaccctccagtccatcacctggcagatgatcgagcagatccagttcatcaagctcttcggcatggccaagatcgacaacctcctccaggagatgctcctcggcggcgagccctccgacgccccccacgcccaccaccccctccacccccacctcatgcaggagcacatgggcaccaacgtcatcgtcgccaacaccatgcccacccacctctccaacggccagatgtgcgagtggccccgcccccgcggccaggccgccgagcccgaggagccccagcccgagccccccggcggctccggctccgagccctacaagctcctccccggcgccgtcgccaccatcgtccgccccctcgaggccatcccccagcccaccatcaccaagcaggaggtcatctga

SEQ ID NO: 389 - RNA, 1425 nt, synthetic construct
  misc_feature 1..1425: note = CDS (opt2) from Homo sapiens__NP_000448.3__HNF4A(1-474)(S87A_K106R_K108R_K126R_K 127R_S142A_S143A_S148A_T166A_S167A_K179R_K180R_S313A_S378A_ T429A_T432A_S436A_K458R_S461E)
  source 1..1425: mol_type = other RNA
atgcgcctctccaagaccctcgtcgacatggacatggccgactactccgccgccctcgaccccgcctacaccaccctcgagttcgagaacgtccaggtcctcaccatgggcaacgacacctccccctccgagggcaccaacctcaacgcccccaactccctcggcgtctccgccctctgcgccatctgcggcgaccgcgccaccggcaagcactacggcgcctcctcctgcgacggctgcaagggcttcttccgccgcgccgtccgcaagaaccacatgtactcctgccgcttctcccgccagtgcgtcgtcgaccgcgaccgccgcaaccagtgccgctactgccgcctcaagaagtgcttccgcgccggcatgcgccgcgaggccgtccagaacgagcgcgaccgcatctccacccgccgcgccgcctacgaggactccgccctcccctccatcaacgccctcctccaggccgaggtcctctcccgccagatcgccgcccccgtctccggcatcaacggcgacatccgcgcccgccgcatcgcctccatcgccgacgtctgcgagtccatgaaggagcagctcctcgtcctcgtcgagtgggccaagtacatccccgccttctgcgagctccccctcgacgaccaggtcgccctcctccgcgcccacgccggcgagcacctcctcctcggcgccaccaagcgctccatggtcttcaaggacgtcctcctcctcggcaacgactacatcgtcccccgccactgccccgagctcgccgagatgtcccgcgtctccatccgcatcctcgacgagctcgtcctccccttccaggagctccagatcgacgacaacgagtacgcctacctcaaggccatcatcttcttcgaccccgacgccaagggcctctccgaccccggcaagatcaagcgcctccgcgcccaggtccaggtctccctcgaggactacatcaacgaccgccagtacgactcccgcggccgcttcggcgagctcctcctcctcctccccaccctccagtccatcacctggcagatgatcgagcagatccagttcatcaagctcttcggcatggccaagatcgacaacctcctccaggagatgctcctcggcggcgccccctccgacgccccccacgcccaccaccccctccacccccacctcatgcaggagcacatgggcaccaacgtcatcgtcgccaacaccatgcccacccacctctccaacggccagatgtgcgagtggccccgcccccgcggccaggccgccgcccccgaggccccccagcccgccccccccggcggctccggctccgagccctacaagctcctccccggcgccgtcgccaccatcgtccgccccctcgaggccatcccccagcccaccatcaccaagcaggaggtcatctga

SEQ ID NO: 390 - RNA, 1425 nt, synthetic construct
  misc_feature 1..1425: note = CDS (opt2) from Homo sapiens__NP_000448.3__HNF4A(1-474)(S87A_K106R_K108R_K126R_K 127R_S142A_S143A_S148A_T166A_S167A_K300R_K307R_K309R_S313A_ S378A_T429A_T432A_S436A_K458R_S461E)
  source 1..1425: mol_type = other RNA
atgcgcctctccaagaccctcgtcgacatggacatggccgactactccgccgccctcgaccccgcctacaccaccctcgagttcgagaacgtccaggtcctcaccatgggcaacgacacctccccctccgagggcaccaacctcaacgcccccaactccctcggcgtctccgccctctgcgccatctgcggcgaccgcgccaccggcaagcactacggcgcctcctcctgcgacggctgcaagggcttcttccgccgcgccgtccgcaagaaccacatgtactcctgccgcttctcccgccagtgcgtcgtcgaccgcgaccgccgcaaccagtgccgctactgccgcctcaagaagtgcttccgcgccggcatgcgccgcgaggccgtccagaacgagcgcgaccgcatctccacccgccgcgccgcctacgaggactccgccctcccctccatcaacgccctcctccaggccgaggtcctctcccgccagatcgccgcccccgtctccggcatcaacggcgacatccgcgccaagaagatcgcctccatcgccgacgtctgcgagtccatgaaggagcagctcctcgtcctcgtcgagtgggccaagtacatccccgccttctgcgagctccccctcgacgaccaggtcgccctcctccgcgcccacgccggcgagcacctcctcctcggcgccaccaagcgctccatggtcttcaaggacgtcctcctcctcggcaacgactacatcgtcccccgccactgccccgagctcgccgagatgtcccgcgtctccatccgcatcctcgacgagctcgtcctccccttccaggagctccagatcgacgacaacgagtacgcctacctcaaggccatcatcttcttcgaccccgacgcccgcggcctctccgaccccggccgcatccgccgcctccgcgcccaggtccaggtctccctcgaggactacatcaacgaccgccagtacgactcccgcggccgcttcggcgagctcctcctcctcctccccaccctccagtccatcacctggcagatgatcgagcagatccagttcatcaagctcttcggcatggccaagatcgacaacctcctccaggagatgctcctcggcggcgccccctccgacgccccccacgcccaccaccccctccacccccacctcatgcaggagcacatgggcaccaacgtcatcgtcgccaacaccatgcccacccacctctccaacggccagatgtgcgagtggccccgcccccgcggccaggccgccgcccccgaggccccccagcccgccccccccggcggctccggctccgagccctacaagctcctccccggcgccgtcgccaccatcgtccgccccctcgaggccatcccccagcccaccatcaccaagcaggaggtcatctga

SEQ ID NO: 391 - RNA, 1425 nt, synthetic construct
  misc_feature 1..1425: note = CDS (opt2) from Homo sapiens__NP_000448.3__HNF4A(1-474)(S87A_K106R_K108R_K126R_K 127R_S142A_S143A_S148A_T166A_S167A_S313A_S378A_T429A_T432A_ S436A_K447R_K458R_S461E_K470R)
  source 1..1425: mol_type = other RNA
atgcgcctctccaagaccctcgtcgacatggacatggccgactactccgccgccctcgaccccgcctacaccaccctcgagttcgagaacgtccaggtcctcaccatgggcaacgacacctccccctccgagggcaccaacctcaacgcccccaactccctcggcgtctccgccctctgcgccatctgcggcgaccgcgccaccggcaagcactacggcgcctcctcctgcgacggctgcaagggcttcttccgccgcgccgtccgcaagaaccacatgtactcctgccgcttctcccgccagtgcgtcgtcgaccgcgaccgccgcaaccagtgccgctactgccgcctcaagaagtgcttccgcgccggcatgcgccgcgaggccgtccagaacgagcgcgaccgcatctccacccgccgcgccgcctacgaggactccgccctcccctccatcaacgccctcctccaggccgaggtcctctcccgccagatcgccgcccccgtctccggcatcaacggcgacatccgcgccaagaagatcgcctccatcgccgacgtctgcgagtccatgaaggagcagctcctcgtcctcgtcgagtgggccaagtacatccccgccttctgcgagctccccctcgacgaccaggtcgccctcctccgcgcccacgccggcgagcacctcctcctcggcgccaccaagcgctccatggtcttcaaggacgtcctcctcctcggcaacgactacatcgtcccccgccactgccccgagctcgccgagatgtcccgcgtctccatccgcatcctcgacgagctcgtcctccccttccaggagctccagatcgacgacaacgagtacgcctacctcaaggccatcatcttcttcgaccccgacgccaagggcctctccgaccccggcaagatcaagcgcctccgcgcccaggtccaggtctccctcgaggactacatcaacgaccgccagtacgactcccgcggccgcttcggcgagctcctcctcctcctccccaccctccagtccatcacctggcagatgatcgagcagatccagttcatcaagctcttcggcatggccaagatcgacaacctcctccaggagatgctcctcggcggcgccccctccgacgccccccacgcccaccaccccctccacccccacctcatgcaggagcacatgggcaccaacgtcatcgtcgccaacaccatgcccacccacctctccaacggccagatgtgcgagtggccccgcccccgcggccaggccgccgcccccgaggccccccagcccgccccccccggcggctccggctccgagccctaccgcctcctccccggcgccgtcgccaccatcgtccgccccctcgaggccatcccccagcccaccatcacccgccaggaggtcatctga

SEQ ID NO: 392 - RNA, 1425 nt, synthetic construct
  misc_feature 1..1425: note = CDS (opt2) from Homo sapiens__NP_000448.3__HNF4A(1-474)(S87A_K106R_K108R_K126R_K 127R_S142A_S143A_S148A_T166A_S167A_K179R_K180R_K234R_K300R_ K307R_K309R_S313A_S378A_T429A_T432A_S436A_K447R_K458R_S461E _K470R)
  source 1..1425: mol_type = other RNA
atgcgcctctccaagaccctcgtcgacatggacatggccgactactccgccgccctcgaccccgcctacaccaccctcgagttcgagaacgtccaggtcctcaccatgggcaacgacacctccccctccgagggcaccaacctcaacgcccccaactccctcggcgtctccgccctctgcgccatctgcggcgaccgcgccaccggcaagcactacggcgcctcctcctgcgacggctgcaagggcttcttccgccgcgccgtccgcaagaaccacatgtactcctgccgcttctcccgccagtgcgtcgtcgaccgcgaccgccgcaaccagtgccgctactgccgcctcaagaagtgcttccgcgccggcatgcgccgcgaggccgtccagaacgagcgcgaccgcatctccacccgccgcgccgcctacgaggactccgccctcccctccatcaacgccctcctccaggccgaggtcctctcccgccagatcgccgcccccgtctccggcatcaacggcgacatccgcgcccgccgcatcgcctccatcgccgacgtctgcgagtccatgaaggagcagctcctcgtcctcgtcgagtgggccaagtacatccccgccttctgcgagctccccctcgacgaccaggtcgccctcctccgcgcccacgccggcgagcacctcctcctcggcgccacccgccgctccatggtcttcaaggacgtcctcctcctcggcaacgactacatcgtcccccgccactgccccgagctcgccgagatgtcccgcgtctccatccgcatcctcgacgagctcgtcctccccttccaggagctccagatcgacgacaacgagtacgcctacctcaaggccatcatcttcttcgaccccgacgcccgcggcctctccgaccccggccgcatccgccgcctccgcgcccaggtccaggtctccctcgaggactacatcaacgaccgccagtacgactcccgcggccgcttcggcgagctcctcctcctcctccccaccctccagtccatcacctggcagatgatcgagcagatccagttcatcaagctcttcggcatggccaagatcgacaacctcctccaggagatgctcctcggcggcgccccctccgacgccccccacgcccaccaccccctccacccccacctcatgcaggagcacatgggcaccaacgtcatcgtcgccaacaccatgcccacccacctctccaacggccagatgtgcgagtggccccgcccccgcggccaggccgccgcccccgaggccccccagcccgccccccccggcggctccggctccgagccctaccgcctcctccccggcgccgtcgccaccatcgtccgccccctcgaggccatcccccagcccaccatcacccgccaggaggtcatctga

SEQ ID NO: 393 - RNA, 1425 nt, synthetic construct
  misc_feature 1..1425: note = CDS (opt2) from Homo sapiens__NP_000448.3__HNF4A(1-474)(S87A_S95A_S99A_K106R_K10 8R_K126R_K127R_S142A_S143A_S148A_T166A_S167A_S313A_S378A_T4 29A_T432A_S436A_K458R_S461E)
  source 1..1425: mol_type = other RNA
atgcgcctctccaagaccctcgtcgacatggacatggccgactactccgccgccctcgaccccgcctacaccaccctcgagttcgagaacgtccaggtcctcaccatgggcaacgacacctccccctccgagggcaccaacctcaacgcccccaactccctcggcgtctccgccctctgcgccatctgcggcgaccgcgccaccggcaagcactacggcgcctcctcctgcgacggctgcaagggcttcttccgccgcgccgtccgcaagaaccacatgtacgcctgccgcttcgcccgccagtgcgtcgtcgaccgcgaccgccgcaaccagtgccgctactgccgcctcaagaagtgcttccgcgccggcatgcgccgcgaggccgtccagaacgagcgcgaccgcatctccacccgccgcgccgcctacgaggactccgccctcccctccatcaacgccctcctccaggccgaggtcctctcccgccagatcgccgcccccgtctccggcatcaacggcgacatccgcgccaagaagatcgcctccatcgccgacgtctgcgagtccatgaaggagcagctcctcgtcctcgtcgagtgggccaagtacatccccgccttctgcgagctccccctcgacgaccaggtcgccctcctccgcgcccacgccggcgagcacctcctcctcggcgccaccaagcgctccatggtcttcaaggacgtcctcctcctcggcaacgactacatcgtcccccgccactgccccgagctcgccgagatgtcccgcgtctccatccgcatcctcgacgagctcgtcctccccttccaggagctccagatcgacgacaacgagtacgcctacctcaaggccatcatcttcttcgaccccgacgccaagggcctctccgaccccggcaagatcaagcgcctccgcgcccaggtccaggtctccctcgaggactacatcaacgaccgccagtacgactcccgcggccgcttcggcgagctcctcctcctcctccccaccctccagtccatcacctggcagatgatcgagcagatccagttcatcaagctcttcggcatggccaagatcgacaacctcctccaggagatgctcctcggcggcgccccctccgacgccccccacgcccaccaccccctccacccccacctcatgcaggagcacatgggcaccaacgtcatcgtcgccaacaccatgcccacccacctctccaacggccagatgtgcgagtggccccgcccccgcggccaggccgccgcccccgaggccccccagcccgccccccccggcggctccggctccgagccctacaagctcctccccggcgccgtcgccaccatcgtccgccccctcgaggccatcccccagcccaccatcaccaagcaggaggtcatctga

SEQ ID NO: 394 - RNA, 1425 nt, synthetic construct
  misc_feature 1..1425: note = CDS (opt2) from Homo sapiens__NP_000448.3__HNF4A(1-474)(S87A_K106R_K108R_K126R_K 127R_S138A_T139A_S142A_S143A_S148A_T166A_S167A_S313A_S378A_ T429A_T432A_S436A_K458R_S461E)
  source 1..1425: mol_type = other RNA
atgcgcctctccaagaccctcgtcgacatggacatggccgactactccgccgccctcgaccccgcctacaccaccctcgagttcgagaacgtccaggtcctcaccatgggcaacgacacctccccctccgagggcaccaacctcaacgcccccaactccctcggcgtctccgccctctgcgccatctgcggcgaccgcgccaccggcaagcactacggcgcctcctcctgcgacggctgcaagggcttcttccgccgcgccgtccgcaagaaccacatgtactcctgccgcttctcccgccagtgcgtcgtcgaccgcgaccgccgcaaccagtgccgctactgccgcctcaagaagtgcttccgcgccggcatgcgccgcgaggccgtccagaacgagcgcgaccgcatcgccgcccgccgcgccgcctacgaggactccgccctcccctccatcaacgccctcctccaggccgaggtcctctcccgccagatcgccgcccccgtctccggcatcaacggcgacatccgcgccaagaagatcgcctccatcgccgacgtctgcgagtccatgaaggagcagctcctcgtcctcgtcgagtgggccaagtacatccccgccttctgcgagctccccctcgacgaccaggtcgccctcctccgcgcccacgccggcgagcacctcctcctcggcgccaccaagcgctccatggtcttcaaggacgtcctcctcctcggcaacgactacatcgtcccccgccactgccccgagctcgccgagatgtcccgcgtctccatccgcatcctcgacgagctcgtcctccccttccaggagctccagatcgacgacaacgagtacgcctacctcaaggccatcatcttcttcgaccccgacgccaagggcctctccgaccccggcaagatcaagcgcctccgcgcccaggtccaggtctccctcgaggactacatcaacgaccgccagtacgactcccgcggccgcttcggcgagctcctcctcctcctccccaccctccagtccatcacctggcagatgatcgagcagatccagttcatcaagctcttcggcatggccaagatcgacaacctcctccaggagatgctcctcggcggcgccccctccgacgccccccacgcccaccaccccctccacccccacctcatgcaggagcacatgggcaccaacgtcatcgtcgccaacaccatgcccacccacctctccaacggccagatgtgcgagtggccccgcccccgcggccaggccgccgcccccgaggccccccagcccgccccccccggcggctccggctccgagccctacaagctcctccccggcgccgtcgccaccatcgtccgccccctcgaggccatcccccagcccaccatcaccaagcaggaggtcatctga

SEQ ID NO: 395 - RNA, 1425 nt, synthetic construct
  misc_feature 1..1425: note = CDS (opt2) from Homo sapiens__NP_000448.3__HNF4A(1-474)(S87A_S95A_S99A_K106R_K10 8R_K126R_K127R_S138A_T139A_S142A_S143A_S148A_T166A_S167A_S3 13A_S378A_T429A_T432A_S436A_K458R_S461E)
  source 1..1425: mol_type = other RNA
atgcgcctctccaagaccctcgtcgacatggacatggccgactactccgccgccctcgaccccgcctacaccaccctcgagttcgagaacgtccaggtcctcaccatgggcaacgacacctccccctccgagggcaccaacctcaacgcccccaactccctcggcgtctccgccctctgcgccatctgcggcgaccgcgccaccggcaagcactacggcgcctcctcctgcgacggctgcaagggcttcttccgccgcgccgtccgcaagaaccacatgtacgcctgccgcttcgcccgccagtgcgtcgtcgaccgcgaccgccgcaaccagtgccgctactgccgcctcaagaagtgcttccgcgccggcatgcgccgcgaggccgtccagaacgagcgcgaccgcatcgccgcccgccgcgccgcctacgaggactccgccctcccctccatcaacgccctcctccaggccgaggtcctctcccgccagatcgccgcccccgtctccggcatcaacggcgacatccgcgccaagaagatcgcctccatcgccgacgtctgcgagtccatgaaggagcagctcctcgtcctcgtcgagtgggccaagtacatccccgccttctgcgagctccccctcgacgaccaggtcgccctcctccgcgcccacgccggcgagcacctcctcctcggcgccaccaagcgctccatggtcttcaaggacgtcctcctcctcggcaacgactacatcgtcccccgccactgccccgagctcgccgagatgtcccgcgtctccatccgcatcctcgacgagctcgtcctccccttccaggagctccagatcgacgacaacgagtacgcctacctcaaggccatcatcttcttcgaccccgacgccaagggcctctccgaccccggcaagatcaagcgcctccgcgcccaggtccaggtctccctcgaggactacatcaacgaccgccagtacgactcccgcggccgcttcggcgagctcctcctcctcctccccaccctccagtccatcacctggcagatgatcgagcagatccagttcatcaagctcttcggcatggccaagatcgacaacctcctccaggagatgctcctcggcggcgccccctccgacgccccccacgcccaccaccccctccacccccacctcatgcaggagcacatgggcaccaacgtcatcgtcgccaacaccatgcccacccacctctccaacggccagatgtgcgagtggccccgcccccgcggccaggccgccgcccccgaggccccccagcccgccccccccggcggctccggctccgagccctacaagctcctccccggcgccgtcgccaccatcgtccgccccctcgaggccatcccccagcccaccatcaccaagcaggaggtcatctga

SEQ ID NO: 396 - RNA, 1425 nt, synthetic construct
  misc_feature 1..1425: note = CDS (opt3) from Homo sapiens__NP_000448.3__HNF4A(1-474)
  source 1..1425: mol_type = other RNA
atgagactgagcaagaccctcgtggacatggatatggccgactactccgctgcacttgatcccgcctatacaactctggagttcgaaaacgtccaggttttgacgatgggcaatgacacctctccttcagaggggacaaacttaaatgcgccaaacagtctgggagtgagcgctctatgcgccatctgtggtgatagggcaactggcaaacactacggggcctcctcttgcgacggatgtaagggctttttccggcgctcggtacgtaaaaatcatatgtattcatgccgatttagcagacaatgtgtggtcgataaggacaaaaggaaccagtgccggtactgtcgcctcaagaagtgcttcagagctggtatgaaaaaggaagcagtgcagaatgagagggatcggattagtacccgccgatcctcttatgaagacagctccctgccgtcaataaacgcccttctgcaggctgaggttttgagtagacaaatcacaagccccgtgtctgggattaatggagatatcagggccaaaaagattgcgtccatcgcagacgtctgtgagtcaatgaaagaacagctcctggtgctggtagagtgggccaagtacatacctgctttttgcgaactcccattagatgaccaggttgccctgcttcgggcacacgctggcgagcatttgctgctaggcgccaccaagcgtagcatggtgttcaaagacgtcctcctgcttgggaacgattatatcgtgccccgccactgtcctgagctggcggaaatgagtagagtgtctattaggatcttggacgagctcgtcctgccatttcaggaattacaaattgatgacaatgagtacgcctacctgaaggcaatcatattctttgatcccgacgctaaaggactctccgatcctggtaagattaaacggcttcgaagccaggttcaggtgtcgctggaagactatatcaacgatcgccagtacgactctagaggcaggttcggggagttgctactgctcctgccaactcttcaatccattacatggcagatgatcgagcagatccaatttattaagctgttcggaatggccaaaatagataatttgctccaggaaatgctgttaggcggttcaccgagtgacgctccccatgcccaccaccctctgcatccacacctaatgcaggagcatatggggaccaacgtaatcgtggcaaatacgatgcccactcacctcagcaacggacagatgtgcgaatggcctcggccacgcggccaagccgctacccccgagacaccgcagccttctcccccaggcgggtccggaagcgaaccttataagctgcttcccggtgcggtcgcaactattgtgaagccattgtcagccatcccccagcctaccataacaaaacaggaggttatttga

SEQ ID NO: 397 - RNA, 1425 nt, synthetic construct
  misc_feature 1..1425: note = CDS (opt3) from Homo sapiens__NP_000448.3__HNF4A(1-474)(S313A)
  source 1..1425: mol_type = other RNA
atgagactgagcaagaccctcgtggacatggatatggccgactactccgctgcacttgatcccgcctatacaactctggagttcgaaaacgtccaggttttgacgatgggcaatgacacctctccttcagaggggacaaacttaaatgcgccaaacagtctgggagtgagcgctctatgcgccatctgtggtgatagggcaactggcaaacactacggggcctcctcttgcgacggatgtaagggctttttccggcgctcggtacgtaaaaatcatatgtattcatgccgatttagcagacaatgtgtggtcgataaggacaaaaggaaccagtgccggtactgtcgcctcaagaagtgcttcagagctggtatgaaaaaggaagcagtgcagaatgagagggatcggattagtacccgccgatcctcttatgaagacagctccctgccgtcaataaacgcccttctgcaggctgaggttttgagtagacaaatcacaagccccgtgtctgggattaatggagatatcagggccaaaaagattgcgtccatcgcagacgtctgtgagtcaatgaaagaacagctcctggtgctggtagagtgggccaagtacatacctgctttttgcgaactcccattagatgaccaggttgccctgcttcgggcacacgctggcgagcatttgctgctaggcgccaccaagcgtagcatggtgttcaaagacgtcctcctgcttgggaacgattatatcgtgccccgccactgtcctgagctggcggaaatgagtagagtgtctattaggatcttggacgagctcgtcctgccatttcaggaattacaaattgatgacaatgagtacgcctacctgaaggcaatcatattctttgatcccgacgctaaaggactctccgatcctggtaagattaaacggcttcgagcccaggttcaggtgagcctggaagactatatcaacgatcgccagtacgactcgagaggcaggttcggggagttgctactgctcctgccaactcttcaatctattacatggcagatgatcgagcagatccaatttattaagctgttcggaatggctaaaatagataatttgctccaggaaatgctgttaggcggttccccgtcagacgcaccccatgcccaccaccctctgcatccacacctaatgcaggagcatatggggaccaacgtaatcgtggccaatacgatgcccactcacctcagtaacggacagatgtgcgaatggcctcggccacgcggccaagctgcgacccccgagacaccgcagcctagcccacccggcgggtccggatctgaaccttataagctgcttcccggtgcagtcgccactattgtgaagccattgagcgctatcccccagcctaccataacaaaacaggaggttatttga

SEQ ID NO: 398 - RNA, 1425 nt, synthetic construct
  misc_feature 1..1425: note = CDS (opt3) from Homo sapiens__NP_000448.3__HNF4A(1-474)(S313E)
  source 1..1425: mol_type = other RNA
atgagactgagcaagaccctcgtggacatggatatggccgactactccgctgcacttgatcccgcctatacaactctggagttcgaaaacgtccaggttttgacgatgggcaatgacacctctccttcagaggggacaaacttaaatgcgccaaacagtctgggagtgagcgctctatgcgccatctgtggtgatagggcaactggcaaacactacggggcctcctcttgcgacggatgtaagggctttttccggcgctcggtacgtaaaaatcatatgtattcatgccgatttagcagacaatgtgtggtcgataaggacaaaaggaaccagtgccggtactgtcgcctcaagaagtgcttcagagctggtatgaaaaaggaagcagtgcagaatgagagggatcggattagtacccgccgatcctcttatgaagacagctccctgccgtcaataaacgcccttctgcaggctgaggttttgagtagacaaatcacaagccccgtgtctgggattaatggagatatcagggccaaaaagattgcgtccatcgcagacgtctgtgagtcaatgaaagaacagctcctggtgctggtagagtgggccaagtacatacctgctttttgcgaactcccattagatgaccaggttgccctgcttcgggcacacgctggcgagcatttgctgctaggcgccaccaagcgtagcatggtgttcaaagacgtcctcctgcttgggaacgattatatcgtgccccgccactgtcctgagctggcggaaatgagtagagtgtctattaggatcttggacgagctcgtcctgccatttcaggaattacaaattgatgacaatgagtacgcctacctgaaggcaatcatattctttgatcccgacgctaaaggactctccgatcctggtaagattaaacggcttcgagaacaggttcaggtgagcctggaggactatatcaacgatcgccagtacgactcgagaggcaggttcggggagttgctactgctcctgccaactcttcaatctattacatggcagatgatcgaacagatccaatttattaagctgttcggaatggccaaaatagataatttgctccaggagatgctgttaggcggttccccgtcagacgctccccatgcccaccaccctctgcatccacacctaatgcaggaacatatggggaccaacgtaatcgtggcaaatacgatgcccactcacctcagtaacggacagatgtgcgagtggcctcggccacgcggccaagccgctacccccgaaacaccgcagcctagcccacccggcgggtccggatctgagccttataagctgcttcccggtgcggtcgcaactattgtgaagccattgagcgccatcccccagcctaccataacaaaacaggaggttatttga

SEQ ID NO: 399 - RNA, 1425 nt, synthetic construct
  misc_feature 1..1425: note = CDS (opt3) from Homo sapiens__NP_000448.3__HNF4A(1-474)(S142A_S143A)
  source 1..1425: mol_type = other RNA
atgagactgagcaagaccctcgtggacatggatatggccgactactccgctgcacttgatcccgcctatacaactctggagttcgaaaacgtccaggttttgacgatgggcaatgacacctctccttcagaggggacaaacttaaatgcgccaaacagtctgggagtgagcgctctatgcgccatctgtggtgatagggcaactggcaaacactacggggcctcctcttgcgacggatgtaagggctttttccggcgctcggtacgtaaaaatcatatgtattcatgccgatttagcagacaatgtgtggtcgataaggacaaaaggaaccagtgccggtactgtcgcctcaagaagtgcttcagagctggtatgaaaaaggaagcagtgcagaatgagagggatcggattagtacccgccgagccgcttatgaagactcctctctgccgagcataaacgcccttctgcaggcggaggttttgtccagacaaatcacatcacccgtgagtgggattaatggagatatcagggccaaaaagattgcaagcatcgctgacgtctgtgagtctatgaaagaacagctcctggtgctggtagagtgggccaagtacatacctgcattttgcgaactcccattagatgaccaggttgctctgcttcgggcccacgcgggcgagcatttgctgctaggcgccaccaagcgttccatggtgttcaaagacgtcctcctgcttgggaacgattatatcgtgccccgccactgtcctgagctggcagaaatgtcaagagtgagcattaggatcttggacgagctcgtcctgccatttcaggaattacaaattgatgacaatgagtacgcttacctgaaggccatcatattctttgatcccgacgctaaaggactcagtgatcctggtaagattaaacggcttcgatctcaggttcaggtgtccctggaagactatatcaacgatcgccagtacgacagcagaggcaggttcggggagttgctactgctcctgccaactcttcaatcgattacatggcagatgatcgagcagatccaatttattaagctgttcggaatggccaaaatagataatttgctccaggaaatgctgttaggcggttctccgtccgacgcaccccatgcccaccaccctctgcatccacacctaatgcaggagcatatggggaccaacgtaatcgtggctaatacgatgcccactcacctctcaaacggacagatgtgcgaatggcctcggccacgcggccaagcggcaacccccgagacaccgcagcctagtcccccaggcgggagcggatccgaaccttataagctgcttcccggtgccgtcgctactattgtgaagccattgtctgccatcccccagcctaccataacaaaacaggaggttatttga

SEQ ID NO: 400 - RNA, 1425 nt, synthetic construct
  misc_feature 1..1425: note = CDS (opt3) from Homo sapiens__NP_000448.3__HNF4A(1-474)(S142E_S143E)
  source 1..1425: mol_type = other RNA
atgagactgagcaagaccctcgtggacatggatatggccgactactccgctgcacttgatcccgcctatacaactctggagttcgaaaacgtccaggttttgacgatgggcaatgacacctctccttcagaggggacaaacttaaatgcgccaaacagtctgggagtgagcgctctatgcgccatctgtggtgatagggcaactggcaaacactacggggcctcctcttgcgacggatgtaagggctttttccggcgctcggtacgtaaaaatcatatgtattcatgccgatttagcagacaatgtgtggtcgataaggacaaaaggaaccagtgccggtactgtcgcctcaagaagtgcttcagagctggtatgaaaaaggaagcagtgcagaatgagagggatcggattagtacccgccgagaagagtatgaggactcctctctgccgagcataaacgcccttctgcaggctgaagttttgtccagacaaatcacatcacccgtgagtgggattaatggagatatcagggccaaaaagattgcgagcatcgcagacgtctgtgagtctatgaaagaacagctcctggtgctggtagagtgggccaagtacatacctgctttttgcgagctcccattagatgaccaggttgccctgcttcgggcacacgctggcgaacatttgctgctaggcgccaccaagcgttccatggtgttcaaagacgtcctcctgcttgggaacgattatatcgtgccccgccactgtcctgagctggcggaaatgtcaagagtgagcattaggatcttggacgagctcgtcctgccatttcaggaattacaaattgatgacaatgagtacgcctacctgaaggcaatcatattctttgatcccgacgctaaaggactcagtgatcctggtaagattaaacggcttcgatctcaggttcaggtgtccctggaggactatatcaacgatcgccagtacgacagcagaggcaggttcggggaattgctactgctcctgccaactcttcaatcgattacatggcagatgatcgagcagatccaatttattaagctgttcggaatggccaaaatagataatttgctccaggaaatgctgttaggcggttctccgtccgacgctccccatgcccaccaccctctgcatccacacctaatgcaggagcatatggggaccaacgtaatcgtggcaaatacgatgcccactcacctctcaaacggacagatgtgcgaatggcctcggccacgcggccaagccgctacccccgagacaccgcagcctagtcccccaggcgggagcggatccgagccttataagctgcttcccggtgcggtcgcaactattgtgaagccattgtctgccatcccccagcctaccataacaaaacaggaagttatttga

SEQ ID NO: 401 - RNA, 1425 nt, synthetic construct
  misc_feature 1..1425: note = CDS (opt3) from Homo sapiens__NP_000448.3__HNF4A(1-474)(S143A)
  source 1..1425: mol_type = other RNA
atgagactgagcaagaccctcgtggacatggatatggccgactactccgctgcacttgatcccgcctatacaactctggagttcgaaaacgtccaggttttgacgatgggcaatgacacctctccttcagaggggacaaacttaaatgcgccaaacagtctgggagtgagcgctctatgcgccatctgtggtgatagggcaactggcaaacactacggggcctcctcttgcgacggatgtaagggctttttccggcgctcggtacgtaaaaatcatatgtattcatgccgatttagcagacaatgtgtggtcgataaggacaaaaggaaccagtgccggtactgtcgcctcaagaagtgcttcagagctggtatgaaaaaggaagcagtgcagaatgagagggatcggattagtacccgccgatccgcctatgaagactctagcctgccgtccataaacgcccttctgcaggccgaggttttgtcaagacaaatcacaagtcccgtgagcgggattaatggagatatcagggcgaaaaagattgcatctatcgccgacgtctgtgagtccatgaaagaacagctcctggtgctggtagagtgggctaagtacatacctgccttttgcgaactcccattagatgaccaggttgcactgcttcgggctcacgccggcgagcatttgctgctaggcgcgaccaagcgttcaatggtgttcaaagacgtcctcctgcttgggaacgattatatcgtgccccgccactgtcctgagctggccgaaatgagcagagtgagtattaggatcttggacgagctcgtcctgccatttcaggaattacaaattgatgacaatgagtacgcatacctgaaggctatcatattctttgatcccgacgccaaaggactctctgatcctggtaagattaaacggcttcgatcccaggttcaggtgagcctggaagactatatcaacgatcgccagtacgactcgagaggcaggttcggggagttgctactgctcctgccaactcttcaatctattacatggcagatgatcgagcagatccaatttattaagctgttcggaatggctaaaatagataatttgctccaggaaatgctgttaggcggttccccgtcagacgctccccatgcacaccaccctctgcatccacacctaatgcaggagcatatggggaccaacgtaatcgtggccaatacgatgcccactcacctcagtaacggacagatgtgcgaatggcctcggccacgcggccaagctgcgacccccgagacaccgcagcctagcccacccggcgggtccggatctgaaccttataagctgcttcccggtgcagtcgccactattgtgaagccattgagcgctatcccccagcctaccataacaaaacaggaggttatttga

SEQ ID NO: 402 - RNA, 1425 nt, synthetic construct
  misc_feature 1..1425: note = CDS (opt3) from Homo sapiens__NP_000448.3__HNF4A(1-474)(T166A)
  source 1..1425: mol_type = other RNA
atgagactgagcaagaccctcgtggacatggatatggccgactactccgctgcacttgatcccgcctatacaactctggagttcgaaaacgtccaggttttgacgatgggcaatgacacctctccttcagaggggacaaacttaaatgcgccaaacagtctgggagtgagcgctctatgcgccatctgtggtgatagggcaactggcaaacactacggggcctcctcttgcgacggatgtaagggctttttccggcgctcggtacgtaaaaatcatatgtattcatgccgatttagcagacaatgtgtggtcgataaggacaaaaggaaccagtgccggtactgtcgcctcaagaagtgcttcagagctggtatgaaaaaggaagcagtgcagaatgagagggatcggattagtacccgccgatcctcttatgaagacagctccctgccgtcaataaacgcccttctgcaggctgaggttttgagtagacaaatcgccagccccgtgtctgggattaatggagatatcagggcgaaaaagattgcatccatcgccgacgtctgtgagtcaatgaaagaacagctcctggtgctggtagagtgggctaagtacatacctgccttttgcgaactcccattagatgaccaggttgcactgcttcgggctcacgccggcgagcatttgctgctaggcgcgacaaagcgtagcatggtgttcaaagacgtcctcctgcttgggaacgattatatcgtgccccgccactgtcctgagctggccgaaatgagtagagtgtctattaggatcttggacgagctcgtcctgccatttcaggaattacaaattgatgacaatgagtacgcatacctgaaggctatcatattctttgatcccgacgccaaaggactctccgatcctggtaagattaaacggcttcgaagccaggttcaggtgtcgctggaagactatatcaacgatcgccagtacgactctagaggcaggttcggggagttgctactgctcctgccaacccttcaatccattacttggcagatgatcgagcagatccaatttattaagctgttcggaatggctaaaatagataatttgctccaggaaatgctgttaggcggttcaccgagtgacgcaccccatgcccaccaccctctgcatccacacctaatgcaggagcatatggggacaaacgtaatcgtggccaataccatgcccacgcacctcagcaacggacagatgtgcgaatggcctcggccacgcggccaagctgcgactcccgagaccccgcagccttctcccccaggcgggtccggaagcgaaccttataagctgcttcccggtgcagtcgccacaattgtgaagccattgtcagctatcccccagcctactataaccaaacaggaggttatttga

SEQ ID NO: 403 - RNA, 1425 nt, synthetic construct
  misc_feature 1..1425: note = CDS (opt3) from Homo sapiens__NP_000448.3__HNF4A(1-474)(S167E)
  source 1..1425: mol_type = other RNA
atgagactgagcaagaccctcgtggacatggatatggccgactactccgctgcacttgatcccgcctatacaactctggagttcgaaaacgtccaggttttgacgatgggcaatgacacctctccttcagaggggacaaacttaaatgcgccaaacagtctgggagtgagcgctctatgcgccatctgtggtgatagggcaactggcaaacactacggggcctcctcttgcgacggatgtaagggctttttccggcgctcggtacgtaaaaatcatatgtattcatgccgatttagcagacaatgtgtggtcgataaggacaaaaggaaccagtgccggtactgtcgcctcaagaagtgcttcagagctggtatgaaaaaggaagcagtgcagaatgagagggatcggattagtacccgccgatcctcttatgaagacagctccctgccgtcaataaacgcccttctgcaggctgaggttttgagtagacaaatcacagagcccgtgagcgggattaatggagatatcagggccaaaaagattgcgtctatcgcagacgtctgtgaatccatgaaagagcagctcctggtgctggtagaatgggccaagtacatacctgctttttgcgagctcccattagatgaccaggttgccctgcttcgggcacacgctggcgagcatttgctgctaggcgccaccaagcgttcaatggtgttcaaagacgtcctcctgcttgggaacgattatatcgtgccccgccactgtcctgaactggcggagatgagcagagtgagtattaggatcttggacgaactcgtcctgccatttcaggagttacaaattgatgacaatgaatacgcctacctgaaggcaatcatattctttgatcccgacgctaaaggactctctgatcctggtaagattaaacggcttcgatcccaggttcaggtgagcctggaggactatatcaacgatcgccagtacgactcgagaggcaggttcggggagttgctactgctcctgccaactcttcaatctattacatggcagatgatcgaacagatccaatttattaagctgttcggaatggccaaaatagataatttgctccaggagatgctgttaggcggttccccgtcagacgctccccatgcccaccaccctctgcatccacacctaatgcaggaacatatggggaccaacgtaatcgtggcaaatacgatgcccactcacctcagtaacggacagatgtgcgagtggcctcggccacgcggccaagccgctacccccgaaacaccgcagcctagcccacccggcgggtccggatctgagccttataagctgcttcccggtgcggtcgcaactattgtgaagccattgagcgccatcccccagcctaccataacaaaacaggaggttatttga

SEQ ID NO: 404 - RNA, 1425 nt, synthetic construct
  misc_feature 1..1425: note = CDS (opt3) from Homo sapiens__NP_000448.3__HNF4A(1-474)(S167A)
  source 1..1425: mol_type = other RNA
atgagactgagcaagaccctcgtggacatggatatggccgactactccgctgcacttgatcccgcctatacaactctggagttcgaaaacgtccaggttttgacgatgggcaatgacacctctccttcagaggggacaaacttaaatgcgccaaacagtctgggagtgagcgctctatgcgccatctgtggtgatagggcaactggcaaacactacggggcctcctcttgcgacggatgtaagggctttttccggcgctcggtacgtaaaaatcatatgtattcatgccgatttagcagacaatgtgtggtcgataaggacaaaaggaaccagtgccggtactgtcgcctcaagaagtgcttcagagctggtatgaaaaaggaagcagtgcagaatgagagggatcggattagtacccgccgatcctcttatgaagacagctccctgccgtcaataaacgcccttctgcaggctgaggttttgagtagacaaatcacagcccccgtgagcgggattaatggagatatcagggcgaaaaagattgcatctatcgccgacgtctgtgagtccatgaaagaacagctcctggtgctggtagagtgggctaagtacatacctgccttttgcgaactcccattagatgaccaggttgcactgcttcgggctcacgccggcgagcatttgctgctaggcgcgaccaagcgttcaatggtgttcaaagacgtcctcctgcttgggaacgattatatcgtgccccgccactgtcctgagctggccgaaatgagcagagtgagtattaggatcttggacgagctcgtcctgccatttcaggaattacaaattgatgacaatgagtacgcatacctgaaggctatcatattctttgatcccgacgccaaaggactctctgatcctggtaagattaaacggcttcgatcccaggttcaggtgagcctggaagactatatcaacgatcgccagtacgactcgagaggcaggttcggggagttgctactgctcctgccaactcttcaatctattacatggcagatgatcgagcagatccaatttattaagctgttcggaatggctaaaatagataatttgctccaggaaatgctgttaggcggttccccgtcagacgcaccccatgcccaccaccctctgcatccacacctaatgcaggagcatatggggaccaacgtaatcgtggccaatacgatgcccactcacctcagtaacggacagatgtgcgaatggcctcggccacgcggccaagctgcgacccccgagacaccgcagcctagcccacccggcgggtccggatctgaaccttataagctgcttcccggtgcagtcgccactattgtgaagccattgagcgctatcccccagcctaccataacaaaacaggaggttatttga

SEQ ID NO: 405 - RNA, 1425 nt, synthetic construct
  misc_feature 1..1425: note = CDS (opt3) from Homo sapiens__NP_000448.3__HNF4A(1-474)(S167A_S378A_T429A_T432A_ S436A)
  source 1..1425: mol_type = other RNA
atgagactgagcaagaccctcgtggacatggatatggccgactactccgctgcacttgatcccgcctatacaactctggagttcgaaaacgtccaggttttgacgatgggcaatgacacctctccttcagaggggacaaacttaaatgcgccaaacagtctgggagtgagcgctctatgcgccatctgtggtgatagggcaactggcaaacactacggggcctcctcttgcgacggatgtaagggctttttccggcgctcggtacgtaaaaatcatatgtattcatgccgatttagcagacaatgtgtggtcgataaggacaaaaggaaccagtgccggtactgtcgcctcaagaagtgcttcagagctggtatgaaaaaggaagcagtgcagaatgagagggatcggattagtacccgccgatcctcttatgaagacagctccctgccgtcaataaacgcccttctgcaggctgaggttttgagtagacaaatcacagcccccgtgagcgggattaatggagatatcagggcgaaaaagattgcatctatcgccgacgtctgtgagtccatgaaagaacagctcctggtgctggtagagtgggctaagtacatacctgccttttgcgaactcccattagatgaccaggttgcactgcttcgggctcacgccggcgagcatttgctgctaggcgcgaccaagcgttcaatggtgttcaaagacgtcctcctgcttgggaacgattatatcgtgccccgccactgtcctgagctggccgaaatgagcagagtgagtattaggatcttggacgagctcgtcctgccatttcaggaattacaaattgatgacaatgagtacgcatacctgaaggctatcatattctttgatcccgacgccaaaggactctctgatcctggtaagattaaacggcttcgatcccaggttcaggtgagcctggaagactatatcaacgatcgccagtacgactcgagaggcaggttcggggagttgctactgctcctgccaactcttcaatctattacatggcagatgatcgagcagatccaatttattaagctgttcggaatggctaaaatagataatttgctccaggaaatgctgttaggcggtgccccgtccgacgcaccccatgcccaccaccctctgcatccacacctaatgcaggagcatatggggaccaacgtaatcgtggctaatacgatgcccactcacctctcaaacggacagatgtgcgaatggcctcggccacgcggccaagcggcagcccccgaggctccgcagcctgcacccccaggcgggagtggaagcgaaccttataagctgcttcccggtgccgtcgccaccattgtgaagccattgtccgctatcccccagcctacaataactaaacaggaggttatttga

SEQ ID NO: 406 - RNA, 1425 nt, synthetic construct
  misc_feature 1..1425: note = CDS (opt3) from Homo sapiens__NP_000448.3__HNF4A(1-474)(S167E_S378E_T429E_T432E_ S436E)
  source 1..1425: mol_type = other RNA
atgagactgagcaagaccctcgtggacatggatatggccgactactccgctgcacttgatcccgcctatacaactctggagttcgaaaacgtccaggttttgacgatgggcaatgacacctctccttcagaggggacaaacttaaatgcgccaaacagtctgggagtgagcgctctatgcgccatctgtggtgatagggcaactggcaaacactacggggcctcctcttgcgacggatgtaagggctttttccggcgctcggtacgtaaaaatcatatgtattcatgccgatttagcagacaatgtgtggtcgataaggacaaaaggaaccagtgccggtactgtcgcctcaagaagtgcttcagagctggtatgaaaaaggaagcagtgcagaatgagagggatcggattagtacccgccgatcctcttatgaagacagctccctgccgtcaataaacgcccttctgcaggctgaggttttgagtagacaaatcacagagcccgtgagcgggattaatggagatatcagggccaaaaagattgcgtctatcgcagacgtctgtgaatccatgaaagagcagctcctggtgctggtagaatgggccaagtacatacctgctttttgcgagctcccattagatgaccaggttgccctgcttcgggcacacgctggcgagcatttgctgctaggcgccaccaagcgttcaatggtgttcaaagacgtcctcctgcttgggaacgattatatcgtgccccgccactgtcctgaactggcggagatgagcagagtgagtattaggatcttggacgaactcgtcctgccatttcaggagttacaaattgatgacaatgaatacgcctacctgaaggcaatcatattctttgatcccgacgctaaaggactctctgatcctggtaagattaaacggcttcgatcccaggttcaggtgagcctggaggactatatcaacgatcgccagtacgactcgagaggcaggttcggggagttgctactgctcctgccaactcttcaatctattacatggcagatgatcgaacagatccaatttattaagctgttcggaatggccaaaatagataatttgctccaggagatgctgttaggcggtgaaccgtccgacgctccccatgcccaccaccctctgcatccacacctaatgcaggagcatatggggaccaacgtaatcgtggcaaatacgatgcccactcacctctcaaacggacagatgtgcgaatggcctcggccacgcggccaagccgctgagcccgaggaaccgcagcctgagcccccaggcgggagtggaagcgaaccttataagctgcttcccggtgcggtcgcaaccattgtgaagccattgtccgccatcccccagcctacaataactaaacaggaggttatttga

SEQ ID NO: 407 - RNA, 1425 nt, synthetic construct
  misc_feature 1..1425: note = CDS (opt3) from Homo sapiens__NP_000448.3__HNF4A(1-474)(S87A)
  source 1..1425: mol_type = other RNA
atgagactgagcaagaccctcgtggacatggatatggccgactactccgctgcacttgatcccgcctatacaactctggagttcgaaaacgtccaggttttgacgatgggcaatgacacctctccttcagaggggacaaacttaaatgcgccaaacagtctgggagtgagcgctctatgcgccatctgtggtgatagggcaactggcaaacactacggggcctcctcttgcgacggatgtaagggctttttccggcgcgctgtacgtaaaaatcatatgtattcgtgccgattttcaagacaatgtgtggtcgataaggacaaaaggaaccagtgccggtactgtcgcctcaagaagtgcttcagagcaggtatgaaaaaggaagccgtgcagaatgagagggatcggattagcacccgccgaagttcctatgaagactctagcctgccgtccataaacgcccttctgcaggccgaggttttgtcaagacaaatcacaagtcccgtgagcgggattaatggagatatcagggcgaaaaagattgcatctatcgccgacgtctgtgagtccatgaaagaacagctcctggtgctggtagagtgggctaagtacatacctgccttttgcgaactcccattagatgaccaggttgcactgcttcgggctcacgccggcgagcatttgctgctaggcgcgaccaagcgttcaatggtgttcaaagacgtcctcctgcttgggaacgattatatcgtgccccgccactgtcctgagctggccgaaatgagcagagtgagtattaggatcttggacgagctcgtcctgccatttcaggaattacaaattgatgacaatgagtacgcatacctgaaggctatcatattctttgatcccgacgccaaaggactctctgatcctggtaagattaaacggcttcgatcccaggttcaggtgagcctggaagactatatcaacgatcgccagtacgactcgagaggcaggttcggggagttgctactgctcctgccaactcttcaatctattacatggcagatgatcgagcagatccaatttattaagctgttcggaatggctaaaatagataatttgctccaggaaatgctgttaggcggttccccgtcagacgctccccatgcacaccaccctctgcatccacacctaatgcaggagcatatggggaccaacgtaatcgtggccaatacgatgcccactcacctcagtaacggacagatgtgcgaatggcctcggccacgcggccaagctgcgacccccgagacaccgcagcctagcccacccggcgggtccggatctgaaccttataagctgcttcccggtgcagtcgccactattgtgaagccattgagcgctatcccccagcctaccataacaaaacaggaggttatttga

SEQ ID NO: 408 - RNA, 1425 nt, synthetic construct
  misc_feature 1..1425: note = CDS (opt3) from Homo sapiens__NP_000448.3__HNF4A(1-474)(S87E)
  source 1..1425: mol_type = other RNA
atgagactgagcaagaccctcgtggacatggatatggccgactactccgctgcacttgatcccgcctatacaactctggagttcgaaaacgtccaggttttgacgatgggcaatgacacctctccttcagaggggacaaacttaaatgcgccaaacagtctgggagtgagcgctctatgcgccatctgtggtgatagggcaactggcaaacactacggggcctcctcttgcgacggatgtaagggctttttccggcgcgaagtacgtaaaaatcatatgtattcgtgccgattttcaagacaatgtgtggtcgataaggacaaaaggaaccagtgccggtactgtcgcctcaagaagtgcttcagagctggtatgaaaaaggaggcagtgcagaatgaaagggatcggattagcacccgccgaagttcctatgaggactctagcctgccgtccataaacgcccttctgcaggctgaggttttgtcaagacaaatcacaagtcccgtgagcgggattaatggagatatcagggccaaaaagattgcgtctatcgcagacgtctgtgaatccatgaaagagcagctcctggtgctggtagaatgggccaagtacatacctgctttttgcgagctcccattagatgaccaggttgccctgcttcgggcacacgctggcgagcatttgctgctaggcgccaccaagcgttcaatggtgttcaaagacgtcctcctgcttgggaacgattatatcgtgccccgccactgtcctgaactggcggagatgagcagagtgagtattaggatcttggacgaactcgtcctgccatttcaggagttacaaattgatgacaatgaatacgcctacctgaaggcaatcatattctttgatcccgacgctaaaggactctctgatcctggtaagattaaacggcttcgatcccaggttcaggtgagcctggaggactatatcaacgatcgccagtacgactcgagaggcaggttcggggagttgctactgctcctgccaactcttcaatctattacatggcagatgatcgaacagatccaatttattaagctgttcggaatggccaaaatagataatttgctccaggagatgctgttaggcggttccccgtcagacgctccccatgcccaccaccctctgcatccacacctaatgcaggaacatatggggaccaacgtaatcgtggcaaatacgatgcccactcacctcagtaacggacagatgtgcgagtggcctcggccacgcggccaagccgctacccccgaaacaccgcagcctagcccacccggcgggtccggatctgagccttataagctgcttcccggtgcggtcgcaactattgtgaagccattgagcgccatcccccagcctaccataacaaaacaggaggttatttga

SEQ ID NO: 409 - RNA, 1425 nt, synthetic construct
  misc_feature 1..1425: note = CDS (opt3) from Homo sapiens__NP_000448.3__HNF4A(1-474)(R2V)
  source 1..1425: mol_type = other RNA
atggtgctgagcaagaccctcgtcgacatggatatggccgactactccgctgcacttgatcccgcctatacaactctggagttcgaaaacgttcaggtgttgacgatgggcaatgacacctctccttcagaggggacaaacttaaatgcgccaaacagtctgggagtaagcgctctatgcgccatctgtggtgatagagcaactggcaaacactacggggcctcctcttgcgacggatgtaagggctttttcaggcggtcggtgcgcaaaaatcatatgtattcatgccgatttagccgtcaatgtgtcgtggataaggacaaaagaaaccagtgcaggtactgtcggctcaagaagtgcttccgcgctggtatgaaaaaggaagcagttcagaatgagagagataggattagtacccggcgctcctcttatgaagacagctccctgccgtcaataaacgcccttctgcaggctgaggtgttgagtcgacaaatcacaagccccgtctctgggattaatggagatatcagagccaaaaagattgcgtccatcgcagacgtgtgtgagtcaatgaaagaacagctcctggtactggttgagtgggccaagtacatacctgctttttgcgaactcccattagatgaccaggtggccctgcttagggcacacgctggcgagcatttgctgctaggcgccaccaagcggagcatggtcttcaaagacgtgctcctgcttgggaacgattatatcgtgccccgtcactgtcctgagctggcggaaatgagtcgcgtctctattagaatcttggacgagctcgttctgccatttcaggaattacaaattgatgacaatgagtacgcctacctgaaggcaatcatattctttgatcccgacgctaaaggactctccgatcctggtaagattaaaaggcttcggagccaggtgcaggtatcgctggaagactatatcaacgatcgacagtacgactctcgcggcagattcggggagttgctactgctcctgccaactcttcaatccattacatggcagatgatcgagcagatccaatttattaagctgttcggaatggccaaaatagataatttgctccaggaaatgctgttaggcggttcaccgagtgacgctccccatgcccaccaccctctgcatccacacctaatgcaggagcatatggggaccaacgtgatcgtcgcaaatacgatgcccactcacctcagcaacggacagatgtgcgaatggcctaggccacggggccaagccgctacccccgagacaccgcagccttctcccccaggcgggtccggaagcgaaccttataagctgcttcccggtgcggtggcaactattgttaagccattgtcagccatcccccagcctaccataacaaaacaggaggtgatttga

SEQ ID NO: 410 - RNA, 1425 nt, synthetic construct
  misc_feature 1..1425: note = CDS (opt3) from Homo sapiens__NP_000448.3__HNF4A(1-474)(R2V_K5V)
  source 1..1425: mol_type = other RNA
atggtgctgagcgtcaccctcgttgacatggatatggccgactactccgctgcacttgatcccgcctatacaactctggagttcgaaaacgtgcaggtattgacgatgggcaatgacacctctccttcagaggggacaaacttaaatgcgccaaacagtctgggagtgagcgctctatgcgccatctgtggtgatagagcaactggcaagcactacggggcctcctcttgcgacggatgtaaaggctttttcaggcggtcggtccgcaagaatcatatgtattcatgccgatttagccgtcaatgtgtggttgataaagacaagagaaaccagtgcaggtactgtcggctcaaaaagtgcttccgcgctggtatgaagaaagaagcagtgcagaatgagagagataggattagtacccggcgctcctcttatgaagacagctccctgccgtcaataaacgcccttctgcaggctgaggtcttgagtcgacaaatcacaagccccgtgtctgggattaatggagatatcagagccaagaaaattgcgtccatcgcagacgtatgtgagtcaatgaaggaacagctcctggttctggtggagtgggccaaatacatacctgctttttgcgaactcccattagatgaccaggtcgccctgcttagggcacacgctggcgagcatttgctgctaggcgccaccaagcggagcatggtgttcaaggacgtgctcctgcttgggaacgattatatcgtcccccgtcactgtcctgagctggcggaaatgagtcgcgtttctattagaatcttggacgagctcgtgctgccatttcaggaattacaaattgatgacaatgagtacgcctacctgaaagcaatcatattctttgatcccgacgctaagggactctccgatcctggtaaaattaagaggcttcggagccaggtacaggtgtcgctggaagactatatcaacgatcgacagtacgactctcgcggcagattcggggagttgctactgctcctgccaactcttcaatccattacatggcagatgatcgagcagatccaatttattaaactgttcggaatggccaagatagataatttgctccaggaaatgctgttaggcggttcaccgagtgacgctccccatgcccaccaccctctgcatccacacctaatgcaggagcatatggggaccaacgtcatcgtggcaaatacgatgcccactcacctcagcaacggacagatgtgcgaatggcctaggccacggggccaagccgctacccccgagacaccgcagccttctcccccaggcgggtccggaagcgaaccttataaactgcttcccggtgcggttgcaactattgtgaagccattgtcagccatcccccagcctaccataacaaagcaggaggtcatttga

SEQ ID NO: 411 - RNA, 1425 nt, synthetic construct
  misc_feature 1..1425: note = CDS (opt3) from Homo sapiens__NP_000448.3__HNF4A(1-474)(K179R_K180R)
  source 1..1425: mol_type = other RNA
atgagactgagcaagaccctcgtggacatggatatggccgactactccgctgcacttgatcccgcctatacaactctggagttcgaaaacgtccaggttttgacgatgggcaatgacacctctccttcagaggggacaaacttaaatgcgccaaacagtctgggagtgagcgctctatgcgccatctgtggtgatagggcaactggcaaacactacggggcctcctcttgcgacggatgtaagggctttttccggcgctcggtacgtaaaaatcatatgtattcatgccgatttagcagacaatgtgtggtcgataaggacaaaaggaaccagtgccggtactgtcgcctcaagaagtgcttcagagctggtatgaaaaaggaagcagtgcagaatgagagggatcggattagtacccgccgatcctcttatgaagacagctccctgccgtcaataaacgcccttctgcaggctgaggttttgagtagacaaatcacaagccccgtgtctgggattaatggagatatcagggcccggcgtattgcgtccatcgcagacgtctgtgagtcaatgaaagaacagctcctggtgctggtagagtgggccaagtacatacctgctttttgcgaactcccattagatgaccaggttgccctgcttcgcgcacacgctggcgagcatttgctgctaggcgccaccaaaagaagcatggtgttcaaggacgtcctcctgcttgggaacgattatatcgtgcccaggcactgtcctgagctggcggaaatgagtcgggtgtctattcgaatcttggacgagctcgtcctgccatttcaggaattacaaattgatgacaatgagtacgcctacctgaaggcaatcatattctttgatcccgacgctaaaggactctccgatcctggtaagattaaacgccttagaagccaggttcaggtgtcgctggaagactatatcaacgataggcagtacgactctcggggccgcttcggggagttgctactgctcctgccaactcttcaatccattacatggcagatgatcgagcagatccaatttattaagctgttcggaatggccaaaatagataatttgctccaggaaatgctgttaggcggttcaccgagtgacgctccccatgcccaccaccctctgcatccacacctaatgcaggagcatatggggaccaacgtaatcgtggcaaatacgatgcccactcacctcagcaacggacagatgtgcgaatggcctagaccaaggggccaagccgctacccccgagacaccgcagccttctcccccaggcgggtccggaagcgaaccttataagctgcttcccggtgcggtcgcaactattgtgaaaccattgtcagccatcccccagcctaccataacaaagcaggaggttatttga

SEQ ID NO: 412 - RNA, 1425 nt, synthetic construct
  misc_feature 1..1425: note = CDS (opt3) from Homo sapiens__NP_000448.3__HNF4A(1-474)(K234R)
  source 1..1425: mol_type = other RNA
atgagactgagcaagaccctcgtggacatggatatggccgactactccgctgcacttgatcccgcctatacaactctggagttcgaaaacgtccaggttttgacgatgggcaatgacacctctccttcagaggggacaaacttaaatgcgccaaacagtctgggagtgagcgctctatgcgccatctgtggtgatagggcaactggcaaacactacggggcctcctcttgcgacggatgtaagggctttttccggcgctcggtacgtaaaaatcatatgtattcatgccgatttagcagacaatgtgtggtcgataaggacaaaaggaaccagtgccggtactgtcgcctcaagaagtgcttcagagctggtatgaaaaaggaagcagtgcagaatgagagggatcggattagtacccgccgatcctcttatgaagacagctccctgccgtcaataaacgcccttctgcaggctgaggttttgagtagacaaatcacaagccccgtgtctgggattaatggagatatcagggccaaaaagattgcgtccatcgcagacgtctgtgagtcaatgaaagaacagctcctggtgctggtagagtgggccaagtacatacctgctttttgcgaactcccattagatgaccaggttgccctgcttcgggcacacgctggcgagcatttgctgctaggcgccacccgtcgcagcatggtgttcaaggacgtcctcctgcttgggaacgattatatcgtgcccagacactgtcctgagctggcggaaatgagtagggtgtctattcggatcttggacgagctcgtcctgccatttcaggaattacaaattgatgacaatgagtacgcctacctgaaagcaatcatattctttgatcccgacgctaagggactctccgatcctggtaaaattaagcgacttcgcagccaggttcaggtgtcgctggaagactatatcaacgatagacagtacgactctaggggccggttcggggagttgctactgctcctgccaactcttcaatccattacatggcagatgatcgagcagatccaatttattaaactgttcggaatggccaagatagataatttgctccaggaaatgctgttaggcggttcaccgagtgacgctccccatgcccaccaccctctgcatccacacctaatgcaggagcatatggggaccaacgtaatcgtggcaaatacgatgcccactcacctcagcaacggacagatgtgcgaatggcctcgcccaagaggccaagccgctacccccgagacaccgcagccttctcccccaggcgggtccggaagcgaaccttataaactgcttcccggtgcggtcgcaactattgtgaagccattgtcagccatcccccagcctaccataacaaagcaggaggttatttga

SEQ ID NO: 413 - RNA, 1425 nt, synthetic construct
  misc_feature 1..1425: note = CDS (opt3) from Homo sapiens__NP_000448.3__HNF4A(1-474)(K300R)
  source 1..1425: mol_type = other RNA
atgagactgagcaagaccctcgtggacatggatatggccgactactccgctgcacttgatcccgcctatacaactctggagttcgaaaacgtccaggttttgacgatgggcaatgacacctctccttcagaggggacaaacttaaatgcgccaaacagtctgggagtgagcgctctatgcgccatctgtggtgatagggcaactggcaaacactacggggcctcctcttgcgacggatgtaagggctttttccggcgctcggtacgtaaaaatcatatgtattcatgccgatttagcagacaatgtgtggtcgataaggacaaaaggaaccagtgccggtactgtcgcctcaagaagtgcttcagagctggtatgaaaaaggaagcagtgcagaatgagagggatcggattagtacccgccgatcctcttatgaagacagctccctgccgtcaataaacgcccttctgcaggctgaggttttgagtagacaaatcacaagccccgtgtctgggattaatggagatatcagggccaaaaagattgcgtccatcgcagacgtctgtgagtcaatgaaagaacagctcctggtgctggtagagtgggccaagtacatacctgctttttgcgaactcccattagatgaccaggttgccctgcttcgggcacacgctggcgagcatttgctgctaggcgccaccaagcgtagcatggtgttcaaagacgtcctcctgcttgggaacgattatatcgtgccccgccactgtcctgagctggcggaaatgagtagagtgtctattaggatcttggacgagctcgtcctgccatttcaggaattacaaattgatgacaatgagtacgcctacctgaaggcaatcatattctttgatcccgacgctcggggactctccgatcctggtaaaattaagcgacttcgcagccaggttcaggtgtcgctggaagactatatcaacgatagacagtacgactctaggggccggttcggggagttgctactgctcctgccaactcttcaatccattacatggcagatgatcgagcagatccaatttattaaactgttcggaatggccaagatagataatttgctccaggaaatgctgttaggcggttcaccgagtgacgctccccatgcccaccaccctctgcatccacacctaatgcaggagcatatggggaccaacgtaatcgtggcaaatacgatgcccactcacctcagcaacggacagatgtgcgaatggcctcgcccaagaggccaagccgctacccccgagacaccgcagccttctcccccaggcgggtccggaagcgaaccttataaactgcttcccggtgcggtcgcaactattgtgaagccattgtcagccatcccccagcctaccataacaaagcaggaggttatttga

SEQ ID NO: 414 - RNA, 1425 nt, synthetic construct
  misc_feature 1..1425: note = CDS (opt3) from Homo sapiens__NP_000448.3__HNF4A(1-474)(K300R_K307R_K309R)
  source 1..1425: mol_type = other RNA
atgagactgagcaagaccctcgtggacatggatatggccgactactccgctgcacttgatcccgcctatacaactctggagttcgaaaacgtccaggttttgacgatgggcaatgacacctctccttcagaggggacaaacttaaatgcgccaaacagtctgggagtgagcgctctatgcgccatctgtggtgatagggcaactggcaaacactacggggcctcctcttgcgacggatgtaagggctttttccggcgctcggtacgtaaaaatcatatgtattcatgccgatttagcagacaatgtgtggtcgataaggacaaaaggaaccagtgccggtactgtcgcctcaagaagtgcttcagagctggtatgaaaaaggaagcagtgcagaatgagagggatcggattagtacccgccgatcctcttatgaagacagctccctgccgtcaataaacgcccttctgcaggctgaggttttgagtagacaaatcacaagccccgtgtctgggattaatggagatatcagggccaaaaagattgcgtccatcgcagacgtctgtgagtcaatgaaagaacagctcctggtgctggtagagtgggccaagtacatacctgctttttgcgaactcccattagatgaccaggttgccctgcttcgggcacacgctggcgagcatttgctgctaggcgccaccaagcgtagcatggtgttcaaagacgtcctcctgcttgggaacgattatatcgtgccccgccactgtcctgagctggcggaaatgagtagagtgtctattaggatcttggacgagctcgtcctgccatttcaggaattacaaattgatgacaatgagtacgcctacctgaaggcaatcatattctttgatcccgacgctcggggactctccgatcctggtcgcattcgaagacttaggagccaggttcaggtgtcgctggaagactatatcaacgatcggcagtacgactctcgcggcagattcggggagttgctactgctcctgccaactcttcaatccattacatggcagatgatcgagcagatccaatttattaaactgttcggaatggccaagatagataatttgctccaggaaatgctgttaggcggttcaccgagtgacgctccccatgcccaccaccctctgcatccacacctaatgcaggagcatatggggaccaacgtaatcgtggcaaatacgatgcccactcacctcagcaacggacagatgtgcgaatggcctaggccacgtggccaagccgctacccccgagacaccgcagccttctcccccaggcgggtccggaagcgaaccttataaactgcttcccggtgcggtcgcaactattgtgaagccattgtcagccatcccccagcctaccataacaaaacaggaggttatttga

SEQ ID NO: 415 - RNA, 1425 nt, synthetic construct
  misc_feature 1..1425: note = CDS (opt3) from Homo sapiens__NP_000448.3__HNF4A(1-474)(K447R_K470R)
  source 1..1425: mol_type = other RNA
atgagactgagcaagaccctcgtggacatggatatggccgactactccgctgcacttgatcccgcctatacaactctggagttcgaaaacgtccaggttttgacgatgggcaatgacacctctccttcagaggggacaaacttaaatgcgccaaacagtctgggagtgagcgctctatgcgccatctgtggtgatagggcaactggcaaacactacggggcctcctcttgcgacggatgtaagggctttttccggcgctcggtacgtaaaaatcatatgtattcatgccgatttagcagacaatgtgtggtcgataaggacaaaaggaaccagtgccggtactgtcgcctcaagaagtgcttcagagctggtatgaaaaaggaagcagtgcagaatgagagggatcggattagtacccgccgatcctcttatgaagacagctccctgccgtcaataaacgcccttctgcaggctgaggttttgagtagacaaatcacaagccccgtgtctgggattaatggagatatcagggccaaaaagattgcgtccatcgcagacgtctgtgagtcaatgaaagaacagctcctggtgctggtagagtgggccaagtacatacctgctttttgcgaactcccattagatgaccaggttgccctgcttcgggcacacgctggcgagcatttgctgctaggcgccaccaagcgtagcatggtgttcaaagacgtcctcctgcttgggaacgattatatcgtgccccgccactgtcctgagctggcggaaatgagtagagtgtctattaggatcttggacgagctcgtcctgccatttcaggaattacaaattgatgacaatgagtacgcctacctgaaggcaatcatattctttgatcccgacgctaaaggactctccgatcctggtaagattaaacggcttcgaagccaggttcaggtgtcgctggaagactatatcaacgatcgccagtacgactctagaggcaggttcggggagttgctactgctcctgccaactcttcaatccattacatggcagatgatcgagcagatccaatttattaagctgttcggaatggccaaaatagataatttgctccaggaaatgctgttaggcggttcaccgagtgacgctccccatgcccaccaccctctgcatccacacctaatgcaggagcatatggggaccaacgtaatcgtggcaaatacgatgcccactcacctcagcaacggacagatgtgcgaatggcctcggccacgcggccaagccgctacccccgagacaccgcagccttctcccccaggcgggtccggaagcgaaccttatagactgcttcccggtgcggtcgcaactattgtgaagccattgtcagccatcccccagcctaccataacaaggcaggaggttatttga

SEQ ID NO: 416 - RNA, 1425 nt, synthetic construct
  misc_feature 1..1425: note = CDS (opt3) from Homo sapiens__NP_000448.3__HNF4A(1-474)(K458R)
  source 1..1425: mol_type = other RNA
atgagactgagcaagaccctcgtggacatggatatggccgactactccgctgcacttgatcccgcctatacaactctggagttcgaaaacgtccaggttttgacgatgggcaatgacacctctccttcagaggggacaaacttaaatgcgccaaacagtctgggagtgagcgctctatgcgccatctgtggtgatagggcaactggcaaacactacggggcctcctcttgcgacggatgtaagggctttttccggcgctcggtacgtaaaaatcatatgtattcatgccgatttagcagacaatgtgtggtcgataaggacaaaaggaaccagtgccggtactgtcgcctcaagaagtgcttcagagctggtatgaaaaaggaagcagtgcagaatgagagggatcggattagtacccgccgatcctcttatgaagacagctccctgccgtcaataaacgcccttctgcaggctgaggttttgagtagacaaatcacaagccccgtgtctgggattaatggagatatcagggccaaaaagattgcgtccatcgcagacgtctgtgagtcaatgaaagaacagctcctggtgctggtagagtgggccaagtacatacctgctttttgcgaactcccattagatgaccaggttgccctgcttcgggcacacgctggcgagcatttgctgctaggcgccaccaagcgtagcatggtgttcaaagacgtcctcctgcttgggaacgattatatcgtgccccgccactgtcctgagctggcggaaatgagtagagtgtctattaggatcttggacgagctcgtcctgccatttcaggaattacaaattgatgacaatgagtacgcctacctgaaggcaatcatattctttgatcccgacgctaaaggactctccgatcctggtaagattaaacggcttcgaagccaggttcaggtgtcgctggaagactatatcaacgatcgccagtacgactctagaggcaggttcggggagttgctactgctcctgccaactcttcaatccattacatggcagatgatcgagcagatccaatttattaagctgttcggaatggccaaaatagataatttgctccaggaaatgctgttaggcggttcaccgagtgacgctccccatgcccaccaccctctgcatccacacctaatgcaggagcatatggggaccaacgtaatcgtggcaaatacgatgcccactcacctcagcaacggacagatgtgcgaatggcctcggccacgcggccaagccgctacccccgagacaccgcagccttctcccccaggcgggtccggaagcgaaccttataagctgcttcccggtgcggtcgcaactattgtgagaccattgtcagccatcccccagcctaccataacaaagcaggaggttatttga

SEQ ID NO: 417 - RNA, 1425 nt, synthetic construct
  misc_feature 1..1425: note = CDS (opt3) from Homo sapiens__NP_000448.3__HNF4A(1-474)(K106R_K108R_K126R_K127R)
  source 1..1425: mol_type = other RNA
atgagactgagcaagaccctcgtggacatggatatggccgactactccgctgcacttgatcccgcctatacaactctggagttcgaaaacgtccaggttttgacgatgggcaatgacacctctccttcagaggggacaaacttaaatgcgccaaacagtctgggagtgagcgctctatgcgccatctgtggtgatagggcaactggcaaacactacggggcctcctcttgcgacggatgtaagggctttttccggcgctcggtacgtaaaaatcatatgtattcatgccgatttagcagacaatgtgtggtcgatagggaccggcgcaaccagtgcagatactgtaggctcaagaaatgcttccgggctggtatgcgccgagaagcagtgcagaatgagagagataggattagtacccggcgttcctcttatgaagacagctccctgccgtcaataaacgcccttctgcaggctgaggttttgagtcgccaaatcacaagccccgtgtctgggattaatggagatatcagagccaagaagattgcgtccatcgcagacgtctgtgagtcaatgaaagaacagctcctggtgctggtagagtgggccaagtacatacctgctttttgcgaactcccattagatgaccaggttgccctgcttagggcacacgctggcgagcatttgctgctaggcgccaccaaacggagcatggtgttcaaggacgtcctcctgcttgggaacgattatatcgtgccccgacactgtcctgagctggcggaaatgagtcgcgtgtctattagaatcttggacgagctcgtcctgccatttcaggaattacaaattgatgacaatgagtacgcctacctgaaagcaatcatattctttgatcccgacgctaagggactctccgatcctggtaagattaaaaggcttcggagccaggttcaggtgtcgctggaagactatatcaacgatcgccagtacgactctagaggcaggttcggggagttgctactgctcctgccaactcttcaatccattacatggcagatgatcgagcagatccaatttattaagctgttcggaatggccaaaatagataatttgctccaggaaatgctgttaggcggttcaccgagtgacgctccccatgcccaccaccctctgcatccacacctaatgcaggagcatatggggaccaacgtaatcgtggcaaatacgatgcccactcacctcagcaacggacagatgtgcgaatggcctcgtccacggggccaagccgctacccccgagacaccgcagccttctcccccaggcgggtccggaagcgaaccttataagctgcttcccggtgcggtcgcaactattgtgaaaccattgtcagccatcccccagcctaccataacaaagcaggaggttatttga

SEQ ID NO: 418 - RNA, 1425 nt, synthetic construct
  misc_feature 1..1425: note = CDS (opt3) from Homo sapiens__NP_000448.3__HNF4A(1-474)(E285Q)
  source 1..1425: mol_type = other RNA
atgagactgagcaagaccctcgtggacatggatatggccgactactccgctgcacttgatcccgcctatacaactctggagttcgaaaacgtccaggttttgacgatgggcaatgacacctctccttcagaggggacaaacttaaatgcgccaaacagtctgggagtgagcgctctatgcgccatctgtggtgatagggcaactggcaaacactacggggcctcctcttgcgacggatgtaagggctttttccggcgctcggtacgtaaaaatcatatgtattcatgccgatttagcagacaatgtgtggtcgataaggacaaaaggaaccagtgccggtactgtcgcctcaagaagtgcttcagagctggtatgaaaaaggaagcagtgcagaatgagagggatcggattagtacccgccgatcctcttatgaagacagctccctgccgtcaataaacgcccttctgcaggctgaggttttgagtagacaaatcacaagccccgtgtctgggattaatggagatatcagggccaaaaagattgcgtccatcgcagacgtctgtgagtcaatgaaagaacagctcctggtgctggtagagtgggccaagtacatacctgctttttgcgaactcccattagatgaccaggttgccctgcttcgggcacacgctggcgagcatttgctgctaggcgccaccaagcgtagcatggtgttcaaagacgtcctcctgcttgggaacgattatatcgtgccccgccactgtcctgagctggcggaaatgagtagagtgtctattaggatcttggacgagctcgtcctgccatttcaggaattacaaattgatgacaatcagtacgcctacctgaaggcaatcatattctttgatcccgacgctaaaggactctccgatcctggtaagattaaacggcttcgaagccaggttcaggtgtcgctggaggactatatcaacgatcgccaatacgactctagaggcaggttcggggaattgctactgctcctgccaactcttcagtccattacatggcagatgatcgagcaaatccagtttattaagctgttcggaatggccaaaatagataatttgctccaggagatgctgttaggcggttcaccgagtgacgctccccatgcccaccaccctctgcatccacacctaatgcaggaacatatggggaccaacgtaatcgtggcaaatacgatgcccactcacctcagcaacggacaaatgtgcgagtggcctcggccacgcggccaggccgctacccccgaaacaccgcagccttctcccccaggcgggtccggaagcgagccttataagctgcttcccggtgcggtcgcaactattgtgaagccattgtcagccatcccccagcctaccataacaaaacaagaagttatttga

SEQ ID NO: 419 - RNA, 1425 nt, synthetic construct
  misc_feature 1..1425: note = CDS (opt3) from Homo sapiens__NP_000448.3__HNF4A(1-474)(T166E)
  source 1..1425: mol_type = other RNA
atgagactgagcaagaccctcgtggacatggatatggccgactactccgctgcacttgatcccgcctatacaactctggagttcgaaaacgtccaggttttgacgatgggcaatgacacctctccttcagaggggacaaacttaaatgcgccaaacagtctgggagtgagcgctctatgcgccatctgtggtgatagggcaactggcaaacactacggggcctcctcttgcgacggatgtaagggctttttccggcgctcggtacgtaaaaatcatatgtattcatgccgatttagcagacaatgtgtggtcgataaggacaaaaggaaccagtgccggtactgtcgcctcaagaagtgcttcagagctggtatgaaaaaggaagcagtgcagaatgagagggatcggattagtacccgccgatcctcttatgaagacagctccctgccgtcaataaacgcccttctgcaggctgaggttttgagtagacaaatcgagagccccgtgtctgggattaatggagatatcagggccaaaaagattgcgtccatcgcagacgtctgtgaatcaatgaaagagcagctcctggtgctggtagaatgggccaagtacatacctgctttttgcgagctcccattagatgaccaggttgccctgcttcgggcacacgctggcgagcatttgctgctaggcgccacaaagcgtagcatggtgttcaaagacgtcctcctgcttgggaacgattatatcgtgccccgccactgtcctgaactggcggagatgagtagagtgtctattaggatcttggacgaactcgtcctgccatttcaggagttacaaattgatgacaatgaatacgcctacctgaaggcaatcatattctttgatcccgacgctaaaggactctccgatcctggtaagattaaacggcttcgaagccaggttcaggtgtcgctggaggactatatcaacgatcgccagtacgactctagaggcaggttcggggagttgctactgctcctgccaacccttcaatccattacttggcagatgatcgaacagatccaatttattaagctgttcggaatggccaaaatagataatttgctccaggagatgctgttaggcggttcaccgagtgacgctccccatgcccaccaccctctgcatccacacctaatgcaggaacatatggggacaaacgtaatcgtggcaaataccatgcccacgcacctcagcaacggacagatgtgcgagtggcctcggccacgcggccaagccgctactcccgaaaccccgcagccttctcccccaggcgggtccggaagcgagccttataagctgcttcccggtgcggtcgcaacaattgtgaagccattgtcagccatcccccagcctactataaccaaacaggaggttatttga

SEQ ID NO: 420 - RNA, 1425 nt, synthetic construct
  misc_feature 1..1425: note = CDS (opt3) from Homo sapiens__NP_000448.3__HNF4A(1-474)(S148A)
  source 1..1425: mol_type = other RNA
atgagactgagcaagaccctcgtggacatggatatggccgactactccgctgcacttgatcccgcctatacaactctggagttcgaaaacgtccaggttttgacgatgggcaatgacacctctccttcagaggggacaaacttaaatgcgccaaacagtctgggagtgagcgctctatgcgccatctgtggtgatagggcaactggcaaacactacggggcctcctcttgcgacggatgtaagggctttttccggcgctcggtacgtaaaaatcatatgtattcatgccgatttagcagacaatgtgtggtcgataaggacaaaaggaaccagtgccggtactgtcgcctcaagaagtgcttcagagctggtatgaaaaaggaagcagtgcagaatgagagggatcggattagtacccgccgatcctcttatgaagacagcgccctgccgtccataaacgcccttctgcaggccgaggttttgtcaagacaaatcacaagtcccgtgagcgggattaatggagatatcagggcgaaaaagattgcatctatcgccgacgtctgtgagtccatgaaagaacagctcctggtgctggtagagtgggctaagtacatacctgccttttgcgaactcccattagatgaccaggttgcactgcttcgggctcacgccggcgagcatttgctgctaggcgcgaccaagcgttcaatggtgttcaaagacgtcctcctgcttgggaacgattatatcgtgccccgccactgtcctgagctggccgaaatgagcagagtgagtattaggatcttggacgagctcgtcctgccatttcaggaattacaaattgatgacaatgagtacgcatacctgaaggctatcatattctttgatcccgacgccaaaggactctctgatcctggtaagattaaacggcttcgatcccaggttcaggtgagcctggaagactatatcaacgatcgccagtacgactcgagaggcaggttcggggagttgctactgctcctgccaactcttcaatctattacatggcagatgatcgagcagatccaatttattaagctgttcggaatggctaaaatagataatttgctccaggaaatgctgttaggcggttccccgtcagacgctccccatgcacaccaccctctgcatccacacctaatgcaggagcatatggggaccaacgtaatcgtggccaatacgatgcccactcacctcagtaacggacagatgtgcgaatggcctcggccacgcggccaagctgcgacccccgagacaccgcagcctagcccacccggcgggtccggatctgaaccttataagctgcttcccggtgcagtcgccactattgtgaagccattgagcgctatcccccagcctaccataacaaaacaggaggttatttga

SEQ ID NO: 421 - RNA, 1425 nt, synthetic construct
  misc_feature 1..1425: note = CDS (opt3) from Homo sapiens__NP_000448.3__HNF4A(1-474)(S148E)
  source 1..1425: mol_type = other RNA
atgagactgagcaagaccctcgtggacatggatatggccgactactccgctgcacttgatcccgcctatacaactctggagttcgaaaacgtccaggttttgacgatgggcaatgacacctctccttcagaggggacaaacttaaatgcgccaaacagtctgggagtgagcgctctatgcgccatctgtggtgatagggcaactggcaaacactacggggcctcctcttgcgacggatgtaagggctttttccggcgctcggtacgtaaaaatcatatgtattcatgccgatttagcagacaatgtgtggtcgataaggacaaaaggaaccagtgccggtactgtcgcctcaagaagtgcttcagagctggtatgaaaaaggaagcagtgcagaatgagagggatcggattagtacccgccgatcctcttatgaagacagcgagctgccgtccataaacgcccttctgcaggctgaggttttgtcaagacaaatcacaagtcccgtgagcgggattaatggagatatcagggccaaaaagattgcgtctatcgcagacgtctgtgaatccatgaaagagcagctcctggtgctggtagaatgggccaagtacatacctgctttttgcgagctcccattagatgaccaggttgccctgcttcgggcacacgctggcgagcatttgctgctaggcgccaccaagcgttcaatggtgttcaaagacgtcctcctgcttgggaacgattatatcgtgccccgccactgtcctgaactggcggagatgagcagagtgagtattaggatcttggacgaactcgtcctgccatttcaggagttacaaattgatgacaatgaatacgcctacctgaaggcaatcatattctttgatcccgacgctaaaggactctctgatcctggtaagattaaacggcttcgatcccaggttcaggtgagcctggaggactatatcaacgatcgccagtacgactcgagaggcaggttcggggagttgctactgctcctgccaactcttcaatctattacatggcagatgatcgaacagatccaatttattaagctgttcggaatggccaaaatagataatttgctccaggagatgctgttaggcggttccccgtcagacgctccccatgcccaccaccctctgcatccacacctaatgcaggaacatatggggaccaacgtaatcgtggcaaatacgatgcccactcacctcagtaacggacagatgtgcgagtggcctcggccacgcggccaagccgctacccccgaaacaccgcagcctagcccacccggcgggtccggatctgagccttataagctgcttcccggtgcggtcgcaactattgtgaagccattgagcgccatcccccagcctaccataacaaaacaggaggttatttga

SEQ ID NO: 422 - RNA, 1425 nt, synthetic construct
  misc_feature 1..1425: note = CDS (opt3) from Homo sapiens__NP_000448.3__HNF4A(1-474)(S183A)
  source 1..1425: mol_type = other RNA
atgagactgagcaagaccctcgtggacatggatatggccgactactccgctgcacttgatcccgcctatacaactctggagttcgaaaacgtccaggttttgacgatgggcaatgacacctctccttcagaggggacaaacttaaatgcgccaaacagtctgggagtgagcgctctatgcgccatctgtggtgatagggcaactggcaaacactacggggcctcctcttgcgacggatgtaagggctttttccggcgctcggtacgtaaaaatcatatgtattcatgccgatttagcagacaatgtgtggtcgataaggacaaaaggaaccagtgccggtactgtcgcctcaagaagtgcttcagagctggtatgaaaaaggaagcagtgcagaatgagagggatcggattagtacccgccgatcctcttatgaagacagctccctgccgtcaataaacgcccttctgcaggctgaggttttgagtagacaaatcacaagccccgtgtctgggattaatggagatatcagggccaaaaagattgcggcaatcgccgacgtctgtgagtccatgaaagaacagctcctggtgctggtagagtgggctaagtacatacctgccttttgcgaactcccattagatgaccaggttgcactgcttcgggctcacgccggcgagcatttgctgctaggcgcgaccaagcgttcaatggtgttcaaagacgtcctcctgcttgggaacgattatatcgtgccccgccactgtcctgagctggccgaaatgagcagagtgagtattaggatcttggacgagctcgtcctgccatttcaggaattacaaattgatgacaatgagtacgcatacctgaaggctatcatattctttgatcccgacgccaaaggactctctgatcctggtaagattaaacggcttcgatcccaggttcaggtgagcctggaagactatatcaacgatcgccagtacgactcgagaggcaggttcggggagttgctactgctcctgccaactcttcaatctattacatggcagatgatcgagcagatccaatttattaagctgttcggaatggctaaaatagataatttgctccaggaaatgctgttaggcggttccccgtcagacgcaccccatgcccaccaccctctgcatccacacctaatgcaggagcatatggggaccaacgtaatcgtggccaatacgatgcccactcacctcagtaacggacagatgtgcgaatggcctcggccacgcggccaagctgcgacccccgagacaccgcagcctagcccacccggcgggtccggatctgaaccttataagctgcttcccggtgcagtcgccactattgtgaagccattgagcgctatcccccagcctaccataacaaaacaggaggttatttga

SEQ ID NO: 423 - RNA, 1425 nt, synthetic construct
  misc_feature 1..1425: note = CDS (opt3) from Homo sapiens__NP_000448.3__HNF4A(1-474)(S183E)
  source 1..1425: mol_type = other RNA
atgagactgagcaagaccctcgtggacatggatatggccgactactccgctgcacttgatcccgcctatacaactctggagttcgaaaacgtccaggttttgacgatgggcaatgacacctctccttcagaggggacaaacttaaatgcgccaaacagtctgggagtgagcgctctatgcgccatctgtggtgatagggcaactggcaaacactacggggcctcctcttgcgacggatgtaagggctttttccggcgctcggtacgtaaaaatcatatgtattcatgccgatttagcagacaatgtgtggtcgataaggacaaaaggaaccagtgccggtactgtcgcctcaagaagtgcttcagagctggtatgaaaaaggaagcagtgcagaatgagagggatcggattagtacccgccgatcctcttatgaagacagctccctgccgtcaataaacgcccttctgcaggctgaggttttgagtagacaaatcacaagccccgtgtctgggattaatggagatatcagggccaaaaagattgcggagatcgcagacgtctgtgaatccatgaaagagcagctcctggtgctggtagaatgggccaagtacatacctgctttttgcgagctcccattagatgaccaggttgccctgcttcgggcacacgctggcgagcatttgctgctaggcgccaccaagcgttcaatggtgttcaaagacgtcctcctgcttgggaacgattatatcgtgccccgccactgtcctgaactggcggagatgagcagagtgagtattaggatcttggacgaactcgtcctgccatttcaggagttacaaattgatgacaatgaatacgcctacctgaaggcaatcatattctttgatcccgacgctaaaggactctctgatcctggtaagattaaacggcttcgatcccaggttcaggtgagcctggaggactatatcaacgatcgccagtacgactcgagaggcaggttcggggagttgctactgctcctgccaactcttcaatctattacatggcagatgatcgaacagatccaatttattaagctgttcggaatggccaaaatagataatttgctccaggagatgctgttaggcggttccccgtcagacgctccccatgcccaccaccctctgcatccacacctaatgcaggaacatatggggaccaacgtaatcgtggcaaatacgatgcccactcacctcagtaacggacagatgtgcgagtggcctcggccacgcggccaagccgctacccccgaaacaccgcagcctagcccacccggcgggtccggatctgagccttataagctgcttcccggtgcggtcgcaactattgtgaagccattgagcgccatcccccagcctaccataacaaaacaggaggttatttga

SEQ ID NO: 424 - RNA, 1425 nt, synthetic construct
  misc_feature 1..1425: note = CDS (opt3) from Homo sapiens__NP_000448.3__HNF4A(1-474)(S461A)
  source 1..1425: mol_type = other RNA
atgagactgagcaagaccctcgtggacatggatatggccgactactccgctgcacttgatcccgcctatacaactctggagttcgaaaacgtccaggttttgacgatgggcaatgacacctctccttcagaggggacaaacttaaatgcgccaaacagtctgggagtgagcgctctatgcgccatctgtggtgatagggcaactggcaaacactacggggcctcctcttgcgacggatgtaagggctttttccggcgctcggtacgtaaaaatcatatgtattcatgccgatttagcagacaatgtgtggtcgataaggacaaaaggaaccagtgccggtactgtcgcctcaagaagtgcttcagagctggtatgaaaaaggaagcagtgcagaatgagagggatcggattagtacccgccgatcctcttatgaagacagctccctgccgtcaataaacgcccttctgcaggctgaggttttgagtagacaaatcacaagccccgtgtctgggattaatggagatatcagggccaaaaagattgcgtccatcgcagacgtctgtgagtcaatgaaagaacagctcctggtgctggtagagtgggccaagtacatacctgctttttgcgaactcccattagatgaccaggttgccctgcttcgggcacacgctggcgagcatttgctgctaggcgccaccaagcgtagcatggtgttcaaagacgtcctcctgcttgggaacgattatatcgtgccccgccactgtcctgagctggcggaaatgagtagagtgtctattaggatcttggacgagctcgtcctgccatttcaggaattacaaattgatgacaatgagtacgcctacctgaaggcaatcatattctttgatcccgacgctaaaggactctccgatcctggtaagattaaacggcttcgaagccaggttcaggtgtcgctggaagactatatcaacgatcgccagtacgactctagaggcaggttcggggagttgctactgctcctgccaactcttcaatccattacatggcagatgatcgagcagatccaatttattaagctgttcggaatggccaaaatagataatttgctccaggaaatgctgttaggcggttcaccgagtgacgctccccatgcccaccaccctctgcatccacacctaatgcaggagcatatggggaccaacgtaatcgtggcaaatacgatgcccactcacctcagcaacggacagatgtgcgaatggcctcggccacgcggccaagccgctacccccgagacaccgcagccttctcccccaggcgggtccggaagcgaaccttataagctgcttcccggtgcggtcgcaactattgtgaagccattggccgctatcccccagcctaccataacaaaacaggaggttatttga

SEQ ID NO: 425 - RNA, 1425 nt, synthetic construct
  misc_feature 1..1425: note = CDS (opt3) from Homo sapiens__NP_000448.3__HNF4A(1-474)(S461E)
  source 1..1425: mol_type = other RNA
atgagactgagcaagaccctcgtggacatggatatggccgactactccgctgcacttgatcccgcctatacaactctggagttcgaaaacgtccaggttttgacgatgggcaatgacacctctccttcagaggggacaaacttaaatgcgccaaacagtctgggagtgagcgctctatgcgccatctgtggtgatagggcaactggcaaacactacggggcctcctcttgcgacggatgtaagggctttttccggcgctcggtacgtaaaaatcatatgtattcatgccgatttagcagacaatgtgtggtcgataaggacaaaaggaaccagtgccggtactgtcgcctcaagaagtgcttcagagctggtatgaaaaaggaagcagtgcagaatgagagggatcggattagtacccgccgatcctcttatgaagacagctccctgccgtcaataaacgcccttctgcaggctgaggttttgagtagacaaatcacaagccccgtgtctgggattaatggagatatcagggccaaaaagattgcgtccatcgcagacgtctgtgagtcaatgaaagaacagctcctggtgctggtagagtgggccaagtacatacctgctttttgcgaactcccattagatgaccaggttgccctgcttcgggcacacgctggcgagcatttgctgctaggcgccaccaagcgtagcatggtgttcaaagacgtcctcctgcttgggaacgattatatcgtgccccgccactgtcctgagctggcggaaatgagtagagtgtctattaggatcttggacgagctcgtcctgccatttcaggaattacaaattgatgacaatgagtacgcctacctgaaggcaatcatattctttgatcccgacgctaaaggactctccgatcctggtaagattaaacggcttcgaagccaggttcaggtgtcgctggaagactatatcaacgatcgccagtacgactctagaggcaggttcggggagttgctactgctcctgccaactcttcaatccattacatggcagatgatcgagcagatccaatttattaagctgttcggaatggccaaaatagataatttgctccaggaaatgctgttaggcggttcaccgagtgacgctccccatgcccaccaccctctgcatccacacctaatgcaggagcatatggggaccaacgtaatcgtggcaaatacgatgcccactcacctcagcaacggacagatgtgcgaatggcctcggccacgcggccaagccgctacccccgagacaccgcagccttctcccccaggcgggtccggaagcgaaccttataagctgcttcccggtgcggtcgcaactattgtgaagccattggaggccatcccccagcctaccataacaaaacaggaggttatttga

SEQ ID NO: 426 - RNA, 1425 nt, synthetic construct
  misc_feature 1..1425: note = CDS (opt3) from Homo sapiens__NP_000448.3__HNF4A(1-474)(S142A_S143A_S313A)
  source 1..1425: mol_type = other RNA
atgagactgagcaagaccctcgtggacatggatatggccgactactccgctgcacttgatcccgcctatacaactctggagttcgaaaacgtccaggttttgacgatgggcaatgacacctctccttcagaggggacaaacttaaatgcgccaaacagtctgggagtgagcgctctatgcgccatctgtggtgatagggcaactggcaaacactacggggcctcctcttgcgacggatgtaagggctttttccggcgctcggtacgtaaaaatcatatgtattcatgccgatttagcagacaatgtgtggtcgataaggacaaaaggaaccagtgccggtactgtcgcctcaagaagtgcttcagagctggtatgaaaaaggaagcagtgcagaatgagagggatcggattagtacccgccgagccgcttatgaagactcctctctgccgagcataaacgcccttctgcaggcggaggttttgtccagacaaatcacatcacccgtgagtgggattaatggagatatcagggccaaaaagattgccagcatcgctgacgtctgtgagtctatgaaagaacagctcctggtgctggtagagtgggccaagtacatacctgcattttgcgaactcccattagatgaccaggttgctctgcttcgggcccacgcgggcgagcatttgctgctaggcgccaccaagcgttccatggtgttcaaagacgtcctcctgcttgggaacgattatatcgtgccccgccactgtcctgagctggcagaaatgtcaagagtgagcattaggatcttggacgagctcgtcctgccatttcaggaattacaaattgatgacaatgagtacgcttacctgaaggccatcatattctttgatcccgacgctaaaggactcagtgatcctggtaagattaaacggcttcgagcccaggttcaggtgtctctggaagactatatcaacgatcgccagtacgactccagaggcaggttcggggagttgctactgctcctgccaactcttcaaagcattacatggcagatgatcgagcagatccaatttattaagctgttcggaatggcaaaaatagataatttgctccaggaaatgctgttaggcggttcgccgtctgacgcaccccatgctcaccaccctctgcatccacacctaatgcaggagcatatggggaccaacgtaatcgtggcgaatacgatgcccactcacctctccaacggacagatgtgcgaatggcctcggccacgcggccaagcagccacccccgagacaccgcagccttcacccccaggcgggagtggaagcgaaccttataagctgcttcccggtgctgtcgccactattgtgaagccattgtccgcaatcccccagcctaccataacaaaacaggaggttatttga

SEQ ID NO: 427 - RNA, 1425 nt, synthetic construct
  misc_feature 1..1425: note = CDS (opt3) from Homo sapiens__NP_000448.3__HNF4A(1-474)(S142A_S143A_S313A_K458R)
  source 1..1425: mol_type = other RNA
atgagactgagcaagaccctcgtggacatggatatggccgactactccgctgcacttgatcccgcctatacaactctggagttcgaaaacgtccaggttttgacgatgggcaatgacacctctccttcagaggggacaaacttaaatgcgccaaacagtctgggagtgagcgctctatgcgccatctgtggtgatagggcaactggcaaacactacggggcctcctcttgcgacggatgtaagggctttttccggcgctcggtacgtaaaaatcatatgtattcatgccgatttagcagacaatgtgtggtcgataaggacaaaaggaaccagtgccggtactgtcgcctcaagaagtgcttcagagctggtatgaaaaaggaagcagtgcagaatgagagggatcggattagtacccgccgagccgcttatgaagactcctctctgccgagcataaacgcccttctgcaggcggaggttttgtccagacaaatcacatcacccgtgagtgggattaatggagatatcagggccaaaaagattgccagcatcgctgacgtctgtgagtctatgaaagaacagctcctggtgctggtagagtgggccaagtacatacctgcattttgcgaactcccattagatgaccaggttgctctgcttcgggcccacgcgggcgagcatttgctgctaggcgccaccaagcgttccatggtgttcaaagacgtcctcctgcttgggaacgattatatcgtgccccgccactgtcctgagctggcagaaatgtcaagagtgagcattaggatcttggacgagctcgtcctgccatttcaggaattacaaattgatgacaatgagtacgcttacctgaaggccatcatattctttgatcccgacgctaaaggactcagtgatcctggtaagattaaacggcttcgagcccaggttcaggtgtctctggaagactatatcaacgatcgccagtacgactccagaggcaggttcggggagttgctactgctcctgccaactcttcaaagcattacatggcagatgatcgagcagatccaatttattaagctgttcggaatggcaaaaatagataatttgctccaggaaatgctgttaggcggttcgccgtctgacgcaccccatgctcaccaccctctgcatccacacctaatgcaggagcatatggggaccaacgtaatcgtggcgaatacgatgcccactcacctctccaacggacagatgtgcgaatggcctcggccacgcggccaagcagccacccccgagacaccgcagccttcacccccaggcgggagtggaagcgaaccttataagctgcttcccggtgctgtcgccactattgtgagaccattgtccgcaatcccccagcctaccataacaaagcaggaggttatttga

SEQ ID NO: 428 - RNA, 1425 nt, synthetic construct
  misc_feature 1..1425: note = CDS (opt3) from Homo sapiens__NP_000448.3__HNF4A(1-474)(S142A_S143A_S167A_S313A_ S378A_T429A_T432A_S436A_K458R)
  source 1..1425: mol_type = other RNA
atgagactgagcaagaccctcgtggacatggatatggccgactactccgctgcacttgatcccgcctatacaactctggagttcgaaaacgtccaggttttgacgatgggcaatgacacctctccttcagaggggacaaacttaaatgcgccaaacagtctgggagtgagcgctctatgcgccatctgtggtgatagggcaactggcaaacactacggggcctcctcttgcgacggatgtaagggctttttccggcgctcggtacgtaaaaatcatatgtattcatgccgatttagcagacaatgtgtggtcgataaggacaaaaggaaccagtgccggtactgtcgcctcaagaagtgcttcagagctggtatgaaaaaggaagcagtgcagaatgagagggatcggattagtacccgccgagccgcttatgaagactcctctctgccgagcataaacgcccttctgcaggcggaggttttgtccagacaaatcacagcacccgtgtcagggattaatggagatatcagggccaaaaagattgctagtatcgccgacgtctgtgagagcatgaaagaacagctcctggtgctggtagagtgggcaaagtacatacctgctttttgcgaactcccattagatgaccaggttgccctgcttcgggcgcacgccggcgagcatttgctgctaggcgcaaccaagcgttctatggtgttcaaagacgtcctcctgcttgggaacgattatatcgtgccccgccactgtcctgagctggctgaaatgtccagagtgtcaattaggatcttggacgagctcgtcctgccatttcaggaattacaaattgatgacaatgagtacgcctacctgaaggctatcatattctttgatcccgacgccaaaggactcagcgatcctggtaagattaaacggcttcgagcacaggttcaggtgagtctggaagactatatcaacgatcgccagtacgactctagaggcaggttcggggagttgctactgctcctgccaactcttcaatccattacatggcagatgatcgagcagatccaatttattaagctgttcggaatggccaaaatagataatttgctccaggaaatgctgttaggcggtgctccgagcgacgcgccccatgcacaccaccctctgcatccacacctaatgcaggagcatatggggaccaacgtaatcgtggccaatacgatgcccactcacctctcgaacggacagatgtgcgaatggcctcggccacgcggccaagctgccgcacccgaggccccgcagcctgctcccccaggcgggtctggatccgaaccttataagctgcttcccggtgccgtcgcaaccattgtgagaccattgtcagcgatcccccagcctacaataactaagcaggaggttatttga

SEQ ID NO: 429 - RNA, 1425 nt, synthetic construct
  misc_feature 1..1425: note = CDS (opt3) from Homo sapiens__NP_000448.3__HNF4A(1-474)(S142A_S143A_S148A_S167A_ S313A_S378A_T429A_T432A_S436A_K458R)
  source 1..1425: mol_type = other RNA
atgagactgagcaagaccctcgtggacatggatatggccgactactccgctgcacttgatcccgcctatacaactctggagttcgaaaacgtccaggttttgacgatgggcaatgacacctctccttcagaggggacaaacttaaatgcgccaaacagtctgggagtgagcgctctatgcgccatctgtggtgatagggcaactggcaaacactacggggcctcctcttgcgacggatgtaagggctttttccggcgctcggtacgtaaaaatcatatgtattcatgccgatttagcagacaatgtgtggtcgataaggacaaaaggaaccagtgccggtactgtcgcctcaagaagtgcttcagagctggtatgaaaaaggaagcagtgcagaatgagagggatcggattagtacccgccgagccgcttatgaagactccgccctgccgtctataaacgcgcttctgcaggcagaggttttgagcagacaaatcacagcccccgtgtccgggattaatggagatatcagggctaaaaagattgcctcaatcgcagacgtctgtgagagtatgaaagaacagctcctggtgctggtagagtgggctaagtacatacctgccttttgcgaactcccattagatgaccaggttgcgctgcttcgggcccacgcaggcgagcatttgctgctaggcgctaccaagcgtagcatggtgttcaaagacgtcctcctgcttgggaacgattatatcgtgccccgccactgtcctgagctggccgaaatgtctagagtgtccattaggatcttggacgagctcgtcctgccatttcaggaattacaaattgatgacaatgagtacgcttacctgaaggccatcatattctttgatcccgacgcaaaaggactctcagatcctggtaagattaaacggcttcgagcccaggttcaggtgagcctggaagactatatcaacgatcgccagtacgacagtagaggcaggttcggggagttgctactgctcctgccaactcttcaatctattacatggcagatgatcgagcagatccaatttattaagctgttcggaatggctaaaatagataatttgctccaggaaatgctgttaggcggtgcgccgtccgacgcaccccatgcccaccaccctctgcatccacacctaatgcaggagcatatggggaccaacgtaatcgtggctaatacgatgcccactcacctcagcaacggacagatgtgcgaatggcctcggccacgcggccaagccgcagcccccgaggctccgcagcctgcacccccaggcgggtcgggatctgaaccttataagctgcttcccggtgccgtcgcgaccattgtgagaccattgtccgctatcccccagcctacaataactaagcaggaggttatttga

SEQ ID NO: 430 - RNA, 1425 nt, synthetic construct
  misc_feature 1..1425: note = CDS (opt3) from Homo sapiens__NP_000448.3__HNF4A(1-474)(K106R_K108R_K126R_K127R_ S142A_S143A_S148A_S167A_S313A_S378A_T429A_T432A_S436A_K458R )
  source 1..1425: mol_type = other RNA
atgagactgagcaagaccctcgtggacatggatatggccgactactccgctgcacttgatcccgcctatacaactctggagttcgaaaacgtccaggttttgacgatgggcaatgacacctctccttcagaggggacaaacttaaatgcgccaaacagtctgggagtgagcgctctatgcgccatctgtggtgatagggcaactggcaaacactacggggcctcctcttgcgacggatgtaagggctttttccggcgctcggtacgtaaaaatcatatgtattcatgccgatttagcagacaatgtgtggtcgatagggaccggcgcaaccagtgcagatactgtaggctcaagaaatgcttccgggctggtatgcgccgagaagcagtgcagaatgagagagataggattagtacccggcgtgccgcttatgaagactccgccctgccgtctataaacgcgcttctgcaggcagaggttttgagccgccaaatcacagcccccgtgtccgggattaatggagatatcagagctaagaagattgcctcaatcgcagacgtctgtgagagtatgaaagaacagctcctggtgctggtagagtgggctaagtacatacctgccttttgcgaactcccattagatgaccaggttgcgctgcttagggcccacgcaggcgagcatttgctgctaggcgctaccaaacggagcatggtgttcaaggacgtcctcctgcttgggaacgattatatcgtgccccgacactgtcctgagctggccgaaatgtctcgcgtgtccattagaatcttggacgagctcgtcctgccatttcaggaattacaaattgatgacaatgagtacgcttacctgaaagccatcatattctttgatcccgacgcaaagggactctcagatcctggtaagattaaaaggcttcgggcccaggttcaggtgagcctggaagactatatcaacgatcgccagtacgacagtagaggcaggttcggggagttgctactgctcctgccaactcttcaatctattacatggcagatgatcgagcagatccaatttattaagctgttcggaatggctaaaatagataatttgctccaggaaatgctgttaggcggtgcgccgtccgacgcaccccatgcccaccaccctctgcatccacacctaatgcaggagcatatggggaccaacgtaatcgtggctaatacgatgcccactcacctcagcaacggacagatgtgcgaatggcctcgtccacggggccaagccgcagcccccgaggctccgcagcctgcacccccaggcgggtcgggatctgaaccttataagctgcttcccggtgccgtcgcgaccattgtgcgaccattgtccgctatcccccagcctacaataactaaacaggaggttatttga

SEQ ID NO: 431 - RNA, 1425 nt, synthetic construct
  misc_feature 1..1425: note = CDS (opt3) from Homo sapiens__NP_000448.3__HNF4A(1-474)(S142A_S143A_S148A_T166A_ S167A_S313A_S378A_T429A_T432A_S436A_K458R)
  source 1..1425: mol_type = other RNA
atgagactgagcaagaccctcgtggacatggatatggccgactactccgctgcacttgatcccgcctatacaactctggagttcgaaaacgtccaggttttgacgatgggcaatgacacctctccttcagaggggacaaacttaaatgcgccaaacagtctgggagtgagcgctctatgcgccatctgtggtgatagggcaactggcaaacactacggggcctcctcttgcgacggatgtaagggctttttccggcgctcggtacgtaaaaatcatatgtattcatgccgatttagcagacaatgtgtggtcgataaggacaaaaggaaccagtgccggtactgtcgcctcaagaagtgcttcagagctggtatgaaaaaggaagcagtgcagaatgagagggatcggattagtacccgccgagccgcttatgaagactccgccctgccgtctataaacgcgcttctgcaggcagaggttttgagcagacaaatcgccgctcccgtgtccgggattaatggagatatcagggccaaaaagattgcatcaatcgctgacgtctgtgagagtatgaaagaacagctcctggtgctggtagagtgggccaagtacatacctgcgttttgcgaactcccattagatgaccaggttgccctgcttcgggcacacgctggcgagcatttgctgctaggcgccacaaagcgtagcatggtgttcaaagacgtcctcctgcttgggaacgattatatcgtgccccgccactgtcctgagctggctgaaatgtctagagtgtccattaggatcttggacgagctcgtcctgccatttcaggaattacaaattgatgacaatgagtacgcctacctgaaggcaatcatattctttgatcccgacgccaaaggactctcagatcctggtaagattaaacggcttcgagctcaggttcaggtgagcctggaagactatatcaacgatcgccagtacgacagtagaggcaggttcggggagttgctactgctcctgccaacccttcaatctattacttggcagatgatcgagcagatccaatttattaagctgttcggaatggcgaaaatagataatttgctccaggaaatgctgttaggcggtgcaccgtccgacgctccccatgcccaccaccctctgcatccacacctaatgcaggagcatatggggacaaacgtaatcgtggccaataccatgcccacgcacctcagcaacggacagatgtgcgaatggcctcggccacgcggccaagcagccgctcccgaggccccgcagcctgcacccccaggcgggtcgggatctgaaccttataagctgcttcccggtgcggtcgctactattgtgagaccattgtccgccatcccccagcctaccataacaaagcaggaggttatttga

SEQ ID NO: 432 - RNA, 1425 nt, synthetic construct
  misc_feature 1..1425: note = CDS (opt3) from Homo sapiens__NP_000448.3__HNF4A(1-474)(S87A_S142A_S143A_S148A_T 166A_S167A_S313A_S378A_T429A_T432A_S436A_K458R)
  source 1..1425: mol_type = other RNA
atgagactgagcaagaccctcgtggacatggatatggccgactactccgctgcacttgatcccgcctatacaactctggagttcgaaaacgtccaggttttgacgatgggcaatgacacctctccttcagaggggacaaacttaaatgcgccaaacagtctgggagtgagcgctctatgcgccatctgtggtgatagggcaactggcaaacactacggggcctcctcttgcgacggatgtaagggctttttccggcgcgctgtacgtaaaaatcatatgtattcgtgccgattttcaagacaatgtgtggtcgataaggacaaaaggaaccagtgccggtactgtcgcctcaagaagtgcttcagagcaggtatgaaaaaggaagccgtgcagaatgagagggatcggattagcacccgccgagctgcctatgaagacagtgcgctgccgtccataaacgcacttctgcaggccgaggttttgtctagacaaatcgctgcccccgtgagcgggattaatggagatatcagggctaaaaagattgcatccatcgccgacgtctgtgagtcaatgaaagaacagctcctggtgctggtagagtgggcgaagtacatacctgccttttgcgaactcccattagatgaccaggttgcactgcttcgggctcacgccggcgagcatttgctgctaggcgctacaaagcgtagtatggtgttcaaagacgtcctcctgcttgggaacgattatatcgtgccccgccactgtcctgagctggccgaaatgagcagagtgtctattaggatcttggacgagctcgtcctgccatttcaggaattacaaattgatgacaatgagtacgcatacctgaaggccatcatattctttgatcccgacgctaaaggactctccgatcctggtaagattaaacggcttcgagcgcaggttcaggtgtcactggaagactatatcaacgatcgccagtacgacagcagaggcaggttcggggagttgctactgctcctgccaacccttcaaagtattacttggcagatgatcgagcagatccaatttattaagctgttcggaatggcaaaaatagataatttgctccaggaaatgctgttaggcggtgccccgtctgacgctccccatgcccaccaccctctgcatccacacctaatgcaggagcatatggggacaaacgtaatcgtggcaaataccatgcccacgcacctctccaacggacagatgtgcgaatggcctcggccacgcggccaagccgctgcccccgaggcaccgcagcctgcgcccccaggcgggagcggatcggaaccttataagctgcttcccggtgctgtcgccactattgtgagaccattgtctgcaatcccccagcctaccataacaaagcaggaggttatttga

SEQ ID NO: 433 - RNA, 1425 nt, synthetic construct
  misc_feature 1..1425: note = CDS (opt3) from Homo sapiens__NP_000448.3__HNF4A(1-474)(S87A_K106R_K108R_K126R_K 127R_S142A_S143A_S148A_T166A_S167A_S313A_S378A_T429A_T432A_ S436A_K458R)
  source 1..1425: mol_type = other RNA
atgagactgagcaagaccctcgtggacatggatatggccgactactccgctgcacttgatcccgcctatacaactctggagttcgaaaacgtccaggttttgacgatgggcaatgacacctctccttcagaggggacaaacttaaatgcgccaaacagtctgggagtgagcgctctatgcgccatctgtggtgatagggcaactggcaaacactacggggcctcctcttgcgacggatgtaagggctttttccggcgcgctgtacgtaaaaatcatatgtattcgtgccgattttcaagacaatgtgtggtcgatagggaccggcgcaaccagtgcagatactgtaggctcaagaaatgcttccgggcaggtatgcgccgagaagccgtgcagaatgagagagataggattagcacccggcgtgctgcctatgaagacagtgcgctgccgtccataaacgcacttctgcaggccgaggttttgtctcgccaaatcgctgcccccgtgagcgggattaatggagatatcagagcaaagaagattgcttccatcgccgacgtctgtgagtcaatgaaagaacagctcctggtgctggtagagtgggcgaagtacatacctgccttttgcgaactcccattagatgaccaggttgcactgcttagggctcacgccggcgagcatttgctgctaggcgctacaaaacggagtatggtgttcaaggacgtcctcctgcttgggaacgattatatcgtgccccgacactgtcctgagctggccgaaatgagccgcgtgtctattagaatcttggacgagctcgtcctgccatttcaggaattacaaattgatgacaatgagtacgcatacctgaaagccatcatattctttgatcccgacgctaagggactctccgatcctggtaagattaaaaggcttcgggcgcaggttcaggtgtcactggaagactatatcaacgatcgccagtacgacagcagaggcaggttcggggagttgctactgctcctgccaacccttcaaagtattacttggcagatgatcgagcagatccaatttattaagctgttcggaatggcaaaaatagataatttgctccaggaaatgctgttaggcggtgccccgtctgacgctccccatgcccaccaccctctgcatccacacctaatgcaggagcatatggggacaaacgtaatcgtggcaaataccatgcccacgcacctctccaacggacagatgtgcgaatggcctcgtccacggggccaagccgctgcccccgaggcaccgcagcctgcgcccccaggcgggagcggatcggaaccttataagctgcttcccggtgctgtcgccactattgtgcgaccattgtctgcaatcccccagcctaccataacaaaacaggaggttatttga

SEQ ID NO: 434 - RNA, 1425 nt, synthetic construct
  misc_feature 1..1425: note = CDS (opt3) from Homo sapiens__NP_000448.3__HNF4A(1-474)(S87A_K106R_K108R_K126R_K 127R)
  source 1..1425: mol_type = other RNA
atgagactgagcaagaccctcgtggacatggatatggccgactactccgctgcacttgatcccgcctatacaactctggagttcgaaaacgtccaggttttgacgatgggcaatgacacctctccttcagaggggacaaacttaaatgcgccaaacagtctgggagtgagcgctctatgcgccatctgtggtgatagggcaactggcaaacactacggggcctcctcttgcgacggatgtaagggctttttccggcgcgctgtacgtaaaaatcatatgtattcgtgccgattttcaagacaatgtgtggtcgatagggaccggcgcaaccagtgcagatactgtaggctcaagaaatgcttccgggcaggtatgcgccgagaagccgtgcagaatgagagagataggattagcacccggcgtagttcctatgaagactctagcctgccgtccataaacgcccttctgcaggccgaggttttgtcacgccaaatcacaagtcccgtgagcgggattaatggagatatcagagcgaagaagattgcatctatcgccgacgtctgtgagtccatgaaagaacagctcctggtgctggtagagtgggctaagtacatacctgccttttgcgaactcccattagatgaccaggttgcactgcttagggctcacgccggcgagcatttgctgctaggcgcgaccaaacggtcaatggtgttcaaggacgtcctcctgcttgggaacgattatatcgtgccccgacactgtcctgagctggccgaaatgagccgcgtgagtattagaatcttggacgagctcgtcctgccatttcaggaattacaaattgatgacaatgagtacgcatacctgaaagctatcatattctttgatcccgacgccaagggactctctgatcctggtaagattaaaaggcttcggtcccaggttcaggtgagcctggaagactatatcaacgatcgccagtacgactcgagaggcaggttcggggagttgctactgctcctgccaactcttcaatctattacatggcagatgatcgagcagatccaatttattaagctgttcggaatggctaaaatagataatttgctccaggaaatgctgttaggcggttccccgtcagacgctccccatgcacaccaccctctgcatccacacctaatgcaggagcatatggggaccaacgtaatcgtggccaatacgatgcccactcacctcagtaacggacagatgtgcgaatggcctcgtccacggggccaagctgcgacccccgagacaccgcagcctagcccacccggcgggtccggatctgaaccttataagctgcttcccggtgcagtcgccactattgtgaaaccattgagcgctatcccccagcctaccataacaaagcaggaggttatttga

SEQ ID NO: 435 - RNA, 1425 nt, synthetic construct
  misc_feature 1..1425: note = CDS (opt3) from Homo sapiens__NP_000448.3__HNF4A(1-474)(S87A_K106R_K108R_K126R_K 127R_S142A_S143A_S148A_T166A_S167A_S313A_S378A_T429A_T432A_ S436A_K458R_S461A)
  source 1..1425: mol_type = other RNA
atgagactgagcaagaccctcgtggacatggatatggccgactactccgctgcacttgatcccgcctatacaactctggagttcgaaaacgtccaggttttgacgatgggcaatgacacctctccttcagaggggacaaacttaaatgcgccaaacagtctgggagtgagcgctctatgcgccatctgtggtgatagggcaactggcaaacactacggggcctcctcttgcgacggatgtaagggctttttccggcgcgctgtacgtaaaaatcatatgtattcgtgccgattttcaagacaatgtgtggtcgatagggaccggcgcaaccagtgcagatactgtaggctcaagaaatgcttccgggcaggtatgcgccgagaagccgtgcagaatgagagagataggattagcacccggcgtgctgcctatgaagacagtgcgctgccgtccataaacgcacttctgcaggccgaggttttgtctcgccaaatcgctgcccccgtgagcgggattaatggagatatcagagcaaagaagattgcttccatcgccgacgtctgtgagtcaatgaaagaacagctcctggtgctggtagagtgggcgaagtacatacctgccttttgcgaactcccattagatgaccaggttgcactgcttagggctcacgccggcgagcatttgctgctaggcgctacaaaacggagtatggtgttcaaggacgtcctcctgcttgggaacgattatatcgtgccccgacactgtcctgagctggccgaaatgagccgcgtgtctattagaatcttggacgagctcgtcctgccatttcaggaattacaaattgatgacaatgagtacgcatacctgaaagccatcatattctttgatcccgacgctaagggactctccgatcctggtaagattaaaaggcttcgggcgcaggttcaggtgtcactggaagactatatcaacgatcgccagtacgacagcagaggcaggttcggggagttgctactgctcctgccaacccttcaaagtattacttggcagatgatcgagcagatccaatttattaagctgttcggaatggcaaaaatagataatttgctccaggaaatgctgttaggcggtgccccgtctgacgctccccatgcccaccaccctctgcatccacacctaatgcaggagcatatggggacaaacgtaatcgtggcaaataccatgcccacgcacctctccaacggacagatgtgcgaatggcctcgtccacggggccaagccgctgcccccgaggcaccgcagcctgcgcccccaggcgggagcggatcggaaccttataagctgcttcccggtgctgtcgccactattgtgcgaccattggcagccatcccccagcctaccataacaaaacaggaggttatttga

SEQ ID NO: 436 - RNA, 1425 nt, synthetic construct
  misc_feature 1..1425: note = CDS (opt3) from Homo sapiens__NP_000448.3__HNF4A(1-474)(S87A_K106R_K108R_K126R_K 127R_S142A_S143A_S148A_T166A_S167A_S313A_S378A_T429A_T432A_ S436A_K458R_S461E)
  source 1..1425: mol_type = other RNA
atgagactgagcaagaccctcgtggacatggatatggccgactactccgctgcacttgatcccgcctatacaactctggagttcgaaaacgtccaggttttgacgatgggcaatgacacctctccttcagaggggacaaacttaaatgcgccaaacagtctgggagtgagcgctctatgcgccatctgtggtgatagggcaactggcaaacactacggggcctcctcttgcgacggatgtaagggctttttccggcgcgctgtacgtaaaaatcatatgtattcgtgccgattttcaagacaatgtgtggtcgatagggaccggcgcaaccagtgcagatactgtaggctcaagaaatgcttccgggcaggtatgcgccgagaagccgtgcagaatgagagagataggattagcacccggcgtgctgcctatgaagacagtgcgctgccgtccataaacgcacttctgcaggccgaggttttgtctcgccaaatcgctgcccccgtgagcgggattaatggagatatcagagcaaagaagattgcttccatcgccgacgtctgtgagtcaatgaaagaacagctcctggtgctggtagagtgggcgaagtacatacctgccttttgcgaactcccattagatgaccaggttgcactgcttagggctcacgccggcgagcatttgctgctaggcgctacaaaacggagtatggtgttcaaggacgtcctcctgcttgggaacgattatatcgtgccccgacactgtcctgagctggccgaaatgagccgcgtgtctattagaatcttggacgagctcgtcctgccatttcaggaattacaaattgatgacaatgagtacgcatacctgaaagccatcatattctttgatcccgacgctaagggactctccgatcctggtaagattaaaaggcttcgggcgcaggttcaggtgtcactggaagactatatcaacgatcgccagtacgacagcagaggcaggttcggggagttgctactgctcctgccaacccttcaaagtattacttggcagatgatcgagcagatccaatttattaagctgttcggaatggcaaaaatagataatttgctccaggaaatgctgttaggcggtgccccgtctgacgctccccatgcccaccaccctctgcatccacacctaatgcaggagcatatggggacaaacgtaatcgtggcaaataccatgcccacgcacctctccaacggacagatgtgcgaatggcctcgtccacggggccaagccgctgcccccgaggcaccgcagcctgcgcccccaggcgggagcggatcggaaccttataagctgcttcccggtgctgtcgccactattgtgcgaccattggaggcaatcccccagcctaccataacaaaacaggaggttatttga

SEQ ID NO: 437 - RNA, 1425 nt, synthetic construct
  misc_feature 1..1425: note = CDS (opt3) from Homo sapiens__NP_000448.3__HNF4A(1-474)(S87A_K106R_K108R_K126R_K 127R_S142A_S143A_S148E_T166A_S167E_S313A_S378E_T429E_T432E_ S436E_K458R_S461E)
  source 1..1425: mol_type = other RNA
atgagactgagcaagaccctcgtggacatggatatggccgactactccgctgcacttgatcccgcctatacaactctggagttcgaaaacgtccaggttttgacgatgggcaatgacacctctccttcagaggggacaaacttaaatgcgccaaacagtctgggagtgagcgctctatgcgccatctgtggtgatagggcaactggcaaacactacggggcctcctcttgcgacggatgtaagggctttttccggcgcgctgtacgtaaaaatcatatgtattcgtgccgattttcaagacaatgtgtggtcgatagggaccggcgcaaccagtgcagatactgtaggctcaagaaatgcttccgggcaggtatgcgccgagaagccgtgcagaatgagagagataggattagcacccggcgtgctgcctatgaagacagtgagctgccgtccataaacgcgcttctgcaggcagaggttttgtctcgccaaatcgccgaacccgtgagcgggattaatggagatatcagagctaagaagattgcctccatcgcagacgtctgtgagtcaatgaaagaacagctcctggtgctggtagagtgggctaagtacatacctgccttttgcgagctcccattagatgaccaggttgcgctgcttagggcccacgcaggcgaacatttgctgctaggcgctacaaaacggagtatggtgttcaaggacgtcctcctgcttgggaacgattatatcgtgccccgacactgtcctgagctggccgaaatgagccgcgtgtctattagaatcttggacgagctcgtcctgccatttcaggaattacaaattgatgacaatgagtacgcttacctgaaagccatcatattctttgatcccgacgcaaagggactctccgatcctggtaagattaaaaggcttcgggcccaggttcaggtgtcactggaggactatatcaacgatcgccagtacgacagcagaggcaggttcggggaattgctactgctcctgccaacccttcaaagtattacttggcagatgatcgagcagatccaatttattaagctgttcggaatggctaaaatagataatttgctccaggaaatgctgttaggcggtgagccgtctgacgcgccccatgcacaccaccctctgcatccacacctaatgcaggaacatatggggacaaacgtaatcgtggccaataccatgcccacgcacctctccaacggacagatgtgcgagtggcctcgtccacggggccaagctgccgagcccgaggaaccgcagcctgaacccccaggcgggagcggatcggagccttataagctgcttcccggtgcagtcgccactattgtgcgaccattggaagctatcccccagcctaccataacaaaacaggaggttatttga

SEQ ID NO: 438 - RNA, 1425 nt, synthetic construct
  misc_feature 1..1425: note = CDS (opt3) from Homo sapiens__NP_000448.3__HNF4A(1-474)(S87A_K106R_K108R_K126R_K 127R_S142A_S143A_S148A_T166A_S167A_K179R_K180R_S313A_S378A_ T429A_T432A_S436A_K458R_S461E)
  source 1..1425: mol_type = other RNA
atgagactgagcaagaccctcgtggacatggatatggccgactactccgctgcacttgatcccgcctatacaactctggagttcgaaaacgtccaggttttgacgatgggcaatgacacctctccttcagaggggacaaacttaaatgcgccaaacagtctgggagtgagcgctctatgcgccatctgtggtgatagggcaactggcaaacactacggggcctcctcttgcgacggatgtaagggctttttccggcgcgctgtacgtaaaaatcatatgtattcgtgccgattttcaagacaatgtgtggtcgatagggaccggcgcaaccagtgcagatactgtaggctcaagaaatgcttccgggcaggtatgcgccgagaagccgtgcagaatgagagagataggattagcacccggcgtgctgcctatgaagacagtgcgctgccgtccataaacgcacttctgcaggccgaggttttgtctcgccaaatcgctgcccccgtgagcgggattaatggagatatcagagcaaggcggattgcttccatcgccgacgtctgtgagtcaatgaaggaacagctcctggtgctggtagagtgggcgaagtacatacctgccttttgcgaactcccattagatgaccaggttgcactgcttcgagctcacgccggcgagcatttgctgctaggcgctacaaaacgcagtatggtgttcaaggacgtcctcctgcttgggaacgattatatcgtgcccagacactgtcctgagctggccgaaatgagcagggtgtctattcggatcttggacgagctcgtcctgccatttcaggaattacaaattgatgacaatgagtacgcatacctgaaagccatcatattctttgatcccgacgctaagggactctccgatcctggtaaaattaagcgccttagagcgcaggttcaggtgtcactggaagactatatcaacgataggcagtacgacagccgtggccggttcggggagttgctactgctcctgccaacccttcaaagtattacttggcagatgatcgagcagatccaatttattaagctgttcggaatggcaaaaatagataatttgctccaggaaatgctgttaggcggtgccccgtctgacgctccccatgcccaccaccctctgcatccacacctaatgcaggagcatatggggacaaacgtaatcgtggcaaataccatgcccacgcacctctccaacggacagatgtgcgaatggcctcgaccaagaggccaagccgctgcccccgaggcaccgcagcctgcgcccccaggcgggagcggatcggaaccttataagctgcttcccggtgctgtcgccactattgtgaggccattggaggcaatcccccagcctaccataacaaaacaggaggttatttga

SEQ ID NO: 439 - RNA, 1425 nt, synthetic construct
  misc_feature 1..1425: note = CDS (opt3) from Homo sapiens__NP_000448.3__HNF4A(1-474)(S87A_K106R_K108R_K126R_K 127R_S142A_S143A_S148A_T166A_S167A_K300R_K307R_K309R_S313A_ S378A_T429A_T432A_S436A_K458R_S461E)
  source 1..1425: mol_type = other RNA
atgagactgagcaagaccctcgtggacatggatatggccgactactccgctgcacttgatcccgcctatacaactctggagttcgaaaacgtccaggttttgacgatgggcaatgacacctctccttcagaggggacaaacttaaatgcgccaaacagtctgggagtgagcgctctatgcgccatctgtggtgatagggcaactggcaaacactacggggcctcctcttgcgacggatgtaagggctttttccggcgcgctgtacgtaaaaatcatatgtattcgtgccgattttcaagacaatgtgtggtcgatagggaccggcgcaaccagtgcagatactgtaggctcaagaaatgcttccgggcaggtatgcgccgagaagccgtgcagaatgagagagataggattagcacccggcgtgctgcctatgaagacagtgcgctgccgtccataaacgcacttctgcaggccgaggttttgtctcgccaaatcgctgcccccgtgagcgggattaatggagatatcagagcaaagaagattgcttccatcgccgacgtctgtgagtcaatgaaagaacagctcctggtgctggtagagtgggcgaagtacatacctgccttttgcgaactcccattagatgaccaggttgcactgcttagggctcacgccggcgagcatttgctgctaggcgctacaaaacggagtatggtgttcaaggacgtcctcctgcttgggaacgattatatcgtgccccgacactgtcctgagctggccgaaatgagccgcgtgtctattagaatcttggacgagctcgtcctgccatttcaggaattacaaattgatgacaatgagtacgcatacctgaaagccatcatattctttgatcccgacgctaggggactctccgatcctggtcggattcgcagacttagggcgcaggttcaggtgtcactggaagactatatcaacgatcgtcagtacgacagccggggccgattcggggagttgctactgctcctgccaacccttcaaagtattacttggcagatgatcgagcagatccaatttattaagctgttcggaatggcaaagatagataatttgctccaggaaatgctgttaggcggtgccccgtctgacgctccccatgcccaccaccctctgcatccacacctaatgcaggagcatatggggacaaacgtaatcgtggcaaataccatgcccacgcacctctccaacggacagatgtgcgaatggcctagaccaaggggccaagccgctgcccccgaggcaccgcagcctgcgcccccaggcgggagcggatcggaaccttataaactgcttcccggtgctgtcgccactattgtgcgcccattggaggcaatcccccagcctaccataacaaagcaggaggttatttga

SEQ ID NO: 440 - RNA, 1425 nt, synthetic construct
  misc_feature 1..1425: note = CDS (opt3) from Homo sapiens__NP_000448.3__HNF4A(1-474)(S87A_K106R_K108R_K126R_K 127R_S142A_S143A_S148A_T166A_S167A_S313A_S378A_T429A_T432A_ S436A_K447R_K458R_S461E_K470R)
  source 1..1425: mol_type = other RNA
atgagactgagcaagaccctcgtggacatggatatggccgactactccgctgcacttgatcccgcctatacaactctggagttcgaaaacgtccaggttttgacgatgggcaatgacacctctccttcagaggggacaaacttaaatgcgccaaacagtctgggagtgagcgctctatgcgccatctgtggtgatagggcaactggcaaacactacggggcctcctcttgcgacggatgtaagggctttttccggcgcgctgtacgtaaaaatcatatgtattcgtgccgattttcaagacaatgtgtggtcgatagggaccggcgcaaccagtgcagatactgtaggctcaagaaatgcttccgggcaggtatgcgccgagaagccgtgcagaatgagagagataggattagcacccggcgtgctgcctatgaagacagtgcgctgccgtccataaacgcacttctgcaggccgaggttttgtctcgccaaatcgctgcccccgtgagcgggattaatggagatatcagagcaaagaagattgcttccatcgccgacgtctgtgagtcaatgaaagaacagctcctggtgctggtagagtgggcgaagtacatacctgccttttgcgaactcccattagatgaccaggttgcactgcttagggctcacgccggcgagcatttgctgctaggcgctacaaaacggagtatggtgttcaaggacgtcctcctgcttgggaacgattatatcgtgccccgacactgtcctgagctggccgaaatgagccgcgtgtctattagaatcttggacgagctcgtcctgccatttcaggaattacaaattgatgacaatgagtacgcatacctgaaagccatcatattctttgatcccgacgctaagggactctccgatcctggtaagattaaaaggcttcgggcgcaggttcaggtgtcactggaagactatatcaacgatcgccagtacgacagcagaggcaggttcggggagttgctactgctcctgccaacccttcaaagtattacttggcagatgatcgagcagatccaatttattaagctgttcggaatggcaaaaatagataatttgctccaggaaatgctgttaggcggtgccccgtctgacgctccccatgcccaccaccctctgcatccacacctaatgcaggagcatatggggacaaacgtaatcgtggcaaataccatgcccacgcacctctccaacggacagatgtgcgaatggcctcgtccacggggccaagccgctgcccccgaggcaccgcagcctgcgcccccaggcgggagcggatcggaaccttatcgactgcttcccggtgctgtcgccactattgtgagaccattggaggcaatcccccagcctaccataacaaggcaggaggttatttga

SEQ ID NO: 441 - RNA, 1425 nt, synthetic construct
  misc_feature 1..1425: note = CDS (opt3) from Homo sapiens__NP_000448.3__HNF4A(1-474)(S87A_K106R_K108R_K126R_K 127R_S142A_S143A_S148A_T166A_S167A_K179R_K180R_K234R_K300R_ K307R_K309R_S313A_S378A_T429A_T432A_S436A_K447R_K458R_S461E _K470R)
  source 1..1425: mol_type = other RNA
atgagactgagcaagaccctcgtggacatggatatggccgactactccgctgcacttgatcccgcctatacaactctggagttcgaaaacgtccaggttttgacgatgggcaatgacacctctccttcagaggggacaaacttaaatgcgccaaacagtctgggagtgagcgctctatgcgccatctgtggtgatagggcaactggcaaacactacggggcctcctcttgcgacggatgtaagggctttttccggcgcgctgtacgtaaaaatcatatgtattcgtgccgattttcaagacaatgtgtggtcgatagggaccggcgcaaccagtgcagatactgtaggctcaagaaatgcttccgggcaggtatgcgccgagaagccgtgcagaatgagagagataggattagcacccggcgtgctgcctatgaagacagtgcgctgccgtccataaacgcacttctgcaggccgaggttttgtctcgccaaatcgctgcccccgtgagcgggattaatggagatatcagagcaaggcggattgcttccatcgccgacgtctgtgagtcaatgaaggaacagctcctggtgctggtagagtgggcgaagtacatacctgccttttgcgaactcccattagatgaccaggttgcactgcttcgagctcacgccggcgagcatttgctgctaggcgctacacgcagaagtatggtgttcaaagacgtcctcctgcttgggaacgattatatcgtgcccaggcactgtcctgagctggccgaaatgagccgggtgtctattcgcatcttggacgagctcgtcctgccatttcaggaattacaaattgatgacaatgagtacgcatacctgaaggccatcatattctttgatcccgacgctagaggactctccgatcctggtaggattcgtcggcttcgagcgcaggttcaggtgtcactggaagactatatcaacgatagacagtacgacagcaggggccgcttcggggagttgctactgctcctgccaacccttcaaagtattacttggcagatgatcgagcagatccaatttattaaactgttcggaatggcaaagatagataatttgctccaggaaatgctgttaggcggtgccccgtctgacgctccccatgcccaccaccctctgcatccacacctaatgcaggagcatatggggacaaacgtaatcgtggcaaataccatgcccacgcacctctccaacggacagatgtgcgaatggcctcggccaagaggccaagccgctgcccccgaggcaccgcagcctgcgcccccaggcgggagcggatcggaaccttataggctgcttcccggtgctgtcgccactattgtgcgcccattggaggcaatcccccagcctaccataacacgacaggaggttatttga

SEQ ID NO: 442 - RNA, 1425 nt, synthetic construct
  misc_feature 1..1425: note = CDS (opt3) from Homo sapiens__NP_000448.3__HNF4A(1-474)(S87A_S95A_S99A_K106R_K10 8R_K126R_K127R_S142A_S143A_S148A_T166A_S167A_S313A_S378A_T4 29A_T432A_S436A_K458R_S461E)
  source 1..1425: mol_type = other RNA
atgagactgagcaagaccctcgtggacatggatatggccgactactccgctgcacttgatcccgcctatacaactctggagttcgaaaacgtccaggttttgacgatgggcaatgacacctctccttcagaggggacaaacttaaatgcgccaaacagtctgggagtgagcgctctatgcgccatctgtggtgatagggcaactggcaaacactacggggcctcctcttgcgacggatgtaagggctttttccggcgcgctgtacgtaaaaatcatatgtatgcatgccgatttgccagacaatgtgtggtcgatagggaccggcgcaaccagtgcagatactgtaggctcaagaaatgcttccgggctggtatgcgccgagaagccgtgcagaatgagagagataggatttcgacccggcgtgcggcatatgaagactcagccctgccgagcataaacgcccttctgcaggccgaggttttgagtcgccaaatcgcagctcccgtgtccgggattaatggagatatcagagccaagaagattgcgtctatcgccgacgtctgtgagagcatgaaagaacagctcctggtgctggtagagtgggcaaagtacatacctgctttttgcgaactcccattagatgaccaggttgccctgcttagggctcacgccggcgagcatttgctgctaggcgcaacaaaacggtccatggtgttcaaggacgtcctcctgcttgggaacgattatatcgtgccccgacactgtcctgagctggccgaaatgtcacgcgtgagtattagaatcttggacgagctcgtcctgccatttcaggaattacaaattgatgacaatgagtacgcttacctgaaagcgatcatattctttgatcccgacgcaaagggactcagcgatcctggtaagattaaaaggcttcgggcccaggttcaggtgtctctggaagactatatcaacgatcgccagtacgactccagaggcaggttcggggagttgctactgctcctgccaacccttcaatcaattacttggcagatgatcgagcagatccaatttattaagctgttcggaatggctaaaatagataatttgctccaggaaatgctgttaggcggtgccccgagcgacgcaccccatgcccaccaccctctgcatccacacctaatgcaggagcatatggggacaaacgtaatcgtggctaataccatgcccacgcacctcagtaacggacagatgtgcgaatggcctcgtccacggggccaagccgcagcgcccgaggctccgcagcctgctcccccaggcgggtctggatccgaaccttataagctgcttcccggtgcagtcgccactattgtgcgaccattggaggctatcccccagcctaccataacaaaacaggaggttatttga

SEQ ID NO: 443 - RNA, 1425 nt, synthetic construct
  misc_feature 1..1425: note = CDS (opt3) from Homo sapiens__NP_000448.3__HNF4A(1-474)(S87A_K106R_K108R_K126R_K 127R_S138A_T139A_S142A_S143A_S148A_T166A_S167A_S313A_S378A_ T429A_T432A_S436A_K458R_S461E)
  source 1..1425: mol_type = other RNA
atgagactgagcaagaccctcgtggacatggatatggccgactactccgctgcacttgatcccgcctatacaactctggagttcgaaaacgtccaggttttgacgatgggcaatgacacctctccttcagaggggacaaacttaaatgcgccaaacagtctgggagtgagcgctctatgcgccatctgtggtgatagggcaactggcaaacactacggggcctcctcttgcgacggatgtaagggctttttccggcgcgctgtacgtaaaaatcatatgtattcgtgccgattttcaagacaatgtgtggtcgatagggaccggcgcaaccagtgcagatactgtaggctcaagaaatgcttccgggcaggtatgcgccgagaagccgtgcagaatgagagagataggattgctgcccggcgtgcggcatatgaagacagcgccctgccgagtataaacgcccttctgcaggccgaggttttgtcccgccaaatcgcagctcccgtgtctgggattaatggagatatcagagccaagaagattgcgagcatcgccgacgtctgtgagtccatgaaagaacagctcctggtgctggtagagtgggcaaagtacatacctgctttttgcgaactcccattagatgaccaggttgccctgcttagggctcacgccggcgagcatttgctgctaggcgcaaccaaacggtcaatggtgttcaaggacgtcctcctgcttgggaacgattatatcgtgccccgacactgtcctgagctggccgaaatgagtcgcgtgagcattagaatcttggacgagctcgtcctgccatttcaggaattacaaattgatgacaatgagtacgcttacctgaaagcgatcatattctttgatcccgacgcaaagggactctctgatcctggtaagattaaaaggcttcgggcccaggttcaggtgtccctggaagactatatcaacgatcgccagtacgactcaagaggcaggttcggggagttgctactgctcctgccaacacttcaaagcattacctggcagatgatcgagcagatccaatttattaagctgttcggaatggctaaaatagataatttgctccaggaaatgctgttaggcggtgccccgagtgacgcaccccatgcccaccaccctctgcatccacacctaatgcaggagcatatggggactaacgtaatcgtggctaatacaatgcccacccacctctctaacggacagatgtgcgaatggcctcgtccacggggccaagccgcagcgcccgaggctccgcagcctgctcccccaggcgggtccggaagcgaaccttataagctgcttcccggtgcagtcgccacgattgtgcgaccattggaggctatcccccagcctactataaccaaacaggaggttatttga

SEQ ID NO: 444 - RNA, 1425 nt, synthetic construct
  misc_feature 1..1425: note = CDS (opt3) from Homo sapiens__NP_000448.3__HNF4A(1-474)(S87A_S95A_S99A_K106R_K10 8R_K126R_K127R_S138A_T139A_S142A_S143A_S148A_T166A_S167A_S3 13A_S378A_T429A_T432A_S436A_K458R_S461E)
  source 1..1425: mol_type = other RNA
atgagactgagcaagaccctcgtggacatggatatggccgactactccgctgcacttgatcccgcctatacaactctggagttcgaaaacgtccaggttttgacgatgggcaatgacacctctccttcagaggggacaaacttaaatgcgccaaacagtctgggagtgagcgctctatgcgccatctgtggtgatagggcaactggcaaacactacggggcctcctcttgcgacggatgtaagggctttttccggcgcgctgtacgtaaaaatcatatgtatgcatgccgatttgccagacaatgtgtggtcgatagggaccggcgcaaccagtgcagatactgtaggctcaagaaatgcttccgggctggtatgcgccgagaagccgtgcagaatgagagagataggattgcggcacggcgtgccgcttatgaagactcggccctgccgtcaataaacgcacttctgcaggctgaggttttgagccgccaaatcgccgcgcccgtgagtgggattaatggagatatcagagccaagaagattgcatccatcgctgacgtctgtgagtctatgaaagaacagctcctggtgctggtagagtgggccaagtacatacctgctttttgcgaactcccattagatgaccaggttgccctgcttagggcacacgccggcgagcatttgctgctaggcgctaccaaacggagcatggtgttcaaggacgtcctcctgcttgggaacgattatatcgtgccccgacactgtcctgagctggcggaaatgtcccgcgtgtcaattagaatcttggacgagctcgtcctgccatttcaggaattacaaattgatgacaatgagtacgcatacctgaaagccatcatattctttgatcccgacgctaagggactcagtgatcctggtaagattaaaaggcttcgggcccaggttcaggtgagcctggaagactatatcaacgatcgccagtacgactctagaggcaggttcggggagttgctactgctcctgccaacacttcaatccattacctggcagatgatcgagcagatccaatttattaagctgttcggaatggcaaaaatagataatttgctccaggaaatgctgttaggcggtgccccgtcagacgctccccatgcccaccaccctctgcatccacacctaatgcaggagcatatggggactaacgtaatcgtggcaaatacaatgcccacccacctcagcaacggacagatgtgcgaatggcctcgtccacggggccaagcggctgcccccgaggcaccgcagcctgctcccccaggcgggagtggatctgaaccttataagctgcttcccggtgccgtcgccacgattgtgcgaccattggaggcaatcccccagcctactataaccaaacaggaggttatttga

SEQ ID NO: 445 - RNA, 1425 nt, synthetic construct
  misc_feature 1..1425: note = CDS (opt4) from Homo sapiens__NP_000448.3__HNF4A(1-474)
  source 1..1425: mol_type = other RNA
atgagactgagcaagaccctggtggacatggacatggccgactacagcgccgccctggaccccgcctacaccaccctggagttcgagaacgtgcaggtgctgaccatgggcaacgacaccagccccagcgagggcaccaacctgaacgcccccaacagcctgggcgtgagcgccctgtgcgccatctgcggcgacagagccaccggcaagcactacggcgccagcagctgcgacggctgcaagggcttcttcagaagaagcgtgagaaagaaccacatgtacagctgcagattcagcagacagtgcgtggtggacaaggacaagagaaaccagtgcagatactgcagactgaagaagtgcttcagagccggcatgaagaaggaggccgtgcagaacgagagagacagaatcagcaccagaagaagcagctacgaggacagcagcctgcccagcatcaacgccctgctgcaggccgaggtgctgagcagacagatcaccagccccgtgagcggcatcaacggcgacatcagagccaagaagatcgccagcatcgccgacgtgtgcgagagcatgaaggagcagctgctggtgctggtggagtgggccaagtacatccccgccttctgcgagctgcccctggacgaccaggtggccctgctgagagcccacgccggcgagcacctgctgctgggcgccaccaagagaagcatggtgttcaaggacgtgctgctgctgggcaacgactacatcgtgcccagacactgccccgagctggccgagatgagcagagtgagcatcagaatcctggacgagctggtgctgcccttccaggagctgcagatcgacgacaacgagtacgcctacctgaaggccatcatcttcttcgaccccgacgccaagggcctgagcgaccccggcaagatcaagagactgagaagccaggtgcaggtgagcctggaggactacatcaacgacagacagtacgacagcagaggcagattcggcgagctgctgctgctgctgcccaccctgcagagcatcacctggcagatgatcgagcagatccagttcatcaagctgttcggcatggccaagatcgacaacctgctgcaggagatgctgctgggcggcagccccagcgacgccccccacgcccaccaccccctgcacccccacctgatgcaggagcacatgggcaccaacgtgatcgtggccaacaccatgcccacccacctgagcaacggccagatgtgcgagtggcccagacccagaggccaggccgccacccccgagaccccccagcccagcccccccggcggcagcggcagcgagccctacaagctgctgcccggcgccgtggccaccatcgtgaagcccctgagcgccatcccccagcccaccatcaccaagcaggaggtgatctga

SEQ ID NO: 446 - RNA, 1425 nt, synthetic construct
  misc_feature 1..1425: note = CDS (opt4) from Homo sapiens__NP_000448.3__HNF4A(1-474)(S313A)
  source 1..1425: mol_type = other RNA
atgagactgagcaagaccctggtggacatggacatggccgactacagcgccgccctggaccccgcctacaccaccctggagttcgagaacgtgcaggtgctgaccatgggcaacgacaccagccccagcgagggcaccaacctgaacgcccccaacagcctgggcgtgagcgccctgtgcgccatctgcggcgacagagccaccggcaagcactacggcgccagcagctgcgacggctgcaagggcttcttcagaagaagcgtgagaaagaaccacatgtacagctgcagattcagcagacagtgcgtggtggacaaggacaagagaaaccagtgcagatactgcagactgaagaagtgcttcagagccggcatgaagaaggaggccgtgcagaacgagagagacagaatcagcaccagaagaagcagctacgaggacagcagcctgcccagcatcaacgccctgctgcaggccgaggtgctgagcagacagatcaccagccccgtgagcggcatcaacggcgacatcagagccaagaagatcgccagcatcgccgacgtgtgcgagagcatgaaggagcagctgctggtgctggtggagtgggccaagtacatccccgccttctgcgagctgcccctggacgaccaggtggccctgctgagagcccacgccggcgagcacctgctgctgggcgccaccaagagaagcatggtgttcaaggacgtgctgctgctgggcaacgactacatcgtgcccagacactgccccgagctggccgagatgagcagagtgagcatcagaatcctggacgagctggtgctgcccttccaggagctgcagatcgacgacaacgagtacgcctacctgaaggccatcatcttcttcgaccccgacgccaagggcctgagcgaccccggcaagatcaagagactgagagcccaggtgcaggtgagcctggaggactacatcaacgacagacagtacgacagcagaggcagattcggcgagctgctgctgctgctgcccaccctgcagagcatcacctggcagatgatcgagcagatccagttcatcaagctgttcggcatggccaagatcgacaacctgctgcaggagatgctgctgggcggcagccccagcgacgccccccacgcccaccaccccctgcacccccacctgatgcaggagcacatgggcaccaacgtgatcgtggccaacaccatgcccacccacctgagcaacggccagatgtgcgagtggcccagacccagaggccaggccgccacccccgagaccccccagcccagcccccccggcggcagcggcagcgagccctacaagctgctgcccggcgccgtggccaccatcgtgaagcccctgagcgccatcccccagcccaccatcaccaagcaggaggtgatctga

SEQ ID NO: 447 - RNA, 1425 nt, synthetic construct
  misc_feature 1..1425: note = CDS (opt4) from Homo sapiens__NP_000448.3__HNF4A(1-474)(S313E)
  source 1..1425: mol_type = other RNA
atgagactgagcaagaccctggtggacatggacatggccgactacagcgccgccctggaccccgcctacaccaccctggagttcgagaacgtgcaggtgctgaccatgggcaacgacaccagccccagcgagggcaccaacctgaacgcccccaacagcctgggcgtgagcgccctgtgcgccatctgcggcgacagagccaccggcaagcactacggcgccagcagctgcgacggctgcaagggcttcttcagaagaagcgtgagaaagaaccacatgtacagctgcagattcagcagacagtgcgtggtggacaaggacaagagaaaccagtgcagatactgcagactgaagaagtgcttcagagccggcatgaagaaggaggccgtgcagaacgagagagacagaatcagcaccagaagaagcagctacgaggacagcagcctgcccagcatcaacgccctgctgcaggccgaggtgctgagcagacagatcaccagccccgtgagcggcatcaacggcgacatcagagccaagaagatcgccagcatcgccgacgtgtgcgagagcatgaaggagcagctgctggtgctggtggagtgggccaagtacatccccgccttctgcgagctgcccctggacgaccaggtggccctgctgagagcccacgccggcgagcacctgctgctgggcgccaccaagagaagcatggtgttcaaggacgtgctgctgctgggcaacgactacatcgtgcccagacactgccccgagctggccgagatgagcagagtgagcatcagaatcctggacgagctggtgctgcccttccaggagctgcagatcgacgacaacgagtacgcctacctgaaggccatcatcttcttcgaccccgacgccaagggcctgagcgaccccggcaagatcaagagactgagagagcaggtgcaggtgagcctggaggactacatcaacgacagacagtacgacagcagaggcagattcggcgagctgctgctgctgctgcccaccctgcagagcatcacctggcagatgatcgagcagatccagttcatcaagctgttcggcatggccaagatcgacaacctgctgcaggagatgctgctgggcggcagccccagcgacgccccccacgcccaccaccccctgcacccccacctgatgcaggagcacatgggcaccaacgtgatcgtggccaacaccatgcccacccacctgagcaacggccagatgtgcgagtggcccagacccagaggccaggccgccacccccgagaccccccagcccagcccccccggcggcagcggcagcgagccctacaagctgctgcccggcgccgtggccaccatcgtgaagcccctgagcgccatcccccagcccaccatcaccaagcaggaggtgatctga

SEQ ID NO: 448 - RNA, 1425 nt, synthetic construct
  misc_feature 1..1425: note = CDS (opt4) from Homo sapiens__NP_000448.3__HNF4A(1-474)(S142A_S143A)
  source 1..1425: mol_type = other RNA
atgagactgagcaagaccctggtggacatggacatggccgactacagcgccgccctggaccccgcctacaccaccctggagttcgagaacgtgcaggtgctgaccatgggcaacgacaccagccccagcgagggcaccaacctgaacgcccccaacagcctgggcgtgagcgccctgtgcgccatctgcggcgacagagccaccggcaagcactacggcgccagcagctgcgacggctgcaagggcttcttcagaagaagcgtgagaaagaaccacatgtacagctgcagattcagcagacagtgcgtggtggacaaggacaagagaaaccagtgcagatactgcagactgaagaagtgcttcagagccggcatgaagaaggaggccgtgcagaacgagagagacagaatcagcaccagaagagccgcctacgaggacagcagcctgcccagcatcaacgccctgctgcaggccgaggtgctgagcagacagatcaccagccccgtgagcggcatcaacggcgacatcagagccaagaagatcgccagcatcgccgacgtgtgcgagagcatgaaggagcagctgctggtgctggtggagtgggccaagtacatccccgccttctgcgagctgcccctggacgaccaggtggccctgctgagagcccacgccggcgagcacctgctgctgggcgccaccaagagaagcatggtgttcaaggacgtgctgctgctgggcaacgactacatcgtgcccagacactgccccgagctggccgagatgagcagagtgagcatcagaatcctggacgagctggtgctgcccttccaggagctgcagatcgacgacaacgagtacgcctacctgaaggccatcatcttcttcgaccccgacgccaagggcctgagcgaccccggcaagatcaagagactgagaagccaggtgcaggtgagcctggaggactacatcaacgacagacagtacgacagcagaggcagattcggcgagctgctgctgctgctgcccaccctgcagagcatcacctggcagatgatcgagcagatccagttcatcaagctgttcggcatggccaagatcgacaacctgctgcaggagatgctgctgggcggcagccccagcgacgccccccacgcccaccaccccctgcacccccacctgatgcaggagcacatgggcaccaacgtgatcgtggccaacaccatgcccacccacctgagcaacggccagatgtgcgagtggcccagacccagaggccaggccgccacccccgagaccccccagcccagcccccccggcggcagcggcagcgagccctacaagctgctgcccggcgccgtggccaccatcgtgaagcccctgagcgccatcccccagcccaccatcaccaagcaggaggtgatctga

SEQ ID NO: 449 - RNA, 1425 nt, synthetic construct
  misc_feature 1..1425: note = CDS (opt4) from Homo sapiens__NP_000448.3__HNF4A(1-474)(S142E_S143E)
  source 1..1425: mol_type = other RNA
atgagactgagcaagaccctggtggacatggacatggccgactacagcgccgccctggaccccgcctacaccaccctggagttcgagaacgtgcaggtgctgaccatgggcaacgacaccagccccagcgagggcaccaacctgaacgcccccaacagcctgggcgtgagcgccctgtgcgccatctgcggcgacagagccaccggcaagcactacggcgccagcagctgcgacggctgcaagggcttcttcagaagaagcgtgagaaagaaccacatgtacagctgcagattcagcagacagtgcgtggtggacaaggacaagagaaaccagtgcagatactgcagactgaagaagtgcttcagagccggcatgaagaaggaggccgtgcagaacgagagagacagaatcagcaccagaagagaggagtacgaggacagcagcctgcccagcatcaacgccctgctgcaggccgaggtgctgagcagacagatcaccagccccgtgagcggcatcaacggcgacatcagagccaagaagatcgccagcatcgccgacgtgtgcgagagcatgaaggagcagctgctggtgctggtggagtgggccaagtacatccccgccttctgcgagctgcccctggacgaccaggtggccctgctgagagcccacgccggcgagcacctgctgctgggcgccaccaagagaagcatggtgttcaaggacgtgctgctgctgggcaacgactacatcgtgcccagacactgccccgagctggccgagatgagcagagtgagcatcagaatcctggacgagctggtgctgcccttccaggagctgcagatcgacgacaacgagtacgcctacctgaaggccatcatcttcttcgaccccgacgccaagggcctgagcgaccccggcaagatcaagagactgagaagccaggtgcaggtgagcctggaggactacatcaacgacagacagtacgacagcagaggcagattcggcgagctgctgctgctgctgcccaccctgcagagcatcacctggcagatgatcgagcagatccagttcatcaagctgttcggcatggccaagatcgacaacctgctgcaggagatgctgctgggcggcagccccagcgacgccccccacgcccaccaccccctgcacccccacctgatgcaggagcacatgggcaccaacgtgatcgtggccaacaccatgcccacccacctgagcaacggccagatgtgcgagtggcccagacccagaggccaggccgccacccccgagaccccccagcccagcccccccggcggcagcggcagcgagccctacaagctgctgcccggcgccgtggccaccatcgtgaagcccctgagcgccatcccccagcccaccatcaccaagcaggaggtgatctga

SEQ ID NO: 450 - RNA, 1425 nt, synthetic construct
  misc_feature 1..1425: note = CDS (opt4) from Homo sapiens__NP_000448.3__HNF4A(1-474)(S143A)
  source 1..1425: mol_type = other RNA
atgagactgagcaagaccctggtggacatggacatggccgactacagcgccgccctggaccccgcctacaccaccctggagttcgagaacgtgcaggtgctgaccatgggcaacgacaccagccccagcgagggcaccaacctgaacgcccccaacagcctgggcgtgagcgccctgtgcgccatctgcggcgacagagccaccggcaagcactacggcgccagcagctgcgacggctgcaagggcttcttcagaagaagcgtgagaaagaaccacatgtacagctgcagattcagcagacagtgcgtggtggacaaggacaagagaaaccagtgcagatactgcagactgaagaagtgcttcagagccggcatgaagaaggaggccgtgcagaacgagagagacagaatcagcaccagaagaagcgcctacgaggacagcagcctgcccagcatcaacgccctgctgcaggccgaggtgctgagcagacagatcaccagccccgtgagcggcatcaacggcgacatcagagccaagaagatcgccagcatcgccgacgtgtgcgagagcatgaaggagcagctgctggtgctggtggagtgggccaagtacatccccgccttctgcgagctgcccctggacgaccaggtggccctgctgagagcccacgccggcgagcacctgctgctgggcgccaccaagagaagcatggtgttcaaggacgtgctgctgctgggcaacgactacatcgtgcccagacactgccccgagctggccgagatgagcagagtgagcatcagaatcctggacgagctggtgctgcccttccaggagctgcagatcgacgacaacgagtacgcctacctgaaggccatcatcttcttcgaccccgacgccaagggcctgagcgaccccggcaagatcaagagactgagaagccaggtgcaggtgagcctggaggactacatcaacgacagacagtacgacagcagaggcagattcggcgagctgctgctgctgctgcccaccctgcagagcatcacctggcagatgatcgagcagatccagttcatcaagctgttcggcatggccaagatcgacaacctgctgcaggagatgctgctgggcggcagccccagcgacgccccccacgcccaccaccccctgcacccccacctgatgcaggagcacatgggcaccaacgtgatcgtggccaacaccatgcccacccacctgagcaacggccagatgtgcgagtggcccagacccagaggccaggccgccacccccgagaccccccagcccagcccccccggcggcagcggcagcgagccctacaagctgctgcccggcgccgtggccaccatcgtgaagcccctgagcgccatcccccagcccaccatcaccaagcaggaggtgatctga

SEQ ID NO: 451 - RNA, 1425 nt, synthetic construct
  misc_feature 1..1425: note = CDS (opt4) from Homo sapiens__NP_000448.3__HNF4A(1-474)(T166A)
  source 1..1425: mol_type = other RNA
atgagactgagcaagaccctggtggacatggacatggccgactacagcgccgccctggaccccgcctacaccaccctggagttcgagaacgtgcaggtgctgaccatgggcaacgacaccagccccagcgagggcaccaacctgaacgcccccaacagcctgggcgtgagcgccctgtgcgccatctgcggcgacagagccaccggcaagcactacggcgccagcagctgcgacggctgcaagggcttcttcagaagaagcgtgagaaagaaccacatgtacagctgcagattcagcagacagtgcgtggtggacaaggacaagagaaaccagtgcagatactgcagactgaagaagtgcttcagagccggcatgaagaaggaggccgtgcagaacgagagagacagaatcagcaccagaagaagcagctacgaggacagcagcctgcccagcatcaacgccctgctgcaggccgaggtgctgagcagacagatcgccagccccgtgagcggcatcaacggcgacatcagagccaagaagatcgccagcatcgccgacgtgtgcgagagcatgaaggagcagctgctggtgctggtggagtgggccaagtacatccccgccttctgcgagctgcccctggacgaccaggtggccctgctgagagcccacgccggcgagcacctgctgctgggcgccaccaagagaagcatggtgttcaaggacgtgctgctgctgggcaacgactacatcgtgcccagacactgccccgagctggccgagatgagcagagtgagcatcagaatcctggacgagctggtgctgcccttccaggagctgcagatcgacgacaacgagtacgcctacctgaaggccatcatcttcttcgaccccgacgccaagggcctgagcgaccccggcaagatcaagagactgagaagccaggtgcaggtgagcctggaggactacatcaacgacagacagtacgacagcagaggcagattcggcgagctgctgctgctgctgcccaccctgcagagcatcacctggcagatgatcgagcagatccagttcatcaagctgttcggcatggccaagatcgacaacctgctgcaggagatgctgctgggcggcagccccagcgacgccccccacgcccaccaccccctgcacccccacctgatgcaggagcacatgggcaccaacgtgatcgtggccaacaccatgcccacccacctgagcaacggccagatgtgcgagtggcccagacccagaggccaggccgccacccccgagaccccccagcccagcccccccggcggcagcggcagcgagccctacaagctgctgcccggcgccgtggccaccatcgtgaagcccctgagcgccatcccccagcccaccatcaccaagcaggaggtgatctga

SEQ ID NO: 452 - RNA, 1425 nt, synthetic construct
  misc_feature 1..1425: note = CDS (opt4) from Homo sapiens__NP_000448.3__HNF4A(1-474)(S167E)
  source 1..1425: mol_type = other RNA
atgagactgagcaagaccctggtggacatggacatggccgactacagcgccgccctggaccccgcctacaccaccctggagttcgagaacgtgcaggtgctgaccatgggcaacgacaccagccccagcgagggcaccaacctgaacgcccccaacagcctgggcgtgagcgccctgtgcgccatctgcggcgacagagccaccggcaagcactacggcgccagcagctgcgacggctgcaagggcttcttcagaagaagcgtgagaaagaaccacatgtacagctgcagattcagcagacagtgcgtggtggacaaggacaagagaaaccagtgcagatactgcagactgaagaagtgcttcagagccggcatgaagaaggaggccgtgcagaacgagagagacagaatcagcaccagaagaagcagctacgaggacagcagcctgcccagcatcaacgccctgctgcaggccgaggtgctgagcagacagatcaccgagcccgtgagcggcatcaacggcgacatcagagccaagaagatcgccagcatcgccgacgtgtgcgagagcatgaaggagcagctgctggtgctggtggagtgggccaagtacatccccgccttctgcgagctgcccctggacgaccaggtggccctgctgagagcccacgccggcgagcacctgctgctgggcgccaccaagagaagcatggtgttcaaggacgtgctgctgctgggcaacgactacatcgtgcccagacactgccccgagctggccgagatgagcagagtgagcatcagaatcctggacgagctggtgctgcccttccaggagctgcagatcgacgacaacgagtacgcctacctgaaggccatcatcttcttcgaccccgacgccaagggcctgagcgaccccggcaagatcaagagactgagaagccaggtgcaggtgagcctggaggactacatcaacgacagacagtacgacagcagaggcagattcggcgagctgctgctgctgctgcccaccctgcagagcatcacctggcagatgatcgagcagatccagttcatcaagctgttcggcatggccaagatcgacaacctgctgcaggagatgctgctgggcggcagccccagcgacgccccccacgcccaccaccccctgcacccccacctgatgcaggagcacatgggcaccaacgtgatcgtggccaacaccatgcccacccacctgagcaacggccagatgtgcgagtggcccagacccagaggccaggccgccacccccgagaccccccagcccagcccccccggcggcagcggcagcgagccctacaagctgctgcccggcgccgtggccaccatcgtgaagcccctgagcgccatcccccagcccaccatcaccaagcaggaggtgatctga

SEQ ID NO: 453 - RNA, 1425 nt, synthetic construct
  misc_feature 1..1425: note = CDS (opt4) from Homo sapiens__NP_000448.3__HNF4A(1-474)(S167A)
  source 1..1425: mol_type = other RNA
atgagactgagcaagaccctggtggacatggacatggccgactacagcgccgccctggaccccgcctacaccaccctggagttcgagaacgtgcaggtgctgaccatgggcaacgacaccagccccagcgagggcaccaacctgaacgcccccaacagcctgggcgtgagcgccctgtgcgccatctgcggcgacagagccaccggcaagcactacggcgccagcagctgcgacggctgcaagggcttcttcagaagaagcgtgagaaagaaccacatgtacagctgcagattcagcagacagtgcgtggtggacaaggacaagagaaaccagtgcagatactgcagactgaagaagtgcttcagagccggcatgaagaaggaggccgtgcagaacgagagagacagaatcagcaccagaagaagcagctacgaggacagcagcctgcccagcatcaacgccctgctgcaggccgaggtgctgagcagacagatcaccgcccccgtgagcggcatcaacggcgacatcagagccaagaagatcgccagcatcgccgacgtgtgcgagagcatgaaggagcagctgctggtgctggtggagtgggccaagtacatccccgccttctgcgagctgcccctggacgaccaggtggccctgctgagagcccacgccggcgagcacctgctgctgggcgccaccaagagaagcatggtgttcaaggacgtgctgctgctgggcaacgactacatcgtgcccagacactgccccgagctggccgagatgagcagagtgagcatcagaatcctggacgagctggtgctgcccttccaggagctgcagatcgacgacaacgagtacgcctacctgaaggccatcatcttcttcgaccccgacgccaagggcctgagcgaccccggcaagatcaagagactgagaagccaggtgcaggtgagcctggaggactacatcaacgacagacagtacgacagcagaggcagattcggcgagctgctgctgctgctgcccaccctgcagagcatcacctggcagatgatcgagcagatccagttcatcaagctgttcggcatggccaagatcgacaacctgctgcaggagatgctgctgggcggcagccccagcgacgccccccacgcccaccaccccctgcacccccacctgatgcaggagcacatgggcaccaacgtgatcgtggccaacaccatgcccacccacctgagcaacggccagatgtgcgagtggcccagacccagaggccaggccgccacccccgagaccccccagcccagcccccccggcggcagcggcagcgagccctacaagctgctgcccggcgccgtggccaccatcgtgaagcccctgagcgccatcccccagcccaccatcaccaagcaggaggtgatctga

SEQ ID NO: 454 - RNA, 1425 nt, synthetic construct
  misc_feature 1..1425: note = CDS (opt4) from Homo sapiens__NP_000448.3__HNF4A(1-474)(S167A_S378A_T429A_T432A_ S436A)
  source 1..1425: mol_type = other RNA
atgagactgagcaagaccctggtggacatggacatggccgactacagcgccgccctggaccccgcctacaccaccctggagttcgagaacgtgcaggtgctgaccatgggcaacgacaccagccccagcgagggcaccaacctgaacgcccccaacagcctgggcgtgagcgccctgtgcgccatctgcggcgacagagccaccggcaagcactacggcgccagcagctgcgacggctgcaagggcttcttcagaagaagcgtgagaaagaaccacatgtacagctgcagattcagcagacagtgcgtggtggacaaggacaagagaaaccagtgcagatactgcagactgaagaagtgcttcagagccggcatgaagaaggaggccgtgcagaacgagagagacagaatcagcaccagaagaagcagctacgaggacagcagcctgcccagcatcaacgccctgctgcaggccgaggtgctgagcagacagatcaccgcccccgtgagcggcatcaacggcgacatcagagccaagaagatcgccagcatcgccgacgtgtgcgagagcatgaaggagcagctgctggtgctggtggagtgggccaagtacatccccgccttctgcgagctgcccctggacgaccaggtggccctgctgagagcccacgccggcgagcacctgctgctgggcgccaccaagagaagcatggtgttcaaggacgtgctgctgctgggcaacgactacatcgtgcccagacactgccccgagctggccgagatgagcagagtgagcatcagaatcctggacgagctggtgctgcccttccaggagctgcagatcgacgacaacgagtacgcctacctgaaggccatcatcttcttcgaccccgacgccaagggcctgagcgaccccggcaagatcaagagactgagaagccaggtgcaggtgagcctggaggactacatcaacgacagacagtacgacagcagaggcagattcggcgagctgctgctgctgctgcccaccctgcagagcatcacctggcagatgatcgagcagatccagttcatcaagctgttcggcatggccaagatcgacaacctgctgcaggagatgctgctgggcggcgcccccagcgacgccccccacgcccaccaccccctgcacccccacctgatgcaggagcacatgggcaccaacgtgatcgtggccaacaccatgcccacccacctgagcaacggccagatgtgcgagtggcccagacccagaggccaggccgccgcccccgaggccccccagcccgccccccccggcggcagcggcagcgagccctacaagctgctgcccggcgccgtggccaccatcgtgaagcccctgagcgccatcccccagcccaccatcaccaagcaggaggtgatctga

SEQ ID NO: 455 - RNA, 1425 nt, synthetic construct
  misc_feature 1..1425: note = CDS (opt4) from Homo sapiens__NP_000448.3__HNF4A(1-474)(S167E_S378E_T429E_T432E_ S436E)
  source 1..1425: mol_type = other RNA
atgagactgagcaagaccctggtggacatggacatggccgactacagcgccgccctggaccccgcctacaccaccctggagttcgagaacgtgcaggtgctgaccatgggcaacgacaccagccccagcgagggcaccaacctgaacgcccccaacagcctgggcgtgagcgccctgtgcgccatctgcggcgacagagccaccggcaagcactacggcgccagcagctgcgacggctgcaagggcttcttcagaagaagcgtgagaaagaaccacatgtacagctgcagattcagcagacagtgcgtggtggacaaggacaagagaaaccagtgcagatactgcagactgaagaagtgcttcagagccggcatgaagaaggaggccgtgcagaacgagagagacagaatcagcaccagaagaagcagctacgaggacagcagcctgcccagcatcaacgccctgctgcaggccgaggtgctgagcagacagatcaccgagcccgtgagcggcatcaacggcgacatcagagccaagaagatcgccagcatcgccgacgtgtgcgagagcatgaaggagcagctgctggtgctggtggagtgggccaagtacatccccgccttctgcgagctgcccctggacgaccaggtggccctgctgagagcccacgccggcgagcacctgctgctgggcgccaccaagagaagcatggtgttcaaggacgtgctgctgctgggcaacgactacatcgtgcccagacactgccccgagctggccgagatgagcagagtgagcatcagaatcctggacgagctggtgctgcccttccaggagctgcagatcgacgacaacgagtacgcctacctgaaggccatcatcttcttcgaccccgacgccaagggcctgagcgaccccggcaagatcaagagactgagaagccaggtgcaggtgagcctggaggactacatcaacgacagacagtacgacagcagaggcagattcggcgagctgctgctgctgctgcccaccctgcagagcatcacctggcagatgatcgagcagatccagttcatcaagctgttcggcatggccaagatcgacaacctgctgcaggagatgctgctgggcggcgagcccagcgacgccccccacgcccaccaccccctgcacccccacctgatgcaggagcacatgggcaccaacgtgatcgtggccaacaccatgcccacccacctgagcaacggccagatgtgcgagtggcccagacccagaggccaggccgccgagcccgaggagccccagcccgagccccccggcggcagcggcagcgagccctacaagctgctgcccggcgccgtggccaccatcgtgaagcccctgagcgccatcccccagcccaccatcaccaagcaggaggtgatctga

SEQ ID NO: 456 - RNA, 1425 nt, synthetic construct
  misc_feature 1..1425: note = CDS (opt4) from Homo sapiens__NP_000448.3__HNF4A(1-474)(S87A)
  source 1..1425: mol_type = other RNA
atgagactgagcaagaccctggtggacatggacatggccgactacagcgccgccctggaccccgcctacaccaccctggagttcgagaacgtgcaggtgctgaccatgggcaacgacaccagccccagcgagggcaccaacctgaacgcccccaacagcctgggcgtgagcgccctgtgcgccatctgcggcgacagagccaccggcaagcactacggcgccagcagctgcgacggctgcaagggcttcttcagaagagccgtgagaaagaaccacatgtacagctgcagattcagcagacagtgcgtggtggacaaggacaagagaaaccagtgcagatactgcagactgaagaagtgcttcagagccggcatgaagaaggaggccgtgcagaacgagagagacagaatcagcaccagaagaagcagctacgaggacagcagcctgcccagcatcaacgccctgctgcaggccgaggtgctgagcagacagatcaccagccccgtgagcggcatcaacggcgacatcagagccaagaagatcgccagcatcgccgacgtgtgcgagagcatgaaggagcagctgctggtgctggtggagtgggccaagtacatccccgccttctgcgagctgcccctggacgaccaggtggccctgctgagagcccacgccggcgagcacctgctgctgggcgccaccaagagaagcatggtgttcaaggacgtgctgctgctgggcaacgactacatcgtgcccagacactgccccgagctggccgagatgagcagagtgagcatcagaatcctggacgagctggtgctgcccttccaggagctgcagatcgacgacaacgagtacgcctacctgaaggccatcatcttcttcgaccccgacgccaagggcctgagcgaccccggcaagatcaagagactgagaagccaggtgcaggtgagcctggaggactacatcaacgacagacagtacgacagcagaggcagattcggcgagctgctgctgctgctgcccaccctgcagagcatcacctggcagatgatcgagcagatccagttcatcaagctgttcggcatggccaagatcgacaacctgctgcaggagatgctgctgggcggcagccccagcgacgccccccacgcccaccaccccctgcacccccacctgatgcaggagcacatgggcaccaacgtgatcgtggccaacaccatgcccacccacctgagcaacggccagatgtgcgagtggcccagacccagaggccaggccgccacccccgagaccccccagcccagcccccccggcggcagcggcagcgagccctacaagctgctgcccggcgccgtggccaccatcgtgaagcccctgagcgccatcccccagcccaccatcaccaagcaggaggtgatctga

SEQ ID NO: 457 - RNA, 1425 nt, synthetic construct
  misc_feature 1..1425: note = CDS (opt4) from Homo sapiens__NP_000448.3__HNF4A(1-474)(S87E)
  source 1..1425: mol_type = other RNA
atgagactgagcaagaccctggtggacatggacatggccgactacagcgccgccctggaccccgcctacaccaccctggagttcgagaacgtgcaggtgctgaccatgggcaacgacaccagccccagcgagggcaccaacctgaacgcccccaacagcctgggcgtgagcgccctgtgcgccatctgcggcgacagagccaccggcaagcactacggcgccagcagctgcgacggctgcaagggcttcttcagaagagaggtgagaaagaaccacatgtacagctgcagattcagcagacagtgcgtggtggacaaggacaagagaaaccagtgcagatactgcagactgaagaagtgcttcagagccggcatgaagaaggaggccgtgcagaacgagagagacagaatcagcaccagaagaagcagctacgaggacagcagcctgcccagcatcaacgccctgctgcaggccgaggtgctgagcagacagatcaccagccccgtgagcggcatcaacggcgacatcagagccaagaagatcgccagcatcgccgacgtgtgcgagagcatgaaggagcagctgctggtgctggtggagtgggccaagtacatccccgccttctgcgagctgcccctggacgaccaggtggccctgctgagagcccacgccggcgagcacctgctgctgggcgccaccaagagaagcatggtgttcaaggacgtgctgctgctgggcaacgactacatcgtgcccagacactgccccgagctggccgagatgagcagagtgagcatcagaatcctggacgagctggtgctgcccttccaggagctgcagatcgacgacaacgagtacgcctacctgaaggccatcatcttcttcgaccccgacgccaagggcctgagcgaccccggcaagatcaagagactgagaagccaggtgcaggtgagcctggaggactacatcaacgacagacagtacgacagcagaggcagattcggcgagctgctgctgctgctgcccaccctgcagagcatcacctggcagatgatcgagcagatccagttcatcaagctgttcggcatggccaagatcgacaacctgctgcaggagatgctgctgggcggcagccccagcgacgccccccacgcccaccaccccctgcacccccacctgatgcaggagcacatgggcaccaacgtgatcgtggccaacaccatgcccacccacctgagcaacggccagatgtgcgagtggcccagacccagaggccaggccgccacccccgagaccccccagcccagcccccccggcggcagcggcagcgagccctacaagctgctgcccggcgccgtggccaccatcgtgaagcccctgagcgccatcccccagcccaccatcaccaagcaggaggtgatctga

SEQ ID NO: 458 - RNA, 1425 nt, synthetic construct
  misc_feature 1..1425: note = CDS (opt4) from Homo sapiens__NP_000448.3__HNF4A(1-474)(R2V)
  source 1..1425: mol_type = other RNA
atggtgctgagcaagaccctggtggacatggacatggccgactacagcgccgccctggaccccgcctacaccaccctggagttcgagaacgtgcaggtgctgaccatgggcaacgacaccagccccagcgagggcaccaacctgaacgcccccaacagcctgggcgtgagcgccctgtgcgccatctgcggcgacagagccaccggcaagcactacggcgccagcagctgcgacggctgcaagggcttcttcagaagaagcgtgagaaagaaccacatgtacagctgcagattcagcagacagtgcgtggtggacaaggacaagagaaaccagtgcagatactgcagactgaagaagtgcttcagagccggcatgaagaaggaggccgtgcagaacgagagagacagaatcagcaccagaagaagcagctacgaggacagcagcctgcccagcatcaacgccctgctgcaggccgaggtgctgagcagacagatcaccagccccgtgagcggcatcaacggcgacatcagagccaagaagatcgccagcatcgccgacgtgtgcgagagcatgaaggagcagctgctggtgctggtggagtgggccaagtacatccccgccttctgcgagctgcccctggacgaccaggtggccctgctgagagcccacgccggcgagcacctgctgctgggcgccaccaagagaagcatggtgttcaaggacgtgctgctgctgggcaacgactacatcgtgcccagacactgccccgagctggccgagatgagcagagtgagcatcagaatcctggacgagctggtgctgcccttccaggagctgcagatcgacgacaacgagtacgcctacctgaaggccatcatcttcttcgaccccgacgccaagggcctgagcgaccccggcaagatcaagagactgagaagccaggtgcaggtgagcctggaggactacatcaacgacagacagtacgacagcagaggcagattcggcgagctgctgctgctgctgcccaccctgcagagcatcacctggcagatgatcgagcagatccagttcatcaagctgttcggcatggccaagatcgacaacctgctgcaggagatgctgctgggcggcagccccagcgacgccccccacgcccaccaccccctgcacccccacctgatgcaggagcacatgggcaccaacgtgatcgtggccaacaccatgcccacccacctgagcaacggccagatgtgcgagtggcccagacccagaggccaggccgccacccccgagaccccccagcccagcccccccggcggcagcggcagcgagccctacaagctgctgcccggcgccgtggccaccatcgtgaagcccctgagcgccatcccccagcccaccatcaccaagcaggaggtgatctga

SEQ ID NO: 459 - RNA, 1425 nt, synthetic construct
  misc_feature 1..1425: note = CDS (opt4) from Homo sapiens__NP_000448.3__HNF4A(1-474)(R2V_K5V)
  source 1..1425: mol_type = other RNA
atggtgctgagcgtgaccctggtggacatggacatggccgactacagcgccgccctggaccccgcctacaccaccctggagttcgagaacgtgcaggtgctgaccatgggcaacgacaccagccccagcgagggcaccaacctgaacgcccccaacagcctgggcgtgagcgccctgtgcgccatctgcggcgacagagccaccggcaagcactacggcgccagcagctgcgacggctgcaagggcttcttcagaagaagcgtgagaaagaaccacatgtacagctgcagattcagcagacagtgcgtggtggacaaggacaagagaaaccagtgcagatactgcagactgaagaagtgcttcagagccggcatgaagaaggaggccgtgcagaacgagagagacagaatcagcaccagaagaagcagctacgaggacagcagcctgcccagcatcaacgccctgctgcaggccgaggtgctgagcagacagatcaccagccccgtgagcggcatcaacggcgacatcagagccaagaagatcgccagcatcgccgacgtgtgcgagagcatgaaggagcagctgctggtgctggtggagtgggccaagtacatccccgccttctgcgagctgcccctggacgaccaggtggccctgctgagagcccacgccggcgagcacctgctgctgggcgccaccaagagaagcatggtgttcaaggacgtgctgctgctgggcaacgactacatcgtgcccagacactgccccgagctggccgagatgagcagagtgagcatcagaatcctggacgagctggtgctgcccttccaggagctgcagatcgacgacaacgagtacgcctacctgaaggccatcatcttcttcgaccccgacgccaagggcctgagcgaccccggcaagatcaagagactgagaagccaggtgcaggtgagcctggaggactacatcaacgacagacagtacgacagcagaggcagattcggcgagctgctgctgctgctgcccaccctgcagagcatcacctggcagatgatcgagcagatccagttcatcaagctgttcggcatggccaagatcgacaacctgctgcaggagatgctgctgggcggcagccccagcgacgccccccacgcccaccaccccctgcacccccacctgatgcaggagcacatgggcaccaacgtgatcgtggccaacaccatgcccacccacctgagcaacggccagatgtgcgagtggcccagacccagaggccaggccgccacccccgagaccccccagcccagcccccccggcggcagcggcagcgagccctacaagctgctgcccggcgccgtggccaccatcgtgaagcccctgagcgccatcccccagcccaccatcaccaagcaggaggtgatctga

SEQ ID NO: 460 - RNA, 1425 nt, synthetic construct
  misc_feature 1..1425: note = CDS (opt4) from Homo sapiens__NP_000448.3__HNF4A(1-474)(K179R_K180R)
  source 1..1425: mol_type = other RNA
atgagactgagcaagaccctggtggacatggacatggccgactacagcgccgccctggaccccgcctacaccaccctggagttcgagaacgtgcaggtgctgaccatgggcaacgacaccagccccagcgagggcaccaacctgaacgcccccaacagcctgggcgtgagcgccctgtgcgccatctgcggcgacagagccaccggcaagcactacggcgccagcagctgcgacggctgcaagggcttcttcagaagaagcgtgagaaagaaccacatgtacagctgcagattcagcagacagtgcgtggtggacaaggacaagagaaaccagtgcagatactgcagactgaagaagtgcttcagagccggcatgaagaaggaggccgtgcagaacgagagagacagaatcagcaccagaagaagcagctacgaggacagcagcctgcccagcatcaacgccctgctgcaggccgaggtgctgagcagacagatcaccagccccgtgagcggcatcaacggcgacatcagagccagaagaatcgccagcatcgccgacgtgtgcgagagcatgaaggagcagctgctggtgctggtggagtgggccaagtacatccccgccttctgcgagctgcccctggacgaccaggtggccctgctgagagcccacgccggcgagcacctgctgctgggcgccaccaagagaagcatggtgttcaaggacgtgctgctgctgggcaacgactacatcgtgcccagacactgccccgagctggccgagatgagcagagtgagcatcagaatcctggacgagctggtgctgcccttccaggagctgcagatcgacgacaacgagtacgcctacctgaaggccatcatcttcttcgaccccgacgccaagggcctgagcgaccccggcaagatcaagagactgagaagccaggtgcaggtgagcctggaggactacatcaacgacagacagtacgacagcagaggcagattcggcgagctgctgctgctgctgcccaccctgcagagcatcacctggcagatgatcgagcagatccagttcatcaagctgttcggcatggccaagatcgacaacctgctgcaggagatgctgctgggcggcagccccagcgacgccccccacgcccaccaccccctgcacccccacctgatgcaggagcacatgggcaccaacgtgatcgtggccaacaccatgcccacccacctgagcaacggccagatgtgcgagtggcccagacccagaggccaggccgccacccccgagaccccccagcccagcccccccggcggcagcggcagcgagccctacaagctgctgcccggcgccgtggccaccatcgtgaagcccctgagcgccatcccccagcccaccatcaccaagcaggaggtgatctga

SEQ ID NO: 461 - RNA, 1425 nt, synthetic construct
  misc_feature 1..1425: note = CDS (opt4) from Homo sapiens__NP_000448.3__HNF4A(1-474)(K234R)
  source 1..1425: mol_type = other RNA
atgagactgagcaagaccctggtggacatggacatggccgactacagcgccgccctggaccccgcctacaccaccctggagttcgagaacgtgcaggtgctgaccatgggcaacgacaccagccccagcgagggcaccaacctgaacgcccccaacagcctgggcgtgagcgccctgtgcgccatctgcggcgacagagccaccggcaagcactacggcgccagcagctgcgacggctgcaagggcttcttcagaagaagcgtgagaaagaaccacatgtacagctgcagattcagcagacagtgcgtggtggacaaggacaagagaaaccagtgcagatactgcagactgaagaagtgcttcagagccggcatgaagaaggaggccgtgcagaacgagagagacagaatcagcaccagaagaagcagctacgaggacagcagcctgcccagcatcaacgccctgctgcaggccgaggtgctgagcagacagatcaccagccccgtgagcggcatcaacggcgacatcagagccaagaagatcgccagcatcgccgacgtgtgcgagagcatgaaggagcagctgctggtgctggtggagtgggccaagtacatccccgccttctgcgagctgcccctggacgaccaggtggccctgctgagagcccacgccggcgagcacctgctgctgggcgccaccagaagaagcatggtgttcaaggacgtgctgctgctgggcaacgactacatcgtgcccagacactgccccgagctggccgagatgagcagagtgagcatcagaatcctggacgagctggtgctgcccttccaggagctgcagatcgacgacaacgagtacgcctacctgaaggccatcatcttcttcgaccccgacgccaagggcctgagcgaccccggcaagatcaagagactgagaagccaggtgcaggtgagcctggaggactacatcaacgacagacagtacgacagcagaggcagattcggcgagctgctgctgctgctgcccaccctgcagagcatcacctggcagatgatcgagcagatccagttcatcaagctgttcggcatggccaagatcgacaacctgctgcaggagatgctgctgggcggcagccccagcgacgccccccacgcccaccaccccctgcacccccacctgatgcaggagcacatgggcaccaacgtgatcgtggccaacaccatgcccacccacctgagcaacggccagatgtgcgagtggcccagacccagaggccaggccgccacccccgagaccccccagcccagcccccccggcggcagcggcagcgagccctacaagctgctgcccggcgccgtggccaccatcgtgaagcccctgagcgccatcccccagcccaccatcaccaagcaggaggtgatctga

SEQ ID NO: 462 - RNA, 1425 nt, synthetic construct
  misc_feature 1..1425: note = CDS (opt4) from Homo sapiens__NP_000448.3__HNF4A(1-474)(K300R)
  source 1..1425: mol_type = other RNA
atgagactgagcaagaccctggtggacatggacatggccgactacagcgccgccctggaccccgcctacaccaccctggagttcgagaacgtgcaggtgctgaccatgggcaacgacaccagccccagcgagggcaccaacctgaacgcccccaacagcctgggcgtgagcgccctgtgcgccatctgcggcgacagagccaccggcaagcactacggcgccagcagctgcgacggctgcaagggcttcttcagaagaagcgtgagaaagaaccacatgtacagctgcagattcagcagacagtgcgtggtggacaaggacaagagaaaccagtgcagatactgcagactgaagaagtgcttcagagccggcatgaagaaggaggccgtgcagaacgagagagacagaatcagcaccagaagaagcagctacgaggacagcagcctgcccagcatcaacgccctgctgcaggccgaggtgctgagcagacagatcaccagccccgtgagcggcatcaacggcgacatcagagccaagaagatcgccagcatcgccgacgtgtgcgagagcatgaaggagcagctgctggtgctggtggagtgggccaagtacatccccgccttctgcgagctgcccctggacgaccaggtggccctgctgagagcccacgccggcgagcacctgctgctgggcgccaccaagagaagcatggtgttcaaggacgtgctgctgctgggcaacgactacatcgtgcccagacactgccccgagctggccgagatgagcagagtgagcatcagaatcctggacgagctggtgctgcccttccaggagctgcagatcgacgacaacgagtacgcctacctgaaggccatcatcttcttcgaccccgacgccagaggcctgagcgaccccggcaagatcaagagactgagaagccaggtgcaggtgagcctggaggactacatcaacgacagacagtacgacagcagaggcagattcggcgagctgctgctgctgctgcccaccctgcagagcatcacctggcagatgatcgagcagatccagttcatcaagctgttcggcatggccaagatcgacaacctgctgcaggagatgctgctgggcggcagccccagcgacgccccccacgcccaccaccccctgcacccccacctgatgcaggagcacatgggcaccaacgtgatcgtggccaacaccatgcccacccacctgagcaacggccagatgtgcgagtggcccagacccagaggccaggccgccacccccgagaccccccagcccagcccccccggcggcagcggcagcgagccctacaagctgctgcccggcgccgtggccaccatcgtgaagcccctgagcgccatcccccagcccaccatcaccaagcaggaggtgatctga

SEQ ID NO: 463 - RNA, 1425 nt, synthetic construct
  misc_feature 1..1425: note = CDS (opt4) from Homo sapiens__NP_000448.3__HNF4A(1-474)(K300R_K307R_K309R)
  source 1..1425: mol_type = other RNA
atgagactgagcaagaccctggtggacatggacatggccgactacagcgccgccctggaccccgcctacaccaccctggagttcgagaacgtgcaggtgctgaccatgggcaacgacaccagccccagcgagggcaccaacctgaacgcccccaacagcctgggcgtgagcgccctgtgcgccatctgcggcgacagagccaccggcaagcactacggcgccagcagctgcgacggctgcaagggcttcttcagaagaagcgtgagaaagaaccacatgtacagctgcagattcagcagacagtgcgtggtggacaaggacaagagaaaccagtgcagatactgcagactgaagaagtgcttcagagccggcatgaagaaggaggccgtgcagaacgagagagacagaatcagcaccagaagaagcagctacgaggacagcagcctgcccagcatcaacgccctgctgcaggccgaggtgctgagcagacagatcaccagccccgtgagcggcatcaacggcgacatcagagccaagaagatcgccagcatcgccgacgtgtgcgagagcatgaaggagcagctgctggtgctggtggagtgggccaagtacatccccgccttctgcgagctgcccctggacgaccaggtggccctgctgagagcccacgccggcgagcacctgctgctgggcgccaccaagagaagcatggtgttcaaggacgtgctgctgctgggcaacgactacatcgtgcccagacactgccccgagctggccgagatgagcagagtgagcatcagaatcctggacgagctggtgctgcccttccaggagctgcagatcgacgacaacgagtacgcctacctgaaggccatcatcttcttcgaccccgacgccagaggcctgagcgaccccggcagaatcagaagactgagaagccaggtgcaggtgagcctggaggactacatcaacgacagacagtacgacagcagaggcagattcggcgagctgctgctgctgctgcccaccctgcagagcatcacctggcagatgatcgagcagatccagttcatcaagctgttcggcatggccaagatcgacaacctgctgcaggagatgctgctgggcggcagccccagcgacgccccccacgcccaccaccccctgcacccccacctgatgcaggagcacatgggcaccaacgtgatcgtggccaacaccatgcccacccacctgagcaacggccagatgtgcgagtggcccagacccagaggccaggccgccacccccgagaccccccagcccagcccccccggcggcagcggcagcgagccctacaagctgctgcccggcgccgtggccaccatcgtgaagcccctgagcgccatcccccagcccaccatcaccaagcaggaggtgatctga

SEQ ID NO: 464 - RNA, 1425 nt, synthetic construct
  misc_feature 1..1425: note = CDS (opt4) from Homo sapiens__NP_000448.3__HNF4A(1-474)(K447R_K470R)
  source 1..1425: mol_type = other RNA
atgagactgagcaagaccctggtggacatggacatggccgactacagcgccgccctggaccccgcctacaccaccctggagttcgagaacgtgcaggtgctgaccatgggcaacgacaccagccccagcgagggcaccaacctgaacgcccccaacagcctgggcgtgagcgccctgtgcgccatctgcggcgacagagccaccggcaagcactacggcgccagcagctgcgacggctgcaagggcttcttcagaagaagcgtgagaaagaaccacatgtacagctgcagattcagcagacagtgcgtggtggacaaggacaagagaaaccagtgcagatactgcagactgaagaagtgcttcagagccggcatgaagaaggaggccgtgcagaacgagagagacagaatcagcaccagaagaagcagctacgaggacagcagcctgcccagcatcaacgccctgctgcaggccgaggtgctgagcagacagatcaccagccccgtgagcggcatcaacggcgacatcagagccaagaagatcgccagcatcgccgacgtgtgcgagagcatgaaggagcagctgctggtgctggtggagtgggccaagtacatccccgccttctgcgagctgcccctggacgaccaggtggccctgctgagagcccacgccggcgagcacctgctgctgggcgccaccaagagaagcatggtgttcaaggacgtgctgctgctgggcaacgactacatcgtgcccagacactgccccgagctggccgagatgagcagagtgagcatcagaatcctggacgagctggtgctgcccttccaggagctgcagatcgacgacaacgagtacgcctacctgaaggccatcatcttcttcgaccccgacgccaagggcctgagcgaccccggcaagatcaagagactgagaagccaggtgcaggtgagcctggaggactacatcaacgacagacagtacgacagcagaggcagattcggcgagctgctgctgctgctgcccaccctgcagagcatcacctggcagatgatcgagcagatccagttcatcaagctgttcggcatggccaagatcgacaacctgctgcaggagatgctgctgggcggcagccccagcgacgccccccacgcccaccaccccctgcacccccacctgatgcaggagcacatgggcaccaacgtgatcgtggccaacaccatgcccacccacctgagcaacggccagatgtgcgagtggcccagacccagaggccaggccgccacccccgagaccccccagcccagcccccccggcggcagcggcagcgagccctacagactgctgcccggcgccgtggccaccatcgtgaagcccctgagcgccatcccccagcccaccatcaccagacaggaggtgatctga

SEQ ID NO: 465 - RNA, 1425 nt, synthetic construct
  misc_feature 1..1425: note = CDS (opt4) from Homo sapiens__NP_000448.3__HNF4A(1-474)(K458R)
  source 1..1425: mol_type = other RNA
atgagactgagcaagaccctggtggacatggacatggccgactacagcgccgccctggaccccgcctacaccaccctggagttcgagaacgtgcaggtgctgaccatgggcaacgacaccagccccagcgagggcaccaacctgaacgcccccaacagcctgggcgtgagcgccctgtgcgccatctgcggcgacagagccaccggcaagcactacggcgccagcagctgcgacggctgcaagggcttcttcagaagaagcgtgagaaagaaccacatgtacagctgcagattcagcagacagtgcgtggtggacaaggacaagagaaaccagtgcagatactgcagactgaagaagtgcttcagagccggcatgaagaaggaggccgtgcagaacgagagagacagaatcagcaccagaagaagcagctacgaggacagcagcctgcccagcatcaacgccctgctgcaggccgaggtgctgagcagacagatcaccagccccgtgagcggcatcaacggcgacatcagagccaagaagatcgccagcatcgccgacgtgtgcgagagcatgaaggagcagctgctggtgctggtggagtgggccaagtacatccccgccttctgcgagctgcccctggacgaccaggtggccctgctgagagcccacgccggcgagcacctgctgctgggcgccaccaagagaagcatggtgttcaaggacgtgctgctgctgggcaacgactacatcgtgcccagacactgccccgagctggccgagatgagcagagtgagcatcagaatcctggacgagctggtgctgcccttccaggagctgcagatcgacgacaacgagtacgcctacctgaaggccatcatcttcttcgaccccgacgccaagggcctgagcgaccccggcaagatcaagagactgagaagccaggtgcaggtgagcctggaggactacatcaacgacagacagtacgacagcagaggcagattcggcgagctgctgctgctgctgcccaccctgcagagcatcacctggcagatgatcgagcagatccagttcatcaagctgttcggcatggccaagatcgacaacctgctgcaggagatgctgctgggcggcagccccagcgacgccccccacgcccaccaccccctgcacccccacctgatgcaggagcacatgggcaccaacgtgatcgtggccaacaccatgcccacccacctgagcaacggccagatgtgcgagtggcccagacccagaggccaggccgccacccccgagaccccccagcccagcccccccggcggcagcggcagcgagccctacaagctgctgcccggcgccgtggccaccatcgtgagacccctgagcgccatcccccagcccaccatcaccaagcaggaggtgatctga

SEQ ID NO: 466 - RNA, 1425 nt, synthetic construct
  misc_feature 1..1425: note = CDS (opt4) from Homo sapiens__NP_000448.3__HNF4A(1-474)(K106R_K108R_K126R_K127R)
  source 1..1425: mol_type = other RNA
atgagactgagcaagaccctggtggacatggacatggccgactacagcgccgccctggaccccgcctacaccaccctggagttcgagaacgtgcaggtgctgaccatgggcaacgacaccagccccagcgagggcaccaacctgaacgcccccaacagcctgggcgtgagcgccctgtgcgccatctgcggcgacagagccaccggcaagcactacggcgccagcagctgcgacggctgcaagggcttcttcagaagaagcgtgagaaagaaccacatgtacagctgcagattcagcagacagtgcgtggtggacagagacagaagaaaccagtgcagatactgcagactgaagaagtgcttcagagccggcatgagaagagaggccgtgcagaacgagagagacagaatcagcaccagaagaagcagctacgaggacagcagcctgcccagcatcaacgccctgctgcaggccgaggtgctgagcagacagatcaccagccccgtgagcggcatcaacggcgacatcagagccaagaagatcgccagcatcgccgacgtgtgcgagagcatgaaggagcagctgctggtgctggtggagtgggccaagtacatccccgccttctgcgagctgcccctggacgaccaggtggccctgctgagagcccacgccggcgagcacctgctgctgggcgccaccaagagaagcatggtgttcaaggacgtgctgctgctgggcaacgactacatcgtgcccagacactgccccgagctggccgagatgagcagagtgagcatcagaatcctggacgagctggtgctgcccttccaggagctgcagatcgacgacaacgagtacgcctacctgaaggccatcatcttcttcgaccccgacgccaagggcctgagcgaccccggcaagatcaagagactgagaagccaggtgcaggtgagcctggaggactacatcaacgacagacagtacgacagcagaggcagattcggcgagctgctgctgctgctgcccaccctgcagagcatcacctggcagatgatcgagcagatccagttcatcaagctgttcggcatggccaagatcgacaacctgctgcaggagatgctgctgggcggcagccccagcgacgccccccacgcccaccaccccctgcacccccacctgatgcaggagcacatgggcaccaacgtgatcgtggccaacaccatgcccacccacctgagcaacggccagatgtgcgagtggcccagacccagaggccaggccgccacccccgagaccccccagcccagcccccccggcggcagcggcagcgagccctacaagctgctgcccggcgccgtggccaccatcgtgaagcccctgagcgccatcccccagcccaccatcaccaagcaggaggtgatctga

SEQ ID NO: 467 - RNA, 1425 nt, synthetic construct
  misc_feature 1..1425: note = CDS (opt4) from Homo sapiens__NP_000448.3__HNF4A(1-474)(E285Q)
  source 1..1425: mol_type = other RNA
atgagactgagcaagaccctggtggacatggacatggccgactacagcgccgccctggaccccgcctacaccaccctggagttcgagaacgtgcaggtgctgaccatgggcaacgacaccagccccagcgagggcaccaacctgaacgcccccaacagcctgggcgtgagcgccctgtgcgccatctgcggcgacagagccaccggcaagcactacggcgccagcagctgcgacggctgcaagggcttcttcagaagaagcgtgagaaagaaccacatgtacagctgcagattcagcagacagtgcgtggtggacaaggacaagagaaaccagtgcagatactgcagactgaagaagtgcttcagagccggcatgaagaaggaggccgtgcagaacgagagagacagaatcagcaccagaagaagcagctacgaggacagcagcctgcccagcatcaacgccctgctgcaggccgaggtgctgagcagacagatcaccagccccgtgagcggcatcaacggcgacatcagagccaagaagatcgccagcatcgccgacgtgtgcgagagcatgaaggagcagctgctggtgctggtggagtgggccaagtacatccccgccttctgcgagctgcccctggacgaccaggtggccctgctgagagcccacgccggcgagcacctgctgctgggcgccaccaagagaagcatggtgttcaaggacgtgctgctgctgggcaacgactacatcgtgcccagacactgccccgagctggccgagatgagcagagtgagcatcagaatcctggacgagctggtgctgcccttccaggagctgcagatcgacgacaaccagtacgcctacctgaaggccatcatcttcttcgaccccgacgccaagggcctgagcgaccccggcaagatcaagagactgagaagccaggtgcaggtgagcctggaggactacatcaacgacagacagtacgacagcagaggcagattcggcgagctgctgctgctgctgcccaccctgcagagcatcacctggcagatgatcgagcagatccagttcatcaagctgttcggcatggccaagatcgacaacctgctgcaggagatgctgctgggcggcagccccagcgacgccccccacgcccaccaccccctgcacccccacctgatgcaggagcacatgggcaccaacgtgatcgtggccaacaccatgcccacccacctgagcaacggccagatgtgcgagtggcccagacccagaggccaggccgccacccccgagaccccccagcccagcccccccggcggcagcggcagcgagccctacaagctgctgcccggcgccgtggccaccatcgtgaagcccctgagcgccatcccccagcccaccatcaccaagcaggaggtgatctga

SEQ ID NO: 468 - RNA, 1425 nt, synthetic construct
  misc_feature 1..1425: note = CDS (opt4) from Homo sapiens__NP_000448.3__HNF4A(1-474)(T166E)
  source 1..1425: mol_type = other RNA
atgagactgagcaagaccctggtggacatggacatggccgactacagcgccgccctggaccccgcctacaccaccctggagttcgagaacgtgcaggtgctgaccatgggcaacgacaccagccccagcgagggcaccaacctgaacgcccccaacagcctgggcgtgagcgccctgtgcgccatctgcggcgacagagccaccggcaagcactacggcgccagcagctgcgacggctgcaagggcttcttcagaagaagcgtgagaaagaaccacatgtacagctgcagattcagcagacagtgcgtggtggacaaggacaagagaaaccagtgcagatactgcagactgaagaagtgcttcagagccggcatgaagaaggaggccgtgcagaacgagagagacagaatcagcaccagaagaagcagctacgaggacagcagcctgcccagcatcaacgccctgctgcaggccgaggtgctgagcagacagatcgagagccccgtgagcggcatcaacggcgacatcagagccaagaagatcgccagcatcgccgacgtgtgcgagagcatgaaggagcagctgctggtgctggtggagtgggccaagtacatccccgccttctgcgagctgcccctggacgaccaggtggccctgctgagagcccacgccggcgagcacctgctgctgggcgccaccaagagaagcatggtgttcaaggacgtgctgctgctgggcaacgactacatcgtgcccagacactgccccgagctggccgagatgagcagagtgagcatcagaatcctggacgagctggtgctgcccttccaggagctgcagatcgacgacaacgagtacgcctacctgaaggccatcatcttcttcgaccccgacgccaagggcctgagcgaccccggcaagatcaagagactgagaagccaggtgcaggtgagcctggaggactacatcaacgacagacagtacgacagcagaggcagattcggcgagctgctgctgctgctgcccaccctgcagagcatcacctggcagatgatcgagcagatccagttcatcaagctgttcggcatggccaagatcgacaacctgctgcaggagatgctgctgggcggcagccccagcgacgccccccacgcccaccaccccctgcacccccacctgatgcaggagcacatgggcaccaacgtgatcgtggccaacaccatgcccacccacctgagcaacggccagatgtgcgagtggcccagacccagaggccaggccgccacccccgagaccccccagcccagcccccccggcggcagcggcagcgagccctacaagctgctgcccggcgccgtggccaccatcgtgaagcccctgagcgccatcccccagcccaccatcaccaagcaggaggtgatctga

SEQ ID NO: 469 - RNA, 1425 nt, synthetic construct
  misc_feature 1..1425: note = CDS (opt4) from Homo sapiens__NP_000448.3__HNF4A(1-474)(S148A)
  source 1..1425: mol_type = other RNA
atgagactgagcaagaccctggtggacatggacatggccgactacagcgccgccctggaccccgcctacaccaccctggagttcgagaacgtgcaggtgctgaccatgggcaacgacaccagccccagcgagggcaccaacctgaacgcccccaacagcctgggcgtgagcgccctgtgcgccatctgcggcgacagagccaccggcaagcactacggcgccagcagctgcgacggctgcaagggcttcttcagaagaagcgtgagaaagaaccacatgtacagctgcagattcagcagacagtgcgtggtggacaaggacaagagaaaccagtgcagatactgcagactgaagaagtgcttcagagccggcatgaagaaggaggccgtgcagaacgagagagacagaatcagcaccagaagaagcagctacgaggacagcgccctgcccagcatcaacgccctgctgcaggccgaggtgctgagcagacagatcaccagccccgtgagcggcatcaacggcgacatcagagccaagaagatcgccagcatcgccgacgtgtgcgagagcatgaaggagcagctgctggtgctggtggagtgggccaagtacatccccgccttctgcgagctgcccctggacgaccaggtggccctgctgagagcccacgccggcgagcacctgctgctgggcgccaccaagagaagcatggtgttcaaggacgtgctgctgctgggcaacgactacatcgtgcccagacactgccccgagctggccgagatgagcagagtgagcatcagaatcctggacgagctggtgctgcccttccaggagctgcagatcgacgacaacgagtacgcctacctgaaggccatcatcttcttcgaccccgacgccaagggcctgagcgaccccggcaagatcaagagactgagaagccaggtgcaggtgagcctggaggactacatcaacgacagacagtacgacagcagaggcagattcggcgagctgctgctgctgctgcccaccctgcagagcatcacctggcagatgatcgagcagatccagttcatcaagctgttcggcatggccaagatcgacaacctgctgcaggagatgctgctgggcggcagccccagcgacgccccccacgcccaccaccccctgcacccccacctgatgcaggagcacatgggcaccaacgtgatcgtggccaacaccatgcccacccacctgagcaacggccagatgtgcgagtggcccagacccagaggccaggccgccacccccgagaccccccagcccagcccccccggcggcagcggcagcgagccctacaagctgctgcccggcgccgtggccaccatcgtgaagcccctgagcgccatcccccagcccaccatcaccaagcaggaggtgatctga

SEQ ID NO: 470 - RNA, 1425 nt, synthetic construct
  misc_feature 1..1425: note = CDS (opt4) from Homo sapiens__NP_000448.3__HNF4A(1-474)(S148E)
  source 1..1425: mol_type = other RNA
atgagactgagcaagaccctggtggacatggacatggccgactacagcgccgccctggaccccgcctacaccaccctggagttcgagaacgtgcaggtgctgaccatgggcaacgacaccagccccagcgagggcaccaacctgaacgcccccaacagcctgggcgtgagcgccctgtgcgccatctgcggcgacagagccaccggcaagcactacggcgccagcagctgcgacggctgcaagggcttcttcagaagaagcgtgagaaagaaccacatgtacagctgcagattcagcagacagtgcgtggtggacaaggacaagagaaaccagtgcagatactgcagactgaagaagtgcttcagagccggcatgaagaaggaggccgtgcagaacgagagagacagaatcagcaccagaagaagcagctacgaggacagcgagctgcccagcatcaacgccctgctgcaggccgaggtgctgagcagacagatcaccagccccgtgagcggcatcaacggcgacatcagagccaagaagatcgccagcatcgccgacgtgtgcgagagcatgaaggagcagctgctggtgctggtggagtgggccaagtacatccccgccttctgcgagctgcccctggacgaccaggtggccctgctgagagcccacgccggcgagcacctgctgctgggcgccaccaagagaagcatggtgttcaaggacgtgctgctgctgggcaacgactacatcgtgcccagacactgccccgagctggccgagatgagcagagtgagcatcagaatcctggacgagctggtgctgcccttccaggagctgcagatcgacgacaacgagtacgcctacctgaaggccatcatcttcttcgaccccgacgccaagggcctgagcgaccccggcaagatcaagagactgagaagccaggtgcaggtgagcctggaggactacatcaacgacagacagtacgacagcagaggcagattcggcgagctgctgctgctgctgcccaccctgcagagcatcacctggcagatgatcgagcagatccagttcatcaagctgttcggcatggccaagatcgacaacctgctgcaggagatgctgctgggcggcagccccagcgacgccccccacgcccaccaccccctgcacccccacctgatgcaggagcacatgggcaccaacgtgatcgtggccaacaccatgcccacccacctgagcaacggccagatgtgcgagtggcccagacccagaggccaggccgccacccccgagaccccccagcccagcccccccggcggcagcggcagcgagccctacaagctgctgcccggcgccgtggccaccatcgtgaagcccctgagcgccatcccccagcccaccatcaccaagcaggaggtgatctga

SEQ ID NO: 471 - RNA, 1425 nt, synthetic construct
  misc_feature 1..1425: note = CDS (opt4) from Homo sapiens__NP_000448.3__HNF4A(1-474)(S183A)
  source 1..1425: mol_type = other RNA
atgagactgagcaagaccctggtggacatggacatggccgactacagcgccgccctggaccccgcctacaccaccctggagttcgagaacgtgcaggtgctgaccatgggcaacgacaccagccccagcgagggcaccaacctgaacgcccccaacagcctgggcgtgagcgccctgtgcgccatctgcggcgacagagccaccggcaagcactacggcgccagcagctgcgacggctgcaagggcttcttcagaagaagcgtgagaaagaaccacatgtacagctgcagattcagcagacagtgcgtggtggacaaggacaagagaaaccagtgcagatactgcagactgaagaagtgcttcagagccggcatgaagaaggaggccgtgcagaacgagagagacagaatcagcaccagaagaagcagctacgaggacagcagcctgcccagcatcaacgccctgctgcaggccgaggtgctgagcagacagatcaccagccccgtgagcggcatcaacggcgacatcagagccaagaagatcgccgccatcgccgacgtgtgcgagagcatgaaggagcagctgctggtgctggtggagtgggccaagtacatccccgccttctgcgagctgcccctggacgaccaggtggccctgctgagagcccacgccggcgagcacctgctgctgggcgccaccaagagaagcatggtgttcaaggacgtgctgctgctgggcaacgactacatcgtgcccagacactgccccgagctggccgagatgagcagagtgagcatcagaatcctggacgagctggtgctgcccttccaggagctgcagatcgacgacaacgagtacgcctacctgaaggccatcatcttcttcgaccccgacgccaagggcctgagcgaccccggcaagatcaagagactgagaagccaggtgcaggtgagcctggaggactacatcaacgacagacagtacgacagcagaggcagattcggcgagctgctgctgctgctgcccaccctgcagagcatcacctggcagatgatcgagcagatccagttcatcaagctgttcggcatggccaagatcgacaacctgctgcaggagatgctgctgggcggcagccccagcgacgccccccacgcccaccaccccctgcacccccacctgatgcaggagcacatgggcaccaacgtgatcgtggccaacaccatgcccacccacctgagcaacggccagatgtgcgagtggcccagacccagaggccaggccgccacccccgagaccccccagcccagcccccccggcggcagcggcagcgagccctacaagctgctgcccggcgccgtggccaccatcgtgaagcccctgagcgccatcccccagcccaccatcaccaagcaggaggtgatctga

SEQ ID NO: 472 - RNA, 1425 nt, synthetic construct
  misc_feature 1..1425: note = CDS (opt4) from Homo sapiens__NP_000448.3__HNF4A(1-474)(S183E)
  source 1..1425: mol_type = other RNA
atgagactgagcaagaccctggtggacatggacatggccgactacagcgccgccctggaccccgcctacaccaccctggagttcgagaacgtgcaggtgctgaccatgggcaacgacaccagccccagcgagggcaccaacctgaacgcccccaacagcctgggcgtgagcgccctgtgcgccatctgcggcgacagagccaccggcaagcactacggcgccagcagctgcgacggctgcaagggcttcttcagaagaagcgtgagaaagaaccacatgtacagctgcagattcagcagacagtgcgtggtggacaaggacaagagaaaccagtgcagatactgcagactgaagaagtgcttcagagccggcatgaagaaggaggccgtgcagaacgagagagacagaatcagcaccagaagaagcagctacgaggacagcagcctgcccagcatcaacgccctgctgcaggccgaggtgctgagcagacagatcaccagccccgtgagcggcatcaacggcgacatcagagccaagaagatcgccgagatcgccgacgtgtgcgagagcatgaaggagcagctgctggtgctggtggagtgggccaagtacatccccgccttctgcgagctgcccctggacgaccaggtggccctgctgagagcccacgccggcgagcacctgctgctgggcgccaccaagagaagcatggtgttcaaggacgtgctgctgctgggcaacgactacatcgtgcccagacactgccccgagctggccgagatgagcagagtgagcatcagaatcctggacgagctggtgctgcccttccaggagctgcagatcgacgacaacgagtacgcctacctgaaggccatcatcttcttcgaccccgacgccaagggcctgagcgaccccggcaagatcaagagactgagaagccaggtgcaggtgagcctggaggactacatcaacgacagacagtacgacagcagaggcagattcggcgagctgctgctgctgctgcccaccctgcagagcatcacctggcagatgatcgagcagatccagttcatcaagctgttcggcatggccaagatcgacaacctgctgcaggagatgctgctgggcggcagccccagcgacgccccccacgcccaccaccccctgcacccccacctgatgcaggagcacatgggcaccaacgtgatcgtggccaacaccatgcccacccacctgagcaacggccagatgtgcgagtggcccagacccagaggccaggccgccacccccgagaccccccagcccagcccccccggcggcagcggcagcgagccctacaagctgctgcccggcgccgtggccaccatcgtgaagcccctgagcgccatcccccagcccaccatcaccaagcaggaggtgatctga

SEQ ID NO: 473 - RNA, 1425 nt, synthetic construct
  misc_feature 1..1425: note = CDS (opt4) from Homo sapiens__NP_000448.3__HNF4A(1-474)(S461A)
  source 1..1425: mol_type = other RNA
atgagactgagcaagaccctggtggacatggacatggccgactacagcgccgccctggaccccgcctacaccaccctggagttcgagaacgtgcaggtgctgaccatgggcaacgacaccagccccagcgagggcaccaacctgaacgcccccaacagcctgggcgtgagcgccctgtgcgccatctgcggcgacagagccaccggcaagcactacggcgccagcagctgcgacggctgcaagggcttcttcagaagaagcgtgagaaagaaccacatgtacagctgcagattcagcagacagtgcgtggtggacaaggacaagagaaaccagtgcagatactgcagactgaagaagtgcttcagagccggcatgaagaaggaggccgtgcagaacgagagagacagaatcagcaccagaagaagcagctacgaggacagcagcctgcccagcatcaacgccctgctgcaggccgaggtgctgagcagacagatcaccagccccgtgagcggcatcaacggcgacatcagagccaagaagatcgccagcatcgccgacgtgtgcgagagcatgaaggagcagctgctggtgctggtggagtgggccaagtacatccccgccttctgcgagctgcccctggacgaccaggtggccctgctgagagcccacgccggcgagcacctgctgctgggcgccaccaagagaagcatggtgttcaaggacgtgctgctgctgggcaacgactacatcgtgcccagacactgccccgagctggccgagatgagcagagtgagcatcagaatcctggacgagctggtgctgcccttccaggagctgcagatcgacgacaacgagtacgcctacctgaaggccatcatcttcttcgaccccgacgccaagggcctgagcgaccccggcaagatcaagagactgagaagccaggtgcaggtgagcctggaggactacatcaacgacagacagtacgacagcagaggcagattcggcgagctgctgctgctgctgcccaccctgcagagcatcacctggcagatgatcgagcagatccagttcatcaagctgttcggcatggccaagatcgacaacctgctgcaggagatgctgctgggcggcagccccagcgacgccccccacgcccaccaccccctgcacccccacctgatgcaggagcacatgggcaccaacgtgatcgtggccaacaccatgcccacccacctgagcaacggccagatgtgcgagtggcccagacccagaggccaggccgccacccccgagaccccccagcccagcccccccggcggcagcggcagcgagccctacaagctgctgcccggcgccgtggccaccatcgtgaagcccctggccgccatcccccagcccaccatcaccaagcaggaggtgatctga

SEQ ID NO: 474 - RNA, 1425 nt, synthetic construct
  misc_feature 1..1425: note = CDS (opt4) from Homo sapiens__NP_000448.3__HNF4A(1-474)(S461E)
  source 1..1425: mol_type = other RNA
atgagactgagcaagaccctggtggacatggacatggccgactacagcgccgccctggaccccgcctacaccaccctggagttcgagaacgtgcaggtgctgaccatgggcaacgacaccagccccagcgagggcaccaacctgaacgcccccaacagcctgggcgtgagcgccctgtgcgccatctgcggcgacagagccaccggcaagcactacggcgccagcagctgcgacggctgcaagggcttcttcagaagaagcgtgagaaagaaccacatgtacagctgcagattcagcagacagtgcgtggtggacaaggacaagagaaaccagtgcagatactgcagactgaagaagtgcttcagagccggcatgaagaaggaggccgtgcagaacgagagagacagaatcagcaccagaagaagcagctacgaggacagcagcctgcccagcatcaacgccctgctgcaggccgaggtgctgagcagacagatcaccagccccgtgagcggcatcaacggcgacatcagagccaagaagatcgccagcatcgccgacgtgtgcgagagcatgaaggagcagctgctggtgctggtggagtgggccaagtacatccccgccttctgcgagctgcccctggacgaccaggtggccctgctgagagcccacgccggcgagcacctgctgctgggcgccaccaagagaagcatggtgttcaaggacgtgctgctgctgggcaacgactacatcgtgcccagacactgccccgagctggccgagatgagcagagtgagcatcagaatcctggacgagctggtgctgcccttccaggagctgcagatcgacgacaacgagtacgcctacctgaaggccatcatcttcttcgaccccgacgccaagggcctgagcgaccccggcaagatcaagagactgagaagccaggtgcaggtgagcctggaggactacatcaacgacagacagtacgacagcagaggcagattcggcgagctgctgctgctgctgcccaccctgcagagcatcacctggcagatgatcgagcagatccagttcatcaagctgttcggcatggccaagatcgacaacctgctgcaggagatgctgctgggcggcagccccagcgacgccccccacgcccaccaccccctgcacccccacctgatgcaggagcacatgggcaccaacgtgatcgtggccaacaccatgcccacccacctgagcaacggccagatgtgcgagtggcccagacccagaggccaggccgccacccccgagaccccccagcccagcccccccggcggcagcggcagcgagccctacaagctgctgcccggcgccgtggccaccatcgtgaagcccctggaggccatcccccagcccaccatcaccaagcaggaggtgatctga

SEQ ID NO: 475 - RNA, 1425 nt, synthetic construct
  misc_feature 1..1425: note = CDS (opt4) from Homo sapiens__NP_000448.3__HNF4A(1-474)(S142A_S143A_S313A)
  source 1..1425: mol_type = other RNA
atgagactgagcaagaccctggtggacatggacatggccgactacagcgccgccctggaccccgcctacaccaccctggagttcgagaacgtgcaggtgctgaccatgggcaacgacaccagccccagcgagggcaccaacctgaacgcccccaacagcctgggcgtgagcgccctgtgcgccatctgcggcgacagagccaccggcaagcactacggcgccagcagctgcgacggctgcaagggcttcttcagaagaagcgtgagaaagaaccacatgtacagctgcagattcagcagacagtgcgtggtggacaaggacaagagaaaccagtgcagatactgcagactgaagaagtgcttcagagccggcatgaagaaggaggccgtgcagaacgagagagacagaatcagcaccagaagagccgcctacgaggacagcagcctgcccagcatcaacgccctgctgcaggccgaggtgctgagcagacagatcaccagccccgtgagcggcatcaacggcgacatcagagccaagaagatcgccagcatcgccgacgtgtgcgagagcatgaaggagcagctgctggtgctggtggagtgggccaagtacatccccgccttctgcgagctgcccctggacgaccaggtggccctgctgagagcccacgccggcgagcacctgctgctgggcgccaccaagagaagcatggtgttcaaggacgtgctgctgctgggcaacgactacatcgtgcccagacactgccccgagctggccgagatgagcagagtgagcatcagaatcctggacgagctggtgctgcccttccaggagctgcagatcgacgacaacgagtacgcctacctgaaggccatcatcttcttcgaccccgacgccaagggcctgagcgaccccggcaagatcaagagactgagagcccaggtgcaggtgagcctggaggactacatcaacgacagacagtacgacagcagaggcagattcggcgagctgctgctgctgctgcccaccctgcagagcatcacctggcagatgatcgagcagatccagttcatcaagctgttcggcatggccaagatcgacaacctgctgcaggagatgctgctgggcggcagccccagcgacgccccccacgcccaccaccccctgcacccccacctgatgcaggagcacatgggcaccaacgtgatcgtggccaacaccatgcccacccacctgagcaacggccagatgtgcgagtggcccagacccagaggccaggccgccacccccgagaccccccagcccagcccccccggcggcagcggcagcgagccctacaagctgctgcccggcgccgtggccaccatcgtgaagcccctgagcgccatcccccagcccaccatcaccaagcaggaggtgatctga

SEQ ID NO: 476 - RNA, 1425 nt, synthetic construct
  misc_feature 1..1425: note = CDS (opt4) from Homo sapiens__NP_000448.3__HNF4A(1-474)(S142A_S143A_S313A_K458R)
  source 1..1425: mol_type = other RNA
atgagactgagcaagaccctggtggacatggacatggccgactacagcgccgccctggaccccgcctacaccaccctggagttcgagaacgtgcaggtgctgaccatgggcaacgacaccagccccagcgagggcaccaacctgaacgcccccaacagcctgggcgtgagcgccctgtgcgccatctgcggcgacagagccaccggcaagcactacggcgccagcagctgcgacggctgcaagggcttcttcagaagaagcgtgagaaagaaccacatgtacagctgcagattcagcagacagtgcgtggtggacaaggacaagagaaaccagtgcagatactgcagactgaagaagtgcttcagagccggcatgaagaaggaggccgtgcagaacgagagagacagaatcagcaccagaagagccgcctacgaggacagcagcctgcccagcatcaacgccctgctgcaggccgaggtgctgagcagacagatcaccagccccgtgagcggcatcaacggcgacatcagagccaagaagatcgccagcatcgccgacgtgtgcgagagcatgaaggagcagctgctggtgctggtggagtgggccaagtacatccccgccttctgcgagctgcccctggacgaccaggtggccctgctgagagcccacgccggcgagcacctgctgctgggcgccaccaagagaagcatggtgttcaaggacgtgctgctgctgggcaacgactacatcgtgcccagacactgccccgagctggccgagatgagcagagtgagcatcagaatcctggacgagctggtgctgcccttccaggagctgcagatcgacgacaacgagtacgcctacctgaaggccatcatcttcttcgaccccgacgccaagggcctgagcgaccccggcaagatcaagagactgagagcccaggtgcaggtgagcctggaggactacatcaacgacagacagtacgacagcagaggcagattcggcgagctgctgctgctgctgcccaccctgcagagcatcacctggcagatgatcgagcagatccagttcatcaagctgttcggcatggccaagatcgacaacctgctgcaggagatgctgctgggcggcagccccagcgacgccccccacgcccaccaccccctgcacccccacctgatgcaggagcacatgggcaccaacgtgatcgtggccaacaccatgcccacccacctgagcaacggccagatgtgcgagtggcccagacccagaggccaggccgccacccccgagaccccccagcccagcccccccggcggcagcggcagcgagccctacaagctgctgcccggcgccgtggccaccatcgtgagacccctgagcgccatcccccagcccaccatcaccaagcaggaggtgatctga

SEQ ID NO: 477 - RNA, 1425 nt, synthetic construct
  misc_feature 1..1425: note = CDS (opt4) from Homo sapiens__NP_000448.3__HNF4A(1-474)(S142A_S143A_S167A_S313A_ S378A_T429A_T432A_S436A_K458R)
  source 1..1425: mol_type = other RNA
atgagactgagcaagaccctggtggacatggacatggccgactacagcgccgccctggaccccgcctacaccaccctggagttcgagaacgtgcaggtgctgaccatgggcaacgacaccagccccagcgagggcaccaacctgaacgcccccaacagcctgggcgtgagcgccctgtgcgccatctgcggcgacagagccaccggcaagcactacggcgccagcagctgcgacggctgcaagggcttcttcagaagaagcgtgagaaagaaccacatgtacagctgcagattcagcagacagtgcgtggtggacaaggacaagagaaaccagtgcagatactgcagactgaagaagtgcttcagagccggcatgaagaaggaggccgtgcagaacgagagagacagaatcagcaccagaagagccgcctacgaggacagcagcctgcccagcatcaacgccctgctgcaggccgaggtgctgagcagacagatcaccgcccccgtgagcggcatcaacggcgacatcagagccaagaagatcgccagcatcgccgacgtgtgcgagagcatgaaggagcagctgctggtgctggtggagtgggccaagtacatccccgccttctgcgagctgcccctggacgaccaggtggccctgctgagagcccacgccggcgagcacctgctgctgggcgccaccaagagaagcatggtgttcaaggacgtgctgctgctgggcaacgactacatcgtgcccagacactgccccgagctggccgagatgagcagagtgagcatcagaatcctggacgagctggtgctgcccttccaggagctgcagatcgacgacaacgagtacgcctacctgaaggccatcatcttcttcgaccccgacgccaagggcctgagcgaccccggcaagatcaagagactgagagcccaggtgcaggtgagcctggaggactacatcaacgacagacagtacgacagcagaggcagattcggcgagctgctgctgctgctgcccaccctgcagagcatcacctggcagatgatcgagcagatccagttcatcaagctgttcggcatggccaagatcgacaacctgctgcaggagatgctgctgggcggcgcccccagcgacgccccccacgcccaccaccccctgcacccccacctgatgcaggagcacatgggcaccaacgtgatcgtggccaacaccatgcccacccacctgagcaacggccagatgtgcgagtggcccagacccagaggccaggccgccgcccccgaggccccccagcccgccccccccggcggcagcggcagcgagccctacaagctgctgcccggcgccgtggccaccatcgtgagacccctgagcgccatcccccagcccaccatcaccaagcaggaggtgatctga

SEQ ID NO: 478 - RNA, 1425 nt, synthetic construct
  misc_feature 1..1425: note = CDS (opt4) from Homo sapiens__NP_000448.3__HNF4A(1-474)(S142A_S143A_S148A_S167A_ S313A_S378A_T429A_T432A_S436A_K458R)
  source 1..1425: mol_type = other RNA
atgagactgagcaagaccctggtggacatggacatggccgactacagcgccgccctggaccccgcctacaccaccctggagttcgagaacgtgcaggtgctgaccatgggcaacgacaccagccccagcgagggcaccaacctgaacgcccccaacagcctgggcgtgagcgccctgtgcgccatctgcggcgacagagccaccggcaagcactacggcgccagcagctgcgacggctgcaagggcttcttcagaagaagcgtgagaaagaaccacatgtacagctgcagattcagcagacagtgcgtggtggacaaggacaagagaaaccagtgcagatactgcagactgaagaagtgcttcagagccggcatgaagaaggaggccgtgcagaacgagagagacagaatcagcaccagaagagccgcctacgaggacagcgccctgcccagcatcaacgccctgctgcaggccgaggtgctgagcagacagatcaccgcccccgtgagcggcatcaacggcgacatcagagccaagaagatcgccagcatcgccgacgtgtgcgagagcatgaaggagcagctgctggtgctggtggagtgggccaagtacatccccgccttctgcgagctgcccctggacgaccaggtggccctgctgagagcccacgccggcgagcacctgctgctgggcgccaccaagagaagcatggtgttcaaggacgtgctgctgctgggcaacgactacatcgtgcccagacactgccccgagctggccgagatgagcagagtgagcatcagaatcctggacgagctggtgctgcccttccaggagctgcagatcgacgacaacgagtacgcctacctgaaggccatcatcttcttcgaccccgacgccaagggcctgagcgaccccggcaagatcaagagactgagagcccaggtgcaggtgagcctggaggactacatcaacgacagacagtacgacagcagaggcagattcggcgagctgctgctgctgctgcccaccctgcagagcatcacctggcagatgatcgagcagatccagttcatcaagctgttcggcatggccaagatcgacaacctgctgcaggagatgctgctgggcggcgcccccagcgacgccccccacgcccaccaccccctgcacccccacctgatgcaggagcacatgggcaccaacgtgatcgtggccaacaccatgcccacccacctgagcaacggccagatgtgcgagtggcccagacccagaggccaggccgccgcccccgaggccccccagcccgccccccccggcggcagcggcagcgagccctacaagctgctgcccggcgccgtggccaccatcgtgagacccctgagcgccatcccccagcccaccatcaccaagcaggaggtgatctga

SEQ ID NO: 479 - RNA, 1425 nt, synthetic construct
  misc_feature 1..1425: note = CDS (opt4) from Homo sapiens__NP_000448.3__HNF4A(1-474)(K106R_K108R_K126R_K127R_ S142A_S143A_S148A_S167A_S313A_S378A_T429A_T432A_S436A_K458R )
  source 1..1425: mol_type = other RNA
atgagactgagcaagaccctggtggacatggacatggccgactacagcgccgccctggaccccgcctacaccaccctggagttcgagaacgtgcaggtgctgaccatgggcaacgacaccagccccagcgagggcaccaacctgaacgcccccaacagcctgggcgtgagcgccctgtgcgccatctgcggcgacagagccaccggcaagcactacggcgccagcagctgcgacggctgcaagggcttcttcagaagaagcgtgagaaagaaccacatgtacagctgcagattcagcagacagtgcgtggtggacagagacagaagaaaccagtgcagatactgcagactgaagaagtgcttcagagccggcatgagaagagaggccgtgcagaacgagagagacagaatcagcaccagaagagccgcctacgaggacagcgccctgcccagcatcaacgccctgctgcaggccgaggtgctgagcagacagatcaccgcccccgtgagcggcatcaacggcgacatcagagccaagaagatcgccagcatcgccgacgtgtgcgagagcatgaaggagcagctgctggtgctggtggagtgggccaagtacatccccgccttctgcgagctgcccctggacgaccaggtggccctgctgagagcccacgccggcgagcacctgctgctgggcgccaccaagagaagcatggtgttcaaggacgtgctgctgctgggcaacgactacatcgtgcccagacactgccccgagctggccgagatgagcagagtgagcatcagaatcctggacgagctggtgctgcccttccaggagctgcagatcgacgacaacgagtacgcctacctgaaggccatcatcttcttcgaccccgacgccaagggcctgagcgaccccggcaagatcaagagactgagagcccaggtgcaggtgagcctggaggactacatcaacgacagacagtacgacagcagaggcagattcggcgagctgctgctgctgctgcccaccctgcagagcatcacctggcagatgatcgagcagatccagttcatcaagctgttcggcatggccaagatcgacaacctgctgcaggagatgctgctgggcggcgcccccagcgacgccccccacgcccaccaccccctgcacccccacctgatgcaggagcacatgggcaccaacgtgatcgtggccaacaccatgcccacccacctgagcaacggccagatgtgcgagtggcccagacccagaggccaggccgccgcccccgaggccccccagcccgccccccccggcggcagcggcagcgagccctacaagctgctgcccggcgccgtggccaccatcgtgagacccctgagcgccatcccccagcccaccatcaccaagcaggaggtgatctga

SEQ ID NO: 480 - RNA, 1425 nt, synthetic construct
  misc_feature 1..1425: note = CDS (opt4) from Homo sapiens__NP_000448.3__HNF4A(1-474)(S142A_S143A_S148A_T166A_ S167A_S313A_S378A_T429A_T432A_S436A_K458R)
  source 1..1425: mol_type = other RNA
atgagactgagcaagaccctggtggacatggacatggccgactacagcgccgccctggaccccgcctacaccaccctggagttcgagaacgtgcaggtgctgaccatgggcaacgacaccagccccagcgagggcaccaacctgaacgcccccaacagcctgggcgtgagcgccctgtgcgccatctgcggcgacagagccaccggcaagcactacggcgccagcagctgcgacggctgcaagggcttcttcagaagaagcgtgagaaagaaccacatgtacagctgcagattcagcagacagtgcgtggtggacaaggacaagagaaaccagtgcagatactgcagactgaagaagtgcttcagagccggcatgaagaaggaggccgtgcagaacgagagagacagaatcagcaccagaagagccgcctacgaggacagcgccctgcccagcatcaacgccctgctgcaggccgaggtgctgagcagacagatcgccgcccccgtgagcggcatcaacggcgacatcagagccaagaagatcgccagcatcgccgacgtgtgcgagagcatgaaggagcagctgctggtgctggtggagtgggccaagtacatccccgccttctgcgagctgcccctggacgaccaggtggccctgctgagagcccacgccggcgagcacctgctgctgggcgccaccaagagaagcatggtgttcaaggacgtgctgctgctgggcaacgactacatcgtgcccagacactgccccgagctggccgagatgagcagagtgagcatcagaatcctggacgagctggtgctgcccttccaggagctgcagatcgacgacaacgagtacgcctacctgaaggccatcatcttcttcgaccccgacgccaagggcctgagcgaccccggcaagatcaagagactgagagcccaggtgcaggtgagcctggaggactacatcaacgacagacagtacgacagcagaggcagattcggcgagctgctgctgctgctgcccaccctgcagagcatcacctggcagatgatcgagcagatccagttcatcaagctgttcggcatggccaagatcgacaacctgctgcaggagatgctgctgggcggcgcccccagcgacgccccccacgcccaccaccccctgcacccccacctgatgcaggagcacatgggcaccaacgtgatcgtggccaacaccatgcccacccacctgagcaacggccagatgtgcgagtggcccagacccagaggccaggccgccgcccccgaggccccccagcccgccccccccggcggcagcggcagcgagccctacaagctgctgcccggcgccgtggccaccatcgtgagacccctgagcgccatcccccagcccaccatcaccaagcaggaggtgatctga

SEQ ID NO: 481 - RNA, 1425 nt, synthetic construct
  misc_feature 1..1425: note = CDS (opt4) from Homo sapiens__NP_000448.3__HNF4A(1-474)(S87A_S142A_S143A_S148A_T 166A_S167A_S313A_S378A_T429A_T432A_S436A_K458R)
  source 1..1425: mol_type = other RNA
atgagactgagcaagaccctggtggacatggacatggccgactacagcgccgccctggaccccgcctacaccaccctggagttcgagaacgtgcaggtgctgaccatgggcaacgacaccagccccagcgagggcaccaacctgaacgcccccaacagcctgggcgtgagcgccctgtgcgccatctgcggcgacagagccaccggcaagcactacggcgccagcagctgcgacggctgcaagggcttcttcagaagagccgtgagaaagaaccacatgtacagctgcagattcagcagacagtgcgtggtggacaaggacaagagaaaccagtgcagatactgcagactgaagaagtgcttcagagccggcatgaagaaggaggccgtgcagaacgagagagacagaatcagcaccagaagagccgcctacgaggacagcgccctgcccagcatcaacgccctgctgcaggccgaggtgctgagcagacagatcgccgcccccgtgagcggcatcaacggcgacatcagagccaagaagatcgccagcatcgccgacgtgtgcgagagcatgaaggagcagctgctggtgctggtggagtgggccaagtacatccccgccttctgcgagctgcccctggacgaccaggtggccctgctgagagcccacgccggcgagcacctgctgctgggcgccaccaagagaagcatggtgttcaaggacgtgctgctgctgggcaacgactacatcgtgcccagacactgccccgagctggccgagatgagcagagtgagcatcagaatcctggacgagctggtgctgcccttccaggagctgcagatcgacgacaacgagtacgcctacctgaaggccatcatcttcttcgaccccgacgccaagggcctgagcgaccccggcaagatcaagagactgagagcccaggtgcaggtgagcctggaggactacatcaacgacagacagtacgacagcagaggcagattcggcgagctgctgctgctgctgcccaccctgcagagcatcacctggcagatgatcgagcagatccagttcatcaagctgttcggcatggccaagatcgacaacctgctgcaggagatgctgctgggcggcgcccccagcgacgccccccacgcccaccaccccctgcacccccacctgatgcaggagcacatgggcaccaacgtgatcgtggccaacaccatgcccacccacctgagcaacggccagatgtgcgagtggcccagacccagaggccaggccgccgcccccgaggccccccagcccgccccccccggcggcagcggcagcgagccctacaagctgctgcccggcgccgtggccaccatcgtgagacccctgagcgccatcccccagcccaccatcaccaagcaggaggtgatctga

SEQ ID NO: 482 - RNA, 1425 nt, synthetic construct
  misc_feature 1..1425: note = CDS (opt4) from Homo sapiens__NP_000448.3__HNF4A(1-474)(S87A_K106R_K108R_K126R_K 127R_S142A_S143A_S148A_T166A_S167A_S313A_S378A_T429A_T432A_ S436A_K458R)
  source 1..1425: mol_type = other RNA
atgagactgagcaagaccctggtggacatggacatggccgactacagcgccgccctggaccccgcctacaccaccctggagttcgagaacgtgcaggtgctgaccatgggcaacgacaccagccccagcgagggcaccaacctgaacgcccccaacagcctgggcgtgagcgccctgtgcgccatctgcggcgacagagccaccggcaagcactacggcgccagcagctgcgacggctgcaagggcttcttcagaagagccgtgagaaagaaccacatgtacagctgcagattcagcagacagtgcgtggtggacagagacagaagaaaccagtgcagatactgcagactgaagaagtgcttcagagccggcatgagaagagaggccgtgcagaacgagagagacagaatcagcaccagaagagccgcctacgaggacagcgccctgcccagcatcaacgccctgctgcaggccgaggtgctgagcagacagatcgccgcccccgtgagcggcatcaacggcgacatcagagccaagaagatcgccagcatcgccgacgtgtgcgagagcatgaaggagcagctgctggtgctggtggagtgggccaagtacatccccgccttctgcgagctgcccctggacgaccaggtggccctgctgagagcccacgccggcgagcacctgctgctgggcgccaccaagagaagcatggtgttcaaggacgtgctgctgctgggcaacgactacatcgtgcccagacactgccccgagctggccgagatgagcagagtgagcatcagaatcctggacgagctggtgctgcccttccaggagctgcagatcgacgacaacgagtacgcctacctgaaggccatcatcttcttcgaccccgacgccaagggcctgagcgaccccggcaagatcaagagactgagagcccaggtgcaggtgagcctggaggactacatcaacgacagacagtacgacagcagaggcagattcggcgagctgctgctgctgctgcccaccctgcagagcatcacctggcagatgatcgagcagatccagttcatcaagctgttcggcatggccaagatcgacaacctgctgcaggagatgctgctgggcggcgcccccagcgacgccccccacgcccaccaccccctgcacccccacctgatgcaggagcacatgggcaccaacgtgatcgtggccaacaccatgcccacccacctgagcaacggccagatgtgcgagtggcccagacccagaggccaggccgccgcccccgaggccccccagcccgccccccccggcggcagcggcagcgagccctacaagctgctgcccggcgccgtggccaccatcgtgagacccctgagcgccatcccccagcccaccatcaccaagcaggaggtgatctga

SEQ ID NO: 483 - RNA, 1425 nt, synthetic construct
  misc_feature 1..1425: note = CDS (opt4) from Homo sapiens__NP_000448.3__HNF4A(1-474)(S87A_K106R_K108R_K126R_K 127R)
  source 1..1425: mol_type = other RNA
atgagactgagcaagaccctggtggacatggacatggccgactacagcgccgccctggaccccgcctacaccaccctggagttcgagaacgtgcaggtgctgaccatgggcaacgacaccagccccagcgagggcaccaacctgaacgcccccaacagcctgggcgtgagcgccctgtgcgccatctgcggcgacagagccaccggcaagcactacggcgccagcagctgcgacggctgcaagggcttcttcagaagagccgtgagaaagaaccacatgtacagctgcagattcagcagacagtgcgtggtggacagagacagaagaaaccagtgcagatactgcagactgaagaagtgcttcagagccggcatgagaagagaggccgtgcagaacgagagagacagaatcagcaccagaagaagcagctacgaggacagcagcctgcccagcatcaacgccctgctgcaggccgaggtgctgagcagacagatcaccagccccgtgagcggcatcaacggcgacatcagagccaagaagatcgccagcatcgccgacgtgtgcgagagcatgaaggagcagctgctggtgctggtggagtgggccaagtacatccccgccttctgcgagctgcccctggacgaccaggtggccctgctgagagcccacgccggcgagcacctgctgctgggcgccaccaagagaagcatggtgttcaaggacgtgctgctgctgggcaacgactacatcgtgcccagacactgccccgagctggccgagatgagcagagtgagcatcagaatcctggacgagctggtgctgcccttccaggagctgcagatcgacgacaacgagtacgcctacctgaaggccatcatcttcttcgaccccgacgccaagggcctgagcgaccccggcaagatcaagagactgagaagccaggtgcaggtgagcctggaggactacatcaacgacagacagtacgacagcagaggcagattcggcgagctgctgctgctgctgcccaccctgcagagcatcacctggcagatgatcgagcagatccagttcatcaagctgttcggcatggccaagatcgacaacctgctgcaggagatgctgctgggcggcagccccagcgacgccccccacgcccaccaccccctgcacccccacctgatgcaggagcacatgggcaccaacgtgatcgtggccaacaccatgcccacccacctgagcaacggccagatgtgcgagtggcccagacccagaggccaggccgccacccccgagaccccccagcccagcccccccggcggcagcggcagcgagccctacaagctgctgcccggcgccgtggccaccatcgtgaagcccctgagcgccatcccccagcccaccatcaccaagcaggaggtgatctga

SEQ ID NO: 484 - RNA, 1425 nt, synthetic construct
  misc_feature 1..1425: note = CDS (opt4) from Homo sapiens__NP_000448.3__HNF4A(1-474)(S87A_K106R_K108R_K126R_K 127R_S142A_S143A_S148A_T166A_S167A_S313A_S378A_T429A_T432A_ S436A_K458R_S461A)
  source 1..1425: mol_type = other RNA
atgagactgagcaagaccctggtggacatggacatggccgactacagcgccgccctggaccccgcctacaccaccctggagttcgagaacgtgcaggtgctgaccatgggcaacgacaccagccccagcgagggcaccaacctgaacgcccccaacagcctgggcgtgagcgccctgtgcgccatctgcggcgacagagccaccggcaagcactacggcgccagcagctgcgacggctgcaagggcttcttcagaagagccgtgagaaagaaccacatgtacagctgcagattcagcagacagtgcgtggtggacagagacagaagaaaccagtgcagatactgcagactgaagaagtgcttcagagccggcatgagaagagaggccgtgcagaacgagagagacagaatcagcaccagaagagccgcctacgaggacagcgccctgcccagcatcaacgccctgctgcaggccgaggtgctgagcagacagatcgccgcccccgtgagcggcatcaacggcgacatcagagccaagaagatcgccagcatcgccgacgtgtgcgagagcatgaaggagcagctgctggtgctggtggagtgggccaagtacatccccgccttctgcgagctgcccctggacgaccaggtggccctgctgagagcccacgccggcgagcacctgctgctgggcgccaccaagagaagcatggtgttcaaggacgtgctgctgctgggcaacgactacatcgtgcccagacactgccccgagctggccgagatgagcagagtgagcatcagaatcctggacgagctggtgctgcccttccaggagctgcagatcgacgacaacgagtacgcctacctgaaggccatcatcttcttcgaccccgacgccaagggcctgagcgaccccggcaagatcaagagactgagagcccaggtgcaggtgagcctggaggactacatcaacgacagacagtacgacagcagaggcagattcggcgagctgctgctgctgctgcccaccctgcagagcatcacctggcagatgatcgagcagatccagttcatcaagctgttcggcatggccaagatcgacaacctgctgcaggagatgctgctgggcggcgcccccagcgacgccccccacgcccaccaccccctgcacccccacctgatgcaggagcacatgggcaccaacgtgatcgtggccaacaccatgcccacccacctgagcaacggccagatgtgcgagtggcccagacccagaggccaggccgccgcccccgaggccccccagcccgccccccccggcggcagcggcagcgagccctacaagctgctgcccggcgccgtggccaccatcgtgagacccctggccgccatcccccagcccaccatcaccaagcaggaggtgatctga

SEQ ID NO: 485 - RNA, 1425 nt, synthetic construct
  misc_feature 1..1425: note = CDS (opt4) from Homo sapiens__NP_000448.3__HNF4A(1-474)(S87A_K106R_K108R_K126R_K 127R_S142A_S143A_S148A_T166A_S167A_S313A_S378A_T429A_T432A_ S436A_K458R_S461E)
  source 1..1425: mol_type = other RNA
atgagactgagcaagaccctggtggacatggacatggccgactacagcgccgccctggaccccgcctacaccaccctggagttcgagaacgtgcaggtgctgaccatgggcaacgacaccagccccagcgagggcaccaacctgaacgcccccaacagcctgggcgtgagcgccctgtgcgccatctgcggcgacagagccaccggcaagcactacggcgccagcagctgcgacggctgcaagggcttcttcagaagagccgtgagaaagaaccacatgtacagctgcagattcagcagacagtgcgtggtggacagagacagaagaaaccagtgcagatactgcagactgaagaagtgcttcagagccggcatgagaagagaggccgtgcagaacgagagagacagaatcagcaccagaagagccgcctacgaggacagcgccctgcccagcatcaacgccctgctgcaggccgaggtgctgagcagacagatcgccgcccccgtgagcggcatcaacggcgacatcagagccaagaagatcgccagcatcgccgacgtgtgcgagagcatgaaggagcagctgctggtgctggtggagtgggccaagtacatccccgccttctgcgagctgcccctggacgaccaggtggccctgctgagagcccacgccggcgagcacctgctgctgggcgccaccaagagaagcatggtgttcaaggacgtgctgctgctgggcaacgactacatcgtgcccagacactgccccgagctggccgagatgagcagagtgagcatcagaatcctggacgagctggtgctgcccttccaggagctgcagatcgacgacaacgagtacgcctacctgaaggccatcatcttcttcgaccccgacgccaagggcctgagcgaccccggcaagatcaagagactgagagcccaggtgcaggtgagcctggaggactacatcaacgacagacagtacgacagcagaggcagattcggcgagctgctgctgctgctgcccaccctgcagagcatcacctggcagatgatcgagcagatccagttcatcaagctgttcggcatggccaagatcgacaacctgctgcaggagatgctgctgggcggcgcccccagcgacgccccccacgcccaccaccccctgcacccccacctgatgcaggagcacatgggcaccaacgtgatcgtggccaacaccatgcccacccacctgagcaacggccagatgtgcgagtggcccagacccagaggccaggccgccgcccccgaggccccccagcccgccccccccggcggcagcggcagcgagccctacaagctgctgcccggcgccgtggccaccatcgtgagacccctggaggccatcccccagcccaccatcaccaagcaggaggtgatctga

SEQ ID NO: 486 - RNA, 1425 nt, synthetic construct
  misc_feature 1..1425: note = CDS (opt4) from Homo sapiens__NP_000448.3__HNF4A(1-474)(S87A_K106R_K108R_K126R_K 127R_S142A_S143A_S148E_T166A_S167E_S313A_S378E_T429E_T432E_ S436E_K458R_S461E)
  source 1..1425: mol_type = other RNA
atgagactgagcaagaccctggtggacatggacatggccgactacagcgccgccctggaccccgcctacaccaccctggagttcgagaacgtgcaggtgctgaccatgggcaacgacaccagccccagcgagggcaccaacctgaacgcccccaacagcctgggcgtgagcgccctgtgcgccatctgcggcgacagagccaccggcaagcactacggcgccagcagctgcgacggctgcaagggcttcttcagaagagccgtgagaaagaaccacatgtacagctgcagattcagcagacagtgcgtggtggacagagacagaagaaaccagtgcagatactgcagactgaagaagtgcttcagagccggcatgagaagagaggccgtgcagaacgagagagacagaatcagcaccagaagagccgcctacgaggacagcgagctgcccagcatcaacgccctgctgcaggccgaggtgctgagcagacagatcgccgagcccgtgagcggcatcaacggcgacatcagagccaagaagatcgccagcatcgccgacgtgtgcgagagcatgaaggagcagctgctggtgctggtggagtgggccaagtacatccccgccttctgcgagctgcccctggacgaccaggtggccctgctgagagcccacgccggcgagcacctgctgctgggcgccaccaagagaagcatggtgttcaaggacgtgctgctgctgggcaacgactacatcgtgcccagacactgccccgagctggccgagatgagcagagtgagcatcagaatcctggacgagctggtgctgcccttccaggagctgcagatcgacgacaacgagtacgcctacctgaaggccatcatcttcttcgaccccgacgccaagggcctgagcgaccccggcaagatcaagagactgagagcccaggtgcaggtgagcctggaggactacatcaacgacagacagtacgacagcagaggcagattcggcgagctgctgctgctgctgcccaccctgcagagcatcacctggcagatgatcgagcagatccagttcatcaagctgttcggcatggccaagatcgacaacctgctgcaggagatgctgctgggcggcgagcccagcgacgccccccacgcccaccaccccctgcacccccacctgatgcaggagcacatgggcaccaacgtgatcgtggccaacaccatgcccacccacctgagcaacggccagatgtgcgagtggcccagacccagaggccaggccgccgagcccgaggagccccagcccgagccccccggcggcagcggcagcgagccctacaagctgctgcccggcgccgtggccaccatcgtgagacccctggaggccatcccccagcccaccatcaccaagcaggaggtgatctga

SEQ ID NO: 487 - RNA, 1425 nt, synthetic construct
  misc_feature 1..1425: note = CDS (opt4) from Homo sapiens__NP_000448.3__HNF4A(1-474)(S87A_K106R_K108R_K126R_K 127R_S142A_S143A_S148A_T166A_S167A_K179R_K180R_S313A_S378A_ T429A_T432A_S436A_K458R_S461E)
  source 1..1425: mol_type = other RNA
atgagactgagcaagaccctggtggacatggacatggccgactacagcgccgccctggaccccgcctacaccaccctggagttcgagaacgtgcaggtgctgaccatgggcaacgacaccagccccagcgagggcaccaacctgaacgcccccaacagcctgggcgtgagcgccctgtgcgccatctgcggcgacagagccaccggcaagcactacggcgccagcagctgcgacggctgcaagggcttcttcagaagagccgtgagaaagaaccacatgtacagctgcagattcagcagacagtgcgtggtggacagagacagaagaaaccagtgcagatactgcagactgaagaagtgcttcagagccggcatgagaagagaggccgtgcagaacgagagagacagaatcagcaccagaagagccgcctacgaggacagcgccctgcccagcatcaacgccctgctgcaggccgaggtgctgagcagacagatcgccgcccccgtgagcggcatcaacggcgacatcagagccagaagaatcgccagcatcgccgacgtgtgcgagagcatgaaggagcagctgctggtgctggtggagtgggccaagtacatccccgccttctgcgagctgcccctggacgaccaggtggccctgctgagagcccacgccggcgagcacctgctgctgggcgccaccaagagaagcatggtgttcaaggacgtgctgctgctgggcaacgactacatcgtgcccagacactgccccgagctggccgagatgagcagagtgagcatcagaatcctggacgagctggtgctgcccttccaggagctgcagatcgacgacaacgagtacgcctacctgaaggccatcatcttcttcgaccccgacgccaagggcctgagcgaccccggcaagatcaagagactgagagcccaggtgcaggtgagcctggaggactacatcaacgacagacagtacgacagcagaggcagattcggcgagctgctgctgctgctgcccaccctgcagagcatcacctggcagatgatcgagcagatccagttcatcaagctgttcggcatggccaagatcgacaacctgctgcaggagatgctgctgggcggcgcccccagcgacgccccccacgcccaccaccccctgcacccccacctgatgcaggagcacatgggcaccaacgtgatcgtggccaacaccatgcccacccacctgagcaacggccagatgtgcgagtggcccagacccagaggccaggccgccgcccccgaggccccccagcccgccccccccggcggcagcggcagcgagccctacaagctgctgcccggcgccgtggccaccatcgtgagacccctggaggccatcccccagcccaccatcaccaagcaggaggtgatctga

SEQ ID NO: 488 - RNA, 1425 nt, synthetic construct
  misc_feature 1..1425: note = CDS (opt4) from Homo sapiens__NP_000448.3__HNF4A(1-474)(S87A_K106R_K108R_K126R_K 127R_S142A_S143A_S148A_T166A_S167A_K300R_K307R_K309R_S313A_ S378A_T429A_T432A_S436A_K458R_S461E)
  source 1..1425: mol_type = other RNA
atgagactgagcaagaccctggtggacatggacatggccgactacagcgccgccctggaccccgcctacaccaccctggagttcgagaacgtgcaggtgctgaccatgggcaacgacaccagccccagcgagggcaccaacctgaacgcccccaacagcctgggcgtgagcgccctgtgcgccatctgcggcgacagagccaccggcaagcactacggcgccagcagctgcgacggctgcaagggcttcttcagaagagccgtgagaaagaaccacatgtacagctgcagattcagcagacagtgcgtggtggacagagacagaagaaaccagtgcagatactgcagactgaagaagtgcttcagagccggcatgagaagagaggccgtgcagaacgagagagacagaatcagcaccagaagagccgcctacgaggacagcgccctgcccagcatcaacgccctgctgcaggccgaggtgctgagcagacagatcgccgcccccgtgagcggcatcaacggcgacatcagagccaagaagatcgccagcatcgccgacgtgtgcgagagcatgaaggagcagctgctggtgctggtggagtgggccaagtacatccccgccttctgcgagctgcccctggacgaccaggtggccctgctgagagcccacgccggcgagcacctgctgctgggcgccaccaagagaagcatggtgttcaaggacgtgctgctgctgggcaacgactacatcgtgcccagacactgccccgagctggccgagatgagcagagtgagcatcagaatcctggacgagctggtgctgcccttccaggagctgcagatcgacgacaacgagtacgcctacctgaaggccatcatcttcttcgaccccgacgccagaggcctgagcgaccccggcagaatcagaagactgagagcccaggtgcaggtgagcctggaggactacatcaacgacagacagtacgacagcagaggcagattcggcgagctgctgctgctgctgcccaccctgcagagcatcacctggcagatgatcgagcagatccagttcatcaagctgttcggcatggccaagatcgacaacctgctgcaggagatgctgctgggcggcgcccccagcgacgccccccacgcccaccaccccctgcacccccacctgatgcaggagcacatgggcaccaacgtgatcgtggccaacaccatgcccacccacctgagcaacggccagatgtgcgagtggcccagacccagaggccaggccgccgcccccgaggccccccagcccgccccccccggcggcagcggcagcgagccctacaagctgctgcccggcgccgtggccaccatcgtgagacccctggaggccatcccccagcccaccatcaccaagcaggaggtgatctga

SEQ ID NO: 489 - RNA, 1425 nt, synthetic construct
  misc_feature 1..1425: note = CDS (opt4) from Homo sapiens__NP_000448.3__HNF4A(1-474)(S87A_K106R_K108R_K126R_K 127R_S142A_S143A_S148A_T166A_S167A_S313A_S378A_T429A_T432A_ S436A_K447R_K458R_S461E_K470R)
  source 1..1425: mol_type = other RNA
atgagactgagcaagaccctggtggacatggacatggccgactacagcgccgccctggaccccgcctacaccaccctggagttcgagaacgtgcaggtgctgaccatgggcaacgacaccagccccagcgagggcaccaacctgaacgcccccaacagcctgggcgtgagcgccctgtgcgccatctgcggcgacagagccaccggcaagcactacggcgccagcagctgcgacggctgcaagggcttcttcagaagagccgtgagaaagaaccacatgtacagctgcagattcagcagacagtgcgtggtggacagagacagaagaaaccagtgcagatactgcagactgaagaagtgcttcagagccggcatgagaagagaggccgtgcagaacgagagagacagaatcagcaccagaagagccgcctacgaggacagcgccctgcccagcatcaacgccctgctgcaggccgaggtgctgagcagacagatcgccgcccccgtgagcggcatcaacggcgacatcagagccaagaagatcgccagcatcgccgacgtgtgcgagagcatgaaggagcagctgctggtgctggtggagtgggccaagtacatccccgccttctgcgagctgcccctggacgaccaggtggccctgctgagagcccacgccggcgagcacctgctgctgggcgccaccaagagaagcatggtgttcaaggacgtgctgctgctgggcaacgactacatcgtgcccagacactgccccgagctggccgagatgagcagagtgagcatcagaatcctggacgagctggtgctgcccttccaggagctgcagatcgacgacaacgagtacgcctacctgaaggccatcatcttcttcgaccccgacgccaagggcctgagcgaccccggcaagatcaagagactgagagcccaggtgcaggtgagcctggaggactacatcaacgacagacagtacgacagcagaggcagattcggcgagctgctgctgctgctgcccaccctgcagagcatcacctggcagatgatcgagcagatccagttcatcaagctgttcggcatggccaagatcgacaacctgctgcaggagatgctgctgggcggcgcccccagcgacgccccccacgcccaccaccccctgcacccccacctgatgcaggagcacatgggcaccaacgtgatcgtggccaacaccatgcccacccacctgagcaacggccagatgtgcgagtggcccagacccagaggccaggccgccgcccccgaggccccccagcccgccccccccggcggcagcggcagcgagccctacagactgctgcccggcgccgtggccaccatcgtgagacccctggaggccatcccccagcccaccatcaccagacaggaggtgatctga

SEQ ID NO: 490 - RNA, 1425 nt, synthetic construct
  misc_feature 1..1425: note = CDS (opt4) from Homo sapiens__NP_000448.3__HNF4A(1-474)(S87A_K106R_K108R_K126R_K 127R_S142A_S143A_S148A_T166A_S167A_K179R_K180R_K234R_K300R_ K307R_K309R_S313A_S378A_T429A_T432A_S436A_K447R_K458R_S461E _K470R)
  source 1..1425: mol_type = other RNA
atgagactgagcaagaccctggtggacatggacatggccgactacagcgccgccctggaccccgcctacaccaccctggagttcgagaacgtgcaggtgctgaccatgggcaacgacaccagccccagcgagggcaccaacctgaacgcccccaacagcctgggcgtgagcgccctgtgcgccatctgcggcgacagagccaccggcaagcactacggcgccagcagctgcgacggctgcaagggcttcttcagaagagccgtgagaaagaaccacatgtacagctgcagattcagcagacagtgcgtggtggacagagacagaagaaaccagtgcagatactgcagactgaagaagtgcttcagagccggcatgagaagagaggccgtgcagaacgagagagacagaatcagcaccagaagagccgcctacgaggacagcgccctgcccagcatcaacgccctgctgcaggccgaggtgctgagcagacagatcgccgcccccgtgagcggcatcaacggcgacatcagagccagaagaatcgccagcatcgccgacgtgtgcgagagcatgaaggagcagctgctggtgctggtggagtgggccaagtacatccccgccttctgcgagctgcccctggacgaccaggtggccctgctgagagcccacgccggcgagcacctgctgctgggcgccaccagaagaagcatggtgttcaaggacgtgctgctgctgggcaacgactacatcgtgcccagacactgccccgagctggccgagatgagcagagtgagcatcagaatcctggacgagctggtgctgcccttccaggagctgcagatcgacgacaacgagtacgcctacctgaaggccatcatcttcttcgaccccgacgccagaggcctgagcgaccccggcagaatcagaagactgagagcccaggtgcaggtgagcctggaggactacatcaacgacagacagtacgacagcagaggcagattcggcgagctgctgctgctgctgcccaccctgcagagcatcacctggcagatgatcgagcagatccagttcatcaagctgttcggcatggccaagatcgacaacctgctgcaggagatgctgctgggcggcgcccccagcgacgccccccacgcccaccaccccctgcacccccacctgatgcaggagcacatgggcaccaacgtgatcgtggccaacaccatgcccacccacctgagcaacggccagatgtgcgagtggcccagacccagaggccaggccgccgcccccgaggccccccagcccgccccccccggcggcagcggcagcgagccctacagactgctgcccggcgccgtggccaccatcgtgagacccctggaggccatcccccagcccaccatcaccagacaggaggtgatctga

SEQ ID NO: 491 - RNA, 1425 nt, synthetic construct
  misc_feature 1..1425: note = CDS (opt4) from Homo sapiens__NP_000448.3__HNF4A(1-474)(S87A_S95A_S99A_K106R_K10 8R_K126R_K127R_S142A_S143A_S148A_T166A_S167A_S313A_S378A_T4 29A_T432A_S436A_K458R_S461E)
  source 1..1425: mol_type = other RNA
atgagactgagcaagaccctggtggacatggacatggccgactacagcgccgccctggaccccgcctacaccaccctggagttcgagaacgtgcaggtgctgaccatgggcaacgacaccagccccagcgagggcaccaacctgaacgcccccaacagcctgggcgtgagcgccctgtgcgccatctgcggcgacagagccaccggcaagcactacggcgccagcagctgcgacggctgcaagggcttcttcagaagagccgtgagaaagaaccacatgtacgcctgcagattcgccagacagtgcgtggtggacagagacagaagaaaccagtgcagatactgcagactgaagaagtgcttcagagccggcatgagaagagaggccgtgcagaacgagagagacagaatcagcaccagaagagccgcctacgaggacagcgccctgcccagcatcaacgccctgctgcaggccgaggtgctgagcagacagatcgccgcccccgtgagcggcatcaacggcgacatcagagccaagaagatcgccagcatcgccgacgtgtgcgagagcatgaaggagcagctgctggtgctggtggagtgggccaagtacatccccgccttctgcgagctgcccctggacgaccaggtggccctgctgagagcccacgccggcgagcacctgctgctgggcgccaccaagagaagcatggtgttcaaggacgtgctgctgctgggcaacgactacatcgtgcccagacactgccccgagctggccgagatgagcagagtgagcatcagaatcctggacgagctggtgctgcccttccaggagctgcagatcgacgacaacgagtacgcctacctgaaggccatcatcttcttcgaccccgacgccaagggcctgagcgaccccggcaagatcaagagactgagagcccaggtgcaggtgagcctggaggactacatcaacgacagacagtacgacagcagaggcagattcggcgagctgctgctgctgctgcccaccctgcagagcatcacctggcagatgatcgagcagatccagttcatcaagctgttcggcatggccaagatcgacaacctgctgcaggagatgctgctgggcggcgcccccagcgacgccccccacgcccaccaccccctgcacccccacctgatgcaggagcacatgggcaccaacgtgatcgtggccaacaccatgcccacccacctgagcaacggccagatgtgcgagtggcccagacccagaggccaggccgccgcccccgaggccccccagcccgccccccccggcggcagcggcagcgagccctacaagctgctgcccggcgccgtggccaccatcgtgagacccctggaggccatcccccagcccaccatcaccaagcaggaggtgatctga

SEQ ID NO: 492 - RNA, 1425 nt, synthetic construct
  misc_feature 1..1425: note = CDS (opt4) from Homo sapiens__NP_000448.3__HNF4A(1-474)(S87A_K106R_K108R_K126R_K 127R_S138A_T139A_S142A_S143A_S148A_T166A_S167A_S313A_S378A_ T429A_T432A_S436A_K458R_S461E)
  source 1..1425: mol_type = other RNA
atgagactgagcaagaccctggtggacatggacatggccgactacagcgccgccctggaccccgcctacaccaccctggagttcgagaacgtgcaggtgctgaccatgggcaacgacaccagccccagcgagggcaccaacctgaacgcccccaacagcctgggcgtgagcgccctgtgcgccatctgcggcgacagagccaccggcaagcactacggcgccagcagctgcgacggctgcaagggcttcttcagaagagccgtgagaaagaaccacatgtacagctgcagattcagcagacagtgcgtggtggacagagacagaagaaaccagtgcagatactgcagactgaagaagtgcttcagagccggcatgagaagagaggccgtgcagaacgagagagacagaatcgccgccagaagagccgcctacgaggacagcgccctgcccagcatcaacgccctgctgcaggccgaggtgctgagcagacagatcgccgcccccgtgagcggcatcaacggcgacatcagagccaagaagatcgccagcatcgccgacgtgtgcgagagcatgaaggagcagctgctggtgctggtggagtgggccaagtacatccccgccttctgcgagctgcccctggacgaccaggtggccctgctgagagcccacgccggcgagcacctgctgctgggcgccaccaagagaagcatggtgttcaaggacgtgctgctgctgggcaacgactacatcgtgcccagacactgccccgagctggccgagatgagcagagtgagcatcagaatcctggacgagctggtgctgcccttccaggagctgcagatcgacgacaacgagtacgcctacctgaaggccatcatcttcttcgaccccgacgccaagggcctgagcgaccccggcaagatcaagagactgagagcccaggtgcaggtgagcctggaggactacatcaacgacagacagtacgacagcagaggcagattcggcgagctgctgctgctgctgcccaccctgcagagcatcacctggcagatgatcgagcagatccagttcatcaagctgttcggcatggccaagatcgacaacctgctgcaggagatgctgctgggcggcgcccccagcgacgccccccacgcccaccaccccctgcacccccacctgatgcaggagcacatgggcaccaacgtgatcgtggccaacaccatgcccacccacctgagcaacggccagatgtgcgagtggcccagacccagaggccaggccgccgcccccgaggccccccagcccgccccccccggcggcagcggcagcgagccctacaagctgctgcccggcgccgtggccaccatcgtgagacccctggaggccatcccccagcccaccatcaccaagcaggaggtgatctga

SEQ ID NO: 493 - RNA, 1425 nt, synthetic construct
  misc_feature 1..1425: note = CDS (opt4) from Homo sapiens__NP_000448.3__HNF4A(1-474)(S87A_S95A_S99A_K106R_K10 8R_K126R_K127R_S138A_T139A_S142A_S143A_S148A_T166A_S167A_S3 13A_S378A_T429A_T432A_S436A_K458R_S461E)
  source 1..1425: mol_type = other RNA
atgagactgagcaagaccctggtggacatggacatggccgactacagcgccgccctggaccccgcctacaccaccctggagttcgagaacgtgcaggtgctgaccatgggcaacgacaccagccccagcgagggcaccaacctgaacgcccccaacagcctgggcgtgagcgccctgtgcgccatctgcggcgacagagccaccggcaagcactacggcgccagcagctgcgacggctgcaagggcttcttcagaagagccgtgagaaagaaccacatgtacgcctgcagattcgccagacagtgcgtggtggacagagacagaagaaaccagtgcagatactgcagactgaagaagtgcttcagagccggcatgagaagagaggccgtgcagaacgagagagacagaatcgccgccagaagagccgcctacgaggacagcgccctgcccagcatcaacgccctgctgcaggccgaggtgctgagcagacagatcgccgcccccgtgagcggcatcaacggcgacatcagagccaagaagatcgccagcatcgccgacgtgtgcgagagcatgaaggagcagctgctggtgctggtggagtgggccaagtacatccccgccttctgcgagctgcccctggacgaccaggtggccctgctgagagcccacgccggcgagcacctgctgctgggcgccaccaagagaagcatggtgttcaaggacgtgctgctgctgggcaacgactacatcgtgcccagacactgccccgagctggccgagatgagcagagtgagcatcagaatcctggacgagctggtgctgcccttccaggagctgcagatcgacgacaacgagtacgcctacctgaaggccatcatcttcttcgaccccgacgccaagggcctgagcgaccccggcaagatcaagagactgagagcccaggtgcaggtgagcctggaggactacatcaacgacagacagtacgacagcagaggcagattcggcgagctgctgctgctgctgcccaccctgcagagcatcacctggcagatgatcgagcagatccagttcatcaagctgttcggcatggccaagatcgacaacctgctgcaggagatgctgctgggcggcgcccccagcgacgccccccacgcccaccaccccctgcacccccacctgatgcaggagcacatgggcaccaacgtgatcgtggccaacaccatgcccacccacctgagcaacggccagatgtgcgagtggcccagacccagaggccaggccgccgcccccgaggccccccagcccgccccccccggcggcagcggcagcgagccctacaagctgctgcccggcgccgtggccaccatcgtgagacccctggaggccatcccccagcccaccatcaccaagcaggaggtgatctga

SEQ ID NO: 494 - RNA, 1425 nt, synthetic construct
  misc_feature 1..1425: note = CDS (opt5) from Homo sapiens__NP_000448.3__HNF4A(1-474)
  source 1..1425: mol_type = other RNA
atgagactgagcaagaccctcgtggacatggatatggccgactactccgctgccctggatcccgcgtatacaacgcttgagttcgaaaacgtccaggttctgaccatgggcaatgacacatctcctagcgaggggaccaacctcaatgctccgaactccctgggagtgtctgccctttgcgccatctgtggcgatcgggctacagggaaacactacggagccagctcctgcgacggctgtaaggggtttttccgcagatctgtgcggaaaaatcatatgtatagctgccgcttttccagacaatgtgtcgtggataaggacaaacggaaccagtgccgctactgtagactgaagaagtgcttccgggctggaatgaaaaaggaagccgttcagaatgagcgcgatagaattagcacccggcgcagctcctatgaagacagctctctcccctccatcaacgcgctgctgcaggccgaggtgctcagcagacaaattacatctcctgtctccggcatcaatggcgatattcgggctaaaaagatcgccagcatcgctgacgtgtgtgagtccatgaaagaacagctgcttgttctggtggagtgggccaagtacattcccgcgttttgcgaactccctctggatgaccaggtcgcccttctgcgcgctcacgccggggagcatctcctgctgggagctaccaagagatctatggtgttcaaagacgtgctcctgcttggcaacgattatatcgtcccccggcactgtcctgagctggccgaaatgagcagagtttccattcgcatcctcgacgagctggtgcttccgtttcaggaactgcaaattgatgacaatgagtacgcctacctcaaggctatcattttctttgatcccgacgcgaaagggctgagcgatcctggaaagatcaaacggctgagatctcaggtgcaggtctccctcgaagactatatcaacgatcgccagtacgacagccggggcagattcggggagctgcttctgctcctgcccacgcttcaatctattacctggcagatgatcgagcagattcaatttatcaagctgttcggaatggccaaaattgataatctcctgcaggaaatgctgctcggcggcagcccttccgacgctccccatgcccaccacccgctgcatcctcaccttatgcaggagcatatggggacaaacgtgatcgttgccaataccatgcccacacacctgtctaacggacagatgtgcgaatggcctcgcccccggggccaagctgccacccccgagacgcctcagccgtctccccctgggggatccggcagcgaaccctataagctcctgcctggggcggtggctacaatcgtcaagcccctgtctgccattccgcagcctaccatcacaaaacaggaggtgatttga

SEQ ID NO: 495 - RNA, 1425 nt, synthetic construct
  misc_feature 1..1425: note = CDS (opt5) from Homo sapiens__NP_000448.3__HNF4A(1-474)(S313A)
  source 1..1425: mol_type = other RNA
atgagactgagcaagaccctcgtggacatggatatggccgactactccgctgccctggatcccgcgtatacaacgcttgagttcgaaaacgtccaggttctgaccatgggcaatgacacatctcctagcgaggggaccaacctcaatgctccgaactccctgggagtgtctgccctttgcgccatctgtggcgatcgggctacagggaaacactacggagccagctcctgcgacggctgtaaggggtttttccgcagatctgtgcggaaaaatcatatgtatagctgccgcttttccagacaatgtgtcgtggataaggacaaacggaaccagtgccgctactgtagactgaagaagtgcttccgggctggaatgaaaaaggaagccgttcagaatgagcgcgatagaattagcacccggagatcttcctatgaagacagctctctcccctccatcaacgcgctgctgcaggccgaggtgctcagccgccaaattacatctcctgtctccggcatcaatggcgatattcgggctaaaaagatcgccagcatcgctgacgtgtgtgagtccatgaaagaacagctgcttgttctggtggagtgggccaagtacattcccgcgttttgcgaactccctctggatgaccaggtcgcccttctgcgcgctcacgccggggagcatctcctgctgggagctaccaagagatctatggtgttcaaagacgtgctcctgcttggcaacgattatatcgtcccccggcactgtcctgagctggccgaaatgagcagagtttccattcgcatcctcgacgagctggtgcttccgtttcaggaactgcaaattgatgacaatgagtacgcctacctcaaggctatcattttctttgatcccgacgcgaaagggctgagcgatcctggaaagatcaaacggctgagagcccaggtgcaggtctctctcgaagactatatcaacgatcgccagtacgactcccggggcagattcggggagctgcttctgctcctgcccacgcttcaaagcattacctggcagatgatcgagcagattcaatttatcaagctgttcggaatggctaaaattgataatctcctgcaggaaatgctgctcggcggctctcctagcgacgctccccatgcccaccacccgctgcatcctcaccttatgcaggagcatatggggacaaacgtgatcgttgccaataccatgcccacacacctgtccaacggacagatgtgcgaatggcctcgcccccggggccaagccgcgacccccgagacgcctcagccgtctccccctgggggaagcggctccgaaccctataagctcctgcctggggctgtggccacaatcgtcaagcccctgagcgccattccgcagcctaccatcacaaaacaggaggtgatttga

SEQ ID NO: 496 - RNA, 1425 nt, synthetic construct
  misc_feature 1..1425: note = CDS (opt5) from Homo sapiens__NP_000448.3__HNF4A(1-474)(S313E)
  source 1..1425: mol_type = other RNA
atgagactgagcaagaccctcgtggacatggatatggccgactactccgctgccctggatcccgcgtatacaacgcttgagttcgaaaacgtccaggttctgaccatgggcaatgacacatctcctagcgaggggaccaacctcaatgctccgaactccctgggagtgtctgccctttgcgccatctgtggcgatcgggctacagggaaacactacggagccagctcctgcgacggctgtaaggggtttttccgcagatctgtgcggaaaaatcatatgtatagctgccgcttttccagacaatgtgtcgtggataaggacaaacggaaccagtgccgctactgtagactgaagaagtgcttccgggctggaatgaaaaaggaagccgttcagaatgagcgcgatagaattagcacccggagatcttcctatgaagacagctctctcccctccatcaacgcgctgctgcaggccgaggtgctcagccgccaaattacatctcctgtctccggcatcaatggcgatattcgggctaaaaagatcgccagcatcgctgacgtgtgtgagtccatgaaagaacagctgcttgttctggtggagtgggccaagtacattcccgcgttttgcgaactccctctggatgaccaggtcgcccttctgcgcgctcacgccggggagcatctcctgctgggagctaccaagagatctatggtgttcaaagacgtgctcctgcttggcaacgattatatcgtcccccggcactgtcctgagctggccgaaatgagcagagtttccattcgcatcctcgacgagctggtgcttccgtttcaggaactgcaaattgatgacaatgagtacgcctacctcaaggctatcattttctttgatcccgacgcgaaagggctgagcgatcctggaaagatcaaacggctgagagaacaggtgcaggtctctctcgaggactatatcaacgatcgccagtacgactcccggggcagattcggggagctgcttctgctcctgcccacgcttcaaagcattacctggcagatgatcgaacagattcaatttatcaagctgttcggaatggccaaaattgataatctcctgcaggagatgctgctcggcggctctcctagcgacgctccccatgcccaccacccgctgcatcctcaccttatgcaggaacatatggggacaaacgtgatcgttgccaataccatgcccacacacctgtccaacggacagatgtgcgagtggcctcgcccccggggccaagctgccacccccgaaacgcctcagccgtctccccctgggggaagcggctccgagccctataagctcctgcctggggcggtggctacaatcgtcaagcccctgagcgccattccgcagcctaccatcacaaaacaggaggtgatttga

SEQ ID NO: 497 - RNA, 1425 nt, synthetic construct
  misc_feature 1..1425: note = CDS (opt5) from Homo sapiens__NP_000448.3__HNF4A(1-474)(S142A_S143A)
  source 1..1425: mol_type = other RNA
atgagactgagcaagaccctcgtggacatggatatggccgactactccgctgccctggatcccgcgtatacaacgcttgagttcgaaaacgtccaggttctgaccatgggcaatgacacatctcctagcgaggggaccaacctcaatgctccgaactccctgggagtgtctgccctttgcgccatctgtggcgatcgggctacagggaaacactacggagccagctcctgcgacggctgtaaggggtttttccgcagatctgtgcggaaaaatcatatgtatagctgccgcttttccagacaatgtgtcgtggataaggacaaacggaaccagtgccgctactgtagactgaagaagtgcttccgggctggaatgaaaaaggaagccgttcagaatgagcgcgatagaattagcacccggcgcgcggcctatgaagactcttccctccccagcatcaacgctctgctgcaggccgaggtgctctctagacaaattacatcccctgtcagcggcatcaatggcgatattcgggctaaaaagatcgcctctatcgcggacgtgtgtgagtccatgaaagaacagctgcttgttctggtggagtgggccaagtacattcccgctttttgcgaactccctctggatgaccaggtcgcccttctgcgcgctcacgccggggagcatctcctgctgggagccaccaagagaagcatggtgttcaaagacgtgctcctgcttggcaacgattatatcgtcccccggcactgtcctgagctggctgaaatgtccagagtttctattcgcatcctcgacgagctggtgcttccgtttcaggaactgcaaattgatgacaatgagtacgcgtacctcaaggccatcattttctttgatcccgacgctaaagggctgagcgatcctggaaagatcaaacggctgagatcccaggtgcaggtcagcctcgaagactatatcaacgatcgccagtacgactctcggggcagattcggggagctgcttctgctcctgcccacgcttcaatccattacctggcagatgatcgagcagattcaatttatcaagctgttcggaatggccaaaattgataatctcctgcaggaaatgctgctcggcggcagcccttctgacgctccccatgcccaccacccgctgcatcctcaccttatgcaggagcatatggggacaaacgtgatcgttgccaataccatgcccacacacctgagcaacggacagatgtgcgaatggcctcgcccccggggccaagcggctacccccgagacgcctcagccgtctccccctgggggatccggcagcgaaccctataagctcctgcctggggccgtggccacaatcgtcaagcccctgtccgctattccgcagcctaccatcacaaaacaggaggtgatttga

SEQ ID NO: 498 - RNA, 1425 nt, synthetic construct
  misc_feature 1..1425: note = CDS (opt5) from Homo sapiens__NP_000448.3__HNF4A(1-474)(S142E_S143E)
  source 1..1425: mol_type = other RNA
atgagactgagcaagaccctcgtggacatggatatggccgactactccgctgccctggatcccgcgtatacaacgcttgagttcgaaaacgtccaggttctgaccatgggcaatgacacatctcctagcgaggggaccaacctcaatgctccgaactccctgggagtgtctgccctttgcgccatctgtggcgatcgggctacagggaaacactacggagccagctcctgcgacggctgtaaggggtttttccgcagatctgtgcggaaaaatcatatgtatagctgccgcttttccagacaatgtgtcgtggataaggacaaacggaaccagtgccgctactgtagactgaagaagtgcttccgggctggaatgaaaaaggaagccgttcagaatgagcgcgatagaattagcacccggcgcgaagagtatgaggactcttccctccccagcatcaacgcgctgctgcaggccgaagtgctctctagacaaattacatcccctgtcagcggcatcaatggcgatattcgggctaaaaagatcgcctctatcgctgacgtgtgtgagtccatgaaagaacagctgcttgttctggtggagtgggccaagtacattcccgcgttttgcgagctccctctggatgaccaggtcgcccttctgcgcgctcacgccggggaacatctcctgctgggagctaccaagagaagcatggtgttcaaagacgtgctcctgcttggcaacgattatatcgtcccccggcactgtcctgagctggccgaaatgtccagagtttctattcgcatcctcgacgagctggtgcttccgtttcaggaactgcaaattgatgacaatgagtacgcctacctcaaggctatcattttctttgatcccgacgcgaaagggctgagcgatcctggaaagatcaaacggctgagatcccaggtgcaggtcagcctcgaggactatatcaacgatcgccagtacgactctcggggcagattcggggaactgcttctgctcctgcccacgcttcaatccattacctggcagatgatcgagcagattcaatttatcaagctgttcggaatggccaaaattgataatctcctgcaggaaatgctgctcggcggcagcccttctgacgctccccatgcccaccacccgctgcatcctcaccttatgcaggagcatatggggacaaacgtgatcgttgccaataccatgcccacacacctgagcaacggacagatgtgcgaatggcctcgcccccggggccaagctgccacccccgagacgcctcagccgtctccccctgggggatccggcagcgagccctataagctcctgcctggggcggtggctacaatcgtcaagcccctgtccgccattccgcagcctaccatcacaaaacaggaagtgatttga

SEQ ID NO: 499 - RNA, 1425 nt, synthetic construct
  misc_feature 1..1425: note = CDS (opt5) from Homo sapiens__NP_000448.3__HNF4A(1-474)(S143A)
  source 1..1425: mol_type = other RNA
atgagactgagcaagaccctcgtggacatggatatggccgactactccgctgccctggatcccgcgtatacaacgcttgagttcgaaaacgtccaggttctgaccatgggcaatgacacatctcctagcgaggggaccaacctcaatgctccgaactccctgggagtgtctgccctttgcgccatctgtggcgatcgggctacagggaaacactacggagccagctcctgcgacggctgtaaggggtttttccgcagatctgtgcggaaaaatcatatgtatagctgccgcttttccagacaatgtgtcgtggataaggacaaacggaaccagtgccgctactgtagactgaagaagtgcttccgggctggaatgaaaaaggaagccgttcagaatgagcgcgatagaattagcacccggcgctctgcgtatgaagactccagcctcccctctatcaacgccctgctgcaggctgaggtgctctccagacaaattacaagccctgtctctggcatcaatggcgatattcgggccaaaaagatcgcttccatcgccgacgtgtgtgagagcatgaaagaacagctgcttgttctggtggagtgggcgaagtacattcccgccttttgcgaactccctctggatgaccaggtcgcccttctgcgcgcccacgctggggagcatctcctgctgggagccaccaagagatccatggtgttcaaagacgtgctcctgcttggcaacgattatatcgtcccccggcactgtcctgagctggccgaaatgtctagagttagcattcgcatcctcgacgagctggtgcttccgtttcaggaactgcaaattgatgacaatgagtacgcttacctcaaggcgatcattttctttgatcccgacgccaaagggctgtccgatcctggaaagatcaaacggctgagaagccaggtgcaggtctctctcgaagactatatcaacgatcgccagtacgactcccggggcagattcggggagctgcttctgctcctgcccacgcttcaaagcattacctggcagatgatcgagcagattcaatttatcaagctgttcggaatggctaaaattgataatctcctgcaggaaatgctgctcggcggctctcctagcgacgctccccatgcccaccacccgctgcatcctcaccttatgcaggagcatatggggacaaacgtgatcgttgctaataccatgcccacacacctgtccaacggacagatgtgcgaatggcctcgcccccggggccaagccgcgacccccgagacgcctcagccgtctccccctgggggaagcggctccgaaccctataagctcctgcctggggctgtggccacaatcgtcaagcccctgagcgccattccgcagcctaccatcacaaaacaggaggtgatttga

SEQ ID NO: 500 - RNA, 1425 nt, synthetic construct
  misc_feature 1..1425: note = CDS (opt5) from Homo sapiens__NP_000448.3__HNF4A(1-474)(T166A)
  source 1..1425: mol_type = other RNA
atgagactgagcaagaccctcgtggacatggatatggccgactactccgctgccctggatcccgcgtatacaacgcttgagttcgaaaacgtccaggttctgaccatgggcaatgacacatctcctagcgaggggaccaacctcaatgctccgaactccctgggagtgtctgccctttgcgccatctgtggcgatcgggctacagggaaacactacggagccagctcctgcgacggctgtaaggggtttttccgcagatctgtgcggaaaaatcatatgtatagctgccgcttttccagacaatgtgtcgtggataaggacaaacggaaccagtgccgctactgtagactgaagaagtgcttccgggctggaatgaaaaaggaagccgttcagaatgagcgcgatagaattagcacccggcgcagctcctatgaagacagctctctcccctccatcaacgcgctgctgcaggccgaggtgctcagcagacaaattgcttctcctgtctccggcatcaatggcgatattcgggccaaaaagatcgctagcatcgccgacgtgtgtgagtccatgaaagaacagctgcttgttctggtggagtgggcgaagtacattcccgccttttgcgaactccctctggatgaccaggtcgcccttctgcgcgcccacgctggggagcatctcctgctgggagccacaaagagatctatggtgttcaaagacgtgctcctgcttggcaacgattatatcgtcccccggcactgtcctgagctggccgaaatgagcagagtttccattcgcatcctcgacgagctggtgcttccgtttcaggaactgcaaattgatgacaatgagtacgcttacctcaaggcgatcattttctttgatcccgacgccaaagggctgagcgatcctggaaagatcaaacggctgagatctcaggtgcaggtctccctcgaagactatatcaacgatcgccagtacgacagccggggcagattcggggagctgcttctgctcctgcccacccttcaatctattacgtggcagatgatcgagcagattcaatttatcaagctgttcggaatggctaaaattgataatctcctgcaggaaatgctgctcggcggcagcccttccgacgctccccatgcccaccacccgctgcatcctcaccttatgcaggagcatatggggaccaacgtgatcgttgctaatacaatgcccacccacctgtctaacggacagatgtgcgaatggcctcgcccccggggccaagccgcgacacccgagacccctcagccgtctccccctgggggatccggcagcgaaccctataagctcctgcctggggctgtggccacgatcgtcaagcccctgtctgccattccgcagcctacaatcaccaaacaggaggtgatttga

SEQ ID NO: 501 - RNA, 1425 nt, synthetic construct
  misc_feature 1..1425: note = CDS (opt5) from Homo sapiens__NP_000448.3__HNF4A(1-474)(S167E)
  source 1..1425: mol_type = other RNA
atgagactgagcaagaccctcgtggacatggatatggccgactactccgctgccctggatcccgcgtatacaacgcttgagttcgaaaacgtccaggttctgaccatgggcaatgacacatctcctagcgaggggaccaacctcaatgctccgaactccctgggagtgtctgccctttgcgccatctgtggcgatcgggctacagggaaacactacggagccagctcctgcgacggctgtaaggggtttttccgcagatctgtgcggaaaaatcatatgtatagctgccgcttttccagacaatgtgtcgtggataaggacaaacggaaccagtgccgctactgtagactgaagaagtgcttccgggctggaatgaaaaaggaagccgttcagaatgagcgcgatagaattagcacccggagatcttcctatgaagacagctctctcccctccatcaacgcgctgctgcaggccgaggtgctcagccgccaaattacagagcctgtctctggcatcaatggcgatattcgggctaaaaagatcgcctccatcgctgacgtgtgtgaaagcatgaaagagcagctgcttgttctggtggaatgggccaagtacattcccgcgttttgcgagctccctctggatgaccaggtcgcccttctgcgcgctcacgccggggagcatctcctgctgggagctaccaagagatccatggtgttcaaagacgtgctcctgcttggcaacgattatatcgtcccccggcactgtcctgaactggccgagatgtctagagttagcattcgcatcctcgacgaactggtgcttccgtttcaggagctgcaaattgatgacaatgaatacgcctacctcaaggctatcattttctttgatcccgacgcgaaagggctgtccgatcctggaaagatcaaacggctgagaagccaggtgcaggtctctctcgaggactatatcaacgatcgccagtacgactcccggggcagattcggggagctgcttctgctcctgcccacgcttcaaagcattacctggcagatgatcgaacagattcaatttatcaagctgttcggaatggccaaaattgataatctcctgcaggagatgctgctcggcggctctcctagcgacgctccccatgcccaccacccgctgcatcctcaccttatgcaggaacatatggggacaaacgtgatcgttgccaataccatgcccacacacctgtccaacggacagatgtgcgagtggcctcgcccccggggccaagctgccacccccgaaacgcctcagccgtctccccctgggggaagcggctccgagccctataagctcctgcctggggcggtggctacaatcgtcaagcccctgagcgccattccgcagcctaccatcacaaaacaggaggtgatttga

SEQ ID NO: 502 - RNA, 1425 nt, synthetic construct
  misc_feature 1..1425: note = CDS (opt5) from Homo sapiens__NP_000448.3__HNF4A(1-474)(S167A)
  source 1..1425: mol_type = other RNA
atgagactgagcaagaccctcgtggacatggatatggccgactactccgctgccctggatcccgcgtatacaacgcttgagttcgaaaacgtccaggttctgaccatgggcaatgacacatctcctagcgaggggaccaacctcaatgctccgaactccctgggagtgtctgccctttgcgccatctgtggcgatcgggctacagggaaacactacggagccagctcctgcgacggctgtaaggggtttttccgcagatctgtgcggaaaaatcatatgtatagctgccgcttttccagacaatgtgtcgtggataaggacaaacggaaccagtgccgctactgtagactgaagaagtgcttccgggctggaatgaaaaaggaagccgttcagaatgagcgcgatagaattagcacccggagatcttcctatgaagacagctctctcccctccatcaacgcgctgctgcaggccgaggtgctcagccgccaaattacagctcctgtctctggcatcaatggcgatattcgggccaaaaagatcgcttccatcgccgacgtgtgtgagagcatgaaagaacagctgcttgttctggtggagtgggcgaagtacattcccgccttttgcgaactccctctggatgaccaggtcgcccttctgcgcgcccacgctggggagcatctcctgctgggagccaccaagagatccatggtgttcaaagacgtgctcctgcttggcaacgattatatcgtcccccggcactgtcctgagctggccgaaatgtctagagttagcattcgcatcctcgacgagctggtgcttccgtttcaggaactgcaaattgatgacaatgagtacgcttacctcaaggcgatcattttctttgatcccgacgccaaagggctgtccgatcctggaaagatcaaacggctgagaagccaggtgcaggtctctctcgaagactatatcaacgatcgccagtacgactcccggggcagattcggggagctgcttctgctcctgcccacgcttcaaagcattacctggcagatgatcgagcagattcaatttatcaagctgttcggaatggctaaaattgataatctcctgcaggaaatgctgctcggcggctctcctagcgacgctccccatgcccaccacccgctgcatcctcaccttatgcaggagcatatggggacaaacgtgatcgttgctaataccatgcccacacacctgtccaacggacagatgtgcgaatggcctcgcccccggggccaagccgcgacccccgagacgcctcagccgtctccccctgggggaagcggctccgaaccctataagctcctgcctggggctgtggccacaatcgtcaagcccctgagcgccattccgcagcctaccatcacaaaacaggaggtgatttga

SEQ ID NO: 503 - RNA, 1425 nt, synthetic construct
  misc_feature 1..1425: note = CDS (opt5) from Homo sapiens__NP_000448.3__HNF4A(1-474)(S167A_S378A_T429A_T432A_ S436A)
  source 1..1425: mol_type = other RNA
atgagactgagcaagaccctcgtggacatggatatggccgactactccgctgccctggatcccgcgtatacaacgcttgagttcgaaaacgtccaggttctgaccatgggcaatgacacatctcctagcgaggggaccaacctcaatgctccgaactccctgggagtgtctgccctttgcgccatctgtggcgatcgggctacagggaaacactacggagccagctcctgcgacggctgtaaggggtttttccgcagatctgtgcggaaaaatcatatgtatagctgccgcttttccagacaatgtgtcgtggataaggacaaacggaaccagtgccgctactgtagactgaagaagtgcttccgggctggaatgaaaaaggaagccgttcagaatgagcgcgatagaattagcacccggagatcttcctatgaagacagctctctcccctccatcaacgcgctgctgcaggccgaggtgctcagccgccaaattacagctcctgtctctggcatcaatggcgatattcgggccaaaaagatcgcttccatcgccgacgtgtgtgagagcatgaaagaacagctgcttgttctggtggagtgggcgaagtacattcccgccttttgcgaactccctctggatgaccaggtcgcccttctgcgcgcccacgctggggagcatctcctgctgggagccaccaagagatccatggtgttcaaagacgtgctcctgcttggcaacgattatatcgtcccccggcactgtcctgagctggccgaaatgtctagagttagcattcgcatcctcgacgagctggtgcttccgtttcaggaactgcaaattgatgacaatgagtacgcttacctcaaggcgatcattttctttgatcccgacgccaaagggctgtccgatcctggaaagatcaaacggctgagaagccaggtgcaggtctctctcgaagactatatcaacgatcgccagtacgactcccggggcagattcggggagctgcttctgctcctgcccacgcttcaaagcattacctggcagatgatcgagcagattcaatttatcaagctgttcggaatggctaaaattgataatctcctgcaggaaatgctgctcggcggcgccccttctgacgctccccatgctcaccacccgctgcatcctcaccttatgcaggagcatatggggacaaacgtgatcgttgccaataccatgcccacacacctgagcaacggacagatgtgcgaatggcctcgcccccggggccaagcggctgcccccgaggcccctcagccggctccccctgggggatccggctctgaaccctataagctcctgcctggggccgtggctaccatcgtcaagcccctgagcgccattccgcagcctacgatcacaaaacaggaggtgatttga

SEQ ID NO: 504 - RNA, 1425 nt, synthetic construct
  misc_feature 1..1425: note = CDS (opt5) from Homo sapiens__NP_000448.3__HNF4A(1-474)(S167E_S378E_T429E_T432E_ S436E)
  source 1..1425: mol_type = other RNA
atgagactgagcaagaccctcgtggacatggatatggccgactactccgctgccctggatcccgcgtatacaacgcttgagttcgaaaacgtccaggttctgaccatgggcaatgacacatctcctagcgaggggaccaacctcaatgctccgaactccctgggagtgtctgccctttgcgccatctgtggcgatcgggctacagggaaacactacggagccagctcctgcgacggctgtaaggggtttttccgcagatctgtgcggaaaaatcatatgtatagctgccgcttttccagacaatgtgtcgtggataaggacaaacggaaccagtgccgctactgtagactgaagaagtgcttccgggctggaatgaaaaaggaagccgttcagaatgagcgcgatagaattagcacccggagatcttcctatgaagacagctctctcccctccatcaacgcgctgctgcaggccgaggtgctcagccgccaaattacagagcctgtctctggcatcaatggcgatattcgggctaaaaagatcgcctccatcgctgacgtgtgtgaaagcatgaaagagcagctgcttgttctggtggaatgggccaagtacattcccgcgttttgcgagctccctctggatgaccaggtcgcccttctgcgcgctcacgccggggagcatctcctgctgggagctaccaagagatccatggtgttcaaagacgtgctcctgcttggcaacgattatatcgtcccccggcactgtcctgaactggccgagatgtctagagttagcattcgcatcctcgacgaactggtgcttccgtttcaggagctgcaaattgatgacaatgaatacgcctacctcaaggctatcattttctttgatcccgacgcgaaagggctgtccgatcctggaaagatcaaacggctgagaagccaggtgcaggtctctctcgaggactatatcaacgatcgccagtacgactcccggggcagattcggggagctgcttctgctcctgcccacgcttcaaagcattacctggcagatgatcgaacagattcaatttatcaagctgttcggaatggccaaaattgataatctcctgcaggagatgctgctcggcggcgaaccttctgacgctccccatgcccaccacccgctgcatcctcaccttatgcaggagcatatggggacaaacgtgatcgttgccaataccatgcccacacacctgagcaacggacagatgtgcgaatggcctcgcccccggggccaagctgccgagcccgaggaacctcagccggagccccctgggggatccggctctgaaccctataagctcctgcctggggcggtggctaccatcgtcaagcccctgagcgccattccgcagcctacgatcacaaaacaggaggtgatttga

SEQ ID NO: 505 - RNA, 1425 nt, synthetic construct
  misc_feature 1..1425: note = CDS (opt5) from Homo sapiens__NP_000448.3__HNF4A(1-474)(S87A)
  source 1..1425: mol_type = other RNA
atgagactgagcaagaccctcgtggacatggatatggccgactactccgctgccctggatcccgcgtatacaacgcttgagttcgaaaacgtccaggttctgaccatgggcaatgacacatctcctagcgaggggaccaacctcaatgctccgaactccctgggagtgtctgccctttgcgccatctgtggcgatcgggctacagggaaacactacggagccagctcctgcgacggctgtaaggggtttttccgcagagctgtgcggaaaaatcatatgtattcttgccgctttagcagacaatgtgtcgtggataaggacaaacggaaccagtgccgctactgtagactgaagaagtgcttccgggccggaatgaaaaaggaagcggttcagaatgagcgcgatagaatttccacccggcgcagctcttatgaagactccagcctcccctctatcaacgccctgctgcaggctgaggtgctctccagacaaattacaagccctgtctctggcatcaatggcgatattcgggccaaaaagatcgcttccatcgccgacgtgtgtgagagcatgaaagaacagctgcttgttctggtggagtgggcgaagtacattcccgccttttgcgaactccctctggatgaccaggtcgcccttctgcgcgcccacgctggggagcatctcctgctgggagccaccaagagatccatggtgttcaaagacgtgctcctgcttggcaacgattatatcgtcccccggcactgtcctgagctggccgaaatgtctagagttagcattcgcatcctcgacgagctggtgcttccgtttcaggaactgcaaattgatgacaatgagtacgcttacctcaaggcgatcattttctttgatcccgacgccaaagggctgtccgatcctggaaagatcaaacggctgagaagccaggtgcaggtctctctcgaagactatatcaacgatcgccagtacgactcccggggcagattcggggagctgcttctgctcctgcccacgcttcaaagcattacctggcagatgatcgagcagattcaatttatcaagctgttcggaatggctaaaattgataatctcctgcaggaaatgctgctcggcggctctcctagcgacgctccccatgcccaccacccgctgcatcctcaccttatgcaggagcatatggggacaaacgtgatcgttgctaataccatgcccacacacctgtccaacggacagatgtgcgaatggcctcgcccccggggccaagccgcgacccccgagacgcctcagccgtctccccctgggggaagcggctccgaaccctataagctcctgcctggggctgtggccacaatcgtcaagcccctgagcgccattccgcagcctaccatcacaaaacaggaggtgatttga

SEQ ID NO: 506 - RNA, 1425 nt, synthetic construct
  misc_feature 1..1425: note = CDS (opt5) from Homo sapiens__NP_000448.3__HNF4A(1-474)(S87E)
  source 1..1425: mol_type = other RNA
atgagactgagcaagaccctcgtggacatggatatggccgactactccgctgccctggatcccgcgtatacaacgcttgagttcgaaaacgtccaggttctgaccatgggcaatgacacatctcctagcgaggggaccaacctcaatgctccgaactccctgggagtgtctgccctttgcgccatctgtggcgatcgggctacagggaaacactacggagccagctcctgcgacggctgtaaggggtttttccgcagagaagtgcggaaaaatcatatgtattcttgccgctttagcagacaatgtgtcgtggataaggacaaacggaaccagtgccgctactgtagactgaagaagtgcttccgggctggaatgaaaaaggaggccgttcagaatgaacgcgatagaatttccacccggcgcagctcttatgaggactccagcctcccctctatcaacgcgctgctgcaggccgaggtgctctccagacaaattacaagccctgtctctggcatcaatggcgatattcgggctaaaaagatcgcctccatcgctgacgtgtgtgaaagcatgaaagagcagctgcttgttctggtggaatgggccaagtacattcccgcgttttgcgagctccctctggatgaccaggtcgcccttctgcgcgctcacgccggggagcatctcctgctgggagctaccaagagatccatggtgttcaaagacgtgctcctgcttggcaacgattatatcgtcccccggcactgtcctgaactggccgagatgtctagagttagcattcgcatcctcgacgaactggtgcttccgtttcaggagctgcaaattgatgacaatgaatacgcctacctcaaggctatcattttctttgatcccgacgcgaaagggctgtccgatcctggaaagatcaaacggctgagaagccaggtgcaggtctctctcgaggactatatcaacgatcgccagtacgactcccggggcagattcggggagctgcttctgctcctgcccacgcttcaaagcattacctggcagatgatcgaacagattcaatttatcaagctgttcggaatggccaaaattgataatctcctgcaggagatgctgctcggcggctctcctagcgacgctccccatgcccaccacccgctgcatcctcaccttatgcaggaacatatggggacaaacgtgatcgttgccaataccatgcccacacacctgtccaacggacagatgtgcgagtggcctcgcccccggggccaagctgccacccccgaaacgcctcagccgtctccccctgggggaagcggctccgagccctataagctcctgcctggggcggtggctacaatcgtcaagcccctgagcgccattccgcagcctaccatcacaaaacaggaggtgatttga

SEQ ID NO: 507 - RNA, 1425 nt, synthetic construct
  misc_feature 1..1425: note = CDS (opt5) from Homo sapiens__NP_000448.3__HNF4A(1-474)(R2V)
  source 1..1425: mol_type = other RNA
atggtgctgagcaagaccctcgtcgacatggatatggccgactactccgctgccctggatcccgcgtatacaacgcttgagttcgaaaacgttcaggtgctgaccatgggcaatgacacatctcctagcgaggggaccaacctcaatgctccgaactccctgggagtgtctgccctttgcgccatctgtggcgatagagctacagggaaacactacggagccagctcctgcgacggctgtaaggggtttttccggcgctctgtccggaaaaatcatatgtatagctgcagattttcccgccaatgtgtggttgataaggacaaaagaaaccagtgccggtactgtcgcctgaagaagtgcttcagagctggaatgaaaaaggaagccgtgcagaatgagcgggatcgcattagcaccagacggtcttcctatgaagacagctctctcccctccatcaacgcgctgctgcaggccgaggtcctcagccgccaaattacatctcctgtgtccggcatcaatggcgatattagagctaaaaagatcgccagcatcgctgacgtttgtgagtccatgaaagaacagctgcttgtgctggtcgagtgggccaagtacattcccgcgttttgcgaactccctctggatgaccaggtggcccttctgcgggctcacgccggggagcatctcctgctgggagctaccaagcgctctatggtgttcaaagacgtcctcctgcttggcaacgattatatcgttcccagacactgtcctgagctggccgaaatgagccgggtgtccattagaatcctcgacgagctggtgcttccgtttcaggaactgcaaattgatgacaatgagtacgcctacctcaaggctatcattttctttgatcccgacgcgaaagggctgagcgatcctggaaagatcaaacgcctgcggtctcaggtccaggtgtccctcgaagactatatcaacgatagacagtacgacagccgcggccggttcggggagctgcttctgctcctgcccacgcttcaatctattacctggcagatgatcgagcagattcaatttatcaagctgttcggaatggccaaaattgataatctcctgcaggaaatgctgctcggcggcagcccttccgacgctccccatgcccaccacccgctgcatcctcaccttatgcaggagcatatggggacaaacgttatcgtggccaataccatgcccacacacctgtctaacggacagatgtgcgaatggcctagaccccgcggccaagctgccacccccgagacgcctcagccgagccctcccgggggatccggcagcgaaccctataagctcctgcctggggcggtcgctacaatcgtgaagcccctgtctgccattccgcagcctaccatcacaaaacaggaggttatttga

SEQ ID NO: 508 - RNA, 1425 nt, synthetic construct
  misc_feature 1..1425: note = CDS (opt5) from Homo sapiens__NP_000448.3__HNF4A(1-474)(R2V_K5V)
  source 1..1425: mol_type = other RNA
atggtgctgagcgtcaccctcgttgacatggatatggccgactactccgctgccctggatcccgcgtatacaacgcttgagttcgaaaacgtccaggtgctgaccatgggcaatgacacatctcctagcgaggggaccaacctcaatgctccgaactccctgggagtgtctgccctttgcgccatctgtggcgatagagctacagggaagcactacggagccagctcctgcgacggctgtaaagggtttttccggcgctctgtgagaaagaatcatatgtatagctgccggttttcccgccaatgtgttgtggataaagacaagagaaaccagtgccggtactgtcgcctgaaaaagtgcttcagagctggaatgaagaaagaagccgtccagaatgagcgggatcgcattagcaccagacggtcttcctatgaagacagctctctcccctccatcaacgcgctgctgcaggccgaggtgctcagccgccaaattacatctcctgtttccggcatcaatggcgatattagagctaagaaaatcgccagcatcgctgacgtgtgtgagtccatgaaggaacagctgcttgtcctggtggagtgggccaaatacattcccgcgttttgcgaactccctctggatgaccaggtggcccttctgcgggctcacgccggggagcatctcctgctgggagctaccaagcgctctatggtcttcaaggacgttctcctgcttggcaacgattatatcgtgcccagacactgtcctgagctggccgaaatgagccgggtgtccattagaatcctcgacgagctggtccttccgtttcaggaactgcaaattgatgacaatgagtacgcctacctcaaagctatcattttctttgatcccgacgcgaaggggctgagcgatcctggaaaaatcaagcgcctgcggtctcaggtgcaggtttccctcgaagactatatcaacgatagacagtacgacagccgcggccggttcggggagctgcttctgctcctgcccacgcttcaatctattacctggcagatgatcgagcagattcaatttatcaaactgttcggaatggccaagattgataatctcctgcaggaaatgctgctcggcggcagcccttccgacgctccccatgcccaccacccgctgcatcctcaccttatgcaggagcatatggggacaaacgtgatcgtcgccaataccatgcccacacacctgtctaacggacagatgtgcgaatggcctagaccccgcggccaagctgccacccccgagacgcctcagccgagccctcccgggggatccggcagcgaaccctataaactcctgcctggggcggtggctacaatcgttaagcccctgtctgccattccgcagcctaccatcacaaagcaggaggtgatttga

SEQ ID NO: 509 - RNA, 1425 nt, synthetic construct
  misc_feature 1..1425: note = CDS (opt5) from Homo sapiens__NP_000448.3__HNF4A(1-474)(K179R_K180R)
  source 1..1425: mol_type = other RNA
atgagactgagcaagaccctcgtggacatggatatggccgactactccgctgccctggatcccgcgtatacaacgcttgagttcgaaaacgtccaggttctgaccatgggcaatgacacatctcctagcgaggggaccaacctcaatgctccgaactccctgggagtgtctgccctttgcgccatctgtggcgatcgggctacagggaaacactacggagccagctcctgcgacggctgtaaggggtttttccgcagatctgtgcggaaaaatcatatgtatagctgccgcttttccagacaatgtgtcgtggataaggacaaacggaaccagtgccgctactgtagactgaagaagtgcttccgggctggaatgaaaaaggaagccgttcagaatgagcgcgatagaattagcacccggcgcagctcctatgaagacagctctctcccctccatcaacgcgctgctgcaggccgaggtgctcagcagacaaattacatctcctgtctccggcatcaatggcgatattcgggctcgcagaatcgccagcatcgctgacgtgtgtgagtccatgaaagaacagctgcttgttctggtggagtgggccaagtacattcccgcgttttgcgaactccctctggatgaccaggtcgcccttctgcgggctcacgccggggagcatctcctgctgggagctaccaaaagatctatggtgttcaaggacgtgctcctgcttggcaacgattatatcgtcccccgccactgtcctgagctggccgaaatgagccgggtttccattagaatcctcgacgagctggtgcttccgtttcaggaactgcaaattgatgacaatgagtacgcctacctcaaggctatcattttctttgatcccgacgcgaaagggctgagcgatcctggaaagatcaaacgcctgcggtctcaggtgcaggtctccctcgaagactatatcaacgatagacagtacgacagccgcggccggttcggggagctgcttctgctcctgcccacgcttcaatctattacctggcagatgatcgagcagattcaatttatcaagctgttcggaatggccaaaattgataatctcctgcaggaaatgctgctcggcggcagcccttccgacgctccccatgcccaccacccgctgcatcctcaccttatgcaggagcatatggggacaaacgtgatcgttgccaataccatgcccacacacctgtctaacggacagatgtgcgaatggcctagaccccgcggccaagctgccacccccgagacgcctcagccgtctccccctgggggatccggcagcgaaccctataagctcctgcctggggcggtggctacaatcgtcaaacccctgtctgccattccgcagcctaccatcacaaagcaggaggtgatttga

SEQ ID NO: 510 - RNA, 1425 nt, synthetic construct
  misc_feature 1..1425: note = CDS (opt5) from Homo sapiens__NP_000448.3__HNF4A(1-474)(K234R)
  source 1..1425: mol_type = other RNA
atgagactgagcaagaccctcgtggacatggatatggccgactactccgctgccctggatcccgcgtatacaacgcttgagttcgaaaacgtccaggttctgaccatgggcaatgacacatctcctagcgaggggaccaacctcaatgctccgaactccctgggagtgtctgccctttgcgccatctgtggcgatcgggctacagggaaacactacggagccagctcctgcgacggctgtaaggggtttttccgcagatctgtgcggaaaaatcatatgtatagctgccgcttttccagacaatgtgtcgtggataaggacaaacggaaccagtgccgctactgtagactgaagaagtgcttccgggctggaatgaaaaaggaagccgttcagaatgagcgcgatagaattagcacccggcgcagctcctatgaagacagctctctcccctccatcaacgcgctgctgcaggccgaggtgctcagcagacaaattacatctcctgtctccggcatcaatggcgatattcgggctaaaaagatcgccagcatcgctgacgtgtgtgagtccatgaaagaacagctgcttgttctggtggagtgggccaagtacattcccgcgttttgcgaactccctctggatgaccaggtcgcccttctgcgcgctcacgccggggagcatctcctgctgggagctaccagacggtctatggtgttcaaggacgtgctcctgcttggcaacgattatatcgtccccagacactgtcctgagctggccgaaatgagccgcgtttccattcggatcctcgacgagctggtgcttccgtttcaggaactgcaaattgatgacaatgagtacgcctacctcaaagctatcattttctttgatcccgacgcgaaggggctgagcgatcctggaaaaatcaagagactgcgctctcaggtgcaggtctccctcgaagactatatcaacgatcggcagtacgacagcagaggccgcttcggggagctgcttctgctcctgcccacgcttcaatctattacctggcagatgatcgagcagattcaatttatcaaactgttcggaatggccaagattgataatctcctgcaggaaatgctgctcggcggcagcccttccgacgctccccatgcccaccacccgctgcatcctcaccttatgcaggagcatatggggacaaacgtgatcgttgccaataccatgcccacacacctgtctaacggacagatgtgcgaatggcctcggcccagaggccaagctgccacccccgagacgcctcagccgtctccccctgggggatccggcagcgaaccctataaactcctgcctggggcggtggctacaatcgtcaagcccctgtctgccattccgcagcctaccatcacaaagcaggaggtgatttga

SEQ ID NO: 511 - RNA, 1425 nt, synthetic construct
  misc_feature 1..1425: note = CDS (opt5) from Homo sapiens__NP_000448.3__HNF4A(1-474)(K300R)
  source 1..1425: mol_type = other RNA
atgagactgagcaagaccctcgtggacatggatatggccgactactccgctgccctggatcccgcgtatacaacgcttgagttcgaaaacgtccaggttctgaccatgggcaatgacacatctcctagcgaggggaccaacctcaatgctccgaactccctgggagtgtctgccctttgcgccatctgtggcgatcgggctacagggaaacactacggagccagctcctgcgacggctgtaaggggtttttccgcagatctgtgcggaaaaatcatatgtatagctgccgcttttccagacaatgtgtcgtggataaggacaaacggaaccagtgccgctactgtagactgaagaagtgcttccgggctggaatgaaaaaggaagccgttcagaatgagcgcgatagaattagcacccggcgcagctcctatgaagacagctctctcccctccatcaacgcgctgctgcaggccgaggtgctcagcagacaaattacatctcctgtctccggcatcaatggcgatattcgggctaaaaagatcgccagcatcgctgacgtgtgtgagtccatgaaagaacagctgcttgttctggtggagtgggccaagtacattcccgcgttttgcgaactccctctggatgaccaggtcgcccttctgcgcgctcacgccggggagcatctcctgctgggagctaccaagagatctatggtgttcaaagacgtgctcctgcttggcaacgattatatcgtcccccggcactgtcctgagctggccgaaatgagcagagtttccattcgcatcctcgacgagctggtgcttccgtttcaggaactgcaaattgatgacaatgagtacgcctacctcaaggctatcattttctttgatcccgacgcgcgggggctgagcgatcctggaaaaatcaagagactgcgctctcaggtgcaggtctccctcgaagactatatcaacgatcggcagtacgacagcagaggccgcttcggggagctgcttctgctcctgcccacgcttcaatctattacctggcagatgatcgagcagattcaatttatcaaactgttcggaatggccaagattgataatctcctgcaggaaatgctgctcggcggcagcccttccgacgctccccatgcccaccacccgctgcatcctcaccttatgcaggagcatatggggacaaacgtgatcgttgccaataccatgcccacacacctgtctaacggacagatgtgcgaatggcctcggcccagaggccaagctgccacccccgagacgcctcagccgtctccccctgggggatccggcagcgaaccctataaactcctgcctggggcggtggctacaatcgtcaagcccctgtctgccattccgcagcctaccatcacaaagcaggaggtgatttga

SEQ ID NO: 512 - RNA, 1425 nt, synthetic construct
  misc_feature 1..1425: note = CDS (opt5) from Homo sapiens__NP_000448.3__HNF4A(1-474)(K300R_K307R_K309R)
  source 1..1425: mol_type = other RNA
atgagactgagcaagaccctcgtggacatggatatggccgactactccgctgccctggatcccgcgtatacaacgcttgagttcgaaaacgtccaggttctgaccatgggcaatgacacatctcctagcgaggggaccaacctcaatgctccgaactccctgggagtgtctgccctttgcgccatctgtggcgatcgggctacagggaaacactacggagccagctcctgcgacggctgtaaggggtttttccgcagatctgtgcggaaaaatcatatgtatagctgccgcttttccagacaatgtgtcgtggataaggacaaacggaaccagtgccgctactgtagactgaagaagtgcttccgggctggaatgaaaaaggaagccgttcagaatgagcgcgatagaattagcacccggcgcagctcctatgaagacagctctctcccctccatcaacgcgctgctgcaggccgaggtgctcagcagacaaattacatctcctgtctccggcatcaatggcgatattcgggctaaaaagatcgccagcatcgctgacgtgtgtgagtccatgaaagaacagctgcttgttctggtggagtgggccaagtacattcccgcgttttgcgaactccctctggatgaccaggtcgcccttctgcgcgctcacgccggggagcatctcctgctgggagctaccaagagatctatggtgttcaaagacgtgctcctgcttggcaacgattatatcgtcccccggcactgtcctgagctggccgaaatgagcagagtttccattcgcatcctcgacgagctggtgcttccgtttcaggaactgcaaattgatgacaatgagtacgcctacctcaaggctatcattttctttgatcccgacgcgcgggggctgagcgatcctggaagaatccgccggctgagatctcaggtgcaggtctccctcgaagactatatcaacgatcgccagtacgacagccggggcagattcggggagctgcttctgctcctgcccacgcttcaatctattacctggcagatgatcgagcagattcaatttatcaaactgttcggaatggccaagattgataatctcctgcaggaaatgctgctcggcggcagcccttccgacgctccccatgcccaccacccgctgcatcctcaccttatgcaggagcatatggggacaaacgtgatcgttgccaataccatgcccacacacctgtctaacggacagatgtgcgaatggcctcgcccccggggccaagctgccacccccgagacgcctcagccgtctccccctgggggatccggcagcgaaccctataaactcctgcctggggcggtggctacaatcgtcaagcccctgtctgccattccgcagcctaccatcacaaaacaggaggtgatttga

SEQ ID NO: 513 - RNA, 1425 nt, synthetic construct
  misc_feature 1..1425: note = CDS (opt5) from Homo sapiens__NP_000448.3__HNF4A(1-474)(K447R_K470R)
  source 1..1425: mol_type = other RNA
atgagactgagcaagaccctcgtggacatggatatggccgactactccgctgccctggatcccgcgtatacaacgcttgagttcgaaaacgtccaggttctgaccatgggcaatgacacatctcctagcgaggggaccaacctcaatgctccgaactccctgggagtgtctgccctttgcgccatctgtggcgatcgggctacagggaaacactacggagccagctcctgcgacggctgtaaggggtttttccgcagatctgtgcggaaaaatcatatgtatagctgccgcttttccagacaatgtgtcgtggataaggacaaacggaaccagtgccgctactgtagactgaagaagtgcttccgggctggaatgaaaaaggaagccgttcagaatgagcgcgatagaattagcacccggcgcagctcctatgaagacagctctctcccctccatcaacgcgctgctgcaggccgaggtgctcagcagacaaattacatctcctgtctccggcatcaatggcgatattcgggctaaaaagatcgccagcatcgctgacgtgtgtgagtccatgaaagaacagctgcttgttctggtggagtgggccaagtacattcccgcgttttgcgaactccctctggatgaccaggtcgcccttctgcgcgctcacgccggggagcatctcctgctgggagctaccaagagatctatggtgttcaaagacgtgctcctgcttggcaacgattatatcgtcccccggcactgtcctgagctggccgaaatgagcagagtttccattcgcatcctcgacgagctggtgcttccgtttcaggaactgcaaattgatgacaatgagtacgcctacctcaaggctatcattttctttgatcccgacgcgaaagggctgagcgatcctggaaagatcaaacggctgagatctcaggtgcaggtctccctcgaagactatatcaacgatcgccagtacgacagccggggcagattcggggagctgcttctgctcctgcccacgcttcaatctattacctggcagatgatcgagcagattcaatttatcaagctgttcggaatggccaaaattgataatctcctgcaggaaatgctgctcggcggcagcccttccgacgctccccatgcccaccacccgctgcatcctcaccttatgcaggagcatatggggacaaacgtgatcgttgccaataccatgcccacacacctgtctaacggacagatgtgcgaatggcctcgcccccggggccaagctgccacccccgagacgcctcagccgtctccccctgggggatccggcagcgaaccctatagactcctgcctggggcggtggctacaatcgtcaagcccctgtctgccattccgcagcctaccatcacacgccaggaggtgatttga

SEQ ID NO: 514 - RNA, 1425 nt, synthetic construct
  misc_feature 1..1425: note = CDS (opt5) from Homo sapiens__NP_000448.3__HNF4A(1-474)(K458R)
  source 1..1425: mol_type = other RNA
atgagactgagcaagaccctcgtggacatggatatggccgactactccgctgccctggatcccgcgtatacaacgcttgagttcgaaaacgtccaggttctgaccatgggcaatgacacatctcctagcgaggggaccaacctcaatgctccgaactccctgggagtgtctgccctttgcgccatctgtggcgatcgggctacagggaaacactacggagccagctcctgcgacggctgtaaggggtttttccgcagatctgtgcggaaaaatcatatgtatagctgccgcttttccagacaatgtgtcgtggataaggacaaacggaaccagtgccgctactgtagactgaagaagtgcttccgggctggaatgaaaaaggaagccgttcagaatgagcgcgatagaattagcacccggcgcagctcctatgaagacagctctctcccctccatcaacgcgctgctgcaggccgaggtgctcagcagacaaattacatctcctgtctccggcatcaatggcgatattcgggctaaaaagatcgccagcatcgctgacgtgtgtgagtccatgaaagaacagctgcttgttctggtggagtgggccaagtacattcccgcgttttgcgaactccctctggatgaccaggtcgcccttctgcgcgctcacgccggggagcatctcctgctgggagctaccaagagatctatggtgttcaaagacgtgctcctgcttggcaacgattatatcgtcccccggcactgtcctgagctggccgaaatgagcagagtttccattcgcatcctcgacgagctggtgcttccgtttcaggaactgcaaattgatgacaatgagtacgcctacctcaaggctatcattttctttgatcccgacgcgaaagggctgagcgatcctggaaagatcaaacggctgagatctcaggtgcaggtctccctcgaagactatatcaacgatcgccagtacgacagccggggcagattcggggagctgcttctgctcctgcccacgcttcaatctattacctggcagatgatcgagcagattcaatttatcaagctgttcggaatggccaaaattgataatctcctgcaggaaatgctgctcggcggcagcccttccgacgctccccatgcccaccacccgctgcatcctcaccttatgcaggagcatatggggacaaacgtgatcgttgccaataccatgcccacacacctgtctaacggacagatgtgcgaatggcctcgcccccggggccaagctgccacccccgagacgcctcagccgtctccccctgggggatccggcagcgaaccctataagctcctgcctggggcggtggctacaatcgtcagacccctgtctgccattccgcagcctaccatcacaaagcaggaggtgatttga

SEQ ID NO: 515 - RNA, 1425 nt, synthetic construct
  misc_feature 1..1425: note = CDS (opt5) from Homo sapiens__NP_000448.3__HNF4A(1-474)(K106R_K108R_K126R_K127R)
  source 1..1425: mol_type = other RNA
atgagactgagcaagaccctcgtggacatggatatggccgactactccgctgccctggatcccgcgtatacaacgcttgagttcgaaaacgtccaggttctgaccatgggcaatgacacatctcctagcgaggggaccaacctcaatgctccgaactccctgggagtgtctgccctttgcgccatctgtggcgatcgggctacagggaaacactacggagccagctcctgcgacggctgtaaggggtttttccgcagatctgtgcggaaaaatcatatgtatagctgccgcttttccagacaatgtgtcgtggatcgggaccgcagaaaccagtgccggtactgtcgcctgaagaaatgcttcagagctggaatgcggcgcgaagccgttcagaatgagagagatcggattagcacccgcagatcttcctatgaagacagctctctcccctccatcaacgcgctgctgcaggccgaggtgctcagccggcaaattacatctcctgtctccggcatcaatggcgatattagagctaagaagatcgccagcatcgctgacgtgtgtgagtccatgaaagaacagctgcttgttctggtggagtgggccaagtacattcccgcgttttgcgaactccctctggatgaccaggtcgcccttctgcgcgctcacgccggggagcatctcctgctgggagctaccaaacggtctatggtgttcaaggacgtgctcctgcttggcaacgattatatcgtccccagacactgtcctgagctggccgaaatgagccgcgtttccattcggatcctcgacgagctggtgcttccgtttcaggaactgcaaattgatgacaatgagtacgcctacctcaaagctatcattttctttgatcccgacgcgaaggggctgagcgatcctggaaagatcaaaagactgcgctctcaggtgcaggtctccctcgaagactatatcaacgatcggcagtacgacagcagaggccgcttcggggagctgcttctgctcctgcccacgcttcaatctattacctggcagatgatcgagcagattcaatttatcaagctgttcggaatggccaaaattgataatctcctgcaggaaatgctgctcggcggcagcccttccgacgctccccatgcccaccacccgctgcatcctcaccttatgcaggagcatatggggacaaacgtgatcgttgccaataccatgcccacacacctgtctaacggacagatgtgcgaatggcctcggcccagaggccaagctgccacccccgagacgcctcagccgagccctcccgggggatccggcagcgaaccctataagctcctgcctggggcggtggctacaatcgtcaaacccctgtctgccattccgcagcctaccatcacaaagcaggaggtgatttga

SEQ ID NO: 516 - RNA, 1425 nt, synthetic construct
  misc_feature 1..1425: note = CDS (opt5) from Homo sapiens__NP_000448.3__HNF4A(1-474)(E285Q)
  source 1..1425: mol_type = other RNA
atgagactgagcaagaccctcgtggacatggatatggccgactactccgctgccctggatcccgcgtatacaacgcttgagttcgaaaacgtccaggttctgaccatgggcaatgacacatctcctagcgaggggaccaacctcaatgctccgaactccctgggagtgtctgccctttgcgccatctgtggcgatcgggctacagggaaacactacggagccagctcctgcgacggctgtaaggggtttttccgcagatctgtgcggaaaaatcatatgtatagctgccgcttttccagacaatgtgtcgtggataaggacaaacggaaccagtgccgctactgtagactgaagaagtgcttccgggctggaatgaaaaaggaagccgttcagaatgagcgcgatagaattagcacccggcgcagctcctatgaagacagctctctcccctccatcaacgcgctgctgcaggccgaggtgctcagcagacaaattacatctcctgtctccggcatcaatggcgatattcgggctaaaaagatcgccagcatcgctgacgtgtgtgagtccatgaaagaacagctgcttgttctggtggagtgggccaagtacattcccgcgttttgcgaactccctctggatgaccaggtcgcccttctgcgcgctcacgccggggagcatctcctgctgggagctaccaagagatctatggtgttcaaagacgtgctcctgcttggcaacgattatatcgtcccccggcactgtcctgagctggccgaaatgagcagagtttccattcgcatcctcgacgagctggtgcttccgtttcaggaactgcaaattgatgacaatcagtacgcctacctcaaggctatcattttctttgatcccgacgcgaaagggctgagcgatcctggaaagatcaaacggctgagatctcaggtgcaggtctccctcgaggactatatcaacgatcgccaatacgacagccggggcagattcggggaactgcttctgctcctgcccacgcttcagtctattacctggcagatgatcgagcaaattcagtttatcaagctgttcggaatggccaaaattgataatctcctgcaggagatgctgctcggcggcagcccttccgacgctccccatgcccaccacccgctgcatcctcaccttatgcaggaacatatggggacaaacgtgatcgttgccaataccatgcccacacacctgtctaacggacaaatgtgcgagtggcctcgcccccggggccaggctgccacccccgaaacgcctcagccgtctccccctgggggatccggcagcgagccctataagctcctgcctggggcggtggctacaatcgtcaagcccctgtctgccattccgcagcctaccatcacaaaacaagaagtgatttga

SEQ ID NO: 517 - RNA, 1425 nt, synthetic construct
  misc_feature 1..1425: note = CDS (opt5) from Homo sapiens__NP_000448.3__HNF4A(1-474)(T166E)
  source 1..1425: mol_type = other RNA
atgagactgagcaagaccctcgtggacatggatatggccgactactccgctgccctggatcccgcgtatacaacgcttgagttcgaaaacgtccaggttctgaccatgggcaatgacacatctcctagcgaggggaccaacctcaatgctccgaactccctgggagtgtctgccctttgcgccatctgtggcgatcgggctacagggaaacactacggagccagctcctgcgacggctgtaaggggtttttccgcagatctgtgcggaaaaatcatatgtatagctgccgcttttccagacaatgtgtcgtggataaggacaaacggaaccagtgccgctactgtagactgaagaagtgcttccgggctggaatgaaaaaggaagccgttcagaatgagcgcgatagaattagcacccggcgcagctcctatgaagacagctctctcccctccatcaacgcgctgctgcaggccgaggtgctcagcagacaaattgagtctcctgtctccggcatcaatggcgatattcgggctaaaaagatcgccagcatcgctgacgtgtgtgaatccatgaaagagcagctgcttgttctggtggaatgggccaagtacattcccgcgttttgcgagctccctctggatgaccaggtcgcccttctgcgcgctcacgccggggagcatctcctgctgggagctacaaagagatctatggtgttcaaagacgtgctcctgcttggcaacgattatatcgtcccccggcactgtcctgaactggccgagatgagcagagtttccattcgcatcctcgacgaactggtgcttccgtttcaggagctgcaaattgatgacaatgaatacgcctacctcaaggctatcattttctttgatcccgacgcgaaagggctgagcgatcctggaaagatcaaacggctgagatctcaggtgcaggtctccctcgaggactatatcaacgatcgccagtacgacagccggggcagattcggggagctgcttctgctcctgcccacccttcaatctattacgtggcagatgatcgaacagattcaatttatcaagctgttcggaatggccaaaattgataatctcctgcaggagatgctgctcggcggcagcccttccgacgctccccatgcccaccacccgctgcatcctcaccttatgcaggaacatatggggaccaacgtgatcgttgccaatacaatgcccacccacctgtctaacggacagatgtgcgagtggcctcgcccccggggccaagctgccacacccgaaacccctcagccgtctccccctgggggatccggcagcgagccctataagctcctgcctggggcggtggctacgatcgtcaagcccctgtctgccattccgcagcctacaatcaccaaacaggaggtgatttga

SEQ ID NO: 518 - RNA, 1425 nt, synthetic construct
  misc_feature 1..1425: note = CDS (opt5) from Homo sapiens__NP_000448.3__HNF4A(1-474)(S148A)
  source 1..1425: mol_type = other RNA
atgagactgagcaagaccctcgtggacatggatatggccgactactccgctgccctggatcccgcgtatacaacgcttgagttcgaaaacgtccaggttctgaccatgggcaatgacacatctcctagcgaggggaccaacctcaatgctccgaactccctgggagtgtctgccctttgcgccatctgtggcgatcgggctacagggaaacactacggagccagctcctgcgacggctgtaaggggtttttccgcagatctgtgcggaaaaatcatatgtatagctgccgcttttccagacaatgtgtcgtggataaggacaaacggaaccagtgccgctactgtagactgaagaagtgcttccgggctggaatgaaaaaggaagccgttcagaatgagcgcgatagaattagcacccggagatcttcctatgaagacagcgcgctcccctctatcaacgccctgctgcaggctgaggtgctctcccgccaaattacaagccctgtctctggcatcaatggcgatattcgggccaaaaagatcgcttccatcgccgacgtgtgtgagagcatgaaagaacagctgcttgttctggtggagtgggcgaagtacattcccgccttttgcgaactccctctggatgaccaggtcgcccttctgcgcgcccacgctggggagcatctcctgctgggagccaccaagagatccatggtgttcaaagacgtgctcctgcttggcaacgattatatcgtcccccggcactgtcctgagctggccgaaatgtctagagttagcattcgcatcctcgacgagctggtgcttccgtttcaggaactgcaaattgatgacaatgagtacgcttacctcaaggcgatcattttctttgatcccgacgccaaagggctgtccgatcctggaaagatcaaacggctgagaagccaggtgcaggtctctctcgaagactatatcaacgatcgccagtacgactcccggggcagattcggggagctgcttctgctcctgcccacgcttcaaagcattacctggcagatgatcgagcagattcaatttatcaagctgttcggaatggctaaaattgataatctcctgcaggaaatgctgctcggcggctctcctagcgacgctccccatgcccaccacccgctgcatcctcaccttatgcaggagcatatggggacaaacgtgatcgttgctaataccatgcccacacacctgtccaacggacagatgtgcgaatggcctcgcccccggggccaagccgcgacccccgagacgcctcagccgtctccccctgggggaagcggctccgaaccctataagctcctgcctggggctgtggccacaatcgtcaagcccctgagcgccattccgcagcctaccatcacaaaacaggaggtgatttga

SEQ ID NO: 519 - RNA, 1425 nt, synthetic construct
  misc_feature 1..1425: note = CDS (opt5) from Homo sapiens__NP_000448.3__HNF4A(1-474)(S148E)
  source 1..1425: mol_type = other RNA
atgagactgagcaagaccctcgtggacatggatatggccgactactccgctgccctggatcccgcgtatacaacgcttgagttcgaaaacgtccaggttctgaccatgggcaatgacacatctcctagcgaggggaccaacctcaatgctccgaactccctgggagtgtctgccctttgcgccatctgtggcgatcgggctacagggaaacactacggagccagctcctgcgacggctgtaaggggtttttccgcagatctgtgcggaaaaatcatatgtatagctgccgcttttccagacaatgtgtcgtggataaggacaaacggaaccagtgccgctactgtagactgaagaagtgcttccgggctggaatgaaaaaggaagccgttcagaatgagcgcgatagaattagcacccggagatcttcctatgaagacagcgagctcccctctatcaacgcgctgctgcaggccgaggtgctctcccgccaaattacaagccctgtctctggcatcaatggcgatattcgggctaaaaagatcgcctccatcgctgacgtgtgtgaaagcatgaaagagcagctgcttgttctggtggaatgggccaagtacattcccgcgttttgcgagctccctctggatgaccaggtcgcccttctgcgcgctcacgccggggagcatctcctgctgggagctaccaagagatccatggtgttcaaagacgtgctcctgcttggcaacgattatatcgtcccccggcactgtcctgaactggccgagatgtctagagttagcattcgcatcctcgacgaactggtgcttccgtttcaggagctgcaaattgatgacaatgaatacgcctacctcaaggctatcattttctttgatcccgacgcgaaagggctgtccgatcctggaaagatcaaacggctgagaagccaggtgcaggtctctctcgaggactatatcaacgatcgccagtacgactcccggggcagattcggggagctgcttctgctcctgcccacgcttcaaagcattacctggcagatgatcgaacagattcaatttatcaagctgttcggaatggccaaaattgataatctcctgcaggagatgctgctcggcggctctcctagcgacgctccccatgcccaccacccgctgcatcctcaccttatgcaggaacatatggggacaaacgtgatcgttgccaataccatgcccacacacctgtccaacggacagatgtgcgagtggcctcgcccccggggccaagctgccacccccgaaacgcctcagccgtctccccctgggggaagcggctccgagccctataagctcctgcctggggcggtggctacaatcgtcaagcccctgagcgccattccgcagcctaccatcacaaaacaggaggtgatttga

SEQ ID NO: 520 - RNA, 1425 nt, synthetic construct
  misc_feature 1..1425: note = CDS (opt5) from Homo sapiens__NP_000448.3__HNF4A(1-474)(S183A)
  source 1..1425: mol_type = other RNA
atgagactgagcaagaccctcgtggacatggatatggccgactactccgctgccctggatcccgcgtatacaacgcttgagttcgaaaacgtccaggttctgaccatgggcaatgacacatctcctagcgaggggaccaacctcaatgctccgaactccctgggagtgtctgccctttgcgccatctgtggcgatcgggctacagggaaacactacggagccagctcctgcgacggctgtaaggggtttttccgcagatctgtgcggaaaaatcatatgtatagctgccgcttttccagacaatgtgtcgtggataaggacaaacggaaccagtgccgctactgtagactgaagaagtgcttccgggctggaatgaaaaaggaagccgttcagaatgagcgcgatagaattagcacccggagatcttcctatgaagacagctctctcccctccatcaacgcgctgctgcaggccgaggtgctcagccgccaaattacatctcctgtctccggcatcaatggcgatattcgggctaaaaagatcgccgctatcgccgacgtgtgtgagagcatgaaagaacagctgcttgttctggtggagtgggcgaagtacattcccgccttttgcgaactccctctggatgaccaggtcgcccttctgcgcgcccacgctggggagcatctcctgctgggagccaccaagagatccatggtgttcaaagacgtgctcctgcttggcaacgattatatcgtcccccggcactgtcctgagctggccgaaatgtctagagttagcattcgcatcctcgacgagctggtgcttccgtttcaggaactgcaaattgatgacaatgagtacgcttacctcaaggcgatcattttctttgatcccgacgccaaagggctgtccgatcctggaaagatcaaacggctgagaagccaggtgcaggtctctctcgaagactatatcaacgatcgccagtacgactcccggggcagattcggggagctgcttctgctcctgcccacgcttcaaagcattacctggcagatgatcgagcagattcaatttatcaagctgttcggaatggctaaaattgataatctcctgcaggaaatgctgctcggcggctctcctagcgacgctccccatgcccaccacccgctgcatcctcaccttatgcaggagcatatggggacaaacgtgatcgttgctaataccatgcccacacacctgtccaacggacagatgtgcgaatggcctcgcccccggggccaagccgcgacccccgagacgcctcagccgtctccccctgggggaagcggctccgaaccctataagctcctgcctggggctgtggccacaatcgtcaagcccctgagcgccattccgcagcctaccatcacaaaacaggaggtgatttga

SEQ ID NO: 521 - RNA, 1425 nt, synthetic construct
  misc_feature 1..1425: note = CDS (opt5) from Homo sapiens__NP_000448.3__HNF4A(1-474)(S183E)
  source 1..1425: mol_type = other RNA
atgagactgagcaagaccctcgtggacatggatatggccgactactccgctgccctggatcccgcgtatacaacgcttgagttcgaaaacgtccaggttctgaccatgggcaatgacacatctcctagcgaggggaccaacctcaatgctccgaactccctgggagtgtctgccctttgcgccatctgtggcgatcgggctacagggaaacactacggagccagctcctgcgacggctgtaaggggtttttccgcagatctgtgcggaaaaatcatatgtatagctgccgcttttccagacaatgtgtcgtggataaggacaaacggaaccagtgccgctactgtagactgaagaagtgcttccgggctggaatgaaaaaggaagccgttcagaatgagcgcgatagaattagcacccggagatcttcctatgaagacagctctctcccctccatcaacgcgctgctgcaggccgaggtgctcagccgccaaattacatctcctgtctccggcatcaatggcgatattcgggctaaaaagatcgccgagatcgctgacgtgtgtgaaagcatgaaagagcagctgcttgttctggtggaatgggccaagtacattcccgcgttttgcgagctccctctggatgaccaggtcgcccttctgcgcgctcacgccggggagcatctcctgctgggagctaccaagagatccatggtgttcaaagacgtgctcctgcttggcaacgattatatcgtcccccggcactgtcctgaactggccgagatgtctagagttagcattcgcatcctcgacgaactggtgcttccgtttcaggagctgcaaattgatgacaatgaatacgcctacctcaaggctatcattttctttgatcccgacgcgaaagggctgtccgatcctggaaagatcaaacggctgagaagccaggtgcaggtctctctcgaggactatatcaacgatcgccagtacgactcccggggcagattcggggagctgcttctgctcctgcccacgcttcaaagcattacctggcagatgatcgaacagattcaatttatcaagctgttcggaatggccaaaattgataatctcctgcaggagatgctgctcggcggctctcctagcgacgctccccatgcccaccacccgctgcatcctcaccttatgcaggaacatatggggacaaacgtgatcgttgccaataccatgcccacacacctgtccaacggacagatgtgcgagtggcctcgcccccggggccaagctgccacccccgaaacgcctcagccgtctccccctgggggaagcggctccgagccctataagctcctgcctggggcggtggctacaatcgtcaagcccctgagcgccattccgcagcctaccatcacaaaacaggaggtgatttga

SEQ ID NO: 522 - RNA, 1425 nt, synthetic construct
  misc_feature 1..1425: note = CDS (opt5) from Homo sapiens__NP_000448.3__HNF4A(1-474)(S461A)
  source 1..1425: mol_type = other RNA
atgagactgagcaagaccctcgtggacatggatatggccgactactccgctgccctggatcccgcgtatacaacgcttgagttcgaaaacgtccaggttctgaccatgggcaatgacacatctcctagcgaggggaccaacctcaatgctccgaactccctgggagtgtctgccctttgcgccatctgtggcgatcgggctacagggaaacactacggagccagctcctgcgacggctgtaaggggtttttccgcagatctgtgcggaaaaatcatatgtatagctgccgcttttccagacaatgtgtcgtggataaggacaaacggaaccagtgccgctactgtagactgaagaagtgcttccgggctggaatgaaaaaggaagccgttcagaatgagcgcgatagaattagcacccggcgcagctcctatgaagacagctctctcccctccatcaacgcgctgctgcaggccgaggtgctcagcagacaaattacatctcctgtctccggcatcaatggcgatattcgggctaaaaagatcgccagcatcgctgacgtgtgtgagtccatgaaagaacagctgcttgttctggtggagtgggccaagtacattcccgcgttttgcgaactccctctggatgaccaggtcgcccttctgcgcgctcacgccggggagcatctcctgctgggagctaccaagagatctatggtgttcaaagacgtgctcctgcttggcaacgattatatcgtcccccggcactgtcctgagctggccgaaatgagcagagtttccattcgcatcctcgacgagctggtgcttccgtttcaggaactgcaaattgatgacaatgagtacgcctacctcaaggctatcattttctttgatcccgacgcgaaagggctgagcgatcctggaaagatcaaacggctgagatctcaggtgcaggtctccctcgaagactatatcaacgatcgccagtacgacagccggggcagattcggggagctgcttctgctcctgcccacgcttcaatctattacctggcagatgatcgagcagattcaatttatcaagctgttcggaatggccaaaattgataatctcctgcaggaaatgctgctcggcggcagcccttccgacgctccccatgcccaccacccgctgcatcctcaccttatgcaggagcatatggggacaaacgtgatcgttgccaataccatgcccacacacctgtctaacggacagatgtgcgaatggcctcgcccccggggccaagctgccacccccgagacgcctcagccgtctccccctgggggatccggcagcgaaccctataagctcctgcctggggcggtggctacaatcgtcaagcccctggccgccattccgcagcctaccatcacaaaacaggaggtgatttga

SEQ ID NO: 523 - RNA, 1425 nt, synthetic construct
  misc_feature 1..1425: note = CDS (opt5) from Homo sapiens__NP_000448.3__HNF4A(1-474)(S461E)
  source 1..1425: mol_type = other RNA
atgagactgagcaagaccctcgtggacatggatatggccgactactccgctgccctggatcccgcgtatacaacgcttgagttcgaaaacgtccaggttctgaccatgggcaatgacacatctcctagcgaggggaccaacctcaatgctccgaactccctgggagtgtctgccctttgcgccatctgtggcgatcgggctacagggaaacactacggagccagctcctgcgacggctgtaaggggtttttccgcagatctgtgcggaaaaatcatatgtatagctgccgcttttccagacaatgtgtcgtggataaggacaaacggaaccagtgccgctactgtagactgaagaagtgcttccgggctggaatgaaaaaggaagccgttcagaatgagcgcgatagaattagcacccggcgcagctcctatgaagacagctctctcccctccatcaacgcgctgctgcaggccgaggtgctcagcagacaaattacatctcctgtctccggcatcaatggcgatattcgggctaaaaagatcgccagcatcgctgacgtgtgtgagtccatgaaagaacagctgcttgttctggtggagtgggccaagtacattcccgcgttttgcgaactccctctggatgaccaggtcgcccttctgcgcgctcacgccggggagcatctcctgctgggagctaccaagagatctatggtgttcaaagacgtgctcctgcttggcaacgattatatcgtcccccggcactgtcctgagctggccgaaatgagcagagtttccattcgcatcctcgacgagctggtgcttccgtttcaggaactgcaaattgatgacaatgagtacgcctacctcaaggctatcattttctttgatcccgacgcgaaagggctgagcgatcctggaaagatcaaacggctgagatctcaggtgcaggtctccctcgaagactatatcaacgatcgccagtacgacagccggggcagattcggggagctgcttctgctcctgcccacgcttcaatctattacctggcagatgatcgagcagattcaatttatcaagctgttcggaatggccaaaattgataatctcctgcaggaaatgctgctcggcggcagcccttccgacgctccccatgcccaccacccgctgcatcctcaccttatgcaggagcatatggggacaaacgtgatcgttgccaataccatgcccacacacctgtctaacggacagatgtgcgaatggcctcgcccccggggccaagctgccacccccgagacgcctcagccgtctccccctgggggatccggcagcgaaccctataagctcctgcctggggcggtggctacaatcgtcaagcccctggaggccattccgcagcctaccatcacaaaacaggaggtgatttga

SEQ ID NO: 524 - RNA, 1425 nt, synthetic construct
  misc_feature 1..1425: note = CDS (opt5) from Homo sapiens__NP_000448.3__HNF4A(1-474)(S142A_S143A_S313A)
  source 1..1425: mol_type = other RNA
atgagactgagcaagaccctcgtggacatggatatggccgactactccgctgccctggatcccgcgtatacaacgcttgagttcgaaaacgtccaggttctgaccatgggcaatgacacatctcctagcgaggggaccaacctcaatgctccgaactccctgggagtgtctgccctttgcgccatctgtggcgatcgggctacagggaaacactacggagccagctcctgcgacggctgtaaggggtttttccgcagatctgtgcggaaaaatcatatgtatagctgccgcttttccagacaatgtgtcgtggataaggacaaacggaaccagtgccgctactgtagactgaagaagtgcttccgggctggaatgaaaaaggaagccgttcagaatgagcgcgatagaattagcacccggcgcgcggcctatgaagactcttccctccccagcatcaacgctctgctgcaggccgaggtgctctctagacaaattacatcccctgtcagcggcatcaatggcgatattcgggctaaaaagatcgcctctatcgcggacgtgtgtgagtccatgaaagaacagctgcttgttctggtggagtgggccaagtacattcccgctttttgcgaactccctctggatgaccaggtcgcccttctgcgcgctcacgccggggagcatctcctgctgggagccaccaagagaagcatggtgttcaaagacgtgctcctgcttggcaacgattatatcgtcccccggcactgtcctgagctggctgaaatgtccagagtttctattcgcatcctcgacgagctggtgcttccgtttcaggaactgcaaattgatgacaatgagtacgcgtacctcaaggccatcattttctttgatcccgacgctaaagggctgagcgatcctggaaagatcaaacggctgagagcccaggtgcaggtctccctcgaagactatatcaacgatcgccagtacgacagccggggcagattcggggagctgcttctgctcctgcccacgcttcaatctattacctggcagatgatcgagcagattcaatttatcaagctgttcggaatggccaaaattgataatctcctgcaggaaatgctgctcggcggctcccctagcgacgctccccatgcccaccacccgctgcatcctcaccttatgcaggagcatatggggacaaacgtgatcgttgcgaataccatgcccacacacctgtctaacggacagatgtgcgaatggcctcgcccccggggccaagctgccacccccgagacgcctcagccgagccctcccgggggatccggctctgaaccctataagctcctgcctggggccgtggctacaatcgtcaagcccctgagcgccattccgcagcctaccatcacaaaacaggaggtgatttga

SEQ ID NO: 525 - RNA, 1425 nt, synthetic construct
  misc_feature 1..1425: note = CDS (opt5) from Homo sapiens__NP_000448.3__HNF4A(1-474)(S142A_S143A_S313A_K458R)
  source 1..1425: mol_type = other RNA
atgagactgagcaagaccctcgtggacatggatatggccgactactccgctgccctggatcccgcgtatacaacgcttgagttcgaaaacgtccaggttctgaccatgggcaatgacacatctcctagcgaggggaccaacctcaatgctccgaactccctgggagtgtctgccctttgcgccatctgtggcgatcgggctacagggaaacactacggagccagctcctgcgacggctgtaaggggtttttccgcagatctgtgcggaaaaatcatatgtatagctgccgcttttccagacaatgtgtcgtggataaggacaaacggaaccagtgccgctactgtagactgaagaagtgcttccgggctggaatgaaaaaggaagccgttcagaatgagcgcgatagaattagcacccggcgcgcggcctatgaagactcttccctccccagcatcaacgctctgctgcaggccgaggtgctctctagacaaattacatcccctgtcagcggcatcaatggcgatattcgggctaaaaagatcgcctctatcgcggacgtgtgtgagtccatgaaagaacagctgcttgttctggtggagtgggccaagtacattcccgctttttgcgaactccctctggatgaccaggtcgcccttctgcgcgctcacgccggggagcatctcctgctgggagccaccaagagaagcatggtgttcaaagacgtgctcctgcttggcaacgattatatcgtcccccggcactgtcctgagctggctgaaatgtccagagtttctattcgcatcctcgacgagctggtgcttccgtttcaggaactgcaaattgatgacaatgagtacgcgtacctcaaggccatcattttctttgatcccgacgctaaagggctgagcgatcctggaaagatcaaacggctgagagcccaggtgcaggtctccctcgaagactatatcaacgatcgccagtacgacagccggggcagattcggggagctgcttctgctcctgcccacgcttcaatctattacctggcagatgatcgagcagattcaatttatcaagctgttcggaatggccaaaattgataatctcctgcaggaaatgctgctcggcggctcccctagcgacgctccccatgcccaccacccgctgcatcctcaccttatgcaggagcatatggggacaaacgtgatcgttgcgaataccatgcccacacacctgtctaacggacagatgtgcgaatggcctcgcccccggggccaagctgccacccccgagacgcctcagccgagccctcccgggggatccggctctgaaccctataagctcctgcctggggccgtggctacaatcgtcagacccctgagcgccattccgcagcctaccatcacaaagcaggaggtgatttga

SEQ ID NO: 526 - RNA, 1425 nt, synthetic construct
  misc_feature 1..1425: note = CDS (opt5) from Homo sapiens__NP_000448.3__HNF4A(1-474)(S142A_S143A_S167A_S313A_ S378A_T429A_T432A_S436A_K458R)
  source 1..1425: mol_type = other RNA
atgagactgagcaagaccctcgtggacatggatatggccgactactccgctgccctggatcccgcgtatacaacgcttgagttcgaaaacgtccaggttctgaccatgggcaatgacacatctcctagcgaggggaccaacctcaatgctccgaactccctgggagtgtctgccctttgcgccatctgtggcgatcgggctacagggaaacactacggagccagctcctgcgacggctgtaaggggtttttccgcagatctgtgcggaaaaatcatatgtatagctgccgcttttccagacaatgtgtcgtggataaggacaaacggaaccagtgccgctactgtagactgaagaagtgcttccgggctggaatgaaaaaggaagccgttcagaatgagcgcgatagaattagcacccggcgcgcggcctatgaagactcttccctccccagcatcaacgctctgctgcaggccgaggtgctctctagacaaattacagctcctgtctccggcatcaatggcgatattcgggccaaaaagatcgcgagcatcgccgacgtgtgtgagtctatgaaagaacagctgcttgttctggtggagtgggctaagtacattcccgccttttgcgaactccctctggatgaccaggtcgcccttctgcgcgcccacgccggggagcatctcctgctgggagctaccaagagatccatggtgttcaaagacgtgctcctgcttggcaacgattatatcgtcccccggcactgtcctgagctggcggaaatgagcagagtttccattcgcatcctcgacgagctggtgcttccgtttcaggaactgcaaattgatgacaatgagtacgcctacctcaaggctatcattttctttgatcccgacgccaaagggctgtctgatcctggaaagatcaaacggctgagagcccaggtgcaggtcagcctcgaagactatatcaacgatcgccagtacgactcccggggcagattcggggagctgcttctgctcctgcccacgcttcaaagcattacctggcagatgatcgagcagattcaatttatcaagctgttcggaatggctaaaattgataatctcctgcaggaaatgctgctcggcggcgccccttctgacgcgccccatgctcaccacccgctgcatcctcaccttatgcaggagcatatggggacaaacgtgatcgttgccaataccatgcccacacacctgtccaacggacagatgtgcgaatggcctcgcccccggggccaagccgctgcccccgaggctcctcagccggctccccctgggggaagcggctctgaaccctataagctcctgcctggggcggtggccaccatcgtcagacccctgagcgctattccgcagcctacgatcacaaagcaggaggtgatttga

SEQ ID NO: 527 - RNA, 1425 nt, synthetic construct
  misc_feature 1..1425: note = CDS (opt5) from Homo sapiens__NP_000448.3__HNF4A(1-474)(S142A_S143A_S148A_S167A_ S313A_S378A_T429A_T432A_S436A_K458R)
  source 1..1425: mol_type = other RNA
atgagactgagcaagaccctcgtggacatggatatggccgactactccgctgccctggatcccgcgtatacaacgcttgagttcgaaaacgtccaggttctgaccatgggcaatgacacatctcctagcgaggggaccaacctcaatgctccgaactccctgggagtgtctgccctttgcgccatctgtggcgatcgggctacagggaaacactacggagccagctcctgcgacggctgtaaggggtttttccgcagatctgtgcggaaaaatcatatgtatagctgccgcttttccagacaatgtgtcgtggataaggacaaacggaaccagtgccgctactgtagactgaagaagtgcttccgggctggaatgaaaaaggaagccgttcagaatgagcgcgatagaattagcacccggcgcgcggcctatgaagactctgctctcccctccatcaacgccctgctgcaggctgaggtgctcagcagacaaattacagcccctgtctctggcatcaatggcgatattcgggcgaaaaagatcgcctccatcgctgacgtgtgtgagagcatgaaagaacagctgcttgttctggtggagtgggccaagtacattcccgctttttgcgaactccctctggatgaccaggtcgcccttctgcgcgcccacgctggggagcatctcctgctgggagcgaccaagagatctatggtgttcaaagacgtgctcctgcttggcaacgattatatcgtcccccggcactgtcctgagctggccgaaatgtccagagttagcattcgcatcctcgacgagctggtgcttccgtttcaggaactgcaaattgatgacaatgagtacgcttacctcaaggccatcattttctttgatcccgacgccaaagggctgtccgatcctggaaagatcaaacggctgagagctcaggtgcaggtctctctcgaagactatatcaacgatcgccagtacgacagccggggcagattcggggagctgcttctgctcctgcccacgcttcaatccattacctggcagatgatcgagcagattcaatttatcaagctgttcggaatggccaaaattgataatctcctgcaggaaatgctgctcggcggcgcgcctagcgacgctccccatgcccaccacccgctgcatcctcaccttatgcaggagcatatggggacaaacgtgatcgttgccaataccatgcccacacacctgtctaacggacagatgtgcgaatggcctcgcccccggggccaagctgccgctcccgaggcccctcagccggcgccccctgggggatccggcagcgaaccctataagctcctgcctggggccgtggctaccatcgtcagacccctgtctgccattccgcagcctacgatcacaaagcaggaggtgatttga

SEQ ID NO: 528 - RNA, 1425 nt, synthetic construct
  misc_feature 1..1425: note = CDS (opt5) from Homo sapiens__NP_000448.3__HNF4A(1-474)(K106R_K108R_K126R_K127R_ S142A_S143A_S148A_S167A_S313A_S378A_T429A_T432A_S436A_K458R )
  source 1..1425: mol_type = other RNA
atgagactgagcaagaccctcgtggacatggatatggccgactactccgctgccctggatcccgcgtatacaacgcttgagttcgaaaacgtccaggttctgaccatgggcaatgacacatctcctagcgaggggaccaacctcaatgctccgaactccctgggagtgtctgccctttgcgccatctgtggcgatcgggctacagggaaacactacggagccagctcctgcgacggctgtaaggggtttttccgcagatctgtgcggaaaaatcatatgtatagctgccgcttttccagacaatgtgtcgtggatcgggaccgcagaaaccagtgccggtactgtcgcctgaagaaatgcttcagagctggaatgcggcgcgaagccgttcagaatgagagagatcggattagcacccgcagagcggcctatgaagactctgctctcccctccatcaacgccctgctgcaggctgaggtgctcagccggcaaattacagcccctgtctctggcatcaatggcgatattagagcgaagaagatcgcctccatcgctgacgtgtgtgagagcatgaaagaacagctgcttgttctggtggagtgggccaagtacattcccgctttttgcgaactccctctggatgaccaggtcgcccttctgcgcgcccacgctggggagcatctcctgctgggagcgaccaaacggtctatggtgttcaaggacgtgctcctgcttggcaacgattatatcgtccccagacactgtcctgagctggccgaaatgtcccgcgttagcattcggatcctcgacgagctggtgcttccgtttcaggaactgcaaattgatgacaatgagtacgcttacctcaaagccatcattttctttgatcccgacgccaaggggctgtccgatcctggaaagatcaaaagactgcgcgctcaggtgcaggtctctctcgaagactatatcaacgatcggcagtacgacagcagaggccgcttcggggagctgcttctgctcctgcccacgcttcaatccattacctggcagatgatcgagcagattcaatttatcaagctgttcggaatggccaaaattgataatctcctgcaggaaatgctgctcggcggcgcgcctagcgacgctccccatgcccaccacccgctgcatcctcaccttatgcaggagcatatggggacaaacgtgatcgttgccaataccatgcccacacacctgtctaacggacagatgtgcgaatggcctcggcccagaggccaagctgccgctcccgaggcccctcagccggcgccccctgggggatccggcagcgaaccctataagctcctgcctggggccgtggctaccatcgtccgccccctgtctgccattccgcagcctacgatcacaaaacaggaggtgatttga

SEQ ID NO: 529 - RNA, 1425 nt, synthetic construct
  misc_feature 1..1425: note = CDS (opt5) from Homo sapiens__NP_000448.3__HNF4A(1-474)(S142A_S143A_S148A_T166A_ S167A_S313A_S378A_T429A_T432A_S436A_K458R)
  source 1..1425: mol_type = other RNA
atgagactgagcaagaccctcgtggacatggatatggccgactactccgctgccctggatcccgcgtatacaacgcttgagttcgaaaacgtccaggttctgaccatgggcaatgacacatctcctagcgaggggaccaacctcaatgctccgaactccctgggagtgtctgccctttgcgccatctgtggcgatcgggctacagggaaacactacggagccagctcctgcgacggctgtaaggggtttttccgcagatctgtgcggaaaaatcatatgtatagctgccgcttttccagacaatgtgtcgtggataaggacaaacggaaccagtgccgctactgtagactgaagaagtgcttccgggctggaatgaaaaaggaagccgttcagaatgagcgcgatagaattagcacccggcgcgcggcctatgaagactctgctctcccctccatcaacgccctgctgcaggctgaggtgctcagcagacaaattgccgcgcctgtctctggcatcaatggcgatattcgggccaaaaagatcgcttccatcgccgacgtgtgtgagagcatgaaagaacagctgcttgttctggtggagtgggctaagtacattcccgccttttgcgaactccctctggatgaccaggtcgcccttctgcgcgctcacgcgggggagcatctcctgctgggagccacaaagagatctatggtgttcaaagacgtgctcctgcttggcaacgattatatcgtcccccggcactgtcctgagctggctgaaatgtccagagttagcattcgcatcctcgacgagctggtgcttccgtttcaggaactgcaaattgatgacaatgagtacgcctacctcaaggccatcattttctttgatcccgacgctaaagggctgtccgatcctggaaagatcaaacggctgagagcccaggtgcaggtctctctcgaagactatatcaacgatcgccagtacgacagccggggcagattcggggagctgcttctgctcctgcccacccttcaatccattacgtggcagatgatcgagcagattcaatttatcaagctgttcggaatggcgaaaattgataatctcctgcaggaaatgctgctcggcggcgctcctagcgacgctccccatgcccaccacccgctgcatcctcaccttatgcaggagcatatggggaccaacgtgatcgttgccaatacaatgcccacccacctgtctaacggacagatgtgcgaatggcctcgcccccggggccaagccgctgcccccgaggcgcctcagccggctccccctgggggatccggcagcgaaccctataagctcctgcctggggccgtggccacaatcgtcagacccctgtctgctattccgcagcctaccatcacgaagcaggaggtgatttga

SEQ ID NO: 530 - RNA, 1425 nt, synthetic construct
  misc_feature 1..1425: note = CDS (opt5) from Homo sapiens__NP_000448.3__HNF4A(1-474)(S87A_S142A_S143A_S148A_T 166A_S167A_S313A_S378A_T429A_T432A_S436A_K458R)
  source 1..1425: mol_type = other RNA
atgagactgagcaagaccctcgtggacatggatatggccgactactccgctgccctggatcccgcgtatacaacgcttgagttcgaaaacgtccaggttctgaccatgggcaatgacacatctcctagcgaggggaccaacctcaatgctccgaactccctgggagtgtctgccctttgcgccatctgtggcgatcgggctacagggaaacactacggagccagctcctgcgacggctgtaaggggtttttccgcagagctgtgcggaaaaatcatatgtattcttgccgctttagcagacaatgtgtcgtggataaggacaaacggaaccagtgccgctactgtagactgaagaagtgcttccgggccggaatgaaaaaggaagcggttcagaatgagcgcgatagaatttccacccggcgcgccgcttatgaagacagcgccctcccctctatcaacgctctgctgcaggccgaggtgctctccagacaaattgcggcccctgtcagcggcatcaatggcgatattcgggctaaaaagatcgcctctatcgctgacgtgtgtgagtccatgaaagaacagctgcttgttctggtggagtgggccaagtacattcccgccttttgcgaactccctctggatgaccaggtcgcccttctgcgcgcgcacgccggggagcatctcctgctgggagctacaaagagaagcatggtgttcaaagacgtgctcctgcttggcaacgattatatcgtcccccggcactgtcctgagctggccgaaatgtctagagtttccattcgcatcctcgacgagctggtgcttccgtttcaggaactgcaaattgatgacaatgagtacgcctacctcaaggctatcattttctttgatcccgacgccaaagggctgagcgatcctggaaagatcaaacggctgagagctcaggtgcaggtctccctcgaagactatatcaacgatcgccagtacgactctcggggcagattcggggagctgcttctgctcctgcccacccttcaaagcattacgtggcagatgatcgagcagattcaatttatcaagctgttcggaatggcgaaaattgataatctcctgcaggaaatgctgctcggcggcgccccttccgacgctccccatgctcaccacccgctgcatcctcaccttatgcaggagcatatggggaccaacgtgatcgttgccaatacaatgcccacccacctgagcaacggacagatgtgcgaatggcctcgcccccggggccaagctgccgcgcccgaggcccctcagccggctccccctgggggatctggctccgaaccctataagctcctgcctggggccgtggctacaatcgtcagacccctgagcgccattccgcagcctaccatcacgaagcaggaggtgatttga

SEQ ID NO: 531 - RNA, 1425 nt, synthetic construct
  misc_feature 1..1425: note = CDS (opt5) from Homo sapiens__NP_000448.3__HNF4A(1-474)(S87A_K106R_K108R_K126R_K 127R_S142A_S143A_S148A_T166A_S167A_S313A_S378A_T429A_T432A_ S436A_K458R)
  source 1..1425: mol_type = other RNA
atgagactgagcaagaccctcgtggacatggatatggccgactactccgctgccctggatcccgcgtatacaacgcttgagttcgaaaacgtccaggttctgaccatgggcaatgacacatctcctagcgaggggaccaacctcaatgctccgaactccctgggagtgtctgccctttgcgccatctgtggcgatcgggctacagggaaacactacggagccagctcctgcgacggctgtaaggggtttttccgcagagctgtgcggaaaaatcatatgtattcttgccgctttagcagacaatgtgtcgtggatcgggaccgcagaaaccagtgccggtactgtcgcctgaagaaatgcttcagagccggaatgcggcgcgaagcggttcagaatgagagagatcggatttccacccgcagagccgcttatgaagacagcgccctcccctctatcaacgctctgctgcaggccgaggtgctctcccggcaaattgcggcccctgtcagcggcatcaatggcgatattagagctaagaagatcgcctctatcgctgacgtgtgtgagtccatgaaagaacagctgcttgttctggtggagtgggccaagtacattcccgccttttgcgaactccctctggatgaccaggtcgcccttctgcgcgcgcacgccggggagcatctcctgctgggagctacaaaacggagcatggtgttcaaggacgtgctcctgcttggcaacgattatatcgtccccagacactgtcctgagctggccgaaatgtctcgcgtttccattcggatcctcgacgagctggtgcttccgtttcaggaactgcaaattgatgacaatgagtacgcctacctcaaagctatcattttctttgatcccgacgccaaggggctgagcgatcctggaaagatcaaaagactgcgcgctcaggtgcaggtctccctcgaagactatatcaacgatcggcagtacgactctagaggccgcttcggggagctgcttctgctcctgcccacccttcaaagcattacgtggcagatgatcgagcagattcaatttatcaagctgttcggaatggcgaaaattgataatctcctgcaggaaatgctgctcggcggcgccccttccgacgctccccatgctcaccacccgctgcatcctcaccttatgcaggagcatatggggaccaacgtgatcgttgccaatacaatgcccacccacctgagcaacggacagatgtgcgaatggcctcggcccagaggccaagctgccgcgcccgaggcccctcagccggctccccctgggggatctggctccgaaccctataagctcctgcctggggccgtggctacaatcgtccgccccctgagcgccattccgcagcctaccatcacgaaacaggaggtgatttga

SEQ ID NO: 532 - RNA, 1425 nt, synthetic construct
  misc_feature 1..1425: note = CDS (opt5) from Homo sapiens__NP_000448.3__HNF4A(1-474)(S87A_K106R_K108R_K126R_K 127R)
  source 1..1425: mol_type = other RNA
atgagactgagcaagaccctcgtggacatggatatggccgactactccgctgccctggatcccgcgtatacaacgcttgagttcgaaaacgtccaggttctgaccatgggcaatgacacatctcctagcgaggggaccaacctcaatgctccgaactccctgggagtgtctgccctttgcgccatctgtggcgatcgggctacagggaaacactacggagccagctcctgcgacggctgtaaggggtttttccgcagagctgtgcggaaaaatcatatgtattcttgccgctttagcagacaatgtgtcgtggatcgggaccgcagaaaccagtgccggtactgtcgcctgaagaaatgcttcagagccggaatgcggcgcgaagcggttcagaatgagagagatcggatttccacccgcagaagctcttatgaagactccagcctcccctctatcaacgccctgctgcaggctgaggtgctctcccggcaaattacaagccctgtctctggcatcaatggcgatattagagccaagaagatcgcttccatcgccgacgtgtgtgagagcatgaaagaacagctgcttgttctggtggagtgggcgaagtacattcccgccttttgcgaactccctctggatgaccaggtcgcccttctgcgcgcccacgctggggagcatctcctgctgggagccaccaaacggtccatggtgttcaaggacgtgctcctgcttggcaacgattatatcgtccccagacactgtcctgagctggccgaaatgtctcgcgttagcattcggatcctcgacgagctggtgcttccgtttcaggaactgcaaattgatgacaatgagtacgcttacctcaaagcgatcattttctttgatcccgacgccaaggggctgtccgatcctggaaagatcaaaagactgcgcagccaggtgcaggtctctctcgaagactatatcaacgatcggcagtacgactccagaggccgcttcggggagctgcttctgctcctgcccacgcttcaaagcattacctggcagatgatcgagcagattcaatttatcaagctgttcggaatggctaaaattgataatctcctgcaggaaatgctgctcggcggctctcctagcgacgctccccatgcccaccacccgctgcatcctcaccttatgcaggagcatatggggacaaacgtgatcgttgctaataccatgcccacacacctgtccaacggacagatgtgcgaatggcctcggcccagaggccaagccgcgacccccgagacgcctcagccgtctccccctgggggaagcggctccgaaccctataagctcctgcctggggctgtggccacaatcgtcaaacccctgagcgccattccgcagcctaccatcacaaagcaggaggtgatttga

SEQ ID NO: 533 - RNA, 1425 nt, synthetic construct
  misc_feature 1..1425: note = CDS (opt5) from Homo sapiens__NP_000448.3__HNF4A(1-474)(S87A_K106R_K108R_K126R_K 127R_S142A_S143A_S148A_T166A_S167A_S313A_S378A_T429A_T432A_ S436A_K458R_S461A)
  source 1..1425: mol_type = other RNA
atgagactgagcaagaccctcgtggacatggatatggccgactactccgctgccctggatcccgcgtatacaacgcttgagttcgaaaacgtccaggttctgaccatgggcaatgacacatctcctagcgaggggaccaacctcaatgctccgaactccctgggagtgtctgccctttgcgccatctgtggcgatcgggctacagggaaacactacggagccagctcctgcgacggctgtaaggggtttttccgcagagctgtgcggaaaaatcatatgtattcttgccgctttagcagacaatgtgtcgtggatcgggaccgcagaaaccagtgccggtactgtcgcctgaagaaatgcttcagagccggaatgcggcgcgaagcggttcagaatgagagagatcggatttccacccgcagagccgcttatgaagacagcgccctcccctctatcaacgctctgctgcaggccgaggtgctctcccggcaaattgcggcccctgtcagcggcatcaatggcgatattagagctaagaagatcgcctctatcgctgacgtgtgtgagtccatgaaagaacagctgcttgttctggtggagtgggccaagtacattcccgccttttgcgaactccctctggatgaccaggtcgcccttctgcgcgcgcacgccggggagcatctcctgctgggagctacaaaacggagcatggtgttcaaggacgtgctcctgcttggcaacgattatatcgtccccagacactgtcctgagctggccgaaatgtctcgcgtttccattcggatcctcgacgagctggtgcttccgtttcaggaactgcaaattgatgacaatgagtacgcctacctcaaagctatcattttctttgatcccgacgccaaggggctgagcgatcctggaaagatcaaaagactgcgcgctcaggtgcaggtctccctcgaagactatatcaacgatcggcagtacgactctagaggccgcttcggggagctgcttctgctcctgcccacccttcaaagcattacgtggcagatgatcgagcagattcaatttatcaagctgttcggaatggcgaaaattgataatctcctgcaggaaatgctgctcggcggcgccccttccgacgctccccatgctcaccacccgctgcatcctcaccttatgcaggagcatatggggaccaacgtgatcgttgccaatacaatgcccacccacctgagcaacggacagatgtgcgaatggcctcggcccagaggccaagctgccgcgcccgaggcccctcagccggctccccctgggggatctggctccgaaccctataagctcctgcctggggccgtggctacaatcgtccgccccctggccgcgattccgcagcctaccatcacgaaacaggaggtgatttga

SEQ ID NO: 534 - RNA, 1425 nt, synthetic construct
  misc_feature 1..1425: note = CDS (opt5) from Homo sapiens__NP_000448.3__HNF4A(1-474)(S87A_K106R_K108R_K126R_K 127R_S142A_S143A_S148A_T166A_S167A_S313A_S378A_T429A_T432A_ S436A_K458R_S461E)
  source 1..1425: mol_type = other RNA
atgagactgagcaagaccctcgtggacatggatatggccgactactccgctgccctggatcccgcgtatacaacgcttgagttcgaaaacgtccaggttctgaccatgggcaatgacacatctcctagcgaggggaccaacctcaatgctccgaactccctgggagtgtctgccctttgcgccatctgtggcgatcgggctacagggaaacactacggagccagctcctgcgacggctgtaaggggtttttccgcagagctgtgcggaaaaatcatatgtattcttgccgctttagcagacaatgtgtcgtggatcgggaccgcagaaaccagtgccggtactgtcgcctgaagaaatgcttcagagccggaatgcggcgcgaagcggttcagaatgagagagatcggatttccacccgcagagccgcttatgaagacagcgccctcccctctatcaacgctctgctgcaggccgaggtgctctcccggcaaattgcggcccctgtcagcggcatcaatggcgatattagagctaagaagatcgcctctatcgctgacgtgtgtgagtccatgaaagaacagctgcttgttctggtggagtgggccaagtacattcccgccttttgcgaactccctctggatgaccaggtcgcccttctgcgcgcgcacgccggggagcatctcctgctgggagctacaaaacggagcatggtgttcaaggacgtgctcctgcttggcaacgattatatcgtccccagacactgtcctgagctggccgaaatgtctcgcgtttccattcggatcctcgacgagctggtgcttccgtttcaggaactgcaaattgatgacaatgagtacgcctacctcaaagctatcattttctttgatcccgacgccaaggggctgagcgatcctggaaagatcaaaagactgcgcgctcaggtgcaggtctccctcgaagactatatcaacgatcggcagtacgactctagaggccgcttcggggagctgcttctgctcctgcccacccttcaaagcattacgtggcagatgatcgagcagattcaatttatcaagctgttcggaatggcgaaaattgataatctcctgcaggaaatgctgctcggcggcgccccttccgacgctccccatgctcaccacccgctgcatcctcaccttatgcaggagcatatggggaccaacgtgatcgttgccaatacaatgcccacccacctgagcaacggacagatgtgcgaatggcctcggcccagaggccaagctgccgcgcccgaggcccctcagccggctccccctgggggatctggctccgaaccctataagctcctgcctggggccgtggctacaatcgtccgccccctggaggccattccgcagcctaccatcacgaaacaggaggtgatttga

SEQ ID NO: 535 - RNA, 1425 nt, synthetic construct
  misc_feature 1..1425: note = CDS (opt5) from Homo sapiens__NP_000448.3__HNF4A(1-474)(S87A_K106R_K108R_K126R_K 127R_S142A_S143A_S148E_T166A_S167E_S313A_S378E_T429E_T432E_ S436E_K458R_S461E)
  source 1..1425: mol_type = other RNA
atgagactgagcaagaccctcgtggacatggatatggccgactactccgctgccctggatcccgcgtatacaacgcttgagttcgaaaacgtccaggttctgaccatgggcaatgacacatctcctagcgaggggaccaacctcaatgctccgaactccctgggagtgtctgccctttgcgccatctgtggcgatcgggctacagggaaacactacggagccagctcctgcgacggctgtaaggggtttttccgcagagctgtgcggaaaaatcatatgtattcttgccgctttagcagacaatgtgtcgtggatcgggaccgcagaaaccagtgccggtactgtcgcctgaagaaatgcttcagagccggaatgcggcgcgaagcggttcagaatgagagagatcggatttccacccgcagagccgcttatgaagacagcgagctcccctctatcaacgccctgctgcaggctgaggtgctctcccggcaaattgccgaacctgtcagcggcatcaatggcgatattagagcgaagaagatcgcctctatcgctgacgtgtgtgagtccatgaaagaacagctgcttgttctggtggagtgggccaagtacattcccgctttttgcgagctccctctggatgaccaggtcgcccttctgcgcgcccacgctggggaacatctcctgctgggagcgacaaaacggagcatggtgttcaaggacgtgctcctgcttggcaacgattatatcgtccccagacactgtcctgagctggccgaaatgtctcgcgtttccattcggatcctcgacgagctggtgcttccgtttcaggaactgcaaattgatgacaatgagtacgcttacctcaaagccatcattttctttgatcccgacgccaaggggctgagcgatcctggaaagatcaaaagactgcgcgctcaggtgcaggtctccctcgaggactatatcaacgatcggcagtacgactctagaggccgcttcggggaactgcttctgctcctgcccacccttcaaagcattacgtggcagatgatcgagcagattcaatttatcaagctgttcggaatggccaaaattgataatctcctgcaggaaatgctgctcggcggcgagccttccgacgcgccccatgctcaccacccgctgcatcctcaccttatgcaggaacatatggggaccaacgtgatcgttgccaatacaatgcccacccacctgagcaacggacagatgtgcgagtggcctcggcccagaggccaagccgctgagcccgaggaacctcagccggaaccccctgggggatctggctccgagccctataagctcctgcctggggccgtggctacaatcgtccgccccctggaagccattccgcagcctaccatcacgaaacaggaggtgatttga

SEQ ID NO: 536 - RNA, 1425 nt, synthetic construct
  misc_feature 1..1425: note = CDS (opt5) from Homo sapiens__NP_000448.3__HNF4A(1-474)(S87A_K106R_K108R_K126R_K 127R_S142A_S143A_S148A_T166A_S167A_K179R_K180R_S313A_S378A_ T429A_T432A_S436A_K458R_S461E)
  source 1..1425: mol_type = other RNA
atgagactgagcaagaccctcgtggacatggatatggccgactactccgctgccctggatcccgcgtatacaacgcttgagttcgaaaacgtccaggttctgaccatgggcaatgacacatctcctagcgaggggaccaacctcaatgctccgaactccctgggagtgtctgccctttgcgccatctgtggcgatcgggctacagggaaacactacggagccagctcctgcgacggctgtaaggggtttttccgcagagctgtgcggaaaaatcatatgtattcttgccgctttagcagacaatgtgtcgtggatcgggaccgcagaaaccagtgccggtactgtcgcctgaagaaatgcttcagagccggaatgcggcgcgaagcggttcagaatgagagagatcggatttccacccgcagagccgcttatgaagacagcgccctcccctctatcaacgctctgctgcaggccgaggtgctctcccggcaaattgcggcccctgtcagcggcatcaatggcgatattagagctcgccggatcgcctctatcgctgacgtgtgtgagtccatgaaggaacagctgcttgttctggtggagtgggccaagtacattcccgccttttgcgaactccctctggatgaccaggtcgcccttctgagagcgcacgccggggagcatctcctgctgggagctacaaaacgcagcatggtgttcaaggacgtgctcctgcttggcaacgattatatcgtcccccggcactgtcctgagctggccgaaatgtctagagtttccattcgcatcctcgacgagctggtgcttccgtttcaggaactgcaaattgatgacaatgagtacgcctacctcaaagctatcattttctttgatcccgacgccaaggggctgagcgatcctggaaaaatcaagcggctgagagctcaggtgcaggtctccctcgaagactatatcaacgatcgccagtacgactctcggggcagattcggggagctgcttctgctcctgcccacccttcaaagcattacgtggcagatgatcgagcagattcaatttatcaagctgttcggaatggcgaaaattgataatctcctgcaggaaatgctgctcggcggcgccccttccgacgctccccatgctcaccacccgctgcatcctcaccttatgcaggagcatatggggaccaacgtgatcgttgccaatacaatgcccacccacctgagcaacggacagatgtgcgaatggcctcgcccccggggccaagctgccgcgcccgaggcccctcagccggctccccctgggggatctggctccgaaccctataagctcctgcctggggccgtggctacaatcgtcagacccctggaggccattccgcagcctaccatcacgaaacaggaggtgatttga

SEQ ID NO: 537 - RNA, 1425 nt, synthetic construct
  misc_feature 1..1425: note = CDS (opt5) from Homo sapiens__NP_000448.3__HNF4A(1-474)(S87A_K106R_K108R_K126R_K 127R_S142A_S143A_S148A_T166A_S167A_K300R_K307R_K309R_S313A_ S378A_T429A_T432A_S436A_K458R_S461E)
  source 1..1425: mol_type = other RNA
atgagactgagcaagaccctcgtggacatggatatggccgactactccgctgccctggatcccgcgtatacaacgcttgagttcgaaaacgtccaggttctgaccatgggcaatgacacatctcctagcgaggggaccaacctcaatgctccgaactccctgggagtgtctgccctttgcgccatctgtggcgatcgggctacagggaaacactacggagccagctcctgcgacggctgtaaggggtttttccgcagagctgtgcggaaaaatcatatgtattcttgccgctttagcagacaatgtgtcgtggatcgggaccgcagaaaccagtgccggtactgtcgcctgaagaaatgcttcagagccggaatgcggcgcgaagcggttcagaatgagagagatcggatttccacccgcagagccgcttatgaagacagcgccctcccctctatcaacgctctgctgcaggccgaggtgctctcccggcaaattgcggcccctgtcagcggcatcaatggcgatattagagctaagaagatcgcctctatcgctgacgtgtgtgagtccatgaaagaacagctgcttgttctggtggagtgggccaagtacattcccgccttttgcgaactccctctggatgaccaggtcgcccttctgcgcgcgcacgccggggagcatctcctgctgggagctacaaaacggagcatggtgttcaaggacgtgctcctgcttggcaacgattatatcgtccccagacactgtcctgagctggccgaaatgtctcgcgtttccattcggatcctcgacgagctggtgcttccgtttcaggaactgcaaattgatgacaatgagtacgcctacctcaaagctatcattttctttgatcccgacgccagagggctgagcgatcctggacgcatccggagactgcgcgctcaggtgcaggtctccctcgaagactatatcaacgatcggcagtacgactctagaggccgcttcggggagctgcttctgctcctgcccacccttcaaagcattacgtggcagatgatcgagcagattcaatttatcaagctgttcggaatggcgaagattgataatctcctgcaggaaatgctgctcggcggcgccccttccgacgctccccatgctcaccacccgctgcatcctcaccttatgcaggagcatatggggaccaacgtgatcgttgccaatacaatgcccacccacctgagcaacggacagatgtgcgaatggcctcggcccagaggccaagctgccgcgcccgaggcccctcagccggctccccctgggggatctggctccgaaccctataaactcctgcctggggccgtggctacaatcgtccggcccctggaggccattccgcagcctaccatcacgaagcaggaggtgatttga

SEQ ID NO: 538 - RNA, 1425 nt, synthetic construct
  misc_feature 1..1425: note = CDS (opt5) from Homo sapiens__NP_000448.3__HNF4A(1-474)(S87A_K106R_K108R_K126R_K 127R_S142A_S143A_S148A_T166A_S167A_S313A_S378A_T429A_T432A_ S436A_K447R_K458R_S461E_K470R)
  source 1..1425: mol_type = other RNA
atgagactgagcaagaccctcgtggacatggatatggccgactactccgctgccctggatcccgcgtatacaacgcttgagttcgaaaacgtccaggttctgaccatgggcaatgacacatctcctagcgaggggaccaacctcaatgctccgaactccctgggagtgtctgccctttgcgccatctgtggcgatcgggctacagggaaacactacggagccagctcctgcgacggctgtaaggggtttttccgcagagctgtgcggaaaaatcatatgtattcttgccgctttagcagacaatgtgtcgtggatcgggaccgcagaaaccagtgccggtactgtcgcctgaagaaatgcttcagagccggaatgcggcgcgaagcggttcagaatgagagagatcggatttccacccgcagagccgcttatgaagacagcgccctcccctctatcaacgctctgctgcaggccgaggtgctctcccggcaaattgcggcccctgtcagcggcatcaatggcgatattagagctaagaagatcgcctctatcgctgacgtgtgtgagtccatgaaagaacagctgcttgttctggtggagtgggccaagtacattcccgccttttgcgaactccctctggatgaccaggtcgcccttctgcgcgcgcacgccggggagcatctcctgctgggagctacaaaacggagcatggtgttcaaggacgtgctcctgcttggcaacgattatatcgtccccagacactgtcctgagctggccgaaatgtctcgcgtttccattcggatcctcgacgagctggtgcttccgtttcaggaactgcaaattgatgacaatgagtacgcctacctcaaagctatcattttctttgatcccgacgccaaggggctgagcgatcctggaaagatcaaaagactgcgcgctcaggtgcaggtctccctcgaagactatatcaacgatcggcagtacgactctagaggccgcttcggggagctgcttctgctcctgcccacccttcaaagcattacgtggcagatgatcgagcagattcaatttatcaagctgttcggaatggcgaaaattgataatctcctgcaggaaatgctgctcggcggcgccccttccgacgctccccatgctcaccacccgctgcatcctcaccttatgcaggagcatatggggaccaacgtgatcgttgccaatacaatgcccacccacctgagcaacggacagatgtgcgaatggcctcggcccagaggccaagctgccgcgcccgaggcccctcagccggctccccctgggggatctggctccgaaccctatcgcctcctgcctggggccgtggctacaatcgtccggcccctggaggccattccgcagcctaccatcacgagacaggaggtgatttga

SEQ ID NO: 539 - RNA, 1425 nt, synthetic construct
  misc_feature 1..1425: note = CDS (opt5) from Homo sapiens__NP_000448.3__HNF4A(1-474)(S87A_K106R_K108R_K126R_K 127R_S142A_S143A_S148A_T166A_S167A_K179R_K180R_K234R_K300R_ K307R_K309R_S313A_S378A_T429A_T432A_S436A_K447R_K458R_S461E _K470R)
  source 1..1425: mol_type = other RNA
atgagactgagcaagaccctcgtggacatggatatggccgactactccgctgccctggatcccgcgtatacaacgcttgagttcgaaaacgtccaggttctgaccatgggcaatgacacatctcctagcgaggggaccaacctcaatgctccgaactccctgggagtgtctgccctttgcgccatctgtggcgatcgggctacagggaaacactacggagccagctcctgcgacggctgtaaggggtttttccgcagagctgtgcggaaaaatcatatgtattcttgccgctttagcagacaatgtgtcgtggatcgggaccgcagaaaccagtgccggtactgtcgcctgaagaaatgcttcagagccggaatgcggcgcgaagcggttcagaatgagagagatcggatttccacccgcagagccgcttatgaagacagcgccctcccctctatcaacgctctgctgcaggccgaggtgctctcccggcaaattgcggcccctgtcagcggcatcaatggcgatattagagctcgccggatcgcctctatcgctgacgtgtgtgagtccatgaaggaacagctgcttgttctggtggagtgggccaagtacattcccgccttttgcgaactccctctggatgaccaggtcgcccttctgagagcgcacgccggggagcatctcctgctgggagctacacgccggagcatggtgttcaaagacgtgctcctgcttggcaacgattatatcgtccccagacactgtcctgagctggccgaaatgtctcgcgtttccattcggatcctcgacgagctggtgcttccgtttcaggaactgcaaattgatgacaatgagtacgcctacctcaaggctatcattttctttgatcccgacgccagagggctgagcgatcctggacgcatccggagactgcgcgctcaggtgcaggtctccctcgaagactatatcaacgatcggcagtacgactctagaggccggttcggggagctgcttctgctcctgcccacccttcaaagcattacgtggcagatgatcgagcagattcaatttatcaaactgttcggaatggcgaagattgataatctcctgcaggaaatgctgctcggcggcgccccttccgacgctccccatgctcaccacccgctgcatcctcaccttatgcaggagcatatggggaccaacgtgatcgttgccaatacaatgcccacccacctgagcaacggacagatgtgcgaatggcctcgccccagaggccaagctgccgcgcccgaggcccctcagccggctccccctgggggatctggctccgaaccctatcggctcctgcctggggccgtggctacaatcgtcagacccctggaggccattccgcagcctaccatcacgcgccaggaggtgatttga

SEQ ID NO: 540 - RNA, 1425 nt, synthetic construct
  misc_feature 1..1425: note = CDS (opt5) from Homo sapiens__NP_000448.3__HNF4A(1-474)(S87A_S95A_S99A_K106R_K10 8R_K126R_K127R_S142A_S143A_S148A_T166A_S167A_S313A_S378A_T4 29A_T432A_S436A_K458R_S461E)
  source 1..1425: mol_type = other RNA
atgagactgagcaagaccctcgtggacatggatatggccgactactccgctgccctggatcccgcgtatacaacgcttgagttcgaaaacgtccaggttctgaccatgggcaatgacacatctcctagcgaggggaccaacctcaatgctccgaactccctgggagtgtctgccctttgcgccatctgtggcgatcgggctacagggaaacactacggagccagctcctgcgacggctgtaaggggtttttccgcagagctgtgcggaaaaatcatatgtatgcctgccgctttgcgagacaatgtgtcgtggatcgggaccgcagaaaccagtgccggtactgtcgcctgaagaaatgcttcagagccggaatgcggcgcgaagctgttcagaatgagagagatcggatttctacccgcagagccgcttatgaagacagcgccctcccctccatcaacgcgctgctgcaggccgaggtgctcagccggcaaattgctgcccctgtctctggcatcaatggcgatattagagctaagaagatcgcctccatcgccgacgtgtgtgagagcatgaaagaacagctgcttgttctggtggagtgggctaagtacattcccgcgttttgcgaactccctctggatgaccaggtcgcccttctgcgcgctcacgccggggagcatctcctgctgggagccacaaaacggtctatggtgttcaaggacgtgctcctgcttggcaacgattatatcgtccccagacactgtcctgagctggctgaaatgtcccgcgttagcattcggatcctcgacgagctggtgcttccgtttcaggaactgcaaattgatgacaatgagtacgcctacctcaaagcgatcattttctttgatcccgacgctaaggggctgtctgatcctggaaagatcaaaagactgcgcgcccaggtgcaggtctccctcgaagactatatcaacgatcggcagtacgacagcagaggccgcttcggggagctgcttctgctcctgcccacccttcaatccattacgtggcagatgatcgagcagattcaatttatcaagctgttcggaatggccaaaattgataatctcctgcaggaaatgctgctcggcggcgctccttctgacgctccccatgcccaccacccgctgcatcctcaccttatgcaggagcatatggggaccaacgtgatcgttgccaatacaatgcccacccacctgagcaacggacagatgtgcgaatggcctcggcccagaggccaagcggccgctcccgaggcccctcagccggctccccctgggggatccggcagcgaaccctataagctcctgcctggggccgtggcgacaatcgtccgccccctggaggccattccgcagcctaccatcacgaaacaggaggtgatttga

SEQ ID NO: 541 - RNA, 1425 nt, synthetic construct
  misc_feature 1..1425: note = CDS (opt5) from Homo sapiens__NP_000448.3__HNF4A(1-474)(S87A_K106R_K108R_K126R_K 127R_S138A_T139A_S142A_S143A_S148A_T166A_S167A_S313A_S378A_ T429A_T432A_S436A_K458R_S461E)
  source 1..1425: mol_type = other RNA
atgagactgagcaagaccctcgtggacatggatatggccgactactccgctgccctggatcccgcgtatacaacgcttgagttcgaaaacgtccaggttctgaccatgggcaatgacacatctcctagcgaggggaccaacctcaatgctccgaactccctgggagtgtctgccctttgcgccatctgtggcgatcgggctacagggaaacactacggagccagctcctgcgacggctgtaaggggtttttccgcagagctgtgcggaaaaatcatatgtattcttgccgctttagcagacaatgtgtcgtggatcgggaccgcagaaaccagtgccggtactgtcgcctgaagaaatgcttcagagccggaatgcggcgcgaagcggttcagaatgagagagatcggattgccgctcgcagagccgcttatgaagactccgccctccccagcatcaacgcgctgctgcaggccgaggtgctctctcggcaaattgctgcccctgtctccggcatcaatggcgatattagagctaagaagatcgccagcatcgccgacgtgtgtgagtctatgaaagaacagctgcttgttctggtggagtgggctaagtacattcccgcgttttgcgaactccctctggatgaccaggtcgcccttctgcgcgctcacgccggggagcatctcctgctgggagccaccaaacggtccatggtgttcaaggacgtgctcctgcttggcaacgattatatcgtccccagacactgtcctgagctggctgaaatgagccgcgtttctattcggatcctcgacgagctggtgcttccgtttcaggaactgcaaattgatgacaatgagtacgcctacctcaaagcgatcattttctttgatcccgacgctaaggggctgtccgatcctggaaagatcaaaagactgcgcgcccaggtgcaggtcagcctcgaagactatatcaacgatcggcagtacgactccagaggccgcttcggggagctgcttctgctcctgcccacacttcaatctattacctggcagatgatcgagcagattcaatttatcaagctgttcggaatggccaaaattgataatctcctgcaggaaatgctgctcggcggcgctcctagcgacgctccccatgcccaccacccgctgcatcctcaccttatgcaggagcatatggggacgaacgtgatcgttgccaataccatgcccacacacctgtccaacggacagatgtgcgaatggcctcggcccagaggccaagcggccgctcccgaggcccctcagccggctccccctgggggaagcggctctgaaccctataagctcctgcctggggccgtggcgaccatcgtccgccccctggaggccattccgcagcctacaatcaccaaacaggaggtgatttga

SEQ ID NO: 542 - RNA, 1425 nt, synthetic construct
  misc_feature 1..1425: note = CDS (opt5) from Homo sapiens__NP_000448.3__HNF4A(1-474)(S87A_S95A_S99A_K106R_K10 8R_K126R_K127R_S138A_T139A_S142A_S143A_S148A_T166A_S167A_S3 13A_S378A_T429A_T432A_S436A_K458R_S461E)
  source 1..1425: mol_type = other RNA
atgagactgagcaagaccctcgtggacatggatatggccgactactccgctgccctggatcccgcgtatacaacgcttgagttcgaaaacgtccaggttctgaccatgggcaatgacacatctcctagcgaggggaccaacctcaatgctccgaactccctgggagtgtctgccctttgcgccatctgtggcgatcgggctacagggaaacactacggagccagctcctgcgacggctgtaaggggtttttccgcagagctgtgcggaaaaatcatatgtatgcctgccgctttgcgagacaatgtgtcgtggatcgggaccgcagaaaccagtgccggtactgtcgcctgaagaaatgcttcagagccggaatgcggcgcgaagctgttcagaatgagagagatcggattgccgctcgcagagccgcgtatgaagactctgccctccccagcatcaacgctctgctgcaggccgaggtgctctcccggcaaattgctgcccctgtcagcggcatcaatggcgatattagagccaagaagatcgcttctatcgcggacgtgtgtgagtccatgaaagaacagctgcttgttctggtggagtgggccaagtacattcccgctttttgcgaactccctctggatgaccaggtcgcccttctgcgcgcccacgctggggagcatctcctgctgggagccaccaaacggagcatggtgttcaaggacgtgctcctgcttggcaacgattatatcgtccccagacactgtcctgagctggcggaaatgtctcgcgtttccattcggatcctcgacgagctggtgcttccgtttcaggaactgcaaattgatgacaatgagtacgcttacctcaaagccatcattttctttgatcccgacgccaaggggctgagcgatcctggaaagatcaaaagactgcgcgctcaggtgcaggtctctctcgaagactatatcaacgatcggcagtacgactccagaggccgcttcggggagctgcttctgctcctgcccacacttcaaagcattacctggcagatgatcgagcagattcaatttatcaagctgttcggaatggccaaaattgataatctcctgcaggaaatgctgctcggcggcgctccttccgacgcgccccatgcccaccacccgctgcatcctcaccttatgcaggagcatatggggacgaacgtgatcgttgccaataccatgcccacacacctgtctaacggacagatgtgcgaatggcctcggcccagaggccaagctgccgctcccgaggcccctcagccggcgccccctgggggaagcggctccgaaccctataagctcctgcctggggccgtggctaccatcgtccgccccctggaggccattccgcagcctacaatcaccaaacaggaggtgatttga

SEQ ID NO: 543 - RNA, 1425 nt, synthetic construct
  misc_feature 1..1425: note = CDS (opt11) from Homo sapiens__NP_000448.3__HNF4A(1-474)
  source 1..1425: mol_type = other RNA
atgcgtctttccaaaacactcgtagacatggacatggcagactacagcgccgccctcgacccagcctacaccaccctcgaatttgaaaacgtccaagtcctaactatgggaaacgacacatcaccctcagaaggtacaaacctcaacgcccccaactcgctaggcgtctccgcactatgcgcaatctgcggcgaccgtgccaccggcaaacactacggagcctcatcctgcgacggttgtaaaggcttcttccgacgcagcgtcagaaaaaaccacatgtactcctgccgcttctcccgtcaatgcgtcgtcgacaaagacaaacgcaaccaatgccggtactgccgcctaaaaaaatgcttccgcgcaggcatgaaaaaagaagcagtccaaaacgaacgcgaccgcatatcaacccgtcgatcatcatacgaagactcctccctccccagcatcaacgccctcctccaagcagaagtactaagccggcaaataacatccccagtcagcggcatcaacggagacatacgagccaaaaaaatagcttcaatcgccgacgtctgcgaatccatgaaagagcaactactggtcctcgtcgaatgggctaaatacatcccggccttctgcgaactccccctcgacgatcaagtcgcccttctaagagcccacgccggcgaacacctcctcttaggcgcaaccaaacgcagcatggtattcaaagacgtactgctcctcggcaacgattacatcgtcccacgacattgccccgagctcgcagaaatgtcccgagtctccatccgcatactcgacgaactcgtactccccttccaagaactccaaatagacgacaatgaatacgcatacctcaaagcaatcatcttcttcgaccccgacgccaaaggactcagcgacccaggcaaaatcaaacgcctacgatcacaagtacaagtttcacttgaagactacatcaacgacagacaatacgactcaagaggtcgtttcggagaactactcctactactaccaaccctccaaagcataacctggcaaatgatagaacaaatacaatttataaaactcttcggcatggccaaaatcgacaatctcctacaagaaatgctcctcggaggaagcccctcagatgccccacacgcccaccacccactacacccccacctcatgcaagagcacatgggtaccaacgtcatagtcgccaacacaatgcccacccacctctcaaacggccaaatgtgcgaatggccgcgcccacgcggacaagccgccacccccgaaaccccacagccaagcccacccggtggctccggcagcgaaccctacaaactcctacccggcgccgttgcaacaatagtcaaacccctatccgccataccccaaccaacgatcaccaaacaagaagtcatctag

SEQ ID NO: 544 - RNA, 1425 nt, synthetic construct
  misc_feature 1..1425: note = CDS (opt11) from Homo sapiens__NP_000448.3__HNF4A(1-474)(S313A)
  source 1..1425: mol_type = other RNA
atgcgtctctcaaaaaccctagtcgacatggacatggccgactattctgcagccctagacccagcctacaccaccctcgaattcgaaaacgtacaagtactcaccatgggcaacgatacctccccatctgaaggcaccaacctcaacgcacccaactctctcggagtctccgccctatgcgcaatctgcggcgaccgagccactggaaaacactacggcgcctcctcttgcgacggatgcaaaggcttcttccgaagatcagtccgaaaaaaccacatgtactcatgccgcttctcgcgccaatgcgtcgtcgacaaagacaaacgtaaccaatgcagatactgccgactcaaaaaatgcttccgcgccggcatgaaaaaagaagccgtccagaacgaacgcgaccgcatctcaaccagacgctcgagctacgaagactcctccctaccctccatcaacgccctactccaagcagaagtactatcccgccaaataacctcccccgtcagcggcatcaacggcgacatcagagccaaaaaaatcgcctcaatcgccgacgtatgcgagagcatgaaagaacagctccttgtcctagtagaatgggccaaatacatcccagccttctgcgaactccccctcgacgaccaagtcgccctactcagagcccacgccggcgaacacctcctcctcggcgctaccaagcgatctatggtattcaaggatgtacttctactcggaaacgactacatcgtaccacgccactgcccagaactagccgaaatgtcccgcgtatccatccgaatcctcgatgaactcgtactccccttccaagaactacaaattgacgacaatgaatacgcctacttaaaagccatcatattcttcgaccccgacgccaaaggtctgtccgacccaggcaaaatcaaacgactacgggcccaagtccaagtatcactcgaagactacatcaacgaccgccaatacgactcacgcggccgcttcggcgagctcctcctccttctcccaaccctacaatccataacctggcaaatgatcgaacaaatccaattcataaaactcttcggcatggcaaaaattgacaaccttctccaagaaatgctcctgggcggatccccctccgacgccccacacgcccatcaccccctccacccccacctaatgcaggaacacatgggcacaaatgtcatagtagccaacactatgcccacacatctctcaaacggccagatgtgtgaatggccacgcccacgaggacaagcagccacacccgaaacaccacaaccctcccccccaggcggctccggatccgaaccctacaaactcctacccggcgccgtcgccacaatcgtcaaacccctatccgccatcccccaacccacgatcaccaaacaagaagtcatctaa

SEQ ID NO: 545 - RNA, 1425 nt, synthetic construct
  misc_feature 1..1425: note = CDS (opt11) from Homo sapiens__NP_000448.3__HNF4A(1-474)(S313E)
  source 1..1425: mol_type = other RNA
atgcgcctgtccaaaaccctcgtcgacatggacatggctgactactccgccgccctcgaccccgcatacaccacactcgaattcgaaaacgtccaggtcctcaccatgggaaacgacacctccccctcagaaggaaccaacctaaacgctcccaactcccttggcgtctccgccctctgcgcaatatgcggagaccgcgccaccggaaaacactacggcgcctcatcctgcgacggttgcaaaggcttcttccgccgatccgtccgcaaaaaccacatgtattcctgccgcttctcgcgacagtgcgtagtcgacaaagataaacgaaaccaatgccgatactgccgccttaaaaaatgcttccgcgccggaatgaaaaaagaagcagtccaaaacgaacgagaccgcatcagcacccgtaggagctcatacgaggactcgagcctcccctcgatcaacgccttactccaagccgaagtactgtcccgccagatcacctcacccgtctccggcatcaacggagacatcagagccaaaaaaatagcatcgatcgccgacgtatgcgagtccatgaaagaacaactcctagtactagtcgaatgggccaaatacatcccagcattctgcgaactacccctagatgatcaagtagccctactacgagcccacgccggcgaacacctcctcctcggggccaccaaacgatcaatggtcttcaaagacgtcctcctcctcggcaacgactacatcgtaccccgccactgcccagaactcgcagaaatgtcacgcgtctcaatccgcatcctggacgaacttgtactcccattccaagaactacaaatagacgacaacgaatacgcatacctgaaagcaatcatctttttcgaccccgacgccaaaggcctatctgaccccggtaaaataaaacgcctccgcgaacaagtacaagtctctctcgaagactacatcaacgaccgccagtacgacagccggggacgcttcggcgaacttctcctcctcctccccactctacaaagcatcacctggcaaatgatcgaacaaatacaattcatcaaactcttcggaatggcaaaaatcgacaacctcctccaagaaatgctcctcggcggctccccgagcgacgcccctcacgcccaccacccactccacccccacctaatgcaagagcacatgggaaccaacgtcatagtcgcaaacacaatgcccacccacctctccaacggccaaatgtgcgaatggccccgcccacgcggccaagccgccacacccgaaacaccccaaccatcacccccaggcggatcaggatccgagccctacaaactcctcccaggcgccgtcgccacaatcgtcaaacccctcagcgccataccacaaccaacaataacgaaacaagaagtcatataa

SEQ ID NO: 546 - RNA, 1425 nt, synthetic construct
  misc_feature 1..1425: note = CDS (opt11) from Homo sapiens__NP_000448.3__HNF4A(1-474)(S142A_S143A)
  source 1..1425: mol_type = other RNA
atgcgcctatcaaaaacactggtcgacatggacatggcagactattctgccgccctggaccccgcctacactacactcgagttcgaaaacgtccaagtactcaccatgggaaacgacacctccccctccgaaggcaccaacttaaacgcccccaactcccttggggtctccgctctctgcgcaatctgcggagacagagccaccggtaaacactacggagcctcctcctgcgacggatgcaaaggcttcttccgccgctcagtacgcaaaaaccacatgtatagttgccgcttctctcgccagtgcgtggtcgacaaagacaaacgcaaccaatgccgatactgccgcctcaaaaagtgcttccgcgccggaatgaagaaagaagctgtccaaaacgaacgcgaccgcatctcaacccgcagagcggcatacgaagacagctcgctaccctccataaacgccctccttcaagccgaagtcctatcccgacagatcacctcccccgtctctggaataaacggcgacatccgcgcaaagaaaatcgcctccatcgccgacgtatgcgaatccatgaaagaacaactcctagtgctagtagaatgggccaaatacatacccgccttctgcgagctccccctagacgaccaagtagccctactccgcgcacacgcaggcgaacacctcctcctcggcgccaccaaacgatcaatggtcttcaaagacgtactactcctcggcaatgactacatcgtcccacgacactgccccgaattagcagaaatgtcgcgagtctccatacgcatcctagacgaactcgtactccctttccaagaactacaaatcgatgacaacgaatacgcatacctcaaagccatcatcttcttcgacccagacgccaaaggcctttccgatcccggcaaaatcaaaagactacgctcacaagtacaagtctccctcgaagattacatcaacgaccgccaatacgactcacgcggccgcttcggagaactcctactactcctcccaaccctacaatccatcacctggcaaatgatcgaacaaatccagttcattaaactcttcggaatggccaaaatcgataacctcctacaagaaatgctcctaggcggcagtccatccgacgcgccccacgcacaccatccactccacccccacctcatgcaagaacacatgggcaccaacgtaatcgtcgcaaacaccatgcccacacacctttcaaacggccaaatgtgcgaatggccgcgcccccgcggccaagcagccaccccagaaaccccacaaccatcacccccaggcggcagcggctcagaaccctataaactcctccccggcgccgtagccacaatcgtcaaacctctctccgcaatcccccaacccaccatcaccaaacaagaagtcatctaa

SEQ ID NO: 547 - RNA, 1425 nt, synthetic construct
  misc_feature 1..1425: note = CDS (opt11) from Homo sapiens__NP_000448.3__HNF4A(1-474)(S142E_S143E)
  source 1..1425: mol_type = other RNA
atgcgcctatccaaaaccctagtcgacatggacatggcagactactccgccgccctcgacccagcatacaccacactcgaattcgaaaacgtccaagtgctaaccatgggcaacgacaccagcccgtccgaaggcacaaacctcaacgcccccaactcccttggtgtctcagccctctgcgcaatctgcggcgaccgtgccaccggtaaacactatggcgcctcatcctgcgacggctgcaaaggcttcttcagacgatcggtacgcaaaaaccacatgtactcatgtcgcttctcccgacaatgtgtagtggacaaagacaaaagaaaccaatgccgctactgccgcctcaaaaaatgcttccgcgcaggcatgaaaaaagaagccgtccagaatgaacgagaccgcataagcacccgccgagaagaatatgaagactcctcacttccctcaatcaacgccctactccaagccgaagtactatcacggcaaatcacaagccccgtctcaggaataaacggagacatccgcgccaaaaaaattgcctccatcgcggacgtatgcgaaagcatgaaagaacaactactcgtactcgtcgaatgggcaaaatacatccccgcattctgcgaactccccctcgacgaccaagtagccctgctcagagcacacgccggagaacaccttctcctcggcgccaccaaacgctccatggtcttcaaagacgtcctcctcctagggaacgactacatagtaccacgacactgcccagaactagccgaaatgtccagagtatcaatccgaatcctcgacgaactcgtcctccccttccaagaactacaaatcgacgacaacgaatacgcctacctaaaagccatcatattcttcgatcccgacgcaaaaggcctctccgaccccggcaaaatcaagcgactacgatcacaagtacaagtctccctggaagactacatcaacgaccgccaatacgacagccgcggaagattcggcgaactcctgctactactccccaccctacaatccatcacctggcaaatgatagaacaaatacaattcatcaaactcttcggcatggctaaaatcgacaacctcctacaagaaatgctactaggcggcagcccctcagacgccccccacgcccaccaccccctccacccccacctcatgcaggaacacatgggcaccaacgtcatcgtcgccaacacaatgcccacccatctctccaacggccaaatgtgcgaatggcctaggccacgtggtcaagcagcaacccccgaaaccccccaaccctccccaccaggcggttcaggatccgaaccctacaaactactcccaggcgccgtagccaccattgtcaagccgctcagcgctataccccaacccaccataaccaaacaagaagtcatataa

SEQ ID NO: 548 - RNA, 1425 nt, synthetic construct
  misc_feature 1..1425: note = CDS (opt11) from Homo sapiens__NP_000448.3__HNF4A(1-474)(S143A)
  source 1..1425: mol_type = other RNA
atgcgactctccaagaccctcgtagacatggatatggcagactacagcgccgccctagatccagcttacaccaccctcgaattcgaaaacgttcaagtcctaacgatgggcaacgacacctcaccatcagaaggcaccaacctcaacgcccccaactccctcggagtctcagccctctgcgcaatctgcggcgaccgcgccaccggcaaacactacggagcctcgtcctgcgacggatgcaaaggattcttcaggcgctccgtacggaaaaaccacatgtactcttgtcgtttctcccgccaatgcgtagtcgacaaagacaaacgcaaccaatgccgctactgtcgcctcaaaaaatgcttccgcgccggcatgaagaaagaagccgtccaaaacgaacgcgaccgcatctccacccgcaggtccgcctacgaagactccagcctaccctccatcaacgcactactccaagccgaagtcctctcccgccaaatcacgtctcccgtctcaggaatcaacggcgacatccgcgctaagaaaatagcatctatcgccgacgtctgtgaatccatgaaagaacaactactcgtactggtagaatgggccaaatacatccccgccttctgcgaacttcccctcgacgaccaagttgcactcctccgagcccacgccggggaacacctactcctcggagccaccaaacgctcaatggtcttcaaagacgtactcctcctcggcaacgactacatcgtgccacgccactgccccgaactagccgaaatgtcccgggtctccattcgaatcctcgacgaactcgtcctccccttccaagaactccaaatagacgacaacgaatacgcttacctcaaagcaataatcttcttcgacccagatgccaaaggcctcagcgacccgggcaagattaaacgcctccgctctcaagtccaagtctcccttgaagactacatcaacgaccgccaatacgactcccgcggtcgattcggggaactactcctactcctcccaacactacaatccatcacctggcaaatgatcgaacaaatccaattcatcaaactcttcggcatggccaaaatcgacaacctcctacaggaaatgctcctaggaggcagcccctccgacgccccccacgcccaccaccccctccacccccacctaatgcaagaacatatgggaaccaacgtaatcgtcgcaaacacaatgcccacccacctctccaacggccaaatgtgcgaatggccccgcccccgcggtcaagcagccacacccgaaacccctcaaccctccccgcccggaggcagcggctccgaaccatacaaactcctcccaggcgccgtagccaccatcgtaaaacccctatcggccataccccaacccacaatcaccaaacaagaagtaatctaa

SEQ ID NO: 549 - RNA, 1425 nt, synthetic construct
  misc_feature 1..1425: note = CDS (opt11) from Homo sapiens__NP_000448.3__HNF4A(1-474)(T166A)
  source 1..1425: mol_type = other RNA
atgaggctcagcaaaactctagtcgacatggacatggccgactactcagccgcactcgaccccgcatataccacactagagttcgaaaacgtccaagttctcaccatgggaaacgacacttccccctcagaaggcacaaacctcaacgcacccaactccctaggagtctccgccctatgcgcgatctgtggcgaccgagcaaccggcaagcattacggcgcatcctcctgcgacggatgcaaaggcttcttccgccgatccgtccgaaagaaccacatgtactcctgccgattctcccgccaatgcgtagttgacaaagacaaacgcaatcaatgccgatactgccgcctcaagaaatgcttccgagcaggaatgaagaaagaagccgtccaaaacgaacgcgatcgcatatccacccgccgctcctcctacgaagactcctccctcccctccatcaacgcactcctccaagcggaagtactctcacgccaaatcgcgtccccagtctccggcataaacggagacatccgcgccaagaaaatagcctcaatcgctgacgtctgcgaatctatgaaagaacagctcctcgtcctagtcgaatgggccaaatacatccccgccttctgcgaactcccactagacgaccaagtggcactcctccgcgcccacgccggcgaacacctactactcggagccaccaaacgctccatggtgttcaaagacgtactactcctcggaaatgactacatcgtcccccgacactgccccgaactcgccgaaatgtccagggtctccatccgcatcctcgacgaactggtcctcccattccaagaactccaaatcgacgacaacgaatacgcctacctaaaagccatcatcttcttcgaccccgacgccaaaggcctatccgacccgggcaaaatcaaacgactccgctcccaagtccaagtctcactcgaagactacatcaacgatagacagtacgactcacgcggtagattcggagaactcctactcctactccccacactccaatccataacctggcaaatgatagaacaaatacaattcatcaaactcttcggcatggccaaaatcgacaacctactccaggaaatgctcttaggcggctccccatccgacgccccacacgcccaccaccccctccacccccacctcatgcaagaacacatgggcaccaatgtcatagtagcaaacaccatgcccacacacctctccaacggacaaatgtgcgaatggccccgcccacgcggtcaggccgccacccccgaaaccccacaaccctccccacccggaggctccggatcagaaccctacaaactcctccccggcgccgtcgcaaccatcgttaaaccactatccgccataccccaacccaccatcaccaaacaagaggtcatataa

SEQ ID NO: 550 - RNA, 1425 nt, synthetic construct
  misc_feature 1..1425: note = CDS (opt11) from Homo sapiens__NP_000448.3__HNF4A(1-474)(S167E)
  source 1..1425: mol_type = other RNA
atgcgcctctccaaaaccctcgtcgacatggacatggcagactactctgcagctctcgaccccgcctataccacgctcgaattcgaaaacgtacaagtcctcaccatgggaaacgacacctccccctctgaaggcaccaacctcaacgcacccaacagccttggcgtcagcgccttatgcgccatttgcggagaccgcgccaccggcaaacactacggagcatcctcatgcgacggctgcaaaggcttcttccgccgatcagtccgaaaaaaccacatgtactcctgccgcttctctcgccagtgcgtagtcgataaagataaaagaaatcaatgccgctactgccgcctcaaaaaatgcttccgcgccggcatgaaaaaagaagcagttcaaaacgaacgcgaccgaatctccacccgccgctcatcctacgaagactcttccctcccctctataaacgccctcctccaagccgaagtactctcacgccaaatcaccgaacctgtctccggcattaacggagacatacgcgccaagaaaatagccagcatcgccgacgtctgcgaatcaatgaaagaacaactcctcgtcctagtcgaatgggccaaatacatccccgcattctgcgaacttcccctcgacgaccaagtcgccctcctccgtgcccatgcaggcgaacacctcctcctcggcgccaccaaacgctccatggtctttaaagacgtcctcctcctgggcaacgactacatcgtcccccgacactgcccagaactcgccgagatgagccgcgtgtccatacgcatactcgacgaactcgtcctccccttccaagaactccagatagacgataacgaatacgcatacctaaaagccataatattcttcgaccccgacgctaaaggtctctcagacccaggaaaaatcaaacgtctcagaagccaagtccaagtctcactcgaagactacatcaacgaccgccaatacgactctcgcggccgcttcggcgaactcctcttattactcccaacactccaatcaatcacctggcaaatgatcgaacaaatacaatttatcaaactcttcggcatggctaaaatcgacaatctcctccaagaaatgctcctcggaggctccccctcagatgccccccacgcccaccacccccttcatccccacttaatgcaagaacatatgggcaccaacgtcatcgtagccaacaccatgcccacacacctatccaacggccaaatgtgcgaatggccccgcccccgaggacaagccgccaccccagaaacaccccaaccctccccccccggaggcagcggctccgaaccatacaaactcctcccaggtgccgtcgccactatcgtcaaacccctctcagccatcccccaaccaaccatcacaaagcaagaagtcatctaa

SEQ ID NO: 551 - RNA, 1425 nt, synthetic construct
  misc_feature 1..1425: note = CDS (opt11) from Homo sapiens__NP_000448.3__HNF4A(1-474)(S167A)
  source 1..1425: mol_type = other RNA
atgcggctctcaaaaaccctagtcgacatggacatggccgactactcagctgccctagaccccgcatacaccacactagaattcgaaaatgtccaagtactaaccatgggcaacgacacctcaccctccgaaggtaccaacctcaacgcgcccaactccctcggcgtctcagccctctgcgccatctgcggcgaccgcgcgaccggcaaacactacggtgcctcctcatgcgacggatgcaaaggcttcttccgacgctcagtccgcaaaaaccacatgtactcctgccgcttctcacgacaatgcgtcgttgacaaagacaaacgcaaccaatgccgctactgccgcctcaaaaaatgcttccgcgcaggaatgaaaaaagaagcagttcaaaacgaacgcgaccgcatctcaacccgcagatcatcatacgaagactcatccctaccatcaataaacgccctcctacaagccgaagtcctctccagacaaatcaccgcccccgtctcaggcataaacggcgacatccgtgcaaaaaaaatcgcctccatcgctgacgtctgcgaatccatgaaagaacaactccttgtcctcgtcgaatgggccaaatacattcctgccttctgcgaactccccctcgacgaccaagtcgcactactcagagcccacgcaggcgaacacctcctcctcggagcaacaaaacgctccatggtcttcaaagacgtcctcctactcggaaatgactacatcgtccccagacactgccccgaactcgctgaaatgtcaagagtctccatacgaatactagacgaactagtcctacccttccaagaactgcaaatagacgacaacgaatacgcctacctcaaagccatcatattcttcgaccccgacgccaagggactctcagaccccggcaaaatcaaacgcctacgctcccaagtgcaagtcagcctcgaagactacataaacgatcgccagtacgactcacgaggacgattcggagaactcctcctcctcctcccaacactccagtccatcacctggcaaatgatcgaacaaatccaatttatcaaactcttcggcatggccaaaatcgacaacctactacaagaaatgctcctcggaggatccccctcagacgccccccacgcccaccaccctctccacccccacctaatgcaagaacacatggggaccaacgtaatcgtcgccaataccatgccaactcatctatcaaacggtcaaatgtgcgaatggccccgcccccggggacaagccgccacccccgagacaccgcaaccctccccccctggcggatccggctcagaaccctataaactactccccggcgcggtcgccaccatagtcaaaccactctctgccatcccccaaccaaccataaccaaacaagaagtcatctaa

SEQ ID NO: 552 - RNA, 1425 nt, synthetic construct
  misc_feature 1..1425: note = CDS (opt11) from Homo sapiens__NP_000448.3__HNF4A(1-474)(S167A_S378A_T429A_T432A_ S436A)
  source 1..1425: mol_type = other RNA
atgcgcctctccaaaaccctcgttgacatggatatggcggactactccgccgcactcgacccagcctacaccaccctagaatttgaaaacgtccaagtactaaccatgggcaacgacacaagcccctccgaaggcacaaatctcaacgcccccaactcactaggcgtctcagccctatgtgctatctgcggcgaccgcgccaccggcaaacactacggcgcatcatcatgtgacggatgcaaaggattcttccgacgctccgtccgaaagaaccacatgtactcctgccgattcagcagacaatgtgttgtcgacaaagacaaacgcaaccaatgtcgctactgccgcctcaaaaaatgctttagagccggaatgaaaaaagaagccgtccaaaacgaacgcgaccgcatctccacacgccgaagctcatacgaagactcatctctcccctccatcaacgcactcctccaagccgaagtcctatctcgccaaatcaccgcacccgtctccggcatcaacggcgacatacgcgccaaaaaaatagcctccatagcagacgtatgcgaatccatgaaagagcaactcctcgtgctagtcgaatgggccaaatacatccccgccttctgcgagctcccactagacgaccaagtcgccctcctccgcgcccacgccggcgaacacctgctcctaggcgccaccaaaagaagcatggtattcaaagacgtcctactcctcggcaacgactatatagtccctcgccactgtccagaactcgcagaaatgtccagagtcagcatccgaatcctcgacgaactcgtcctacccttccaagaactacaaatcgacgacaacgaatacgcctaccttaaagccatcatcttcttcgaccccgacgccaaaggcctatccgaccccggcaaaatcaaacgcttacgatcccaagtccaggtcagcctcgaagactacataaacgaccgccaatacgactcacgcggccgcttcggcgaactactcctcctcctcccaaccctccaaagcatcacctggcaaatgatagaacaaatacaattcatcaaacttttcggcatggccaaaatcgacaaccttttacaagaaatgctactcggtggcgcgcccagcgacgctccgcacgcccaccaccccctccacccacacctcatgcaggaacacatgggcaccaacgtaatagtcgccaacacaatgccaacccacctctcaaacggccagatgtgcgaatggccccgaccccgaggccaagccgcagccccagaagccccccaaccagcccccccaggaggatccggctcagaaccctataaactcttacccggtgccgtcgcgaccattgtcaaacccctctccgccataccccagcccacaatcaccaaacaagaagtcatctaa

SEQ ID NO: 553 - RNA, 1425 nt, synthetic construct
  misc_feature 1..1425: note = CDS (opt11) from Homo sapiens__NP_000448.3__HNF4A(1-474)(S167E_S378E_T429E_T432E_ S436E)
  source 1..1425: mol_type = other RNA
atgcgactatctaaaactctcgtagacatggacatggccgactactcggccgccctcgaccccgcatacaccacgctcgagttcgaaaacgttcaagtcctcacaatgggcaacgacacctccccctcagaaggcaccaacctcaacgctccaaactccctaggggtctccgcactctgcgcaatctgcggcgaccgtgccaccggcaaacattacggcgcctcatcctgcgacggctgcaaaggattcttccggcgatccgtccgaaagaaccacatgtacagctgcagattcagccgacaatgcgtcgtggacaaagataaacgcaaccaatgccgctactgccgactcaagaaatgcttccgcgcaggcatgaagaaagaagcagtacaaaacgaacgcgaccgcatctcaacaagacgtagctcctacgaagactcaagcctcccatccatcaacgccctcctccaagccgaagtactctcacgtcaaatcaccgaacccgtgtcaggaatcaacggcgacatccgcgccaagaaaatcgcctccatcgcagacgtctgcgaatccatgaaagaacaactcctcgtcctggtcgaatgggctaaatacatccccgcattctgcgaactccccctagatgaccaagtcgccctactgcgcgcccacgcaggcgaacatctattactcggcgccaccaaacgcagcatggtattcaaagacgtcctcctcctcggcaacgactacatagtcccacgccactgcccagaactggccgaaatgagccgagtctctatccgcatactcgacgagctagtcctccccttccaagaactccaaattgacgacaacgaatacgcctacctcaaagccatcatattcttcgaccccgacgcgaaaggcctatccgaccccggtaaaatcaaaagactacgctcacaagtccaagtctcccttgaagactacatcaacgaccgccagtacgacagccgcggccgcttcggcgaactacttctcctcctccccaccctccaatccatcacctggcaaatgatcgaacaaatccaattcataaaactattcggaatggccaaaatcgacaacctcctgcaagaaatgctcctcggaggcgaaccctcagacgcaccccacgcccatcaccccctccatccacacttaatgcaagaacacatgggcaccaacgtaatcgtagccaacactatgcccacccacctatccaatggccaaatgtgcgaatggcccagaccaagaggacaagccgccgaacccgaagaaccacaaccagaacctcccggtggatccggctcagaaccctacaaactactccccggagccgtagctaccatcgtcaagcccctatcagccatcccccaacccacaatcaccaaacaggaagtcatctaa

SEQ ID NO: 554 - RNA, 1425 nt, synthetic construct
  misc_feature 1..1425: note = CDS (opt11) from Homo sapiens__NP_000448.3__HNF4A(1-474)(S87A)
  source 1..1425: mol_type = other RNA
atgcgcctaagcaaaacattagtcgacatggacatggccgactactccgccgcactcgacccagcatacaccacattagagttcgaaaacgtccaagtcctcacaatgggcaacgacacctcaccctcagagggcaccaatctcaacgccccaaactcactcggagtaagtgcactatgcgcgatctgcggcgaccgcgccaccggcaaacactacggcgcatcctcctgcgacggctgcaaaggattcttccgacgcgccgtccgcaaaaaccacatgtactcatgccgcttctcacgccagtgcgtcgtagacaaagacaaacgcaatcaatgccgctactgccgactcaagaaatgcttccgcgccggaatgaagaaagaagcagtacaaaacgaacgcgaccgaatctccacccgccgctcctcctacgaagattcctccctcccctccatcaacgccctactccaagccgaagtactctcccgccaaatcacctctccagtttccggcataaacggcgacatacgagcaaagaaaattgcatctatcgccgacgtctgcgaatcgatgaaagagcaactcctagtactcgtagaatgggccaaatacatccccgcattctgcgaactcccacttgacgaccaagtcgcccttctccgagcacacgccggcgaacatctcctgctcggcgctacaaaaagaagcatggtcttcaaagacgtcctcctactcggcaacgactacatcgtcccccgccactgccccgaactagccgaaatgagccgagtctccatcagaatcctcgacgaactcgtactccccttccaagaactccaaatagacgacaacgaatatgcatacctcaaagcaatcatattcttcgaccccgacgccaaaggactttccgaccccggcaaaataaaacgcctccgatcccaagtacaggtctccctcgaagactacatcaacgacagacaatacgacagccgtggacgattcggagagttactcctactacttcccacccttcagtcaatcacctggcaaatgatagaacaaatccaattcatcaaactgttcggaatggctaaaatcgacaacctgctacaagaaatgctcctcggcggctcccctagcgacgccccacacgcacaccaccccctccacccacacctcatgcaagagcacatgggcacaaacgtaatagtagccaacacaatgcccacccacctctcgaacggccaaatgtgcgaatggccccgcccccgcggacaagccgcaaccccagaaacaccccaaccttcacccccaggcggctccggatccgaaccctacaaactactccccggagccgtagcaaccatagtcaaaccgctcagcgccatcccccaacccacaataaccaaacaagaagtcatctag

SEQ ID NO: 555 - RNA, 1425 nt, synthetic construct
  misc_feature 1..1425: note = CDS (opt11) from Homo sapiens__NP_000448.3__HNF4A(1-474)(S87E)
  source 1..1425: mol_type = other RNA
atgcgcctatccaaaaccctagtcgacatggacatggcagactattcagccgcactagatcccgcctatacaacactcgaattcgaaaacgtgcaggtcctcaccatgggcaacgacacctccccctccgaaggaaccaacctaaacgcaccaaattccctcggcgtctccgccctttgcgccatatgtggggaccgcgcaacaggaaaacactacggcgcctcctcctgcgacggatgcaaaggattcttccgacgcgaagtcagaaaaaaccacatgtactcatgtcgattctcccgccagtgcgtcgtcgacaaagacaaaagaaaccaatgcagatactgtcgcctaaaaaaatgcttccgcgccggaatgaaaaaggaagcagtacagaacgaacgcgaccgcatctccaccagacgctcctcctacgaagactcatccctgccctcgatcaacgcacttctccaagccgaggtcctatcaagacaaatcacttctccagtatccggcatcaatggcgacatccgcgccaaaaaaatcgcctcaatcgccgacgtctgcgagtccatgaaagaacaactactagtccttgtagaatgggctaaatatattcccgccttctgcgaacttcccctagacgaccaagtagcactcctccgcgctcacgccggcgagcacctactactcggcgcaaccaaaagatcaatggtcttcaaagacgtcctcctcctgggcaacgactacatcgtcccccgacactgccccgaactcgcggaaatgtcccgcgtcagcatccgcatcctcgacgaactcgtactccccttccaagaactacaaatcgacgacaacgaatacgcctacctcaaagcgataatcttcttcgacccagacgccaaaggtctatccgacccaggaaaaatcaaacgtctccgctctcaagtacaagtctctctcgaagactacataaacgaccgccaatacgactccagaggccggttcggcgaactcctcctcctactccccacactccaaagcatcacctggcaaatgatcgaacaaatccaattcataaaactattcggcatggccaaaatagacaacctgctacaagaaatgctcctcggaggttccccctcagacgccccccacgcccaccacccccttcacccacacctaatgcaagaacacatgggcactaacgtaatagtagccaacacaatgcccacccacctctccaacggccaaatgtgtgaatggccaagaccacgcggacaagccgcaacccctgagaccccccagccctccccacccggcggctctggcagcgaaccctacaaactgctacccggggccgtcgccacaatcgtaaaaccactctcggcaatcccccaacccaccatcaccaaacaagaagttatctaa

SEQ ID NO: 556 - RNA, 1425 nt, synthetic construct
  misc_feature 1..1425: note = CDS (opt11) from Homo sapiens__NP_000448.3__HNF4A(1-474)(R2V)
  source 1..1425: mol_type = other RNA
atggtactctccaagaccctagtcgacatggacatggccgactactccgccgccctagacccagcctacaccactctagagttcgaaaacgtccaagtcctcacaatgggaaacgacacctccccctccgaaggcacaaacctcaacgcccccaactccctcggcgtctccgccctatgcgccatatgcggagaccgagccaccggcaagcactacggcgcttcctcctgcgacggatgcaaaggcttcttccggagaagcgtccggaaaaaccacatgtattcctgccgattctcacgccaatgcgtagtcgacaaagacaaacgcaaccaatgccgctactgccgccttaagaaatgtttcagagccggaatgaagaaagaagccgtccaaaacgaacgcgaccgcataagcacccgccgctcctcatacgaagacagcagcctcccctccatcaacgccctcctccaagcagaagtgctctcccgacaaatcaccagccccgtaagcggaatcaacggcgacatacgcgccaagaaaatcgcctccatcgccgacgtctgcgaatcaatgaaagaacaactactcgtccttgtagaatgggccaaatacatccccgccttctgcgagctcccactcgacgaccaagtcgccctcctccgcgcacacgccggtgaacatctcctactaggagcaaccaaacgatcaatggtattcaaagacgtcctcctcctcggtaacgactacatagtcccaagacactgccccgaactagccgaaatgtcacgcgtctccatccgcatcctagacgaactcgtccttccctttcaagaactacaaatcgacgacaacgaatacgcctacctcaaagccatcatcttcttcgacccagacgcaaaaggactctcagaccccggcaaaatcaaacgcctccgctcccaagtccaagtcagcctcgaagactacatcaacgacagacaatacgactcacgaggccgcttcggagaactactactcttgctccccacactacaatcgataacctggcaaatgatcgaacaaatccaatttatcaaactattcggaatggcaaaaatagacaaccttctgcaagaaatgctccttggcggctctccctctgacgctccccacgcccaccaccccctccacccccaccttatgcaagaacacatgggaaccaacgtcatcgtagccaacacaatgcccacccacctatcaaacggccaaatgtgcgaatggccacggccacgcggccaagccgcaacacccgaaaccccacaaccctcacccccaggcggctccggctcagagccgtacaaactactacccggcgccgtagccaccatcgtgaaacctctctccgccatccctcaacccacaatcaccaaacaagaggtcatctaa

SEQ ID NO: 557 - RNA, 1425 nt, synthetic construct
  misc_feature 1..1425: note = CDS (opt11) from Homo sapiens__NP_000448.3__HNF4A(1-474)(R2V_K5V)
  source 1..1425: mol_type = other RNA
atggtcctcagcgtcaccctcgtcgacatggacatggccgactactccgcagccctcgaccccgcctacaccacactagaatttgaaaacgtccaagtcctgaccatgggcaacgacacctccccctcagaaggtaccaacctcaacgcacccaactcgctcggcgtatcagccctttgtgccatctgcggtgatcgcgcaaccggaaaacactacggcgcatcctcatgcgacggctgcaaaggcttcttccgccgatccgtccgtaaaaaccatatgtactcctgtcgattctcccgccaatgtgtcgtagataaagacaaacgcaaccaatgcagatactgccgcctaaaaaaatgcttccgggcaggtatgaagaaagaagcagtccaaaacgaacgcgaccgcatcagcacccgccgctcctcctacgaagactcgtccctcccatccatcaacgccctactccaagccgaagtcttatcccgacaaatcacttcccccgtctccggcataaacggcgacatccgcgcaaaaaaaatcgcctccatagccgacgtctgcgaatcaatgaaagaacaactcctagtccttgtcgaatgggccaaatacatccccgcattctgcgaactcccactcgatgaccaggtagccctcctccgcgcccacgcgggtgaacacctcctcctcggggccaccaaacgctccatggtattcaaagacgtcctcctcctcggaaacgactacatcgtcccacgccattgccccgagctagccgaaatgtctagagtctccatacgcatcctcgacgaactcgtactccccttccaagaactccaaattgatgacaacgaatacgcctacctcaaagcaatcatcttcttcgaccccgacgccaaagggctctccgacccaggaaaaatcaaacgcctcagatcccaagtccaggtatcactcgaagactacatcaacgaccgacaatacgactcccgaggccgtttcggcgaactcctactcctcttaccaaccctacaatccatcacatggcaaatgatcgaacaaattcaattcatcaaactcttcggaatggccaaaatcgacaatctcctacaagaaatgctcctcggaggatcaccctcagacgccccacacgcccaccaccctttacatccccacctaatgcaagaacacatgggaaccaacgtcatcgtagccaacaccatgccaacacacctctcaaacggacaaatgtgcgagtggcccagaccccgaggccaagccgccacaccagaaacaccccagccctcaccacccggcggctcaggctccgaaccctacaaactactccccggagccgtcgccaccatcgtcaagccactatcagcaatcccacaacccaccatcaccaaacaagaagtaatctaa

SEQ ID NO: 558 - RNA, 1425 nt, synthetic construct
  misc_feature 1..1425: note = CDS (opt11) from Homo sapiens__NP_000448.3__HNF4A(1-474)(K179R_K180R)
  source 1..1425: mol_type = other RNA
atgcgcctctccaaaacacttgtcgacatggacatggccgactactccgccgcactcgaccccgcctacaccacccttgaattcgaaaacgtccaagtcctcaccatgggaaacgacacctccccctccgaaggaaccaacctaaacgcccccaactccctaggcgtctccgccctctgcgcaatatgcggagaccgcgcaaccggcaaacattacggcgcttcctcctgtgacggttgcaaaggatttttccgccgatccgtccgtaaaaaccacatgtactcctgccgcttcagccgacaatgcgtggtagataaagacaaacgcaaccaatgccgttactgccgactcaaaaaatgcttccgagccggaatgaaaaaagaagcagtccaaaacgaacgcgaccgcatctctacacgcagatcttcatatgaagatagcagcctccccagcatcaacgccctcctccaagccgaagtcctctcccgacaaatcacctccccagtaagcggcataaatggcgacatccgtgcccggcgcatcgcatcaatcgccgacgtatgcgaatcaatgaaagaacaactactagtcctcgtcgaatgggcaaaatacatacccgcattctgcgaactccccctcgacgaccaagtagccctcctacgcgcccacgccggagaacacctactcctcggggccacgaaacgatccatggtcttcaaagacgtcctactcctcggaaatgactacatagtccccaggcactgccccgaactcgccgaaatgtcccgcgtctcaattcgaatcctagacgaactcgtcctacccttccaagaactccaaatagacgacaacgaatacgcttacctcaaagccattatcttcttcgacccagacgccaaaggactctccgacccgggaaaaataaaacgactacgcagccaagtccaagtctccttagaagactacatcaacgaccgccagtacgactcccgcggccgattcggagagcttctcctactcctccccaccctccaatccatcacatggcaaatgatcgaacaaatccaattcataaaactcttcggcatggccaaaatcgataatctactccaagaaatgctcctcggcgggtccccatcagacgccccccacgcacaccacccgctgcacccacacctaatgcaagaacacatgggaacaaacgtcatcgtcgccaacacaatgcccacccacctctcaaacggacagatgtgcgaatggccccgcccacgcggccaagcggcaacccccgaaacaccacagccctccccccccggcggcagcggctcagaaccctacaaactcctcccaggagcagtcgccaccatagtcaagcccctctcagccatcccacaaccaaccatcaccaaacaagaagtaatatag

SEQ ID NO: 559 - RNA, 1425 nt, synthetic construct
  misc_feature 1..1425: note = CDS (opt11) from Homo sapiens__NP_000448.3__HNF4A(1-474)(K234R)
  source 1..1425: mol_type = other RNA
atgcgcctatctaaaacacttgtagacatggacatggccgactactcagccgcactcgaccccgcctacaccaccttagagttcgagaacgtccaagtcctcacgatgggcaatgacacctccccatccgaaggcaccaaccttaacgcacccaactccctcggagtatccgccctctgcgccatctgcggcgaccgcgccacaggcaaacactacggagcctcatcctgcgacggctgcaaaggcttcttccgacgctccgtcagaaaaaaccacatgtactcctgccgattctcccgtcaatgcgtagtcgacaaagacaaacgcaaccaatgccgatactgccgcctcaaaaagtgcttccgagccggcatgaaaaaagaagccgtccagaacgagcgcgaccgaatctccacaagaagatcatcatacgaagactcctccctcccctccatcaacgccctactccaagccgaagtcctctccagacaaatcacaagccccgtatccggtatcaacggcgacataagagccaaaaaaatcgcctccatagccgacgtctgcgaatccatgaaagaacaactcctcgtgctcgtagaatgggccaaatacattcccgccttctgcgaactccctctcgacgaccaggtcgctctactcagggctcacgccggcgaacacctcctcctcggcgcaacccgccgctccatggtattcaaagacgtcctactactcggaaacgactacatcgttccccgccactgcccagagctcgctgaaatgtctcgcgtctccatccgcatcctcgacgaactcgtcctcccattccaagaactccaaatcgacgacaacgaatacgcctacctaaaagccataatcttcttcgaccccgacgcaaaaggactctccgacccagggaaaattaaacgactccgctcccaagtacaggtaagcctcgaagactacatcaacgaccgccaatacgattcccgaggccgcttcggcgaacttctcctactactacccaccctacagtccatcacctggcaaatgatcgaacaaatccaattcatcaaacttttcggaatggccaaaatcgacaacctcctccaagaaatgctcctcggcggctccccctccgacgccccccacgcacaccaccccctccacccacaccttatgcaagaacatatgggcacaaacgtcatcgtcgccaacaccatgcccacccacctctctaacggccaaatgtgcgaatggccccgcccaagaggccaagccgccaccccagaaaccccgcaacctagcccacccggcggctccggcagcgaaccctacaaactattacccggagcagtggccacgatcgtaaagcccctcagcgcaatcccacaaccaacaatcactaaacaagaagtcatctaa

SEQ ID NO: 560 - RNA, 1425 nt, synthetic construct
  misc_feature 1..1425: note = CDS (opt11) from Homo sapiens__NP_000448.3__HNF4A(1-474)(K300R)
  source 1..1425: mol_type = other RNA
atgcgcctctcaaaaaccctagtagacatggacatggcagactactccgccgccctcgaccccgcatacaccaccctcgagttcgaaaacgtacaagtcctcactatgggaaacgacacctccccctcggaaggcaccaacctcaacgcccccaactcccttggggtcagtgcactatgcgccatctgcggcgatagagccaccggaaagcactacggcgcctcctcatgcgacggctgcaaaggcttcttccgccgatccgtccgcaaaaaccacatgtactcatgcagattcagcagacaatgcgtcgtcgacaaagacaagagaaaccagtgccgatactgccgcctcaagaaatgtttccgcgccggcatgaagaaagaagcagtccaaaacgaacgcgaccgcatctccacccgccgctcatcctacgaagactccagcctaccctccataaatgccctactccaagcagaagtcctctcccgccaaataacctccccagtatccggaatcaacggcgacatccgcgccaagaaaatcgcctcaatagcagacgtctgcgaatccatgaaagaacaactacttgtcttagtagaatgggccaaatacatccccgccttttgcgaactaccccttgacgaccaagtcgccctcctccgcgcacacgccggcgaacacctattactaggcgccactaaacgctccatggtcttcaaagacgtactcctcctcggcaacgactatatcgtcccccgacactgccccgaactcgccgaaatgtcccgcgtctcaatacgaatcctcgacgaactcgtcctccccttccaagaactacagatcgacgacaacgaatacgcctacctcaaagcaatcatcttcttcgaccccgacgcccgcggcctatccgaccctggcaaaatcaaacgcctgcgctcccaagtacaagtgtccctcgaagactacatcaacgaccgacagtacgattcccgaggccgattcggcgaactcctcctcctactcccaacactccaatccatcacctggcaaatgatcgaacaaatccaattcattaaactcttcggcatggcaaaaatcgacaacctcctacaagaaatgctcctcggtgggtccccctccgatgctccccacgcccaccaccccctccacccccacctcatgcaggaacacatgggcaccaacgtcatcgtcgccaacacaatgccaacccacctctcaaacggacaaatgtgtgaatggccccgaccccgaggccaagcagccacacccgaaacaccccaaccctcacccccaggcggctccggctcagaaccctacaaactactcccaggagccgtcgccaccatcgtaaaaccactaagcgccataccccaaccaactatcacaaaacaggaggtcatctaa

SEQ ID NO: 561 - RNA, 1425 nt, synthetic construct
  misc_feature 1..1425: note = CDS (opt11) from Homo sapiens__NP_000448.3__HNF4A(1-474)(K300R_K307R_K309R)
  source 1..1425: mol_type = other RNA
atgcgcctcagcaaaacactcgttgacatggatatggccgactactccgccgcactagatcccgcctataccacactcgaattcgaaaacgttcaagtactcaccatgggcaacgacacctccccatccgaaggcaccaacctcaacgccccaaactccctcggtgtatccgcactctgcgcaatctgcggcgaccgcgctacaggcaaacactacggcgcatcctcctgcgacggatgcaagggcttcttccgccgctcagtccggaaaaaccacatgtactcttgccgcttctcacgtcagtgcgtggtcgacaaagacaaacgcaaccaatgccgctactgccgactcaaaaaatgcttccgcgccggaatgaaaaaagaagcagtacaaaacgaacgagaccgcatcagcacccgtcgctccagctacgaagactcttcacttccctccatcaacgccctcctccaagccgaagtcctctcacgccaaatcacgtcccccgtctccggcataaacggcgacatccgagcaaaaaaaatcgcctccatcgcagacgtatgcgaatccatgaaagaacagctcctagtcctcgtcgaatgggccaaatacatcccagcattctgcgaacttcccctagacgaccaagtcgcccttctcagagcacacgctggggaacacctcctactaggcgcaacaaaacgctccatggtcttcaaagacgtactactcctcggcaacgactacatagtccctcgccactgccccgaactcgcagaaatgtcccgagtctcaatacgaatactagacgaactagtcctccctttccaagaactacaaatcgacgacaacgaatacgcttacctaaaagccatcattttcttcgacccagacgcccgcgggctctccgaccccggccgcatacgacgccttcgctcccaagtccaagtatcattagaagactacatcaacgaccgccaatacgactcccgcggccgcttcggagaactcctactcctcctacccacactccagtccatcacctggcaaatgatcgaacaaatccaattcattaaactattcggcatggccaaaatcgacaacctactccaagaaatgctcctcggcggaagcccctctgacgcccctcacgcacaccaccccctacacccacacttgatgcaggaacacatggggaccaacgtcatcgtcgccaacaccatgcccacacatctctcaaatggccaaatgtgcgaatggccacgacctcgcggtcaagctgctaccccagaaaccccccaaccttccccacccggcggttcaggctcggaaccctacaaactccttcccggcgccgtcgccacaatagtcaaaccactatccgcaatcccccaacccacaattaccaaacaagaagtaatctag

SEQ ID NO: 562 - RNA, 1425 nt, synthetic construct
  misc_feature 1..1425: note = CDS (opt11) from Homo sapiens__NP_000448.3__HNF4A(1-474)(K447R_K470R)
  source 1..1425: mol_type = other RNA
atgcgcctctccaaaaccctcgtcgatatggacatggccgactactccgccgcccttgaccccgcctacaccaccctagaattcgaaaacgtacaagtactcacaatgggcaacgacacctccccatccgaaggaacaaacctcaacgctcccaacagcttaggtgtctccgccctctgcgccatctgcggagatcgcgccaccggcaaacactacggcgcctcatcatgcgacggctgcaaaggcttcttccgacgctcagtccgcaaaaaccacatgtactcctgcagattctcaagacaatgtgtcgttgacaaagacaaacgaaaccaatgccgatactgccgccttaaaaaatgcttccgcgcaggaatgaaaaaagaagcagtccagaacgaacgcgaccgcatatccacccgccgttccagctacgaagacagctcactcccttcaatcaacgccctactacaagccgaagtcctctcccgacaaataacctcacccgtatccggcatcaacggagacatacgcgccaaaaaaatagcctcaatcgccgacgtctgcgaatccatgaaagaacaactcctagtcctagtcgaatgggccaaatacatacccgcattctgcgaactccccctagacgaccaggtagccctcctccgagcccacgccggcgagcacctcttacttggcgcaaccaaacgctccatggtattcaaggacgtcctactcctaggcaatgactacatcgtcccccgccactgccccgaactcgctgaaatgtcccgagtctcaatcagaattctagatgaactagtcctacccttccaagaactccaaatagacgacaacgaatacgcatacctcaaagccatcatattcttcgaccccgatgccaaaggtctaagcgaccccggaaaaataaagcgactacggtcgcaagtacaagtctccctggaagactacataaacgaccgccaatacgacagccgcggacgattcggagaactactcctactcctccccactctccaatccataacatggcaaatgatcgaacaaatccaattcatcaaactattcggcatggccaaaatcgacaatcttttacaggaaatgctacttggaggatccccatccgacgcccctcacgcgcaccacccactccacccacacctcatgcaagaacacatgggcaccaacgtgatagtagcaaacaccatgcccacccacctctccaacggccaaatgtgcgagtggccacgaccacggggccaagccgccaccccagagacaccacaaccctcaccccccggaggctccggctccgaaccctaccgactactgccaggagccgtcgcaaccatcgtaaaaccactcagcgccatcccccaacccaccatcacccggcaagaagtcatctaa

SEQ ID NO: 563 - RNA, 1425 nt, synthetic construct
  misc_feature 1..1425: note = CDS (opt11) from Homo sapiens__NP_000448.3__HNF4A(1-474)(K458R)
  source 1..1425: mol_type = other RNA
atgcgactttccaaaaccctagtcgacatggacatggccgactactctgccgccctcgacccagcttacacaacattagagttcgaaaacgtccaagtcctgaccatgggaaacgacacaagcccatctgaaggaactaacctcaacgcccccaactccctaggagtatccgctctctgcgccatctgcggagaccgcgccaccgggaaacactacggcgcctcctcatgcgacggatgcaaaggcttcttccgccgctcagtccgcaaaaaccacatgtactcctgtcgattctcccgacaatgcgtcgtcgacaaagacaaacgcaaccaatgccgatactgccgcctcaagaaatgcttcagagccggcatgaagaaagaagccgtacaaaacgaacgagaccgcatctccacacgccgtagctcctacgaagactcaagcctcccctcaatcaacgccctacttcaggccgaagtcctctcccgacaaattaccagcccagtctccggcatcaacggcgacatccgagccaagaaaatcgcatcaatagccgatgtctgcgaaagcatgaaagaacaactccttgtcctcgtagaatgggccaaatacatccccgccttctgcgaactacccctcgatgaccaagtagccctactcagagcccacgccggcgaacacctcctcctcggcgccaccaaacgcagcatggtcttcaaagatgtactcctcctcggcaacgactacatcgtcccccgacactgccccgaacttgcagaaatgagcagagtctcaatccgcatcctcgacgaactcgtactaccattccaagaactccagatcgacgacaacgaatacgcctacctgaaagcaattatcttcttcgaccccgacgccaaaggcctctcagaccccggcaaaattaaacgcctcagaagtcaagtccaagtatccctcgaagactatatcaatgaccgccaatacgactcccgcgggcgcttcggcgaactcctcctccttctcccaaccctccaatcaatcacctggcaaatgatcgaacaaatccaattcataaaattattcggaatggccaaaatcgacaacctactccaggaaatgctcctcggcgggtccccctccgacgccccacacgcccaccaccccctccacccccacctaatgcaagaacatatgggcaccaacgtcatcgtcgcaaacaccatgccaacccacctctcaaacggacaaatgtgcgaatggccccgtccccgaggccaggccgccacccccgaaacccctcaaccctcgcctcccggaggctccggctcagaaccctacaaactcctcccaggtgcagttgcaacaatagtcagacccctctccgccatcccccagcccacaataacaaaacaagaagtcatctaa

SEQ ID NO: 564 - RNA, 1425 nt, synthetic construct
  misc_feature 1..1425: note = CDS (opt11) from Homo sapiens__NP_000448.3__HNF4A(1-474)(K106R_K108R_K126R_K127R)
  source 1..1425: mol_type = other RNA
atgcgactgtccaaaaccttagtcgacatggacatggcagactactcagccgccctcgacccagcatatacaacactagagttcgaaaacgtccaggtccttaccatgggcaacgacacctcaccctccgaaggcaccaacctcaacgctcccaactccctaggcgtctcagccctctgcgcgatatgcggagaccgagccaccggtaaacactacggcgcttcgagctgcgacggctgcaaaggcttcttccgtcgctcagtccgcaaaaaccacatgtactcatgccgattctcacgccaatgcgtagtagaccgcgaccgccgcaaccagtgccgatactgccgtcttaagaaatgcttccgcgccggcatgcgcagagaagcagtccaaaacgaacgcgaccgcatctcaacccggcgcagctcttacgaagactcaagccttccctcaatcaacgccctactacaagccgaagtcctaagccgccaaatcacttcacccgtatccggaataaacggcgacatccgagccaagaaaatagcctccatcgccgacgtctgcgaaagcatgaaagaacaactcctcgtcttagtcgaatgggccaaatacatccccgcattctgcgaactcccactggacgaccaagtagccctgctccgagcccacgccggcgaacacctcctcctcggcgccacgaaacgaagcatggtcttcaaagacgtccttctccttggcaacgactacatcgtcccacgccactgcccagagctagccgaaatgtcacgagtctcaatccgcatactcgacgagctagtactcccattccaagaactacaaatagacgacaacgaatacgcctatctcaaagcgatcatattcttcgaccccgacgccaaaggcctctccgacccaggcaaaatcaaacgcctccgctcccaagtccaggtgtcccttgaagactacataaacgatcgccaatacgactcacgaggaagattcggcgaactccttcttcttctccccacactccagtcaatcacatggcaaatgatcgaacagatacaattcatcaaacttttcggcatggccaaaatagacaacctcctacaggaaatgctactaggaggatccccatcagacgcaccccacgcccaccaccccctacacccccacctcatgcaagaacacatgggcaccaacgtcatagtcgccaacaccatgcccacccacctaagcaacggacaaatgtgcgagtggccccgcccacgcggccaagccgccacccccgaaacaccacaaccaagcccacccggcggctccggctccgaaccatacaaacttctcccaggcgctgtagccaccatcgtaaaaccactctcagccataccccaacccactatcaccaaacaagaggttatctag

SEQ ID NO: 565 - RNA, 1425 nt, synthetic construct
  misc_feature 1..1425: note = CDS (opt11) from Homo sapiens__NP_000448.3__HNF4A(1-474)(E285Q)
  source 1..1425: mol_type = other RNA
atgcgactctccaaaacacttgtcgacatggacatggccgactactccgccgccctcgatcccgcatacaccaccctcgagttcgaaaacgtccaagtcctcaccatgggaaatgacacctcgccatccgaaggcacgaacctaaatgcccccaactcccttggcgtctccgcactctgcgccatctgcggcgaccgcgcaaccgggaaacactacggcgcctcatcctgcgacggctgcaaaggattcttccgtcgatctgtacgcaaaaaccacatgtactcttgccgattcagccgacaatgcgtcgttgacaaagacaaacgcaaccaatgccgctactgccgactcaaaaagtgcttccgcgcaggtatgaaaaaggaagcagtacaaaacgaacgagaccgcatttccacccgacgatcatcctatgaagactcctccctcccctcaatcaacgccctacttcaagccgaagtcctctcccgacaaataacctcccccgtcagcggcatcaacggcgacatcagagccaagaaaatcgcaagcatcgcagacgtatgcgagtcaatgaaagaacaactcctcgtcctagtcgaatgggcaaaatacatccccgccttctgcgaactcccactagacgaccaagtagccctcctccgcgcccacgccggagaacacctcctcctaggcgccactaaacgctccatggtcttcaaagacgtcctcctcctaggcaatgattacatcgttccccgacattgccccgaactagccgaaatgtcccgagtatccatccgcatcctcgacgaactcgtcctaccattccaagaactacaaatcgacgacaaccaatatgcatacctaaaagcaatcatcttcttcgaccccgacgccaaaggccttagcgacccaggcaaaatcaagcgactacgcagccaagtacaagtatccctagaagattacatcaacgatcgccaatacgactcccgcggccggttcggcgaactcctcctcctcctccccactctacaatccataacctggcaaatgatagaacaaatccaattcatcaagttattcggcatggccaaaatagacaacctcctccaagaaatgctactcggcggctccccatccgacgccccacacgcccatcaccccctccacccacaccttatgcaagaacacatgggcaccaacgtaatagtcgccaacaccatgccaacccacctctccaacggacaaatgtgcgaatggccacggccacgcggacaagccgccacaccggaaacaccacaacccagcccacccggcggttccggctccgaaccctacaaactactacccggcgcagtcgccaccatcgtcaaaccgctctcagccatccctcaaccaaccatcaccaaacaagaagtcatataa

SEQ ID NO: 566 - RNA, 1425 nt, synthetic construct
  misc_feature 1..1425: note = CDS (opt11) from Homo sapiens__NP_000448.3__HNF4A(1-474)(T166E)
  source 1..1425: mol_type = other RNA
atgcgcctatccaaaaccctcgtcgacatggacatggccgactactcagccgcactcgaccccgcatataccactctcgagttcgaaaacgtacaagtcctcaccatggggaacgacactagcccctccgaaggcaccaacctcaacgcaccaaactccttaggggtttcagccctatgcgccatatgcggcgatagagcaacaggaaaacactacggcgcctcatcatgcgatggctgcaaaggcttcttccgccgatccgtccgaaagaaccacatgtactcatgccgcttctcacgacaatgcgtcgtcgacaaagacaagcgaaaccaatgccgctactgccgcctaaagaaatgcttccgcgccggcatgaagaaagaagcagtacaaaacgaacgcgatcgcatctccacccgcagatcgtcctacgaagacagcagcctccccagcatcaacgccctcctccaagctgaagtcctctcccgccaaatcgaatcacccgtctcaggcatcaacggtgatatccgcgcaaagaaaatagcctccatcgccgacgtctgcgaatccatgaaagaacaactcctagtcctagtagaatgggccaaatacatcccagcattctgcgagctccccctggacgatcaagtcgctctcctccgcgcccacgccggcgaacacctcctactcggagcaaccaaacgcagtatggtattcaaagacgtcctactactcggtaacgactacatagtaccccgccactgcccagaactcgccgaaatgtcccgtgtctccatacgcatcctagacgaactcgtcctccccttccaagaactacaaatcgacgacaacgaatacgcctacctaaaagccatcatcttcttcgaccccgacgctaaaggcctctccgatccaggcaaaatcaaacgcctacgaagccaagtccaagtttccctcgaagactacatcaacgacagacaatacgactcccgcggccgcttcggcgaactactcctcctacttccaacactccaaagcataacgtggcaaatgatagaacaaatccaattcatcaaactcttcggcatggctaaaatagacaacctcctccaggaaatgctccttggaggctccccctccgacgcaccccacgcccaccacccactccaccctcacctcatgcaagaacacatgggcacaaacgtaatcgttgccaacactatgcccacccacctatccaacggacaaatgtgcgaatggccccgaccccgcggccaagccgccaccccagagactccccaaccctcgccacccggagggtccggctccgaaccctacaaactactccccggagcagtagcaacaatcgtaaaaccactctccgccataccccaacccactatcaccaaacaagaagtcatctaa

SEQ ID NO: 567 - RNA, 1425 nt, synthetic construct
  misc_feature 1..1425: note = CDS (opt11) from Homo sapiens__NP_000448.3__HNF4A(1-474)(S148A)
  source 1..1425: mol_type = other RNA
atgcgactatctaaaacactcgtcgacatggacatggccgactactccgcggccctggaccccgcctacaccacgctagaattcgaaaacgtccaagtattaacaatgggaaacgacacctctccctccgaaggcaccaacctcaacgcacccaactccctcggagtctccgccctctgcgccatctgtggcgaccgagcaaccgggaaacattacggcgcatcctcctgcgacggctgcaaaggcttcttccgccgatccgtcagaaaaaaccacatgtactcgtgccgattctcacgccaatgcgtagttgacaaagacaaacgcaaccaatgccgctactgccgccttaaaaaatgcttccgcgccggaatgaaaaaagaggccgtacaaaatgaacgcgaccgaatcagcacacgccgctcttcatacgaagactccgcactcccatccatcaacgccctactacaagccgaagtcctcagccggcaaatcacatccccagtgtccggtattaacggagacatacgcgccaagaaaatagcctccatagcagacgtctgcgagtcaatgaaagaacaactcctcgtactcgtagaatgggcaaaatacatccccgccttctgcgaacttcccctcgacgaccaagtcgcactcctccgcgcccacgccggcgaacatctcctactaggagccaccaaacgttcaatggtcttcaaagacgtcctgctactcggcaacgactatatcgtccccagacactgccccgaactagcagaaatgtccagagtctcaatacgaatcctagacgaactcgtcctcccattccaagaactacaaatcgacgacaacgaatacgcctacctcaaagccatcatcttctttgaccccgacgccaaagggctctccgaccccggaaaaatcaaacgcctgcgctcacaagtccaagtatccctcgaagactacatcaacgaccgccagtacgacagccgaggacgtttcggcgaactcctactcctcctcccaacactccagtccatcacctggcaaatgatcgaacaaatccaattcataaaactcttcggcatggccaaaatcgacaacctactccaagaaatgctcctcggcggatccccgtccgacgccccccacgcccaccaccccctacacccacacctcatgcaagaacacatgggaacaaacgtcatcgtagccaacaccatgcccacccacctctccaacggccaaatgtgcgaatggccccgcccacgcggccaagctgcaacaccagaaaccccacaaccatccccccccggcggcagcggctccgaaccctacaagcttctccccggtgccgtggccacaatagtcaaaccactctcggccattccccaaccaacaataacaaaacaagaagtgatctaa

SEQ ID NO: 568 - RNA, 1425 nt, synthetic construct
  misc_feature 1..1425: note = CDS (opt11) from Homo sapiens__NP_000448.3__HNF4A(1-474)(S148E)
  source 1..1425: mol_type = other RNA
atgcgcctctccaaaaccctcgtcgacatggacatggccgactactcagcagccctagacccagcctacacaacactcgagttcgaaaacgtacaagtactaaccatgggcaacgacacctcaccctctgaaggaaccaacctcaacgcacccaactccctcggcgtatccgccctgtgcgccatctgcggtgatcgcgccaccggcaaacactacggggcctcaagctgcgacggctgcaaaggcttcttccgccgctctgtcaggaaaaaccacatgtacagctgccgattctcccgccaatgcgtagtcgataaagacaaacggaaccaatgccgatactgtcgcctcaagaaatgcttccgagcaggcatgaaaaaggaagcagtccaaaacgaacgggaccgaatctccactcgccgctcatcctacgaagacagcgaactaccctccattaatgccctcctccaagcagaagtactttcacgacaaataacctcccccgtctcaggcatcaacggcgacatcagagccaagaaaatcgcctccatcgccgacgtatgcgaatccatgaaagaacaactcctggtgctagtcgaatgggcaaaatatatccccgctttctgcgaactccccctagacgaccaagtcgcactcctccgagcccacgccggagagcacctcttactaggcgccaccaaacgaagcatggtcttcaaagacgtcctcctcctcggaaatgactacatcgtccccagacactgccccgaactcgccgaaatgtcacgagtctccatcagaatcctcgacgaactggtcctaccatttcaagaactacaaatcgatgacaacgaatacgcatacctcaaagcgatcatcttcttcgaccccgacgccaaagggctctccgacccaggcaaaatcaaacgcctcagaagccaggtccaagtctccctagaagactacataaacgaccgccagtatgactcccgcggcagattcggcgaactcctccttctacttccgaccctccaatccatcacctggcaaatgatcgaacaaatccaattcatcaaactcttcggcatggccaaaattgacaacctcctacaagaaatgctcctaggcggcagcccctcagacgcgccccacgcccaccacccactccacccacacctcatgcaagagcacatgggcaccaacgtcatagtagccaacaccatgcccacacacctctccaacggccagatgtgcgaatggccacgcccacgtggtcaagcagccacccccgaaaccccgcaaccatccccacccggcggatccggatccgaaccctacaaactcctacccggcgcagtcgccacaatcgtaaaacccctcagcgccatccctcagcccaccataaccaaacaagaagtcatctga

SEQ ID NO: 569 - RNA, 1425 nt, synthetic construct
  misc_feature 1..1425: note = CDS (opt11) from Homo sapiens__NP_000448.3__HNF4A(1-474)(S183A)
  source 1..1425: mol_type = other RNA
atgcgactcagcaaaacactagttgacatggacatggccgactacagcgcagccctggatccagcctacaccaccctcgaattcgaaaacgtacaagtcctcaccatgggtaacgacacctccccctcggagggaacaaacctcaacgcccccaactcactcggcgtcagcgcactctgcgccatatgcggcgaccgcgccaccggaaaacactacggagcctcaagctgcgacggctgcaaaggattcttcagacgcagcgtccggaaaaaccacatgtactcctgccgcttctcccgacaatgcgtcgtcgacaaagacaaacgaaaccaatgccgatactgccgcctaaaaaaatgcttccgcgctggaatgaaaaaagaagcagtacaaaacgaacgcgaccgcatatccaccagaagatcctcctacgaagactccagcctaccctcaatcaacgctctcctccaagcagaagtcctcagccgccaaatcacctcacccgtcagcggcatcaacggggacatccgcgccaaaaaaatcgccgcgattgccgacgtgtgcgaatccatgaaagagcaactcctcgtcctcgtagaatgggccaaatacatccccgccttctgcgaactacccctagacgaccaagtagcccttctacgcgcccacgccggggaacacctcctactcggcgcaaccaaaaggtcaatggtcttcaaagacgtcctcctactcggaaacgactacatcgtgcccaggcactgtccggaactcgccgaaatgtccagagtctcaatccggatactagacgaactcgtactccccttccaagaactacaaatcgacgacaacgaatacgcatacctaaaagccatcatcttcttcgacccagacgctaaaggactaagcgacccaggcaagatcaaacgactacgttcccaagtacaagtatccctggaagactacatcaacgaccgccaatacgactcacgaggtcgcttcggcgaactgctcctactcctacccaccctccaatccatcacatggcaaatgatcgaacaaatccaattcatcaaactcttcggtatggctaaaatcgacaacctactccaagaaatgcttctcggcggctccccatccgacgccccccacgcccaccacccactccacccccacctaatgcaagaacacatgggcaccaatgtcatagtcgccaacaccatgcccacccacctctcaaacggacaaatgtgcgaatggccccgaccacggggacaagcagccacaccagaaaccccccaacctagcccacccggaggctccggctcggaaccctacaaactcctccccggcgccgtagccaccatagtaaaacctttatccgccatcccacaacccaccatcacgaaacaggaagtaatataa

SEQ ID NO: 570 - RNA, 1425 nt, synthetic construct
  misc_feature 1..1425: note = CDS (opt11) from Homo sapiens__NP_000448.3__HNF4A(1-474)(S183E)
  source 1..1425: mol_type = other RNA
atgcgcctctccaaaaccctcgtcgacatggacatggccgactactccgccgccctcgacccagcctacacaacactagagttcgaaaacgtccaagtcctaaccatgggaaacgatacctccccctcggaagggaccaacctcaacgccccaaattcacttggagtctccgccctatgcgccatatgtggagaccgcgctaccggaaaacactatggcgcgtcatcctgcgacggatgcaaaggcttcttcagacgctcggtccgcaaaaaccacatgtactcctgccgattctcccgccaatgcgtcgtcgacaaagacaaaagaaaccaatgcaggtactgccgtctgaagaaatgcttccgcgccggaatgaagaaagaagccgtccaaaacgaacgcgaccgaatcagcaccagacgcagctcctacgaagactcctcactcccatcaatcaacgccctactccaagccgaagtcctctcccgccaaatcacctccccagtaagcggaatcaacggcgacatccgcgccaagaaaatagccgaaatagccgacgtctgcgaatcaatgaaagaacagctactcgtcctcgtcgaatgggccaaatacatacccgccttctgcgaactccctctcgacgaccaagtcgcactactcagagcccacgccggagaacacctactcctcggagccacgaaacgatccatggtattcaaagacgtactcctccttggtaacgattacatcgtcccaagacactgcccagaactcgccgaaatgtccagagtatcaatccgaatcctcgacgagctagtactcccctttcaggaactacaaatagatgacaacgaatacgcatacctaaaagccatcatcttctttgaccccgacgccaaaggcctctccgacccaggcaaaatcaaacgcctacgctcccaagttcaagtatccctcgaagactacatcaatgaccgccaatacgacagccgaggacgcttcggcgaactactcctgctactccccaccctacaatccatcacttggcaaatgatcgaacaaatccaattcatcaaactcttcggcatggccaaaatcgacaaccttctccaggaaatgctcctcggtggcagcccctccgacgcaccccacgcccaccaccccctccacccacacctcatgcaagaacacatgggcaccaacgtcatagtagcaaacaccatgcccacccacctatcaaacggacaaatgtgcgaatggccgcgcccgagaggacaagccgccacacccgaaacaccccaaccaagccctcccggcggctcaggttcagaaccctataaactcctacccggcgccgtagccaccatcgtaaaacccctcagcgccatcccccaacccaccatcaccaaacaagaagtgatataa

SEQ ID NO: 571 - RNA, 1425 nt, synthetic construct
  misc_feature 1..1425: note = CDS (opt11) from Homo sapiens__NP_000448.3__HNF4A(1-474)(S461A)
  source 1..1425: mol_type = other RNA
atgcgactctccaaaaccctcgtcgacatggacatggcagattactccgctgccctcgacccggcctacaccacactagagttcgaaaacgttcaagtattaaccatgggcaacgacacatcccccagcgaaggcaccaatctaaacgcacccaactccctcggggtctcagcactatgcgccatctgcggagatcgcgctactggcaaacactacggagcctcctcctgcgacggctgcaaaggcttcttccgaagatcagtccgcaaaaaccacatgtactcatgccgcttctctcgccaatgcgtcgtcgacaaagacaaacgaaaccagtgccgctactgccgcctaaagaaatgctttcgcgccggcatgaagaaagaagcagtacaaaacgaacgcgaccgcatctccacccgccggtcaagctacgaggactcatcactcccatcaatcaacgctctcctccaagcagaagtccttagccgacaaatcacatcccccgtttccggaatcaacggcgacatccgagcaaagaaaatcgcctctatcgcagacgtatgcgaatccatgaaagaacaactcctagtcctagtcgaatgggcaaaatatatacccgccttctgcgaactgcccctagacgatcaagtcgcactactccgagcccacgccggcgagcacctcctgctcggcgccacaaaacgatccatggtattcaaagacgtactactcctcgggaacgactacatcgtaccccgccactgccccgagctcgccgaaatgtcacgtgtctcaattcgcatactagacgagctagtcctccccttccaagaactacaaatagacgacaacgaatacgcatacctaaaagccatcatcttcttcgaccccgatgccaaaggactatccgaccccggcaaaatcaaacgccttcgttcacaagtgcaagtctcgctcgaagactacatcaacgaccgccaatacgactccagaggccgattcggagaactcctactcctcctccccaccctccaatccatcacatggcaaatgatagaacaaatccaattcataaaactcttcggcatggccaaaatcgacaacctgctccaagaaatgctcctcggcggatcaccctccgacgccccacacgcccaccaccccctacacccccaccttatgcaagaacacatgggaaccaacgtcatcgtcgccaacacaatgcccacacacctatcaaacggacaaatgtgcgagtggcctcgcccccgcggccaagcagccacacccgaaacaccccagccctccccacccggcggctccggctcggaaccctacaaacttctcccaggcgccgtcgccaccatcgtaaaaccactcgccgcaataccccaaccaaccatcaccaaacaagaggtaatctaa

SEQ ID NO: 572 - RNA, 1425 nt, synthetic construct
  misc_feature 1..1425: note = CDS (opt11) from Homo sapiens__NP_000448.3__HNF4A(1-474)(S461E)
  source 1..1425: mol_type = other RNA
atgcgactgtccaaaaccctagtcgacatggacatggcagactacagcgcagcactcgatcccgcctacaccaccctagagttcgaaaacgtacaagtactaacaatgggaaacgacacctctccatccgaaggcacaaacctcaacgcacccaactccctcggcgtctccgcactttgcgcaatctgcggcgaccgagccaccggcaaacattacggagcctccagctgcgacggctgcaagggattcttccgccgcagcgtccgcaaaaaccacatgtactcgtgccgcttctcacgacagtgcgtagtcgacaaagacaaacgcaaccaatgcagatactgcagacttaaaaagtgcttccgcgcgggaatgaagaaagaagccgtccaaaacgaacgagatcgcatctccacccgccggagctcatacgaagactcatcactaccatcaataaacgccctcctacaagccgaagtcctatcccgccaaataacctcccccgtctctggcatcaacggagacatccgcgccaagaaaatcgcaagcatcgccgacgtctgcgaatcaatgaaagagcaactactcgtcctagtagaatgggcaaaatacataccagccttctgcgaactccccctagacgaccaagtcgcgctactccgagcccacgcaggagaacaccttctcctaggcgcaaccaaacgctccatggtatttaaagacgtcctactcctgggcaacgactacatagtcccccgccattgcccagaactcgccgaaatgtcacgcgtatcgatacgcatcctcgacgagctagtcctccccttccaagaactacaaatagacgacaacgaatacgcctacttgaaagccataatcttcttcgacccagacgccaaaggcctctccgacccaggcaaaataaaacgcctacgcagccaggtacaggtcagcctcgaagactatatcaacgaccgtcaatacgactcccgaggccgattcggagaactcctcctactcctaccaaccctccaatcaatcacctggcaaatgatcgaacaaatacaattcatcaaactgttcggcatggcaaaaatagacaacctacttcaagaaatgctcttaggaggctccccctccgacgccccacacgcccaccaccccctccacccacacctcatgcaagaacacatggggaccaacgtaatagtcgccaacaccatgcccacccacctatccaacggccaaatgtgcgaatggccccgcccgcgcggccaagccgccacccctgaaacaccacaaccctcccctcccggcggatcaggctccgaaccctacaaactccttcccggcgccgtagccactatcgtcaaacccctcgaagccatacctcaaccaaccatcaccaaacaagaggtcatctaa

SEQ ID NO: 573 - RNA, 1425 nt, synthetic construct
  misc_feature 1..1425: note = CDS (opt11) from Homo sapiens__NP_000448.3__HNF4A(1-474)(S142A_S143A_S313A)
  source 1..1425: mol_type = other RNA
atgcgcctctccaaaacccttgtcgacatggacatggcagactactccgccgcacttgacccggcttacacaaccctagaattcgaaaacgtccaagtactcaccatgggaaatgacacctcaccctctgaagggaccaacctaaacgcaccaaactcactcggagtcagcgccctatgcgccatctgcggcgaccgcgcaaccggaaaacactacggcgcctcctcttgcgacggctgcaaaggcttcttccgaagatccgtcagaaaaaaccatatgtacagctgccgcttctcacgacaatgcgtcgtcgacaaagacaaaagaaaccaatgcagatattgccgactcaaaaaatgctttcgagccggcatgaaaaaggaagcagtccaaaacgaacgcgaccgcatttccacccgcagagccgcctacgaagacagctccctccccagcatcaacgcactactccaagctgaagtattatcccgccaaatcacctccccagtctccggcatcaacggcgacatacgggccaaaaaaatcgcctcaatcgccgacgtctgcgaatccatgaaagaacaactcctagtcctagtcgaatgggccaaatacatacccgcattctgcgaactacctttagacgaccaagtcgccctcttacgagcccacgccggcgaacatctactgcttggcgccaccaaacgatccatggttttcaaagacgtactactcctcggaaacgactacatcgtcccacgtcactgcccagaactagccgaaatgtcccgcgtctcaatccgcatcctcgacgaactcgtactcccctttcaagaactacaaatcgacgacaacgagtacgcctacctcaaagccatcatcttcttcgaccccgacgcaaaaggcctctccgaccccggcaaaattaaacgacttagagcacaagtacaagtcagcctagaagactacataaatgaccgccaatacgacagcagaggccgcttcggcgagctcctactcctcctccccaccctacaatcaattacctggcagatgatcgaacaaatacaattcataaaacttttcggaatggccaaaatcgacaacctactccaagaaatgctcctcggcggctcccccagcgacgccccccacgcacaccaccccctacacccccacctaatgcaagagcacatgggaaccaacgtcatagtagccaacacaatgcccactcacctcagcaacggccaaatgtgcgaatggccccgcccccgaggacaagccgccacccccgaaaccccccaaccgagcccccccggcggctccggctccgaaccctacaaactcctccctggcgccgtagccacgatagtaaaaccgctctccgccatcccccaaccgacaataacgaaacaagaagtaatctaa

SEQ ID NO: 574 - RNA, 1425 nt, synthetic construct
  misc_feature 1..1425: note = CDS (opt11) from Homo sapiens__NP_000448.3__HNF4A(1-474)(S142A_S143A_S313A_K458R)
  source 1..1425: mol_type = other RNA
atgcgcctcagcaaaacactagtagacatggacatggcagactactccgccgccctagacccagcctacacaaccctcgaattcgaaaacgtccaagtcctaacgatgggcaacgacacatccccctccgagggcaccaacctcaacgcccccaactctctcggcgtctctgccctctgcgccatctgcggcgaccgcgccaccggaaaacactacggagccagctcatgcgacggctgcaaaggattctttcgacgctccgttagaaaaaaccacatgtactcatgccgtttctctcgccaatgcgtcgtcgacaaagacaaacgtaaccagtgccgctactgccgcctaaaaaaatgcttccgcgcaggcatgaaaaaagaagccgtccaaaacgagagagaccgcatatccacccgccgagccgcctacgaagactcttcactaccgtccataaacgccctcctacaagccgaagtcctatcacgacaaataacctcccccgtcagcggcatcaacggcgacatcagagccaagaaaatagcctctatagcagacgtatgcgaatcaatgaaagaacaactcctagtactagtcgaatgggccaaatacattcccgccttctgcgaactgccactcgacgaccaagtggccctactccgtgcccacgccggcgaacatttactcctcggcgccaccaaacgatcaatggtattcaaagacgtactactcctcggcaacgactacatagtcccccgccactgccccgaactcgccgaaatgtcacgtgtctctatccggatcctagacgaactcgtcctccccttccaagaactccaaatcgacgacaacgaatacgcctacctaaaagccatcatattcttcgatcccgacgccaagggtctctccgacccaggaaaaatcaaacgcctacgcgcacaagtacaagtatccctcgaagactacatcaacgaccgacaatacgacagccgcggccgattcggcgaactactccttctcctccccacactacaatcaataacctggcaaatgatcgaacaaatccagttcataaaactctttggcatggccaaaatagacaacctcctccaggaaatgctcctcggaggaagcccctccgacgccccccacgcccaccacccactccacccccacctcatgcaagagcacatgggcaccaacgtcatcgtcgccaacaccatgcccacacacctatcaaacggccaaatgtgtgaatggcccagacctcgcggccaagccgccacacccgaaaccccacaaccctcccccccggggggctcaggctccgaaccctacaaactcctcccaggtgccgtcgccacaatcgtacgacccctctccgccatccctcaaccaacaataaccaaacaagaagtcatctaa

SEQ ID NO: 575 - RNA, 1425 nt, synthetic construct
  misc_feature 1..1425: note = CDS (opt11) from Homo sapiens__NP_000448.3__HNF4A(1-474)(S142A_S143A_S167A_S313A_ S378A_T429A_T432A_S436A_K458R)
  source 1..1425: mol_type = other RNA
atgcgcctaagcaaaaccctagtcgacatggacatggcagactactccgccgccctcgaccccgcctacaccaccctagaattcgaaaacgttcaggtcctcaccatggggaacgacacatcgccaagcgaaggaaccaaccttaacgccccaaactccctgggcgtctccgccctttgcgccatctgcggagaccgcgccacaggcaaacactatggcgcctccagctgcgacggctgcaaaggcttcttccgacgctcagtacggaaaaaccacatgtactcatgccgcttctcacgccaatgcgtcgtcgacaaagacaaacgcaaccaatgccgctactgccgactcaaaaaatgcttccgcgcaggcatgaaaaaggaagccgtccaaaacgaacgcgaccgtatctcaacccgacgtgctgcatacgaagactcatccctcccctccatcaacgccctactccaggccgaagtcctgagtcgacaaatcacagcccccgtctcaggcatcaacggcgacatccgagcaaagaaaatcgcctctatagccgacgtctgcgaatcaatgaaagaacaactcctcgtcctcgtagaatgggccaaatacatccccgcattctgcgaactacccctcgacgaccaagtcgccctactaagagcccacgccggcgaacaccttctgcttggcgccacaaaacgcagcatggtattcaaagacgtactactcctcggcaacgactacatcgtaccccgacactgccccgaactcgccgaaatgtcccgcgtctccatacgcatcctagacgaactggtcctccccttccaggaactccaaatcgacgacaacgaatacgcctacctcaaagccatcatattcttcgacccagacgcaaaaggcctcagcgaccccggcaaaatcaaaagactccgcgcccaagtacaagtcagcctagaagattacataaacgaccgccaatacgatagcagaggccgattcggcgaactcctcctactcctacccacactacaatcaatcacctggcaaatgatagaacaaatccaattcatcaagctattcggcatggcaaaaattgacaacctactacaagaaatgctcctcggcggcgccccaagcgacgcaccacacgcccaccaccccctccacccgcacctcatgcaagaacacatgggcaccaacgtcatcgtcgccaacacaatgcccacacacctctccaatggacaaatgtgcgaatggccacgcccacgaggccaagcggccgcgcccgaagccccacaacctgccccgcccggaggctctggaagcgaaccctacaaactactccccggcgcagtcgccacgatagtccgcccactatccgccatcccccagcccacaataaccaaacaagaagtcatataa

SEQ ID NO: 576 - RNA, 1425 nt, synthetic construct
  misc_feature 1..1425: note = CDS (opt11) from Homo sapiens__NP_000448.3__HNF4A(1-474)(S142A_S143A_S148A_S167A_ S313A_S378A_T429A_T432A_S436A_K458R)
  source 1..1425: mol_type = other RNA
atgcgcctttccaaaaccctagtcgacatggacatggccgactactcagccgcactagaccccgcctatactaccctagagttcgaaaacgtccaagtcctcaccatgggcaatgacacctccccatccgaaggcaccaacctcaacgcccccaactcactaggagtctccgccctttgcgccatctgcggcgaccgcgccacaggaaaacactacggcgcgtcaagctgcgatggatgcaaaggtttcttccgtcgttccgtccgcaaaaaccacatgtattcctgccgattctcgcgccaatgcgtcgtcgacaaagacaaacgaaaccaatgccgatactgccgcctcaaaaagtgcttccgcgccggcatgaagaaagaagccgtccaaaacgaacgcgacagaatatcaacccgacgagccgcctacgaagactcagccctcccctcaataaatgccctcctccaagcagaggtcctttccagacagatcaccgcccccgtctccggcatcaacggcgacatcagagccaagaaaatcgcctccatcgccgacgtctgcgaatccatgaaagaacaacttctagttctcgtcgaatgggccaaatacatccccgccttctgcgaactaccccttgacgaccaagtcgctctcctgcgcgcccacgccggcgaacacctccttctcggagcaactaaacgctccatggtgttcaaagacgtcctcctcctcggcaacgactacatcgtcccccgacactgccccgaactagctgaaatgtcacgcgtcagcatcagaatcctcgacgaactcgtcctccccttccaagaactccaaatcgatgacaacgagtacgcctatcttaaagccatcatattcttcgacccagacgcaaaaggtctctccgaccccggcaaaataaaacgactccgcgcccaagtccaagtttccctcgaagactacatcaacgaccgacaatacgattcccgcggccgattcggcgaactcctcctactccttcccaccctccagtccataacatggcaaatgatcgaacaaatccaattcataaaactcttcggcatggccaaaatagacaacctcctccaagagatgctactcggcggtgctccatccgacgccccacacgcacaccaccccctccacccccacctcatgcaagagcacatgggcaccaacgtcatagtagcaaacaccatgcctacccacctatccaacggacaaatgtgcgaatggccccgcccacggggccaagccgccgcccccgaagccccacaacccgccccacccggaggatccggcagcgaaccctacaaactactacccggtgccgtcgccacaatcgtccgccccctatccgccataccacagcccaccatcaccaaacaagaagtcatatag

SEQ ID NO: 577 - RNA, 1425 nt, synthetic construct
  misc_feature 1..1425: note = CDS (opt11) from Homo sapiens__NP_000448.3__HNF4A(1-474)(K106R_K108R_K126R_K127R_ S142A_S143A_S148A_S167A_S313A_S378A_T429A_T432A_S436A_K458R )
  source 1..1425: mol_type = other RNA
atgcgcctctccaagaccctcgtcgacatggacatggcagactacagcgcagccctagaccccgcctacaccacccttgagttcgaaaacgtccaagtcctaacaatgggaaacgacacctcaccatccgaaggcacaaacctaaacgcccccaactcacttggcgtttcggccctctgcgccatatgcggagaccgcgccaccggcaaacactacggagcatcctcctgcgacggctgtaaaggcttcttcagacgatccgtacgcaaaaaccacatgtactcctgccgcttcagcagacaatgcgtcgtcgaccgcgaccgccgcaaccaatgccgctactgccgcctaaagaaatgcttccgcgcaggcatgcgccgagaagcagtccaaaacgaacgagaccgaataagcacccgcagagccgcgtacgaagactccgccctcccatcaatcaacgcacttctacaagccgaagtactctcccgccaaataaccgccccagtatccggaatcaacggcgacatccgcgccaagaaaatcgcttccatagcagacgtctgtgaatccatgaaagagcaactcctcgtcctcgtcgagtgggccaaatacatccccgccttctgcgagctacccctcgacgaccaagtcgccctcctccgagcccacgctggcgaacacctcctactcggcgccaccaaaagatccatggttttcaaagacgtactccttctgggaaacgactacatcgtacccaggcactgccccgagctagccgaaatgtccagagtctcaatccgcatactcgacgagctcgtccttccctttcaagaacttcaaatagacgacaacgaatacgcatacctgaaagccatcatcttcttcgaccccgacgccaaaggactatccgacccaggcaaaatcaaacgcctacgagcacaagtacaagtctccctagaagactacataaacgaccgccaatacgactcgagaggccgcttcggcgaactactccttctcctccctaccctacaaagcatcacctggcaaatgatcgaacaaatccaattcataaaactcttcggaatggccaaaatcgacaatttactccaggaaatgttactcggcggcgcaccatccgacgcaccccacgcccaccaccccctacacccccacctcatgcaagaacacatgggaaccaatgtcatagtcgccaacacaatgcctacacatctctccaacggccaaatgtgcgaatggccgcgtccccgaggacaagcagccgcccccgaagcaccccagcccgccccgcccggcggatccggatcagaaccctacaaactcctcccaggcgccgtcgcaaccatcgtccgccccctctcagcaatcccccaacccaccatcaccaaacaagaagtcatctaa

SEQ ID NO: 578 - RNA, 1425 nt, synthetic construct
  misc_feature 1..1425: note = CDS (opt11) from Homo sapiens__NP_000448.3__HNF4A(1-474)(S142A_S143A_S148A_T166A_ S167A_S313A_S378A_T429A_T432A_S436A_K458R)
  source 1..1425: mol_type = other RNA
atgcgcctctccaaaacactcgtcgatatggacatggccgactacagcgctgcccttgaccccgcgtacaccaccctagaattcgaaaacgtccaagttctcaccatgggcaacgacacctccccctcagaaggaaccaacctaaatgcccccaactctctcggcgtctccgctctctgcgccatctgcggcgaccgagccaccggaaaacactacggagcctcctcctgcgacgggtgcaaaggcttcttcagaagatccgtccgcaaaaaccacatgtactcatgccggttctcccgacaatgcgtagtcgacaaagacaaacgcaaccaatgccgctactgccgcctcaaaaaatgctttcgcgccggcatgaagaaagaagcagtacaaaacgaaagagacagaatctcaactcgcagagccgcctacgaagactcggcgctcccctctatcaacgccctgcttcaagccgaagtcctctcacgccaaatcgccgcacccgtatccggaatcaacggcgatatccgcgcaaaaaaaatcgcatccatcgccgacgtctgcgaatccatgaaggaacaactgctagtcctcgtagaatgggccaaatacatccctgccttctgtgaactccccctagacgatcaagtcgccctcctacgcgcccacgccggcgagcacctactacttggagccaccaaacgttctatggtcttcaaagacgtactcttactcggcaacgactacatagtcccccgccactgcccagaactggccgaaatgagccgcgtctcaatacgaatcctagacgaactcgtgctaccattccaagaactacaaatcgacgacaacgaatacgcatacctaaaagctattatcttcttcgaccccgacgccaaaggcctatccgaccccggcaaaataaaacgcctgcgagcccaagtacaagtaagcctcgaagactacatcaacgaccgacagtacgactcccgaggccgcttcggcgaactcctacttctcctccccaccctacaatccatcacctggcaaatgatagaacaaatccaattcatcaaactcttcggaatggcaaaaatcgataacctgctccaagaaatgctcctcggcggagccccaagcgatgcaccacacgcacaccacccactacacccacacctcatgcaagaacacatgggaaccaacgtcatagtcgccaacacaatgccaacccacctatccaacggccaaatgtgcgaatggccccgcccccgcggtcaagcagcagctcccgaagcacctcaaccagccccccccggaggctccggctccgaaccttacaaactcctcccaggagccgtcgccacaatcgtaagacccctctcagccatcccccaaccaaccatcacaaaacaagaagtgatataa

SEQ ID NO: 579 - RNA, 1425 nt, synthetic construct
  misc_feature 1..1425: note = CDS (opt11) from Homo sapiens__NP_000448.3__HNF4A(1-474)(S87A_S142A_S143A_S148A_T 166A_S167A_S313A_S378A_T429A_T432A_S436A_K458R)
  source 1..1425: mol_type = other RNA
atgcgcctctccaaaaccctcgtcgacatggacatggcagactactctgccgccctcgaccccgcctacacaaccctcgagttcgaaaacgtacaagtcttaaccatgggaaacgacacctcaccatcagaaggtacaaacctcaacgcccctaactcactcggcgtatctgcactatgcgcaatatgcggagaccgtgccactggcaaacactacggagcctcatcatgtgacggctgcaaaggcttcttccgacgtgcagtccgcaaaaaccatatgtactcctgccgattctcccgacaatgcgtcgtagacaaagacaaacgaaaccaatgccggtactgccgcctaaagaaatgcttccgcgccgggatgaagaaagaagccgtacaaaacgaacgagatcgcatctccacacgccgagccgcctacgaagactccgccctcccctccatcaacgccctactccaggccgaagtactgtcgcgccaaatcgccgcgccagtttccggaataaacggcgacatccgcgccaagaaaatcgcctcaatcgcagacgtatgcgaatccatgaaagaacaactcctcgtcctcgtagaatgggccaaatacatccccgcattctgcgaactacccctagatgaccaagtagcactattacgcgctcacgccggagaacacctcctcctcggagccactaaacgctccatggtcttcaaagacgtcctcctcctcggcaacgactacatcgtaccccgccactgccccgaactcgcagaaatgtcaagggtctccataagaatcctagacgagctagtcctaccgttccaagaactccaaatcgacgacaatgaatacgcatacctcaaagccataatcttcttcgacccagacgccaaaggcctctcagaccccggcaaaatcaaacgactacgcgcccaggtccaagtctccctagaagactacatcaacgacagacaatacgacagccgagggagattcggcgaactcctcctactcctccccaccctccaatcaataacatggcaaatgatcgaacaaatccagttcatcaaactcttcggcatggccaaaatcgacaacctactccaagaaatgctcctcggaggcgccccaagcgacgcaccccacgcacaccaccccctccacccacacctcatgcaagaacacatgggaaccaacgtcatagtagcaaacacaatgcccacccacctctcaaacggccaaatgtgcgaatggccccgcccacgaggccaagcagcggcccccgaagctccccaacccgcccctcccggagggtccggcagcgaaccctacaaactcctcccaggcgcagtagccaccatcgtacgcccgctttccgcaatacctcagcccacaatcacaaaacaagaagtaatataa

SEQ ID NO: 580 - RNA, 1425 nt, synthetic construct
  misc_feature 1..1425: note = CDS (opt11) from Homo sapiens__NP_000448.3__HNF4A(1-474)(S87A_K106R_K108R_K126R_K 127R_S142A_S143A_S148A_T166A_S167A_S313A_S378A_T429A_T432A_ S436A_K458R)
  source 1..1425: mol_type = other RNA
atgcgcctcagcaagacactcgtagacatggacatggccgactactccgccgcacttgaccccgcctataccaccctcgaattcgaaaacgtacaagtactcacaatgggaaacgacacctccccatccgaaggtaccaacttaaacgcccccaactccttaggcgtctccgccctctgcgcaatctgcggcgaccgagctacaggtaaacactacggcgcatcaagctgtgacggctgcaaaggcttcttccgacgagccgtccgcaaaaaccacatgtactcatgcagattctcccgacaatgcgtcgtggacagagaccgacgaaaccaatgccgctactgccgcctcaaaaaatgcttccgcgccggcatgcgacgtgaagcagtccaaaacgaacgtgatcgcataagcactagacgcgccgcctacgaagactccgccctgccctccatcaacgccctactacaagccgaagtccttagcagacaaatagccgccccagtctccggaataaacggagacatacgtgccaaaaaaatagcatccatcgccgacgtatgcgaaagcatgaaagaacaactccttgtcctagtagaatgggctaaatacatccccgcattctgcgaactccccctagacgaccaagtagccctcctccgagcacacgccggcgaacacctcctactcggcgccacaaaaagaagcatggtcttcaaagacgtcctacttctaggaaacgactacatcgtccctcgccactgccccgaactcgccgagatgagtagagtctctatcagaatcctcgacgaactcgtactcccattccaagaactacaaatagacgacaacgaatacgcctacctcaaagcgatcatcttcttcgaccccgacgccaaaggcctatcagaccccggcaaaatcaaaagactccgcgcccaagtacaagtctccctagaagactacatcaacgaccgccagtacgacagccgaggccgattcggcgaactacttctactcctcccaacactacaatcaatcacctggcagatgatcgaacaaatccaattcatcaaactattcggcatggccaaaatagacaaccttctacaagaaatgctcctaggcggcgcccccagcgacgcaccacacgcacaccacccccttcacccccacctaatgcaagagcacatgggcaccaacgtcattgtagccaacacaatgcccacccacctctcgaacggtcaaatgtgcgaatggccccgcccacgcggccaagcagccgcacccgaagcaccccaaccagccccacccggaggatccggttcggaaccctacaaactcctacccggcgccgtggccacaatagtaagacccctctcagcaatcccccaacccaccatcaccaaacaagaagtcatctaa

SEQ ID NO: 581 - RNA, 1425 nt, synthetic construct
  misc_feature 1..1425: note = CDS (opt11) from Homo sapiens__NP_000448.3__HNF4A(1-474)(S87A_K106R_K108R_K126R_K 127R)
  source 1..1425: mol_type = other RNA
atgcgcctctccaaaacactcgtcgacatggacatggccgactactcagcagccctagaccccgcttacaccaccctcgagttcgaaaacgtacaagtcctcaccatgggcaacgacaccagcccatctgaaggtaccaacctcaacgcaccaaactccctcggcgtttcagctctatgcgccatatgcggagaccgcgccaccggcaaacactacggagcctcctcttgcgacggctgcaaaggcttcttccgcagagccgtacgcaaaaaccacatgtacagctgtagattttcccgccaatgcgtcgtcgaccgcgaccgccgcaaccagtgcagatattgccgactcaagaaatgcttccgcgcaggaatgcgccgcgaagccgtacaaaacgaacgcgaccgcatctccacacgccgctcatcttacgaagactcctccctaccaagcatcaacgcactacttcaagcagaagtcctatcccgacaaatcacctcccccgtctcaggcataaacggcgacataagggcaaagaaaatcgcctccatagccgacgtatgcgaatcaatgaaagaacaactcctagtcctcgtcgaatgggccaaatacatccccgccttctgcgaactgcccctcgacgaccaagtagcacttctccgcgcccacgccggcgaacacctcctactcggcgccaccaaacgttccatggtcttcaaagacgtcctcctacttggtaacgactacatcgtaccccgccactgccctgaactcgcagaaatgtcccgcgtctcaataagaatcctcgacgagctagttctccccttccaagaactacaaatcgacgacaacgaatacgcctacctcaaagccatcatatttttcgaccccgacgccaaaggcctttccgaccccggcaaaataaaacgcctccgctctcaagtccaggtcagcctcgaagactacatcaacgaccgccaatacgactctcgtggccgcttcggagaactactactactcctccccacactacaatccatcacctggcaaatgatcgaacaaatccaattcatcaaactcttcggcatggccaaaattgacaacctactccaagaaatgctcctaggcggctccccatccgacgcaccccacgcccaccaccccctccacccccacctcatgcaagaacacatgggaaccaacgtaatcgtcgcaaacacaatgccaacccacctatccaacggtcaaatgtgcgaatggccacgaccccgcggccaagcagctacccccgaaaccccacaaccctcaccaccaggaggcagcggttccgaaccatacaaactcctacccggggccgtcgccaccatcgtaaaacccctctccgccatcccccaacctacaatcaccaaacaagaagtcatctaa

SEQ ID NO: 582 - RNA, 1425 nt, synthetic construct
  misc_feature 1..1425: note = CDS (opt11) from Homo sapiens__NP_000448.3__HNF4A(1-474)(S87A_K106R_K108R_K126R_K 127R_S142A_S143A_S148A_T166A_S167A_S313A_S378A_T429A_T432A_ S436A_K458R_S461A)
  source 1..1425: mol_type = other RNA
atgcgcctaagcaaaaccctagtagacatggacatggcagactactcagcagcactagaccccgcctacaccaccctcgaatttgaaaacgttcaagtcctaacaatgggcaacgacacctctcccagcgaaggcacaaacctcaacgcccccaactcactcggggtctccgccctctgcgccatatgcggtgaccgtgcaaccggcaaacactacggcgcctcatcctgcgacggctgcaaaggattcttccgacgcgccgtacgcaaaaaccacatgtactcctgcagattctcacgccaatgcgtcgtggaccgagaccgccgcaaccaatgccgttactgccgcctcaagaaatgcttccgagccggaatgcgaagagaagccgtacaaaacgaacgcgaccgcatctccacacgacgagcagcctacgaagactccgccctaccctccataaacgcactcctccaagccgaagtactctcccgacaaatagccgcaccagtctccggcataaacggagacatccgagcaaagaaaatagcctcaatcgccgacgtatgcgaatcaatgaaagaacaacttctcgtcctcgtcgaatgggccaaatatatacccgccttctgcgaactccccctagacgaccaagtggcccttcttcgcgcccacgccggcgaacacctcctactcggagccaccaaacgctccatggtcttcaaagacgtactactcctcggtaacgactacatcgtcccacgacactgccccgaactagccgaaatgtcacgcgtctccatccgcatcctagacgaactcgtactcccattccaagaactccaaatcgacgacaacgaatacgcatacctcaaagccatcatcttcttcgacccagacgccaaaggcctatccgacccaggaaaaataaaacgcttacgcgcacaagtccaagtctccctcgaagactacatcaacgaccgtcagtacgacagccgggggagattcggcgaactgctactactacttcccaccctccaatccatcacctggcaaatgatagaacaaatacaattcatcaaactattcggcatggccaaaatcgacaacctcctacaagaaatgctactcggcggcgccccctccgacgcaccccacgcccaccaccccctccacccccatctaatgcaagaacacatgggcacaaacgtcatcgttgccaacacaatgcccacccacctttccaacggccaaatgtgcgaatggccacgcccccgtggccaagccgccgcccccgaagccccacaaccggccccaccaggtggatccggctcggaaccctacaaactactcccaggagcggtcgctaccatcgtacgccctttggccgccatcccccaacccacaatcaccaaacaagaagttatctag

SEQ ID NO: 583 - RNA, 1425 nt, synthetic construct
  misc_feature 1..1425: note = CDS (opt11) from Homo sapiens__NP_000448.3__HNF4A(1-474)(S87A_K106R_K108R_K126R_K 127R_S142A_S143A_S148A_T166A_S167A_S313A_S378A_T429A_T432A_ S436A_K458R_S461E)
  source 1..1425: mol_type = other RNA
atgcgcctctccaaaaccctcgtcgacatggacatggcagactacagcgccgccctcgaccccgcatacaccaccctagagttcgaaaacgtccaagtcctaacgatgggaaacgacacctcaccatccgaaggcacaaacctcaacgccccgaactccctaggagtctcagccctctgcgccatatgcggcgaccgagccacaggcaaacactacggcgcctcatcgtgcgacggatgcaaaggattcttccgacgagctgtccgcaaaaaccacatgtactcctgccgcttctcccgccaatgcgtcgttgaccgcgaccggcgcaaccaatgcagatactgccgactcaagaaatgcttccgcgcaggcatgcgacgagaagccgtccaaaacgaacgcgaccgcatctcaaccagacgcgccgcctacgaagactctgcactccccagcatcaacgccctcctgcaagccgaagtattatcccgacagatcgccgcccccgtatccggcatcaacggcgacatccgcgccaagaaaatcgcctccatcgcagatgtctgcgaaagcatgaaagaacaattactcgtactcgtcgaatgggcaaaatacatccccgcattctgcgaactccccctcgacgaccaagtcgccctattacgcgcccacgcaggagaacaccttctcttaggcgcaacgaaacgcagcatggtcttcaaagacgtcctactcctcggcaacgactacatcgtcccccgtcactgccccgaactcgccgaaatgtcccgcgtatccatccgcatcctcgacgaactcgtcctaccattccaagaactccaaatcgacgacaacgaatacgcctacctcaaagcaatcatcttcttcgaccccgacgcaaaaggactatccgaccccggcaaaatcaaacgcctccgcgcacaagtccaagtctccctcgaagactacataaacgacagacaatacgacagccgaggcagattcggagaacttctcctcctcctccccacactacaatccatcacatggcaaatgatcgaacaaatacaattcatcaaactcttcggcatggcaaaaatcgacaacctgctccaagaaatgctacttggcggagcccccagcgacgccccacacgcacaccaccccctccacccccacctcatgcaagagcacatgggcaccaacgtcatcgtagccaacacaatgcccacacacctctccaacggccaaatgtgcgaatggccccgtccccgcggccaagccgcagcccccgaagcaccacaacccgcacctccaggcggcagcggctctgaaccctacaaactcctccccggcgcagtcgccacaatcgtccgccccctagaggccataccccaacccacaattaccaaacaagaggtaatctaa

SEQ ID NO: 584 - RNA, 1425 nt, synthetic construct
  misc_feature 1..1425: note = CDS (opt11) from Homo sapiens__NP_000448.3__HNF4A(1-474)(S87A_K106R_K108R_K126R_K 127R_S142A_S143A_S148E_T166A_S167E_S313A_S378E_T429E_T432E_ S436E_K458R_S461E)
  source 1..1425: mol_type = other RNA
atgcgactaagcaagaccctagtagacatggacatggccgactactccgccgccctggatcccgcctacaccacactagaatttgaaaacgtacaagtcctcaccatgggcaacgacacaagccccagcgaagggaccaacctcaacgcgccaaacagcctaggcgtctcagccctatgtgccatctgcggagacagagccaccggcaaacactacggagcctcatcctgcgacggatgcaaaggcttcttccgacgcgccgtccgcaaaaaccacatgtactcctgccgtttctcccgacaatgcgtcgtagaccgcgaccgccgcaaccaatgccgctattgccgcctaaagaaatgcttccgcgccggcatgcgacgcgaagccgtccagaacgagcgcgaccgaatctccacacgtcgcgctgcctacgaagactctgaactcccctcgataaacgcactgctccaagccgaagttctatcacgccaaatagccgaacccgtcagcggcatcaacggcgacatccgcgccaagaaaatcgcatcaatcgcagatgtatgcgaatccatgaaagaacagctcctcgtcctcgtagaatgggctaaatacatccccgccttctgtgagctccccctcgacgaccaggtagccctgctaagagcccatgccggcgaacacctcctccttggcgccactaaacgatcaatggtattcaaagacgtcctcctactaggaaacgactacatagtccccagacactgccccgaacttgcagaaatgagccgagtctccatccgcatcttagacgaactcgtcctcccattccaagaactccagatcgacgacaacgaatacgcataccttaaagcaataatcttcttcgaccccgacgccaaaggactatcagaccccgggaaaattaaaagactccgagcacaagtccaagtctcactcgaagactacatcaacgatcgccaatacgactcacgcggacgatttggcgaactcctcctgttactccccaccctacaaagcatcacctggcaaatgatcgaacaaatccagttcataaaactcttcggaatggccaaaatcgacaacctgctccaagaaatgctcctcggcggcgaaccctccgacgcaccccacgcccaccaccccctccacccacacctaatgcaagaacacatgggaaccaacgtcatagtcgccaacaccatgccaacacacctctcgaacggccaaatgtgcgaatggccccgaccacgcggccaagccgctgaacccgaagaaccccaacccgaacccccaggaggctccggctccgaaccctacaaactcctccctggcgccgtcgcaaccatagtacgccccctagaagctatcccacaacccacaataaccaaacaagaagtcatctga

SEQ ID NO: 585 - RNA, 1425 nt, synthetic construct
  misc_feature 1..1425: note = CDS (opt11) from Homo sapiens__NP_000448.3__HNF4A(1-474)(S87A_K106R_K108R_K126R_K 127R_S142A_S143A_S148A_T166A_S167A_K179R_K180R_S313A_S378A_ T429A_T432A_S436A_K458R_S461E)
  source 1..1425: mol_type = other RNA
atgcggctctccaaaactctcgtcgacatggacatggcagactacagcgccgccctcgacccagcctacacaaccctcgaattcgaaaacgttcaagtcctcaccatgggtaacgacacatccccctcagaaggaaccaacctcaacgcacccaactccctcggagtttccgccctatgcgcaatctgcggcgatcgagccaccggcaaacactacggcgcctcgtcttgcgacggctgcaaaggcttcttccgccgcgccgtcagaaaaaaccacatgtactcatgccggttctccagacaatgcgtcgtcgaccgagaccgccgaaaccaatgcaggtactgccgcctgaaaaaatgcttccgcgcaggcatgcgccgcgaagccgtccaaaacgagcgagaccgaatctcaacgcgacgcgccgcctacgaagactcagccctcccatccatcaacgcactactacaagccgaagtactatcccgacaaatagccgcaccagtctcaggaatcaacggagacatacgcgccagacgaatagcctccattgccgacgtatgcgaaagcatgaaagaacaactactcgttctcgtcgagtgggccaaatacattcccgctttctgcgaattacccctagacgaccaagtcgccctcctcagagcccacgcaggcgaacacctcctactcggagccaccaaacgatccatggtcttcaaagacgtcttactcctcggcaacgactacatcgtccccagacactgtcccgaactcgccgaaatgtcccgcgtctccatccgaatcctcgacgaactcgtactccccttccaggaactccaaatcgacgacaacgaatacgcctacctaaaagccatcatttttttcgaccctgatgccaaaggcctctctgaccccggcaaaatcaaacgactacgcgcccaagtccaagtctcactcgaagactacatcaacgatcgccagtacgactcccgaggccgcttcggtgaactcctcctcctcctgcccaccctacaatcaataacttggcaaatgatcgaacaaatacaattcatcaaactcttcggcatggccaaaattgacaacctcctacaagaaatgcttctcggcggagcacccagcgatgccccacacgcccaccaccccctccacccacacctcatgcaagaacacatgggcaccaacgtaatcgtcgccaacacaatgcccacacacctctccaacggacaaatgtgcgaatggccccgcccccgaggccaagcagccgccccagaagcaccccaacccgccccacccggaggctcaggctctgaaccctacaaactcctcccaggagcagtcgcaaccatcgtccggcccctcgaagcaatcccccaacccacaatcacaaaacaagaggtaatctag

SEQ ID NO: 586 - RNA, 1425 nt, synthetic construct
  misc_feature 1..1425: note = CDS (opt11) from Homo sapiens__NP_000448.3__HNF4A(1-474)(S87A_K106R_K108R_K126R_K 127R_S142A_S143A_S148A_T166A_S167A_K300R_K307R_K309R_S313A_ S378A_T429A_T432A_S436A_K458R_S461E)
  source 1..1425: mol_type = other RNA
atgcgcctatccaaaacactcgttgacatggacatggcagactactccgcagccctcgaccccgcctacaccaccctcgaattcgaaaacgtccaagtcctaacaatgggaaacgacacatccccatcagaagggaccaacctaaacgcccccaactccctcggcgtctccgcactctgcgcaatctgcggcgacagagccaccggaaaacactacggcgcctcctcatgcgacggatgcaaaggattcttccgaagagccgtccgaaaaaaccacatgtactcatgccgattctcgcgccaatgcgtcgtcgatcgcgacagacgcaaccaatgccgatactgcagacttaaaaaatgcttccgtgctggcatgcgacgcgaagctgtccaaaatgagcgcgaccgcatatctacccgaagagccgcctacgaagactcagcactaccctcaatcaacgccctactccaggccgaagtcctatcccgacaaatcgcagcccccgtgtccggcataaacggtgacatccgcgccaaaaaaatcgcctcaatagccgacgtctgtgaaagcatgaaagaacaactactagttctcgtcgaatgggcaaaatacatacccgcattctgcgaactcccactagacgaccaagtggccctcctccgagcccatgcaggagaacacctcctcctcggggccacaaaacgctccatggtgttcaaagacgtactactcctaggaaacgactacatcgtaccccgccactgccccgaactagctgaaatgtcacgcgtctcgatccgcatcctcgacgaactcgtcctaccattccaagaactgcaaatcgacgacaacgagtacgcgtacctaaaagcaataatattcttcgaccccgacgcccgcggcctctccgaccccggaagaatcaggcgactccgcgcccaagtccaagtaagcctcgaagactacatcaacgaccgccaatacgactcacgaggcagattcggcgaactactcctcctcctcccaacacttcaatcaatcacctggcaaatgatcgaacaaatccaattcatcaagctattcggcatggccaaaatcgacaacctcctacaagaaatgctactgggaggcgccccctccgacgccccccacgcccaccaccccctacatccacacctcatgcaggaacatatgggaaccaacgtcatcgtcgcaaacaccatgcccacccacctttccaacggccaaatgtgcgaatggccccgcccccgcggccaagcagccgcccccgaagccccccaacccgcaccacccggcggcagtggctcggaaccctacaaactcctccccggcgccgtagccaccatcgtccgaccactagaagcaataccacaacccaccataaccaaacaagaagtaatctaa

SEQ ID NO: 587 - RNA, 1425 nt, synthetic construct
  misc_feature 1..1425: note = CDS (opt11) from Homo sapiens__NP_000448.3__HNF4A(1-474)(S87A_K106R_K108R_K126R_K 127R_S142A_S143A_S148A_T166A_S167A_S313A_S378A_T429A_T432A_ S436A_K447R_K458R_S461E_K470R)
  source 1..1425: mol_type = other RNA
atgagactatcaaaaaccctggtggacatggacatggccgactacagcgctgccctcgaccccgcctataccacactagagttcgaaaacgtccaagtcctaaccatgggcaacgacacatccccctccgaaggaacaaacctaaacgcccccaactccctcggtgtgtccgccttatgcgccatctgcggagaccgcgccacaggcaaacactacggcgcatcaagctgcgacggctgtaaaggattcttccgccgcgccgtgcgcaaaaaccacatgtactcatgccgcttctcccgccagtgcgtcgtcgaccgcgaccgccgcaaccaatgccgatactgccgcctcaagaaatgcttccgagccggcatgcgacgagaagcagtccaaaacgaacgcgatcgcatctccacaagacgcgcagcatatgaagactcggccctcccatcaatcaacgccctcctacaagccgaagtactatcccgccaaatcgccgcccccgtctccggcatcaacggcgacatacgcgctaagaaaatcgcctcaatagcagacgtctgcgaatcaatgaaagaacaactgctcgtactcgtggaatgggccaaatacatcccagcgttctgcgaactccccctcgacgaccaagtagcattactacgcgcccacgccggcgaacaccttctactaggagcaaccaaacgatccatggtcttcaaagacgtcctgctcctaggaaatgactacatcgtcccccgccattgccctgaactagcagaaatgtcgcgcgtctcaatccgaatcctcgacgaactcgttctaccattccaagaactacaaatcgacgacaacgaatacgcctaccttaaagcaataatcttcttcgacccagatgcaaaaggcctctccgaccccggcaaaatcaaacgcctacgagcacaagtccaagtctctctcgaagactacatcaacgaccgccaatacgactcacgtggccgcttcggcgaactcctcctcctcctacccacccttcaatcaatcacatggcaaatgatcgaacaaatacaattcataaaactattcggcatggccaaaatcgacaacctcctccaagaaatgctactcggcggtgccccgtccgacgcaccccacgcccaccaccccctccatccacacctcatgcaggaacacatgggaaccaacgtcatcgtcgccaacaccatgcccactcacctcagcaacggacaaatgtgcgaatggccaagaccgcgaggacaagccgccgcccccgaagccccacaacctgcacccccaggaggctccggatcagaaccttaccgcctcctccccggcgccgtcgccacaatcgtacgcccactcgaagccatcccccaaccaaccatcacccgccaagaagtcatctaa

SEQ ID NO: 588 - RNA, 1425 nt, synthetic construct
  misc_feature 1..1425: note = CDS (opt11) from Homo sapiens__NP_000448.3__HNF4A(1-474)(S87A_K106R_K108R_K126R_K 127R_S142A_S143A_S148A_T166A_S167A_K179R_K180R_K234R_K300R_ K307R_K309R_S313A_S378A_T429A_T432A_S436A_K447R_K458R_S461E _K470R)
  source 1..1425: mol_type = other RNA
atgcgcctttccaaaaccctagtcgacatggacatggccgactactccgcagccctagacccagcgtacaccaccctcgagttcgaaaacgtccaagtactcacaatgggcaacgacacctccccctcggaaggcaccaacctcaacgcccctaactcactcggcgtttccgctctctgcgccatctgcggagaccgagcgacaggaaaacactacggagcctcctcatgcgatggctgcaaaggcttcttccgccgcgcagtacgcaaaaaccacatgtactcatgcagattctcaagacaatgcgtcgtcgaccgcgaccgacgcaaccaatgccgatactgccgcctcaagaaatgcttccgcgccggcatgcgccgagaagcagtccaaaacgaacgcgacagaataagtactcgccgagccgcatacgaagacagcgccctaccatccatcaacgcactcctccaagccgaagtcctatcacgacaaatcgcagctcccgtttccggcatcaacggcgatatccgcgcaagacgaatagcaagcattgcagacgtctgcgaatcaatgaaagaacaactcctcgtcctcgtcgaatgggccaaatacatccccgcattctgcgaactccccctcgacgaccaagtcgccctactaagagcccacgccggcgaacacctcctcctaggcgctacccgacgctccatggtattcaaagacgtcctactcctaggtaacgactacatcgtaccccgccactgccccgaactcgcagaaatgagcagagtttcaatccgcatcctagacgagctagttctccccttccaagaacttcaaatcgacgataacgaatacgcctacctaaaagccatcatcttcttcgacccagacgcccgaggcctctccgacccaggacgaataagaagactacgcgcccaagtacaagtttccctcgaagattacatcaacgacagacagtacgactccagaggccgattcggtgaactcctcctgctactccccaccctccaaagcataacatggcaaatgatcgaacaaatccaattcatcaaactcttcggcatggccaaaatcgacaacctcctacaagaaatgctactgggcggtgcaccctccgacgccccacacgctcaccaccccctccacccccatcttatgcaagaacacatgggaaccaatgtcatcgtcgcaaacacaatgcccacccacctaagcaacggccaaatgtgcgaatggcccagaccacgcggccaagcagccgcccccgaagccccacaaccagcccctcccggaggatcaggatctgaaccctaccgactactccccggagccgtcgccaccatcgtccgccccctcgaagcaataccacaaccgaccataacgcgccaagaagtcatctaa

SEQ ID NO: 589 - RNA, 1425 nt, synthetic construct
  misc_feature 1..1425: note = CDS (opt11) from Homo sapiens__NP_000448.3__HNF4A(1-474)(S87A_S95A_S99A_K106R_K10 8R_K126R_K127R_S142A_S143A_S148A_T166A_S167A_S313A_S378A_T4 29A_T432A_S436A_K458R_S461E)
  source 1..1425: mol_type = other RNA
atgagactaagcaaaaccctcgtcgacatggacatggccgactacagcgccgccctcgaccccgcatacaccaccctcgaatttgaaaacgtacaagtcctcaccatgggtaacgatacctccccatccgaaggaaccaacctcaacgccccaaactcactaggcgtctccgccctctgcgccatctgcggcgaccgcgccaccggcaaacactacggcgcctcttcctgtgacggatgcaaaggctttttccggcgcgcagtccgcaaaaaccacatgtacgcctgccgtttcgcccgacagtgcgtagtcgaccgcgaccgtcgaaaccaatgcagatactgccgactaaagaaatgcttccgcgccggcatgcgcagagaagcagtacaaaacgaacgagaccgcatctcaacccgccgtgcggcatatgaagactcggccctaccatccatcaacgccctgctccaagccgaagtattatcccgccaaatcgcagcccccgttagtggaatcaacggcgacatccgagccaagaaaatcgcctccatagccgacgtctgcgagagcatgaaagaacaactcctcgtactcgtagaatgggcaaaatacatacccgccttctgcgaactccccctagacgaccaagtagccctactccgagcccacgccggtgaacatctactcctcggagccaccaaaagatccatggtattcaaagacgtcctcctcctaggcaacgactacatcgtcccccgccactgccccgaactcgccgaaatgtcccgcgtctcaatccgcatactggacgagctcgtactccccttccaagaactacaaatcgacgacaacgaatacgcttacctaaaagcaatcatcttcttcgacccagacgcgaaaggcctatcagatcccggcaaaatcaaacgcctacgcgcacaagtacaagtatcccttgaagactacataaacgaccgacaatacgacagccggggccgtttcggagaacttctcctcctcctacccacactccaatccattacctggcaaatgatagaacaaatccaattcatcaaactcttcggaatggccaagatcgacaacctcctccaagaaatgctactcggaggcgcccccagtgacgctccccacgcccatcaccccctccacccccacctaatgcaagaacacatgggcaccaacgtcatagtcgccaacaccatgccaacccacctctcaaacggccaaatgtgcgaatggcctcgccccagaggccaagcggccgcccccgaagccccacaacccgccccacccggcggctccggatcagaaccatacaaactcctacccggcgccgtagccactatcgtacgaccactcgaagccatcccacaacccacaatcaccaaacaagaagtcatctaa

SEQ ID NO: 590 - RNA, 1425 nt, synthetic construct
  misc_feature 1..1425: note = CDS (opt11) from Homo sapiens__NP_000448.3__HNF4A(1-474)(S87A_K106R_K108R_K126R_K 127R_S138A_T139A_S142A_S143A_S148A_T166A_S167A_S313A_S378A_ T429A_T432A_S436A_K458R_S461E)
  source 1..1425: mol_type = other RNA
atgcgcctctccaaaaccctagtagatatggacatggcagactatagcgcagcactcgaccccgcctacactacccttgaattcgaaaacgtccaagtcctcacaatgggaaacgacacctctccttccgaaggcaccaacctcaacgccccaaactccctcggcgtctccgccttgtgcgccatctgcggcgaccgagccacaggaaaacactacggagcctcctcctgcgatggctgcaaaggcttcttccgccgcgcagtaagaaaaaaccacatgtactcatgccgcttctcccgccagtgcgtcgtagaccgcgaccgccgcaaccaatgccgctactgccgcctcaaaaaatgcttccgagccggaatgcgaagagaagccgtccaaaacgaacgcgaccgcatcgccgcccgacgggccgcatacgaggatagcgccctcccaagcatcaatgctcttctccaagccgaggtcctttcccgtcaaatcgcagcccccgtatccggaatcaacggagacatacgcgccaaaaaaatcgcaagcatcgccgacgtctgcgaaagcatgaaagaacaactcctcgtactcgtcgaatgggccaaatacataccagccttctgcgaactacccctcgacgatcaagtagccctcctacgagcccacgccggagaacacctcctacttggcgccacaaaacgaagcatggttttcaaggacgtcctcctcctcggcaacgactacatagtaccccgccactgccccgaactagcagaaatgtcccgggtatcgatccgcatactagacgaactagtcctcccctttcaagaactccaaatcgatgacaacgaatacgcttacctgaaagcaataatcttcttcgaccctgacgccaaaggcctctccgacccaggaaaaataaaacgcctccgcgcccaagtacaagtctccctagaagactacataaacgaccgacaatacgactcccgaggacgattcggcgaactactattattactacctacactacaatccatcacctggcaaatgatcgaacaaatccaattcatcaaactattcggcatggccaaaatcgacaacctactccaagaaatgctcctaggcggcgcccccagcgacgccccacacgcccaccaccccctccacccccacctaatgcaagaacacatgggcacaaacgtcatagtagccaacaccatgcccacccacctcagcaacggccaaatgtgcgagtggccccgaccacgcggccaagccgcagcccctgaagccccccaacctgccccccccggcggctccggctccgaaccatacaaactactccccggggccgtcgccacaatcgtcagacccctcgaagcaatcccccaacctacaatcaccaaacaagaagtaatttaa

SEQ ID NO: 591 - RNA, 1425 nt, synthetic construct
  misc_feature 1..1425: note = CDS (opt11) from Homo sapiens__NP_000448.3__HNF4A(1-474)(S87A_S95A_S99A_K106R_K10 8R_K126R_K127R_S138A_T139A_S142A_S143A_S148A_T166A_S167A_S3 13A_S378A_T429A_T432A_S436A_K458R_S461E)
  source 1..1425: mol_type = other RNA
atgcgactaagcaaaaccctagtcgacatggacatggcagactatagcgccgcactcgacccagcctacacaacgctcgagttcgaaaacgttcaagtccttaccatgggcaacgacacctcccccagcgaaggcaccaacctaaacgcccctaactcactcggagtgtccgcactatgcgcaatctgcggggaccgcgccaccggcaaacactacggcgcctccagctgcgacggctgcaaaggcttcttccgccgagccgtccgcaagaaccacatgtacgcctgccgcttcgctcgccaatgcgtcgtagaccgagaccgcagaaaccaatgcagatactgcagactcaagaaatgcttccgcgccggcatgcgacgcgaagccgtacaaaacgaacgcgaccgcatcgccgctcgtcgagcagcctatgaagactcagcccttccctcaataaacgcactactccaagccgaagtcctcagccgacaaatcgccgccccagtctcaggcatcaacggcgacatccgcgccaagaaaatagcctccatcgcggacgtctgcgagtccatgaaagaacaactcctagttctggtcgaatgggctaaatacatccccgcattctgcgaactcccactcgacgaccaagtagccctactccgagcccacgcaggagaacacctactcctaggagccacaaaacgttccatggtatttaaagacgtcctcctactaggcaacgactacatcgtcccccgccactgccccgaactcgccgaaatgtcccgcgtctccatccgcatcctagacgagctcgtactcccattccaagaactccaaatagacgacaacgaatacgcctacctaaaagccatcatcttcttcgatccagacgcaaaaggcctctcagacccaggcaaaatcaaaagacttagagcccaagtccaagtatcactcgaagactacatcaacgaccgacaatacgactcccgcggaaggttcggcgaactcctcctcctcctccccacactacaatccatcacctggcaaatgatagaacaaattcaattcataaaactattcggcatggccaagatagacaacctcctccaagaaatgctcctcggcggagccccctccgacgcaccccacgcccaccaccccctacacccccacctgatgcaagaacacatgggaacaaacgtaatcgtagccaacaccatgccgacacatctctctaacggccaaatgtgcgaatggccacgcccacgcggccaagccgcagcccccgaagcaccacaaccagccccacccggaggctccggatccgaaccctacaagttgctccccggcgccgtagccacaatcgtccgccccctagaggccataccacaacccacaatcacaaaacaagaagtcatataa

SEQ ID NO: 592 - RNA, 1425 nt, synthetic construct
  misc_feature 1..1425: note = CDS (opt28) from Homo sapiens__NP_000448.3__HNF4A(1-474)
  source 1..1425: mol_type = other RNA
atgcggctgagcaagaccctggtggacatggatatggcagactactccgccgctctggatccagcatatacaactctggagttcgaaaacgtccaggtgctgaccatgggaaatgacacatctcccagtgagggcactaacctgaatgcccctaactcactgggggtgagcgctctgtgcgcaatctgcggagacagggccaccggcaaacactacggggcttcctcttgtgatggatgcaagggctttttcagacgcagcgtccggaaaaatcatatgtacagttgccgattttcaaggcagtgcgtggtggacaaggacaagagaaaccagtgccgctattgtcggctgaaaaagtgcttcagggcaggaatgaaaaaggaagccgtccagaatgagagagatcgaatttccacacggcgcagctcttacgaagacagctccctgccaagtatcaacgctctgctgcaggcagaggtgctgtcaaggcagatcactagccccgtgtctgggattaacggcgatatcagagccaagaaaattgcttccatcgcagacgtctgcgaaagcatgaaggagcagctgctggtgctggtggagtgggccaaatacatccctgcattttgcgaactgccactggacgatcaggtcgctctgctgcgggcccacgcaggagagcatctgctgctgggcgctaccaagcgaagtatggtgttcaaggacgtgctgctgctggggaatgactatattgtccccaggcactgccctgaactggccgagatgtcaagagtgtctatccgcatcctggatgaactggtgctgccattccaggagctgcagattgacgataacgaatacgcatacctgaaagctatcatctttttcgaccccgacgccaagggactgtccgatcctggcaaaattaagcggctgaggagccaggtccaggtgagtctggaggactatatcaatgacagacagtacgatagccgagggcggtttggagaactgctgctgctgctgccaacactgcagtccattacctggcagatgatcgagcagatccagttcattaaactgttcggcatggcaaagatcgacaacctgctgcaggagatgctgctgggagggtcaccctctgatgcccctcatgctcaccacccactgcatccccacctgatgcaggaacatatgggcactaatgtgatcgtcgcaaacacaatgcctacccacctgagcaatggacagatgtgtgagtggccacgccccaggggccaggccgcaactcctgaaaccccacagccctcccctccagggggatctggcagcgagccctacaagctgctgcctggagctgtggccacaattgtgaaaccactgagtgcaatcccccagcctaccattactaagcaggaagtcatctga

SEQ ID NO: 593 - RNA, 1425 nt, synthetic construct
  misc_feature 1..1425: note = CDS (opt28) from Homo sapiens__NP_000448.3__HNF4A(1-474)(S313A)
  source 1..1425: mol_type = other RNA
atgcggctgagcaagaccctggtggacatggatatggcagactactccgccgctctggatccagcatatacaactctggagttcgaaaacgtccaggtgctgaccatgggaaatgacacatctccctcagagggcactaacctgaatgcccctaacagtctgggggtgagcgctctgtgcgcaatctgcggagacagggccaccggcaaacactacggggcttcctcttgtgatggatgcaagggctttttcagacgcagcgtccggaaaaatcatatgtactcatgccgatttagtaggcagtgcgtggtggacaaggacaagagaaaccagtgccgctattgtcggctgaaaaagtgcttcagggcaggaatgaaaaaggaagccgtccagaatgagagagatcgaatttccacacggcgcagctcttacgaagacagctccctgccatcaatcaacgctctgctgcaggcagaggtgctgagtaggcagatcactagccccgtgtctgggattaacggcgatatcagagccaagaaaattgcatccatcgctgacgtctgcgaaagcatgaaggagcagctgctggtgctggtggagtgggccaaatacatccctgcattttgcgaactgccactggacgatcaggtcgctctgctgcgggcccacgcaggagagcatctgctgctgggcgctaccaagcgatcaatggtgttcaaggacgtgctgctgctggggaatgactatattgtccccaggcactgccctgaactggccgagatgagtagagtgtctatccgcatcctggatgaactggtgctgccattccaggagctgcagattgacgataacgaatacgcatacctgaaagctatcatctttttcgaccccgacgccaagggactgtccgatcctggcaaaattaagcggctgagggcacaggtccaggtgagcctggaggactatatcaatgacagacagtacgatagccgagggcggtttggagaactgctgctgctgctgccaacactgcagtccattacctggcagatgatcgagcagatccagttcattaaactgttcggcatggccaagatcgacaacctgctgcaggagatgctgctgggagggtcaccctctgatgctcctcatgcacaccacccactgcatccccacctgatgcaggaacatatgggcactaatgtgatcgtcgccaacacaatgcctacccacctgagtaatggacagatgtgtgagtggccacgccccaggggccaggcagctactcctgaaaccccacagcccagccctccagggggatccggctctgagccctacaagctgctgcctggagcagtggccacaattgtgaaaccactgagcgctatcccccagcctaccattactaagcaggaagtcatctga

SEQ ID NO: 594 - RNA, 1425 nt, synthetic construct
  misc_feature 1..1425: note = CDS (opt28) from Homo sapiens__NP_000448.3__HNF4A(1-474)(S313E)
  source 1..1425: mol_type = other RNA
atgcggctgagcaagaccctggtggacatggatatggcagactactccgccgctctggatccagcatatacaactctggagttcgaaaacgtccaggtgctgaccatgggaaatgacacatctccctcagagggcactaacctgaatgcccctaacagtctgggggtgagcgctctgtgcgcaatctgcggagacagggccaccggcaaacactacggggcttcctcttgtgatggatgcaagggctttttcagacgcagcgtccggaaaaatcatatgtactcatgccgatttagtaggcagtgcgtggtggacaaggacaagagaaaccagtgccgctattgtcggctgaaaaagtgcttcagggcaggaatgaaaaaggaagccgtccagaatgagagagatcgaatttccacacggcgcagctcttacgaagacagctccctgccatcaatcaacgctctgctgcaggcagaggtgctgagtaggcagatcactagccccgtgtctgggattaacggcgatatcagagccaagaaaattgcatccatcgctgacgtctgcgaaagcatgaaggagcagctgctggtgctggtggagtgggccaaatacatccctgcattttgcgaactgccactggacgatcaggtcgctctgctgcgggcccacgcaggagagcatctgctgctgggcgctaccaagcgatcaatggtgttcaaggacgtgctgctgctggggaatgactatattgtccccaggcactgccctgaactggccgagatgagtagagtgtctatccgcatcctggatgaactggtgctgccattccaggagctgcagattgacgataacgaatacgcatacctgaaagctatcatctttttcgaccccgacgccaagggactgtccgatcctggcaaaattaagcggctgagggagcaggtccaggtgagcctggaagactatatcaatgacagacagtacgatagccgagggcggtttggagagctgctgctgctgctgccaacactgcagtccattacctggcagatgatcgagcagatccagttcattaaactgttcggcatggcaaagatcgacaacctgctgcaggaaatgctgctgggagggtcaccctctgatgcccctcatgctcaccacccactgcatccccacctgatgcaggagcatatgggcactaatgtgatcgtcgcaaacacaatgcctacccacctgagtaatggacagatgtgtgaatggccacgccccaggggccaggccgcaactcctgagaccccacagcccagccctccagggggatccggctctgaaccctacaagctgctgcctggagctgtggcaacaattgtgaaaccactgagcgccatcccccagcctaccattactaagcaggaggtcatctga

SEQ ID NO: 595 - RNA, 1425 nt, synthetic construct
  misc_feature 1..1425: note = CDS (opt28) from Homo sapiens__NP_000448.3__HNF4A(1-474)(S142A_S143A)
  source 1..1425: mol_type = other RNA
atgcggctgagcaagaccctggtggacatggatatggcagactactccgccgctctggatccagcatatacaactctggagttcgaaaacgtccaggtgctgaccatgggaaatgacacatctccctcagagggcactaacctgaatgcccctaacagtctgggggtgagcgctctgtgcgcaatctgcggagacagggccaccggcaaacactacggggcttcctcttgtgatggatgcaagggctttttcagacgcagcgtccggaaaaatcatatgtactcatgccgatttagtaggcagtgcgtggtggacaaggacaagagaaaccagtgccgctattgtcggctgaaaaagtgcttcagggcaggaatgaaaaaggaagccgtccagaatgagagagatcgaatttccacacggcgcgctgcatacgaagacagctctctgccaagcatcaacgccctgctgcaggcagaggtgctgtccaggcagatcacttcacccgtgagtgggattaacggcgatatcagagctaagaaaattgccagcatcgcagacgtctgcgaatctatgaaggagcagctgctggtgctggtggagtgggctaaatacatccctgccttttgcgaactgccactggacgatcaggtcgcactgctgcgggctcacgccggagagcatctgctgctgggcgcaaccaagcgatccatggtgttcaaggacgtgctgctgctggggaatgactatattgtccccaggcactgccctgaactggctgagatgagcagagtgtcaatccgcatcctggatgaactggtgctgccattccaggagctgcagattgacgataacgaatacgcctacctgaaagcaatcatctttttcgaccccgacgccaagggactgagtgatcctggcaaaattaagcggctgaggtctcaggtccaggtgtccctggaggactatatcaatgacagacagtacgatagccgagggcggtttggagaactgctgctgctgctgccaacactgcagagcattacctggcagatgatcgagcagatccagttcattaaactgttcggcatggctaagatcgacaacctgctgcaggagatgctgctgggagggtccccctcagatgcacctcatgcccaccacccactgcatccccacctgatgcaggaacatatgggcactaatgtgatcgtcgcaaacacaatgcctacccacctgtctaatggacagatgtgtgagtggccacgccccaggggccaggctgcaactcctgaaaccccacagcccagtcctccagggggaagcggctccgagccctacaagctgctgcctggagccgtggctacaattgtgaaaccactgtctgcaatcccccagcctaccattactaagcaggaagtcatctga

SEQ ID NO: 596 - RNA, 1425 nt, synthetic construct
  misc_feature 1..1425: note = CDS (opt28) from Homo sapiens__NP_000448.3__HNF4A(1-474)(S142E_S143E)
  source 1..1425: mol_type = other RNA
atgcggctgagcaagaccctggtggacatggatatggcagactactccgccgctctggatccagcatatacaactctggagttcgaaaacgtccaggtgctgaccatgggaaatgacacatctccctcagagggcactaacctgaatgcccctaacagtctgggggtgagcgctctgtgcgcaatctgcggagacagggccaccggcaaacactacggggcttcctcttgtgatggatgcaagggctttttcagacgcagcgtccggaaaaatcatatgtactcatgccgatttagtaggcagtgcgtggtggacaaggacaagagaaaccagtgccgctattgtcggctgaaaaagtgcttcagggcaggaatgaaaaaggaagccgtccagaatgagagagatcgaatttccacacggcgcgaagagtacgaagacagctctctgccaagcatcaacgctctgctgcaggcagaggtgctgtccaggcagatcacttcacccgtgagtgggattaacggcgatatcagagccaagaaaattgcaagcatcgctgacgtctgcgagtctatgaaggaacagctgctggtgctggtggagtgggccaaatacatccctgcattttgcgaactgccactggacgatcaggtcgctctgctgcgggcccacgcaggagagcatctgctgctgggcgctaccaagcgatccatggtgttcaaggacgtgctgctgctggggaatgactatattgtccccaggcactgccctgaactggccgagatgagcagagtgtcaatccgcatcctggatgaactggtgctgccattccaggagctgcagattgacgataacgaatacgcatacctgaaagctatcatctttttcgaccccgacgccaagggactgagtgatcctggcaaaattaagcggctgaggtctcaggtccaggtgtccctggaggactatatcaatgacagacagtacgatagccgagggcggtttggagagctgctgctgctgctgccaacactgcagagcattacctggcagatgatcgaacagatccagttcattaaactgttcggcatggcaaagatcgacaacctgctgcaggagatgctgctgggagggtccccctcagatgcccctcatgctcaccacccactgcatccccacctgatgcaggaacatatgggcactaatgtgatcgtcgcaaacacaatgcctacccacctgtctaatggacagatgtgtgagtggccacgccccaggggccaggccgcaactcctgaaaccccacagcccagtcctccagggggaagcggctccgagccctacaagctgctgcctggagctgtggcaacaattgtgaaaccactgtctgccatcccccagcctaccattactaagcaggaagtcatctga

SEQ ID NO: 597 - RNA, 1425 nt, synthetic construct
  misc_feature 1..1425: note = CDS (opt28) from Homo sapiens__NP_000448.3__HNF4A(1-474)(S143A)
  source 1..1425: mol_type = other RNA
atgcggctgagcaagaccctggtggacatggatatggcagactactccgccgctctggatccagcatatacaactctggagttcgaaaacgtccaggtgctgaccatgggaaatgacacatctccctcagagggcactaacctgaatgcccctaacagtctgggggtgagcgctctgtgcgcaatctgcggagacagggccaccggcaaacactacggggcttcctcttgtgatggatgcaagggctttttcagacgcagcgtccggaaaaatcatatgtactcatgccgatttagtaggcagtgcgtggtggacaaggacaagagaaaccagtgccgctattgtcggctgaaaaagtgcttcagggcaggaatgaaaaaggaagccgtccagaatgagagagatcgaatttccacacggcgcagcgcttacgaagactctagcctgccatccatcaacgcactgctgcaggccgaggtgctgtcaaggcagatcaccagtcccgtgagcgggattaacggcgatatcagagcaaagaaaattgcttctatcgccgacgtctgcgaatccatgaaggagcagctgctggtgctggtggagtgggcaaaatacatccctgctttttgcgaactgccactggacgatcaggtcgccctgctgcgggcacacgctggagagcatctgctgctgggcgccactaagcgaagcatggtgttcaaggacgtgctgctgctggggaatgactatattgtccccaggcactgccctgaactggcagagatgtcaagagtgagtatccgcatcctggatgaactggtgctgccattccaggagctgcagattgacgataacgaatacgcttacctgaaagccatcatctttttcgaccccgacgcaaagggactgtctgatcctggcaaaattaagcggctgaggtcccaggtccaggtgagcctggaggactatatcaatgacagacagtacgatagccgagggcggtttggagaactgctgctgctgctgccaacactgcagtccattacctggcagatgatcgagcagatccagttcattaaactgttcggcatggccaagatcgacaacctgctgcaggagatgctgctgggagggtcaccctctgatgctcctcatgcacaccacccactgcatccccacctgatgcaggaacatatgggcactaatgtgatcgtcgccaacacaatgcctacccacctgagtaatggacagatgtgtgagtggccacgccccaggggccaggcagctactcctgaaaccccacagcccagccctccagggggatccggctctgagccctacaagctgctgcctggagcagtggccacaattgtgaaaccactgagcgctatcccccagcctaccattactaagcaggaagtcatctga

SEQ ID NO: 598 - RNA, 1425 nt, synthetic construct
  misc_feature 1..1425: note = CDS (opt28) from Homo sapiens__NP_000448.3__HNF4A(1-474)(T166A)
  source 1..1425: mol_type = other RNA
atgcggctgagcaagaccctggtggacatggatatggcagactactccgccgctctggatccagcatatacaactctggagttcgaaaacgtccaggtgctgaccatgggaaatgacacatctccctcagagggcactaacctgaatgcccctaacagtctgggggtgagcgctctgtgcgcaatctgcggagacagggccaccggcaaacactacggggcttcctcttgtgatggatgcaagggctttttcagacgcagcgtccggaaaaatcatatgtactcatgccgatttagtaggcagtgcgtggtggacaaggacaagagaaaccagtgccgctattgtcggctgaaaaagtgcttcagggcaggaatgaaaaaggaagccgtccagaatgagagagatcgaatttccacacggcgcagctcttacgaagacagctccctgccatcaatcaacgctctgctgcaggcagaggtgctgagtaggcagatcgccagccccgtgtctgggattaacggcgatatcagagcaaagaaaattgcttccatcgccgacgtctgcgaaagcatgaaggagcagctgctggtgctggtggagtgggcaaaatacatccctgctttttgcgaactgccactggacgatcaggtcgccctgctgcgggcacacgctggagagcatctgctgctgggcgccactaagcgatcaatggtgttcaaggacgtgctgctgctggggaatgactatattgtccccaggcactgccctgaactggcagagatgagtagagtgtctatccgcatcctggatgaactggtgctgccattccaggagctgcagattgacgataacgaatacgcttacctgaaagccatcatctttttcgaccccgacgcaaagggactgtccgatcctggcaaaattaagcggctgaggagccaggtccaggtgagcctggaggactatatcaatgacagacagtacgattcccgagggcggtttggagaactgctgctgctgctgccaaccctgcagtcaattacatggcagatgatcgagcagatccagttcattaaactgttcggcatggccaagatcgacaacctgctgcaggagatgctgctgggagggtctcccagtgatgctcctcatgcacaccacccactgcatccccacctgatgcaggaacatatgggcaccaatgtgatcgtcgccaacactatgcctacacacctgagcaatggacagatgtgtgagtggccacgccccaggggccaggcagctacccctgaaactccacagccctcccctccagggggatctggcagcgagccctacaagctgctgcctggagcagtggccaccattgtgaaaccactgtcagctatcccccagcctacaattaccaagcaggaagtcatctga

SEQ ID NO: 599 - RNA, 1425 nt, synthetic construct
  misc_feature 1..1425: note = CDS (opt28) from Homo sapiens__NP_000448.3__HNF4A(1-474)(S167E)
  source 1..1425: mol_type = other RNA
atgcggctgagcaagaccctggtggacatggatatggcagactactccgccgctctggatccagcatatacaactctggagttcgaaaacgtccaggtgctgaccatgggaaatgacacatctccctcagagggcactaacctgaatgcccctaacagtctgggggtgagcgctctgtgcgcaatctgcggagacagggccaccggcaaacactacggggcttcctcttgtgatggatgcaagggctttttcagacgcagcgtccggaaaaatcatatgtactcatgccgatttagtaggcagtgcgtggtggacaaggacaagagaaaccagtgccgctattgtcggctgaaaaagtgcttcagggcaggaatgaaaaaggaagccgtccagaatgagagagatcgaatttccacacggcgcagctcttacgaagacagctccctgccatcaatcaacgctctgctgcaggcagaggtgctgagtaggcagatcactgaacccgtgagcgggattaacggcgatatcagagccaagaaaattgcatctatcgctgacgtctgcgagtccatgaaggagcagctgctggtgctggtggaatgggccaaatacatccctgcattttgcgagctgccactggacgatcaggtcgctctgctgcgggcccacgcaggagaacatctgctgctgggcgctaccaagcgaagcatggtgttcaaggacgtgctgctgctggggaatgactatattgtccccaggcactgccctgagctggccgaaatgtcaagagtgagtatccgcatcctggatgagctggtgctgccattccaggaactgcagattgacgataacgagtacgcatacctgaaagctatcatctttttcgaccccgacgccaagggactgtctgatcctggcaaaattaagcggctgaggtcccaggtccaggtgagcctggaagactatatcaatgacagacagtacgatagccgagggcggtttggagagctgctgctgctgctgccaacactgcagtccattacctggcagatgatcgagcagatccagttcattaaactgttcggcatggcaaagatcgacaacctgctgcaggaaatgctgctgggagggtcaccctctgatgcccctcatgctcaccacccactgcatccccacctgatgcaggagcatatgggcactaatgtgatcgtcgcaaacacaatgcctacccacctgagtaatggacagatgtgtgaatggccacgccccaggggccaggccgcaactcctgagaccccacagcccagccctccagggggatccggctctgaaccctacaagctgctgcctggagctgtggcaacaattgtgaaaccactgagcgccatcccccagcctaccattactaagcaggaggtcatctga

SEQ ID NO: 600 - RNA, 1425 nt, synthetic construct
  misc_feature 1..1425: note = CDS (opt28) from Homo sapiens__NP_000448.3__HNF4A(1-474)(S167A)
  source 1..1425: mol_type = other RNA
atgcggctgagcaagaccctggtggacatggatatggcagactactccgccgctctggatccagcatatacaactctggagttcgaaaacgtccaggtgctgaccatgggaaatgacacatctccctcagagggcactaacctgaatgcccctaacagtctgggggtgagcgctctgtgcgcaatctgcggagacagggccaccggcaaacactacggggcttcctcttgtgatggatgcaagggctttttcagacgcagcgtccggaaaaatcatatgtactcatgccgatttagtaggcagtgcgtggtggacaaggacaagagaaaccagtgccgctattgtcggctgaaaaagtgcttcagggcaggaatgaaaaaggaagccgtccagaatgagagagatcgaatttccacacggcgcagctcttacgaagacagctccctgccatcaatcaacgctctgctgcaggcagaggtgctgagtaggcagatcactgcccccgtgagcgggattaacggcgatatcagagcaaagaaaattgcttctatcgccgacgtctgcgaatccatgaaggagcagctgctggtgctggtggagtgggcaaaatacatccctgctttttgcgaactgccactggacgatcaggtcgccctgctgcgggcacacgctggagagcatctgctgctgggcgccaccaagcgaagcatggtgttcaaggacgtgctgctgctggggaatgactatattgtccccaggcactgccctgaactggcagagatgtcaagagtgagtatccgcatcctggatgaactggtgctgccattccaggagctgcagattgacgataacgaatacgcttacctgaaagccatcatctttttcgaccccgacgcaaagggactgtctgatcctggcaaaattaagcggctgaggtcccaggtccaggtgagcctggaggactatatcaatgacagacagtacgatagccgagggcggtttggagaactgctgctgctgctgccaacactgcagtccattacctggcagatgatcgagcagatccagttcattaaactgttcggcatggccaagatcgacaacctgctgcaggagatgctgctgggagggtcaccctctgatgctcctcatgcacaccacccactgcatccccacctgatgcaggaacatatgggcactaatgtgatcgtcgccaacacaatgcctacccacctgagtaatggacagatgtgtgagtggccacgccccaggggccaggcagctactcctgaaaccccacagcccagccctccagggggatccggctctgagccctacaagctgctgcctggagcagtggccacaattgtgaaaccactgagcgctatcccccagcctaccattactaagcaggaagtcatctga

SEQ ID NO: 601 - RNA, 1425 nt, synthetic construct
  misc_feature 1..1425: note = CDS (opt28) from Homo sapiens__NP_000448.3__HNF4A(1-474)(S167A_S378A_T429A_T432A_ S436A)
  source 1..1425: mol_type = other RNA
atgcggctgagcaagaccctggtggacatggatatggcagactactccgccgctctggatccagcatatacaactctggagttcgaaaacgtccaggtgctgaccatgggaaatgacacatctccctcagagggcactaacctgaatgcccctaacagtctgggggtgagcgctctgtgcgcaatctgcggagacagggccaccggcaaacactacggggcttcctcttgtgatggatgcaagggctttttcagacgcagcgtccggaaaaatcatatgtactcatgccgatttagtaggcagtgcgtggtggacaaggacaagagaaaccagtgccgctattgtcggctgaaaaagtgcttcagggcaggaatgaaaaaggaagccgtccagaatgagagagatcgaatttccacacggcgcagctcttacgaagacagctccctgccatcaatcaacgctctgctgcaggcagaggtgctgagtaggcagatcactgcccccgtgagcgggattaacggcgatatcagagcaaagaaaattgcttctatcgccgacgtctgcgaatccatgaaggagcagctgctggtgctggtggagtgggcaaaatacatccctgctttttgcgaactgccactggacgatcaggtcgccctgctgcgggcacacgctggagagcatctgctgctgggcgccaccaagcgaagcatggtgttcaaggacgtgctgctgctggggaatgactatattgtccccaggcactgccctgaactggcagagatgtcaagagtgagtatccgcatcctggatgaactggtgctgccattccaggagctgcagattgacgataacgaatacgcttacctgaaagccatcatctttttcgaccccgacgcaaagggactgtctgatcctggcaaaattaagcggctgaggtcccaggtccaggtgagcctggaggactatatcaatgacagacagtacgatagccgagggcggtttggagaactgctgctgctgctgccaacactgcagtccattacctggcagatgatcgagcagatccagttcattaaactgttcggcatggccaagatcgacaacctgctgcaggagatgctgctgggaggggctccctcagatgcacctcatgcccaccacccactgcatccccacctgatgcaggaacatatgggcactaatgtgatcgtcgcaaacacaatgcctacccacctgtctaatggacagatgtgtgagtggccacgccccaggggccaggctgcagcccctgaagctccacagcccgcacctccagggggaagtggcagcgagccctacaagctgctgcctggagccgtggctactattgtgaaaccactgtccgcaatcccccagcctaccattacaaagcaggaagtcatctga

SEQ ID NO: 602 - RNA, 1425 nt, synthetic construct
  misc_feature 1..1425: note = CDS (opt28) from Homo sapiens__NP_000448.3__HNF4A(1-474)(S167E_S378E_T429E_T432E_ S436E)
  source 1..1425: mol_type = other RNA
atgcggctgagcaagaccctggtggacatggatatggcagactactccgccgctctggatccagcatatacaactctggagttcgaaaacgtccaggtgctgaccatgggaaatgacacatctccctcagagggcactaacctgaatgcccctaacagtctgggggtgagcgctctgtgcgcaatctgcggagacagggccaccggcaaacactacggggcttcctcttgtgatggatgcaagggctttttcagacgcagcgtccggaaaaatcatatgtactcatgccgatttagtaggcagtgcgtggtggacaaggacaagagaaaccagtgccgctattgtcggctgaaaaagtgcttcagggcaggaatgaaaaaggaagccgtccagaatgagagagatcgaatttccacacggcgcagctcttacgaagacagctccctgccatcaatcaacgctctgctgcaggcagaggtgctgagtaggcagatcactgaacccgtgagcgggattaacggcgatatcagagccaagaaaattgcatctatcgctgacgtctgcgagtccatgaaggagcagctgctggtgctggtggaatgggccaaatacatccctgcattttgcgagctgccactggacgatcaggtcgctctgctgcgggcccacgcaggagaacatctgctgctgggcgctaccaagcgaagcatggtgttcaaggacgtgctgctgctggggaatgactatattgtccccaggcactgccctgagctggccgaaatgtcaagagtgagtatccgcatcctggatgagctggtgctgccattccaggaactgcagattgacgataacgagtacgcatacctgaaagctatcatctttttcgaccccgacgccaagggactgtctgatcctggcaaaattaagcggctgaggtcccaggtccaggtgagcctggaagactatatcaatgacagacagtacgatagccgagggcggtttggagagctgctgctgctgctgccaacactgcagtccattacctggcagatgatcgagcagatccagttcattaaactgttcggcatggcaaagatcgacaacctgctgcaggaaatgctgctgggaggggagccctcagatgcccctcatgctcaccacccactgcatccccacctgatgcaggaacatatgggcactaatgtgatcgtcgcaaacacaatgcctacccacctgtctaatggacagatgtgtgagtggccacgccccaggggccaggccgcagaacctgaggaaccacagcccgagcctccagggggaagtggcagcgagccctacaagctgctgcctggagctgtggcaactattgtgaaaccactgtccgccatcccccagcctaccattacaaagcaggaagtcatctga

SEQ ID NO: 603 - RNA, 1425 nt, synthetic construct
  misc_feature 1..1425: note = CDS (opt28) from Homo sapiens__NP_000448.3__HNF4A(1-474)(S87A)
  source 1..1425: mol_type = other RNA
atgcggctgagcaagaccctggtggacatggatatggcagactactccgccgctctggatccagcatatacaactctggagttcgaaaacgtccaggtgctgaccatgggaaatgacacatctccctcagagggcactaacctgaatgcccctaacagtctgggggtgagcgctctgtgcgcaatctgcggagacagggccaccggcaaacactacggggcttcctcttgtgatggatgcaagggctttttcagacgcgcagtccggaaaaatcatatgtacagctgccgattttcaaggcagtgcgtggtggacaaggacaagagaaaccagtgccgctattgtcggctgaaaaagtgcttcagggccggaatgaaaaaggaagctgtccagaatgagagagatcgaattagtacacggcgctccagctacgaagactctagcctgccatccatcaacgcactgctgcaggccgaggtgctgtcaaggcagatcaccagtcccgtgagcgggattaacggcgatatcagagcaaagaaaattgcttctatcgccgacgtctgcgaatccatgaaggagcagctgctggtgctggtggagtgggcaaaatacatccctgctttttgcgaactgccactggacgatcaggtcgccctgctgcgggcacacgctggagagcatctgctgctgggcgccactaagcgaagcatggtgttcaaggacgtgctgctgctggggaatgactatattgtccccaggcactgccctgaactggcagagatgtcaagagtgagtatccgcatcctggatgaactggtgctgccattccaggagctgcagattgacgataacgaatacgcttacctgaaagccatcatctttttcgaccccgacgcaaagggactgtctgatcctggcaaaattaagcggctgaggtcccaggtccaggtgagcctggaggactatatcaatgacagacagtacgatagccgagggcggtttggagaactgctgctgctgctgccaacactgcagtccattacctggcagatgatcgagcagatccagttcattaaactgttcggcatggccaagatcgacaacctgctgcaggagatgctgctgggagggtcaccctctgatgctcctcatgcacaccacccactgcatccccacctgatgcaggaacatatgggcactaatgtgatcgtcgccaacacaatgcctacccacctgagtaatggacagatgtgtgagtggccacgccccaggggccaggcagctactcctgaaaccccacagcccagccctccagggggatccggctctgagccctacaagctgctgcctggagcagtggccacaattgtgaaaccactgagcgctatcccccagcctaccattactaagcaggaagtcatctga

SEQ ID NO: 604 - RNA, 1425 nt, synthetic construct
  misc_feature 1..1425: note = CDS (opt28) from Homo sapiens__NP_000448.3__HNF4A(1-474)(S87E)
  source 1..1425: mol_type = other RNA
atgcggctgagcaagaccctggtggacatggatatggcagactactccgccgctctggatccagcatatacaactctggagttcgaaaacgtccaggtgctgaccatgggaaatgacacatctccctcagagggcactaacctgaatgcccctaacagtctgggggtgagcgctctgtgcgcaatctgcggagacagggccaccggcaaacactacggggcttcctcttgtgatggatgcaagggctttttcagacgcgaagtccggaaaaatcatatgtacagctgccgattttcaaggcagtgcgtggtggacaaggacaagagaaaccagtgccgctattgtcggctgaaaaagtgcttcagggcaggaatgaaaaaggaggccgtccagaatgaaagagatcgaattagtacacggcgctccagctacgaggactctagcctgccatccatcaacgctctgctgcaggcagaagtgctgtcaaggcagatcaccagtcccgtgagcgggattaacggcgatatcagagccaagaaaattgcatctatcgctgacgtctgcgagtccatgaaggagcagctgctggtgctggtggaatgggccaaatacatccctgcattttgcgagctgccactggacgatcaggtcgctctgctgcgggcccacgcaggagaacatctgctgctgggcgctactaagcgaagcatggtgttcaaggacgtgctgctgctggggaatgactatattgtccccaggcactgccctgagctggccgaaatgtcaagagtgagtatccgcatcctggatgagctggtgctgccattccaggaactgcagattgacgataacgagtacgcatacctgaaagctatcatctttttcgaccccgacgccaagggactgtctgatcctggcaaaattaagcggctgaggtcccaggtccaggtgagcctggaagactatatcaatgacagacagtacgatagccgagggcggtttggagagctgctgctgctgctgccaacactgcagtccattacctggcagatgatcgagcagatccagttcattaaactgttcggcatggcaaagatcgacaacctgctgcaggaaatgctgctgggagggtcaccctctgatgcccctcatgctcaccacccactgcatccccacctgatgcaggagcatatgggcactaatgtgatcgtcgcaaacacaatgcctacccacctgagtaatggacagatgtgtgaatggccacgccccaggggccaggccgcaactcctgagaccccacagcccagccctccagggggatccggctctgaaccctacaagctgctgcctggagctgtggcaacaattgtgaaaccactgagcgccatcccccagcctaccattactaagcaggaggtcatctga

SEQ ID NO: 605 - RNA, 1425 nt, synthetic construct
  misc_feature 1..1425: note = CDS (opt28) from Homo sapiens__NP_000448.3__HNF4A(1-474)(R2V)
  source 1..1425: mol_type = other RNA
atggtgctgagcaagaccctggtcgacatggatatggcagactactccgccgctctggatccagcatatacaactctggagttcgaaaacgtccaggtgctgaccatgggaaatgacacatctccctcagagggcactaacctgaatgcccctaacagtctgggggtgagcgctctgtgcgcaatctgcggagaccgggccaccggcaaacactacggggcttcctcttgtgatggatgcaagggctttttcaggagaagcgtgcgcaaaaatcatatgtactcatgccgatttagtcggcagtgcgtggtcgacaaggacaagaggaaccagtgcagatattgtcgcctgaaaaagtgcttccgggcaggaatgaaaaaggaagccgtgcagaatgagagggatagaatttccacacgacggagctcttacgaagacagctccctgccatcaatcaacgctctgctgcaggcagaggtgctgagtcgccagatcactagccccgtctctgggattaacggcgatatcagggccaagaaaattgcatccatcgctgacgtgtgcgaaagcatgaaggagcagctgctggtgctggtcgagtgggccaaatacatccctgcattttgcgaactgccactggacgatcaggtggctctgctgagagcccacgcaggagagcatctgctgctgggcgctaccaagcggtcaatggtgttcaaggacgtcctgctgctggggaatgactatattgtgccccgacactgccctgaactggccgagatgagtagggtgtctatcagaatcctggatgaactggtcctgccattccaggagctgcagattgacgataacgaatacgcatacctgaaagctatcatctttttcgaccccgacgccaagggactgtccgatcctggcaaaattaagcgcctgcggagccaggtccaggtgagcctggaggactatatcaatgacaggcagtacgattccagagggcgatttggagaactgctgctgctgctgccaacactgcagtcaattacctggcagatgatcgagcagatccagttcattaaactgttcggcatggcaaagatcgacaacctgctgcaggagatgctgctgggagggtctcccagtgatgcccctcatgctcaccacccactgcatccccacctgatgcaggaacatatgggcactaatgtgatcgtggcaaacacaatgcctacccacctgagcaatggacagatgtgtgagtggccacggccccgcggccaggccgcaactcctgaaaccccacagccctcccctccagggggatctggcagcgagccctacaagctgctgcctggagctgtggcaacaattgtcaaaccactgtcagccatcccccagcctaccattactaagcaggaagtgatctga

SEQ ID NO: 606 - RNA, 1425 nt, synthetic construct
  misc_feature 1..1425: note = CDS (opt28) from Homo sapiens__NP_000448.3__HNF4A(1-474)(R2V_K5V)
  source 1..1425: mol_type = other RNA
atggtgctgagcgtcaccctggtggacatggatatggcagactactccgccgctctggatccagcatatacaactctggagttcgaaaacgtgcaggtcctgaccatgggaaatgacacatctccctcagagggcactaacctgaatgcccctaacagtctgggggtgagcgctctgtgcgcaatctgcggagaccgggccaccggcaagcactacggggcttcctcttgtgatggatgcaaaggctttttcaggagaagcgtgcgcaagaatcatatgtactcatgccgatttagtcggcagtgcgtcgtggacaaagacaagaggaaccagtgcagatattgtcgcctgaagaaatgcttccgggcaggaatgaagaaagaagccgtgcagaatgagagggatagaatttccacacgacggagctcttacgaagacagctccctgccatcaatcaacgctctgctgcaggcagaggtcctgagtcgccagatcactagccccgtgtctgggattaacggcgatatcagggccaagaagattgcatccatcgctgacgtgtgcgaaagcatgaaagagcagctgctggtcctggtggagtgggccaagtacatccctgcattttgcgaactgccactggacgatcaggtggctctgctgagagcccacgcaggagagcatctgctgctgggcgctaccaaacggtcaatggtcttcaaggacgtgctgctgctggggaatgactatattgtgccccgacactgccctgaactggccgagatgagtagggtctctatcagaatcctggatgaactggtgctgccattccaggagctgcagattgacgataacgaatacgcatacctgaaggctatcatctttttcgaccccgacgccaaaggactgtccgatcctggcaagattaaacgcctgcggagccaggtgcaggtcagcctggaggactatatcaatgacaggcagtacgattccagagggcgatttggagaactgctgctgctgctgccaacactgcagtcaattacctggcagatgatcgagcagatccagttcattaagctgttcggcatggcaaaaatcgacaacctgctgcaggagatgctgctgggagggtctcccagtgatgcccctcatgctcaccacccactgcatccccacctgatgcaggaacatatgggcactaatgtgatcgtggcaaacacaatgcctacccacctgagcaatggacagatgtgtgagtggccacggccccgcggccaggccgcaactcctgaaaccccacagccctcccctccagggggatctggcagcgagccctacaagctgctgcctggagctgtcgcaacaattgtgaagccactgtcagccatcccccagcctaccattactaaacaggaagtcatctga

SEQ ID NO: 607 - RNA, 1425 nt, synthetic construct
  misc_feature 1..1425: note = CDS (opt28) from Homo sapiens__NP_000448.3__HNF4A(1-474)(K179R_K180R)
  source 1..1425: mol_type = other RNA
atgcggctgagcaagaccctggtggacatggatatggcagactactccgccgctctggatccagcatatacaactctggagttcgaaaacgtccaggtgctgaccatgggaaatgacacatctccctcagagggcactaacctgaatgcccctaacagtctgggggtgagcgctctgtgcgcaatctgcggagacagggccaccggcaaacactacggggcttcctcttgtgatggatgcaagggctttttcagacgcagcgtccggaaaaatcatatgtactcatgccgatttagtaggcagtgcgtggtggacaaggacaagagaaaccagtgccgctattgtcggctgaaaaagtgcttcagggcaggaatgaaaaaggaagccgtccagaatgagagagatcgaatttccacacggcgcagctcttacgaagacagctccctgccatcaatcaacgctctgctgcaggcagaggtgctgagtaggcagatcactagccccgtgtctgggattaacggcgatatcagagcccggcgaattgcatccatcgctgacgtctgcgaaagcatgaaggagcagctgctggtgctggtggagtgggccaaatacatccctgcattttgcgaactgccactggacgatcaggtcgctctgctgagggcccacgcaggagagcatctgctgctgggcgctaccaagagatcaatggtgttcaaagacgtgctgctgctggggaatgactatattgtcccccgccactgccctgaactggccgagatgagtcgggtgtctatcaggatcctggatgaactggtgctgccattccaggagctgcagattgacgataacgaatacgcatacctgaaggctatcatctttttcgaccccgacgccaagggactgtccgatcctggcaaaattaagagactgcgaagccaggtccaggtgagcctggaggactatatcaatgaccggcagtacgattcccgcgggaggtttggagaactgctgctgctgctgccaacactgcagtcaattacctggcagatgatcgagcagatccagttcattaaactgttcggcatggcaaagatcgacaacctgctgcaggagatgctgctgggagggtctcccagtgatgcccctcatgctcaccacccactgcatccccacctgatgcaggaacatatgggcactaatgtgatcgtcgcaaacacaatgcctacccacctgagcaatggacagatgtgtgagtggccaagaccccggggccaggccgcaactcctgaaaccccacagccctcccctccagggggatctggcagcgagccctacaaactgctgcctggagctgtggcaacaattgtgaagccactgtcagccatcccccagcctaccattactaagcaggaagtcatctga

SEQ ID NO: 608 - RNA, 1425 nt, synthetic construct
  misc_feature 1..1425: note = CDS (opt28) from Homo sapiens__NP_000448.3__HNF4A(1-474)(K234R)
  source 1..1425: mol_type = other RNA
atgcggctgagcaagaccctggtggacatggatatggcagactactccgccgctctggatccagcatatacaactctggagttcgaaaacgtccaggtgctgaccatgggaaatgacacatctccctcagagggcactaacctgaatgcccctaacagtctgggggtgagcgctctgtgcgcaatctgcggagacagggccaccggcaaacactacggggcttcctcttgtgatggatgcaagggctttttcagacgcagcgtccggaaaaatcatatgtactcatgccgatttagtaggcagtgcgtggtggacaaggacaagagaaaccagtgccgctattgtcggctgaaaaagtgcttcagggcaggaatgaaaaaggaagccgtccagaatgagagagatcgaatttccacacggcgcagctcttacgaagacagctccctgccatcaatcaacgctctgctgcaggcagaggtgctgagtaggcagatcactagccccgtgtctgggattaacggcgatatcagagccaagaaaattgcatccatcgctgacgtctgcgaaagcatgaaggagcagctgctggtgctggtggagtgggccaaatacatccctgcattttgcgaactgccactggacgatcaggtcgctctgctgcgggcccacgcaggagagcatctgctgctgggcgctacccgaaggtcaatggtgttcaaggacgtgctgctgctggggaatgactatattgtccccagacactgccctgaactggccgagatgagtcgcgtgtctatccggatcctggatgaactggtgctgccattccaggagctgcagattgacgataacgaatacgcatacctgaaggctatcatctttttcgaccccgacgccaaaggactgtccgatcctggcaagattaaaaggctgagaagccaggtccaggtgagcctggaggactatatcaatgaccgacagtacgattcccgggggcgctttggagaactgctgctgctgctgccaacactgcagtcaattacctggcagatgatcgagcagatccagttcattaagctgttcggcatggcaaaaatcgacaacctgctgcaggagatgctgctgggagggtctcccagtgatgcccctcatgctcaccacccactgcatccccacctgatgcaggaacatatgggcactaatgtgatcgtcgcaaacacaatgcctacccacctgagcaatggacagatgtgtgagtggccaaggcccagaggccaggccgcaactcctgaaaccccacagccctcccctccagggggatctggcagcgagccctacaagctgctgcctggagctgtggcaacaattgtgaagccactgtcagccatcccccagcctaccattactaaacaggaagtcatctga

SEQ ID NO: 609 - RNA, 1425 nt, synthetic construct
  misc_feature 1..1425: note = CDS (opt28) from Homo sapiens__NP_000448.3__HNF4A(1-474)(K300R)
  source 1..1425: mol_type = other RNA
atgcggctgagcaagaccctggtggacatggatatggcagactactccgccgctctggatccagcatatacaactctggagttcgaaaacgtccaggtgctgaccatgggaaatgacacatctccctcagagggcactaacctgaatgcccctaacagtctgggggtgagcgctctgtgcgcaatctgcggagacagggccaccggcaaacactacggggcttcctcttgtgatggatgcaagggctttttcagacgcagcgtccggaaaaatcatatgtactcatgccgatttagtaggcagtgcgtggtggacaaggacaagagaaaccagtgccgctattgtcggctgaaaaagtgcttcagggcaggaatgaaaaaggaagccgtccagaatgagagagatcgaatttccacacggcgcagctcttacgaagacagctccctgccatcaatcaacgctctgctgcaggcagaggtgctgagtaggcagatcactagccccgtgtctgggattaacggcgatatcagagccaagaaaattgcatccatcgctgacgtctgcgaaagcatgaaggagcagctgctggtgctggtggagtgggccaaatacatccctgcattttgcgaactgccactggacgatcaggtcgctctgctgcgggcccacgcaggagagcatctgctgctgggcgctaccaagcgatcaatggtgttcaaggacgtgctgctgctggggaatgactatattgtccccaggcactgccctgaactggccgagatgagtagagtgtctatccgcatcctggatgaactggtgctgccattccaggagctgcagattgacgataacgaatacgcatacctgaaagctatcatctttttcgaccccgacgcccggggactgtccgatcctggcaagattaaaaggctgagaagccaggtccaggtgagcctggaggactatatcaatgaccgacagtacgattcccgggggcgctttggagaactgctgctgctgctgccaacactgcagtcaattacctggcagatgatcgagcagatccagttcattaagctgttcggcatggcaaaaatcgacaacctgctgcaggagatgctgctgggagggtctcccagtgatgcccctcatgctcaccacccactgcatccccacctgatgcaggaacatatgggcactaatgtgatcgtcgcaaacacaatgcctacccacctgagcaatggacagatgtgtgagtggccaaggcccagaggccaggccgcaactcctgaaaccccacagccctcccctccagggggatctggcagcgagccctacaagctgctgcctggagctgtggcaacaattgtgaagccactgtcagccatcccccagcctaccattactaaacaggaagtcatctga

SEQ ID NO: 610 - RNA, 1425 nt, synthetic construct
  misc_feature 1..1425: note = CDS (opt28) from Homo sapiens__NP_000448.3__HNF4A(1-474)(K300R_K307R_K309R)
  source 1..1425: mol_type = other RNA
atgcggctgagcaagaccctggtggacatggatatggcagactactccgccgctctggatccagcatatacaactctggagttcgaaaacgtccaggtgctgaccatgggaaatgacacatctccctcagagggcactaacctgaatgcccctaacagtctgggggtgagcgctctgtgcgcaatctgcggagacagggccaccggcaaacactacggggcttcctcttgtgatggatgcaagggctttttcagacgcagcgtccggaaaaatcatatgtactcatgccgatttagtaggcagtgcgtggtggacaaggacaagagaaaccagtgccgctattgtcggctgaaaaagtgcttcagggcaggaatgaaaaaggaagccgtccagaatgagagagatcgaatttccacacggcgcagctcttacgaagacagctccctgccatcaatcaacgctctgctgcaggcagaggtgctgagtaggcagatcactagccccgtgtctgggattaacggcgatatcagagccaagaaaattgcatccatcgctgacgtctgcgaaagcatgaaggagcagctgctggtgctggtggagtgggccaaatacatccctgcattttgcgaactgccactggacgatcaggtcgctctgctgcgggcccacgcaggagagcatctgctgctgggcgctaccaagcgatcaatggtgttcaaggacgtgctgctgctggggaatgactatattgtccccaggcactgccctgaactggccgagatgagtagagtgtctatccgcatcctggatgaactggtgctgccattccaggagctgcagattgacgataacgaatacgcatacctgaaagctatcatctttttcgaccccgacgcccggggactgtccgatcctggcaggattagacgactgcggagccaggtccaggtgagcctggaggactatatcaatgaccgccagtacgattccagggggagatttggagaactgctgctgctgctgccaacactgcagtcaattacctggcagatgatcgagcagatccagttcattaagctgttcggcatggcaaaaatcgacaacctgctgcaggagatgctgctgggagggtctcccagtgatgcccctcatgctcaccacccactgcatccccacctgatgcaggaacatatgggcactaatgtgatcgtcgcaaacacaatgcctacccacctgagcaatggacagatgtgtgagtggccacggccccgcggccaggccgcaactcctgaaaccccacagccctcccctccagggggatctggcagcgagccctacaagctgctgcctggagctgtggcaacaattgtgaaaccactgtcagccatcccccagcctaccattactaagcaggaagtcatctga

SEQ ID NO: 611 - RNA, 1425 nt, synthetic construct
  misc_feature 1..1425: note = CDS (opt28) from Homo sapiens__NP_000448.3__HNF4A(1-474)(K447R_K470R)
  source 1..1425: mol_type = other RNA
atgcggctgagcaagaccctggtggacatggatatggcagactactccgccgctctggatccagcatatacaactctggagttcgaaaacgtccaggtgctgaccatgggaaatgacacatctccctcagagggcactaacctgaatgcccctaacagtctgggggtgagcgctctgtgcgcaatctgcggagacagggccaccggcaaacactacggggcttcctcttgtgatggatgcaagggctttttcagacgcagcgtccggaaaaatcatatgtactcatgccgatttagtaggcagtgcgtggtggacaaggacaagagaaaccagtgccgctattgtcggctgaaaaagtgcttcagggcaggaatgaaaaaggaagccgtccagaatgagagagatcgaatttccacacggcgcagctcttacgaagacagctccctgccatcaatcaacgctctgctgcaggcagaggtgctgagtaggcagatcactagccccgtgtctgggattaacggcgatatcagagccaagaaaattgcatccatcgctgacgtctgcgaaagcatgaaggagcagctgctggtgctggtggagtgggccaaatacatccctgcattttgcgaactgccactggacgatcaggtcgctctgctgcgggcccacgcaggagagcatctgctgctgggcgctaccaagcgatcaatggtgttcaaggacgtgctgctgctggggaatgactatattgtccccaggcactgccctgaactggccgagatgagtagagtgtctatccgcatcctggatgaactggtgctgccattccaggagctgcagattgacgataacgaatacgcatacctgaaagctatcatctttttcgaccccgacgccaagggactgtccgatcctggcaaaattaagcggctgaggagccaggtccaggtgagcctggaggactatatcaatgacagacagtacgattcccgagggcggtttggagaactgctgctgctgctgccaacactgcagtcaattacctggcagatgatcgagcagatccagttcattaaactgttcggcatggcaaagatcgacaacctgctgcaggagatgctgctgggagggtctcccagtgatgcccctcatgctcaccacccactgcatccccacctgatgcaggaacatatgggcactaatgtgatcgtcgcaaacacaatgcctacccacctgagcaatggacagatgtgtgagtggccacgccccaggggccaggccgcaactcctgaaaccccacagccctcccctccagggggatctggcagcgagccctacagactgctgcctggagctgtggcaacaattgtgaagccactgtcagccatcccccagcctaccattactcggcaggaagtcatctga

SEQ ID NO: 612 - RNA, 1425 nt, synthetic construct
  misc_feature 1..1425: note = CDS (opt28) from Homo sapiens__NP_000448.3__HNF4A(1-474)(K458R)
  source 1..1425: mol_type = other RNA
atgcggctgagcaagaccctggtggacatggatatggcagactactccgccgctctggatccagcatatacaactctggagttcgaaaacgtccaggtgctgaccatgggaaatgacacatctccctcagagggcactaacctgaatgcccctaacagtctgggggtgagcgctctgtgcgcaatctgcggagacagggccaccggcaaacactacggggcttcctcttgtgatggatgcaagggctttttcagacgcagcgtccggaaaaatcatatgtactcatgccgatttagtaggcagtgcgtggtggacaaggacaagagaaaccagtgccgctattgtcggctgaaaaagtgcttcagggcaggaatgaaaaaggaagccgtccagaatgagagagatcgaatttccacacggcgcagctcttacgaagacagctccctgccatcaatcaacgctctgctgcaggcagaggtgctgagtaggcagatcactagccccgtgtctgggattaacggcgatatcagagccaagaaaattgcatccatcgctgacgtctgcgaaagcatgaaggagcagctgctggtgctggtggagtgggccaaatacatccctgcattttgcgaactgccactggacgatcaggtcgctctgctgcgggcccacgcaggagagcatctgctgctgggcgctaccaagcgatcaatggtgttcaaggacgtgctgctgctggggaatgactatattgtccccaggcactgccctgaactggccgagatgagtagagtgtctatccgcatcctggatgaactggtgctgccattccaggagctgcagattgacgataacgaatacgcatacctgaaagctatcatctttttcgaccccgacgccaagggactgtccgatcctggcaaaattaagcggctgaggagccaggtccaggtgagcctggaggactatatcaatgacagacagtacgattcccgagggcggtttggagaactgctgctgctgctgccaacactgcagtcaattacctggcagatgatcgagcagatccagttcattaaactgttcggcatggcaaagatcgacaacctgctgcaggagatgctgctgggagggtctcccagtgatgcccctcatgctcaccacccactgcatccccacctgatgcaggaacatatgggcactaatgtgatcgtcgcaaacacaatgcctacccacctgagcaatggacagatgtgtgagtggccacgccccaggggccaggccgcaactcctgaaaccccacagccctcccctccagggggatctggcagcgagccctacaagctgctgcctggagctgtggcaacaattgtgagaccactgtcagccatcccccagcctaccattactaaacaggaagtcatctga

SEQ ID NO: 613 - RNA, 1425 nt, synthetic construct
  misc_feature 1..1425: note = CDS (opt28) from Homo sapiens__NP_000448.3__HNF4A(1-474)(K106R_K108R_K126R_K127R)
  source 1..1425: mol_type = other RNA
atgcggctgagcaagaccctggtggacatggatatggcagactactccgccgctctggatccagcatatacaactctggagttcgaaaacgtccaggtgctgaccatgggaaatgacacatctccctcagagggcactaacctgaatgcccctaacagtctgggggtgagcgctctgtgcgcaatctgcggagacagggccaccggcaaacactacggggcttcctcttgtgatggatgcaagggctttttcagacgcagcgtccggaaaaatcatatgtactcatgccgatttagtaggcagtgcgtggtggacagagaccgccggaaccagtgcaggtattgtagactgaagaagtgcttccgagcaggaatgcggcgcgaagccgtccagaatgagagggatagaatttccacacggcgaagctcttacgaagacagctccctgccatcaatcaacgctctgctgcaggcagaggtgctgagtaggcagatcactagccccgtgtctgggattaacggcgatatcagagccaaaaagattgcatccatcgctgacgtctgcgaaagcatgaaagagcagctgctggtgctggtggagtgggccaagtacatccctgcattttgcgaactgccactggacgatcaggtcgctctgctgcgcgcccacgcaggagagcatctgctgctgggcgctaccaagcggtcaatggtgttcaaagacgtgctgctgctggggaatgactatattgtccccaggcactgccctgaactggccgagatgagtagagtgtctatccgaatcctggatgaactggtgctgccattccaggagctgcagattgacgataacgaatacgcatacctgaaggctatcatctttttcgaccccgacgccaaaggactgtccgatcctggcaagattaagcggctgcgcagccaggtccaggtgagcctggaggactatatcaatgacaggcagtacgattccagagggcggtttggagaactgctgctgctgctgccaacactgcagtcaattacctggcagatgatcgagcagatccagttcattaaactgttcggcatggcaaagatcgacaacctgctgcaggagatgctgctgggagggtctcccagtgatgcccctcatgctcaccacccactgcatccccacctgatgcaggaacatatgggcactaatgtgatcgtcgcaaacacaatgcctacccacctgagcaatggacagatgtgtgagtggccacgccccaggggccaggccgcaactcctgaaaccccacagccctcccctccagggggatctggcagcgagccctacaaactgctgcctggagctgtggcaacaattgtgaagccactgtcagccatcccccagcctaccattactaaacaggaagtcatctga

SEQ ID NO: 614 - RNA, 1425 nt, synthetic construct
  misc_feature 1..1425: note = CDS (opt28) from Homo sapiens__NP_000448.3__HNF4A(1-474)(E285Q)
  source 1..1425: mol_type = other RNA
atgcggctgagcaagaccctggtggacatggatatggcagactactccgccgctctggatccagcatatacaactctggagttcgaaaacgtccaggtgctgaccatgggaaatgacacatctccctcagagggcactaacctgaatgcccctaacagtctgggggtgagcgctctgtgcgcaatctgcggagacagggccaccggcaaacactacggggcttcctcttgtgatggatgcaagggctttttcagacgcagcgtccggaaaaatcatatgtactcatgccgatttagtaggcagtgcgtggtggacaaggacaagagaaaccagtgccgctattgtcggctgaaaaagtgcttcagggcaggaatgaaaaaggaagccgtccagaatgagagagatcgaatttccacacggcgcagctcttacgaagacagctccctgccatcaatcaacgctctgctgcaggcagaggtgctgagtaggcagatcactagccccgtgtctgggattaacggcgatatcagagccaagaaaattgcatccatcgctgacgtctgcgaaagcatgaaggagcagctgctggtgctggtggagtgggccaaatacatccctgcattttgcgaactgccactggacgatcaggtcgctctgctgcgggcccacgcaggagagcatctgctgctgggcgctaccaagcgatcaatggtgttcaaggacgtgctgctgctggggaatgactatattgtccccaggcactgccctgaactggccgagatgagtagagtgtctatccgcatcctggatgaactggtgctgccattccaggagctgcagattgacgataaccagtacgcatacctgaaagctatcatctttttcgaccccgacgccaagggactgtccgatcctggcaaaattaagcggctgaggagccaggtccaggtgagcctggaagactatatcaatgacagacagtacgattcccgagggcggtttggagagctgctgctgctgctgccaacactgcagtcaattacctggcagatgatcgaacagatccagttcattaaactgttcggcatggcaaagatcgacaacctgctgcaggagatgctgctgggagggtctcccagtgatgcccctcatgctcaccacccactgcatccccacctgatgcaggagcatatgggcactaatgtgatcgtcgcaaacacaatgcctacccacctgagcaatggacagatgtgtgaatggccacgccccaggggccaggccgcaactcctgagaccccacagccctcccctccagggggatctggcagcgaaccctacaagctgctgcctggagctgtggcaacaattgtgaaaccactgtcagccatcccccagcctaccattactaagcaggaggtcatctga

SEQ ID NO: 615 - RNA, 1425 nt, synthetic construct
  misc_feature 1..1425: note = CDS (opt28) from Homo sapiens__NP_000448.3__HNF4A(1-474)(T166E)
  source 1..1425: mol_type = other RNA
atgcggctgagcaagaccctggtggacatggatatggcagactactccgccgctctggatccagcatatacaactctggagttcgaaaacgtccaggtgctgaccatgggaaatgacacatctccctcagagggcactaacctgaatgcccctaacagtctgggggtgagcgctctgtgcgcaatctgcggagacagggccaccggcaaacactacggggcttcctcttgtgatggatgcaagggctttttcagacgcagcgtccggaaaaatcatatgtactcatgccgatttagtaggcagtgcgtggtggacaaggacaagagaaaccagtgccgctattgtcggctgaaaaagtgcttcagggcaggaatgaaaaaggaagccgtccagaatgagagagatcgaatttccacacggcgcagctcttacgaagacagctccctgccatcaatcaacgctctgctgcaggcagaggtgctgagtaggcagatcgaaagccccgtgtctgggattaacggcgatatcagagccaagaaaattgcatccatcgctgacgtctgcgagagcatgaaggagcagctgctggtgctggtggaatgggccaaatacatccctgcattttgcgagctgccactggacgatcaggtcgctctgctgcgggcccacgcaggagaacatctgctgctgggcgctactaagcgatcaatggtgttcaaggacgtgctgctgctggggaatgactatattgtccccaggcactgccctgagctggccgaaatgagtagagtgtctatccgcatcctggatgagctggtgctgccattccaggaactgcagattgacgataacgagtacgcatacctgaaagctatcatctttttcgaccccgacgccaagggactgtccgatcctggcaaaattaagcggctgaggagccaggtccaggtgagcctggaagactatatcaatgacagacagtacgattcccgagggcggtttggagagctgctgctgctgctgccaaccctgcagtcaattacatggcagatgatcgagcagatccagttcattaaactgttcggcatggcaaagatcgacaacctgctgcaggaaatgctgctgggagggtctcccagtgatgcccctcatgctcaccacccactgcatccccacctgatgcaggagcatatgggcaccaatgtgatcgtcgcaaacactatgcctacacacctgagcaatggacagatgtgtgaatggccacgccccaggggccaggccgcaacccctgagactccacagccctcccctccagggggatctggcagcgaaccctacaagctgctgcctggagctgtggcaaccattgtgaaaccactgtcagccatcccccagcctacaattaccaagcaggaggtcatctga

SEQ ID NO: 616 - RNA, 1425 nt, synthetic construct
  misc_feature 1..1425: note = CDS (opt28) from Homo sapiens__NP_000448.3__HNF4A(1-474)(S148A)
  source 1..1425: mol_type = other RNA
atgcggctgagcaagaccctggtggacatggatatggcagactactccgccgctctggatccagcatatacaactctggagttcgaaaacgtccaggtgctgaccatgggaaatgacacatctccctcagagggcactaacctgaatgcccctaacagtctgggggtgagcgctctgtgcgcaatctgcggagacagggccaccggcaaacactacggggcttcctcttgtgatggatgcaagggctttttcagacgcagcgtccggaaaaatcatatgtactcatgccgatttagtaggcagtgcgtggtggacaaggacaagagaaaccagtgccgctattgtcggctgaaaaagtgcttcagggcaggaatgaaaaaggaagccgtccagaatgagagagatcgaatttccacacggcgcagctcttacgaagacagcgctctgccatccatcaacgcactgctgcaggccgaggtgctgtcaaggcagatcaccagtcccgtgagcgggattaacggcgatatcagagcaaagaaaattgcttctatcgccgacgtctgcgaatccatgaaggagcagctgctggtgctggtggagtgggcaaaatacatccctgctttttgcgaactgccactggacgatcaggtcgccctgctgcgggcacacgctggagagcatctgctgctgggcgccactaagcgaagcatggtgttcaaggacgtgctgctgctggggaatgactatattgtccccaggcactgccctgaactggcagagatgtcaagagtgagtatccgcatcctggatgaactggtgctgccattccaggagctgcagattgacgataacgaatacgcttacctgaaagccatcatctttttcgaccccgacgcaaagggactgtctgatcctggcaaaattaagcggctgaggtcccaggtccaggtgagcctggaggactatatcaatgacagacagtacgatagccgagggcggtttggagaactgctgctgctgctgccaacactgcagtccattacctggcagatgatcgagcagatccagttcattaaactgttcggcatggccaagatcgacaacctgctgcaggagatgctgctgggagggtcaccctctgatgctcctcatgcacaccacccactgcatccccacctgatgcaggaacatatgggcactaatgtgatcgtcgccaacacaatgcctacccacctgagtaatggacagatgtgtgagtggccacgccccaggggccaggcagctactcctgaaaccccacagcccagccctccagggggatccggctctgagccctacaagctgctgcctggagcagtggccacaattgtgaaaccactgagcgctatcccccagcctaccattactaagcaggaagtcatctga

SEQ ID NO: 617 - RNA, 1425 nt, synthetic construct
  misc_feature 1..1425: note = CDS (opt28) from Homo sapiens__NP_000448.3__HNF4A(1-474)(S148E)
  source 1..1425: mol_type = other RNA
atgcggctgagcaagaccctggtggacatggatatggcagactactccgccgctctggatccagcatatacaactctggagttcgaaaacgtccaggtgctgaccatgggaaatgacacatctccctcagagggcactaacctgaatgcccctaacagtctgggggtgagcgctctgtgcgcaatctgcggagacagggccaccggcaaacactacggggcttcctcttgtgatggatgcaagggctttttcagacgcagcgtccggaaaaatcatatgtactcatgccgatttagtaggcagtgcgtggtggacaaggacaagagaaaccagtgccgctattgtcggctgaaaaagtgcttcagggcaggaatgaaaaaggaagccgtccagaatgagagagatcgaatttccacacggcgcagctcttacgaagacagcgagctgccatccatcaacgctctgctgcaggcagaagtgctgtcaaggcagatcaccagtcccgtgagcgggattaacggcgatatcagagccaagaaaattgcatctatcgctgacgtctgcgagtccatgaaggagcagctgctggtgctggtggaatgggccaaatacatccctgcattttgcgagctgccactggacgatcaggtcgctctgctgcgggcccacgcaggagaacatctgctgctgggcgctactaagcgaagcatggtgttcaaggacgtgctgctgctggggaatgactatattgtccccaggcactgccctgagctggccgaaatgtcaagagtgagtatccgcatcctggatgagctggtgctgccattccaggaactgcagattgacgataacgagtacgcatacctgaaagctatcatctttttcgaccccgacgccaagggactgtctgatcctggcaaaattaagcggctgaggtcccaggtccaggtgagcctggaagactatatcaatgacagacagtacgatagccgagggcggtttggagagctgctgctgctgctgccaacactgcagtccattacctggcagatgatcgagcagatccagttcattaaactgttcggcatggcaaagatcgacaacctgctgcaggaaatgctgctgggagggtcaccctctgatgcccctcatgctcaccacccactgcatccccacctgatgcaggagcatatgggcactaatgtgatcgtcgcaaacacaatgcctacccacctgagtaatggacagatgtgtgaatggccacgccccaggggccaggccgcaactcctgagaccccacagcccagccctccagggggatccggctctgaaccctacaagctgctgcctggagctgtggcaacaattgtgaaaccactgagcgccatcccccagcctaccattactaagcaggaggtcatctga

SEQ ID NO: 618 - RNA, 1425 nt, synthetic construct
  misc_feature 1..1425: note = CDS (opt28) from Homo sapiens__NP_000448.3__HNF4A(1-474)(S183A)
  source 1..1425: mol_type = other RNA
atgcggctgagcaagaccctggtggacatggatatggcagactactccgccgctctggatccagcatatacaactctggagttcgaaaacgtccaggtgctgaccatgggaaatgacacatctccctcagagggcactaacctgaatgcccctaacagtctgggggtgagcgctctgtgcgcaatctgcggagacagggccaccggcaaacactacggggcttcctcttgtgatggatgcaagggctttttcagacgcagcgtccggaaaaatcatatgtactcatgccgatttagtaggcagtgcgtggtggacaaggacaagagaaaccagtgccgctattgtcggctgaaaaagtgcttcagggcaggaatgaaaaaggaagccgtccagaatgagagagatcgaatttccacacggcgcagctcttacgaagacagctccctgccatcaatcaacgctctgctgcaggcagaggtgctgagtaggcagatcactagccccgtgtctgggattaacggcgatatcagagccaagaaaattgcagctatcgccgacgtctgcgaatccatgaaggagcagctgctggtgctggtggagtgggcaaaatacatccctgctttttgcgaactgccactggacgatcaggtcgccctgctgcgggcacacgctggagagcatctgctgctgggcgccaccaagcgaagcatggtgttcaaggacgtgctgctgctggggaatgactatattgtccccaggcactgccctgaactggcagagatgtcaagagtgagtatccgcatcctggatgaactggtgctgccattccaggagctgcagattgacgataacgaatacgcttacctgaaagccatcatctttttcgaccccgacgcaaagggactgtctgatcctggcaaaattaagcggctgaggtcccaggtccaggtgagcctggaggactatatcaatgacagacagtacgatagccgagggcggtttggagaactgctgctgctgctgccaacactgcagtccattacctggcagatgatcgagcagatccagttcattaaactgttcggcatggccaagatcgacaacctgctgcaggagatgctgctgggagggtcaccctctgatgctcctcatgcacaccacccactgcatccccacctgatgcaggaacatatgggcactaatgtgatcgtcgccaacacaatgcctacccacctgagtaatggacagatgtgtgagtggccacgccccaggggccaggcagctactcctgaaaccccacagcccagccctccagggggatccggctctgagccctacaagctgctgcctggagcagtggccacaattgtgaaaccactgagcgctatcccccagcctaccattactaagcaggaagtcatctga

SEQ ID NO: 619 - RNA, 1425 nt, synthetic construct
  misc_feature 1..1425: note = CDS (opt28) from Homo sapiens__NP_000448.3__HNF4A(1-474)(S183E)
  source 1..1425: mol_type = other RNA
atgcggctgagcaagaccctggtggacatggatatggcagactactccgccgctctggatccagcatatacaactctggagttcgaaaacgtccaggtgctgaccatgggaaatgacacatctccctcagagggcactaacctgaatgcccctaacagtctgggggtgagcgctctgtgcgcaatctgcggagacagggccaccggcaaacactacggggcttcctcttgtgatggatgcaagggctttttcagacgcagcgtccggaaaaatcatatgtactcatgccgatttagtaggcagtgcgtggtggacaaggacaagagaaaccagtgccgctattgtcggctgaaaaagtgcttcagggcaggaatgaaaaaggaagccgtccagaatgagagagatcgaatttccacacggcgcagctcttacgaagacagctccctgccatcaatcaacgctctgctgcaggcagaggtgctgagtaggcagatcactagccccgtgtctgggattaacggcgatatcagagccaagaaaattgcagaaatcgctgacgtctgcgagtccatgaaggagcagctgctggtgctggtggaatgggccaaatacatccctgcattttgcgagctgccactggacgatcaggtcgctctgctgcgggcccacgcaggagaacatctgctgctgggcgctaccaagcgaagcatggtgttcaaggacgtgctgctgctggggaatgactatattgtccccaggcactgccctgagctggccgaaatgtcaagagtgagtatccgcatcctggatgagctggtgctgccattccaggaactgcagattgacgataacgagtacgcatacctgaaagctatcatctttttcgaccccgacgccaagggactgtctgatcctggcaaaattaagcggctgaggtcccaggtccaggtgagcctggaagactatatcaatgacagacagtacgatagccgagggcggtttggagagctgctgctgctgctgccaacactgcagtccattacctggcagatgatcgagcagatccagttcattaaactgttcggcatggcaaagatcgacaacctgctgcaggaaatgctgctgggagggtcaccctctgatgcccctcatgctcaccacccactgcatccccacctgatgcaggagcatatgggcactaatgtgatcgtcgcaaacacaatgcctacccacctgagtaatggacagatgtgtgaatggccacgccccaggggccaggccgcaactcctgagaccccacagcccagccctccagggggatccggctctgaaccctacaagctgctgcctggagctgtggcaacaattgtgaaaccactgagcgccatcccccagcctaccattactaagcaggaggtcatctga

SEQ ID NO: 620 - RNA, 1425 nt, synthetic construct
  misc_feature 1..1425: note = CDS (opt28) from Homo sapiens__NP_000448.3__HNF4A(1-474)(S461A)
  source 1..1425: mol_type = other RNA
atgcggctgagcaagaccctggtggacatggatatggcagactactccgccgctctggatccagcatatacaactctggagttcgaaaacgtccaggtgctgaccatgggaaatgacacatctccctcagagggcactaacctgaatgcccctaacagtctgggggtgagcgctctgtgcgcaatctgcggagacagggccaccggcaaacactacggggcttcctcttgtgatggatgcaagggctttttcagacgcagcgtccggaaaaatcatatgtactcatgccgatttagtaggcagtgcgtggtggacaaggacaagagaaaccagtgccgctattgtcggctgaaaaagtgcttcagggcaggaatgaaaaaggaagccgtccagaatgagagagatcgaatttccacacggcgcagctcttacgaagacagctccctgccatcaatcaacgctctgctgcaggcagaggtgctgagtaggcagatcactagccccgtgtctgggattaacggcgatatcagagccaagaaaattgcatccatcgctgacgtctgcgaaagcatgaaggagcagctgctggtgctggtggagtgggccaaatacatccctgcattttgcgaactgccactggacgatcaggtcgctctgctgcgggcccacgcaggagagcatctgctgctgggcgctaccaagcgatcaatggtgttcaaggacgtgctgctgctggggaatgactatattgtccccaggcactgccctgaactggccgagatgagtagagtgtctatccgcatcctggatgaactggtgctgccattccaggagctgcagattgacgataacgaatacgcatacctgaaagctatcatctttttcgaccccgacgccaagggactgtccgatcctggcaaaattaagcggctgaggagccaggtccaggtgagcctggaggactatatcaatgacagacagtacgattcccgagggcggtttggagaactgctgctgctgctgccaacactgcagtcaattacctggcagatgatcgagcagatccagttcattaaactgttcggcatggcaaagatcgacaacctgctgcaggagatgctgctgggagggtctcccagtgatgcccctcatgctcaccacccactgcatccccacctgatgcaggaacatatgggcactaatgtgatcgtcgcaaacacaatgcctacccacctgagcaatggacagatgtgtgagtggccacgccccaggggccaggccgcaactcctgaaaccccacagccctcccctccagggggatctggcagcgagccctacaagctgctgcctggagctgtggcaacaattgtgaaaccactggccgctatcccccagcctaccattactaagcaggaagtcatctga

SEQ ID NO: 621 - RNA, 1425 nt, synthetic construct
  misc_feature 1..1425: note = CDS (opt28) from Homo sapiens__NP_000448.3__HNF4A(1-474)(S461E)
  source 1..1425: mol_type = other RNA
atgcggctgagcaagaccctggtggacatggatatggcagactactccgccgctctggatccagcatatacaactctggagttcgaaaacgtccaggtgctgaccatgggaaatgacacatctccctcagagggcactaacctgaatgcccctaacagtctgggggtgagcgctctgtgcgcaatctgcggagacagggccaccggcaaacactacggggcttcctcttgtgatggatgcaagggctttttcagacgcagcgtccggaaaaatcatatgtactcatgccgatttagtaggcagtgcgtggtggacaaggacaagagaaaccagtgccgctattgtcggctgaaaaagtgcttcagggcaggaatgaaaaaggaagccgtccagaatgagagagatcgaatttccacacggcgcagctcttacgaagacagctccctgccatcaatcaacgctctgctgcaggcagaggtgctgagtaggcagatcactagccccgtgtctgggattaacggcgatatcagagccaagaaaattgcatccatcgctgacgtctgcgaaagcatgaaggagcagctgctggtgctggtggagtgggccaaatacatccctgcattttgcgaactgccactggacgatcaggtcgctctgctgcgggcccacgcaggagagcatctgctgctgggcgctaccaagcgatcaatggtgttcaaggacgtgctgctgctggggaatgactatattgtccccaggcactgccctgaactggccgagatgagtagagtgtctatccgcatcctggatgaactggtgctgccattccaggagctgcagattgacgataacgaatacgcatacctgaaagctatcatctttttcgaccccgacgccaagggactgtccgatcctggcaaaattaagcggctgaggagccaggtccaggtgagcctggaggactatatcaatgacagacagtacgattcccgagggcggtttggagaactgctgctgctgctgccaacactgcagtcaattacctggcagatgatcgagcagatccagttcattaaactgttcggcatggcaaagatcgacaacctgctgcaggagatgctgctgggagggtctcccagtgatgcccctcatgctcaccacccactgcatccccacctgatgcaggaacatatgggcactaatgtgatcgtcgcaaacacaatgcctacccacctgagcaatggacagatgtgtgagtggccacgccccaggggccaggccgcaactcctgaaaccccacagccctcccctccagggggatctggcagcgagccctacaagctgctgcctggagctgtggcaacaattgtgaaaccactggaagccatcccccagcctaccattactaagcaggaggtcatctga

SEQ ID NO: 622 - RNA, 1425 nt, synthetic construct
  misc_feature 1..1425: note = CDS (opt28) from Homo sapiens__NP_000448.3__HNF4A(1-474)(S142A_S143A_S313A)
  source 1..1425: mol_type = other RNA
atgcggctgagcaagaccctggtggacatggatatggcagactactccgccgctctggatccagcatatacaactctggagttcgaaaacgtccaggtgctgaccatgggaaatgacacatctccctcagagggcactaacctgaatgcccctaacagtctgggggtgagcgctctgtgcgcaatctgcggagacagggccaccggcaaacactacggggcttcctcttgtgatggatgcaagggctttttcagacgcagcgtccggaaaaatcatatgtactcatgccgatttagtaggcagtgcgtggtggacaaggacaagagaaaccagtgccgctattgtcggctgaaaaagtgcttcagggcaggaatgaaaaaggaagccgtccagaatgagagagatcgaatttccacacggcgcgctgcatacgaagacagctctctgccaagcatcaacgccctgctgcaggcagaggtgctgtccaggcagatcacttcacccgtgagtgggattaacggcgatatcagagctaagaaaattgccagcatcgcagacgtctgcgaatctatgaaggagcagctgctggtgctggtggagtgggctaaatacatccctgccttttgcgaactgccactggacgatcaggtcgcactgctgcgggctcacgccggagagcatctgctgctgggcgcaaccaagcgatccatggtgttcaaggacgtgctgctgctggggaatgactatattgtccccaggcactgccctgaactggctgagatgagcagagtgtcaatccgcatcctggatgaactggtgctgccattccaggagctgcagattgacgataacgaatacgcctacctgaaagcaatcatctttttcgaccccgacgccaagggactgagtgatcctggcaaaattaagcggctgagggctcaggtccaggtgtctctggaggactatatcaatgacagacagtacgattcccgagggcggtttggagaactgctgctgctgctgccaacactgcagagcattacctggcagatgatcgagcagatccagttcattaaactgttcggcatggcaaagatcgacaacctgctgcaggagatgctgctgggagggagcccctccgatgcccctcatgcacaccacccactgcatccccacctgatgcaggaacatatgggcactaatgtgatcgtcgctaacacaatgcctacccacctgtcaaatggacagatgtgtgagtggccacgccccaggggccaggcagccactcctgaaaccccacagccctctcctccagggggaagtggcagcgagccctacaagctgctgcctggagctgtggcaacaattgtgaaaccactgtccgccatcccccagcctaccattactaagcaggaagtcatctga

SEQ ID NO: 623 - RNA, 1425 nt, synthetic construct
  misc_feature 1..1425: note = CDS (opt28) from Homo sapiens__NP_000448.3__HNF4A(1-474)(S142A_S143A_S313A_K458R)
  source 1..1425: mol_type = other RNA
atgcggctgagcaagaccctggtggacatggatatggcagactactccgccgctctggatccagcatatacaactctggagttcgaaaacgtccaggtgctgaccatgggaaatgacacatctccctcagagggcactaacctgaatgcccctaacagtctgggggtgagcgctctgtgcgcaatctgcggagacagggccaccggcaaacactacggggcttcctcttgtgatggatgcaagggctttttcagacgcagcgtccggaaaaatcatatgtactcatgccgatttagtaggcagtgcgtggtggacaaggacaagagaaaccagtgccgctattgtcggctgaaaaagtgcttcagggcaggaatgaaaaaggaagccgtccagaatgagagagatcgaatttccacacggcgcgctgcatacgaagacagctctctgccaagcatcaacgccctgctgcaggcagaggtgctgtccaggcagatcacttcacccgtgagtgggattaacggcgatatcagagctaagaaaattgccagcatcgcagacgtctgcgaatctatgaaggagcagctgctggtgctggtggagtgggctaaatacatccctgccttttgcgaactgccactggacgatcaggtcgcactgctgcgggctcacgccggagagcatctgctgctgggcgcaaccaagcgatccatggtgttcaaggacgtgctgctgctggggaatgactatattgtccccaggcactgccctgaactggctgagatgagcagagtgtcaatccgcatcctggatgaactggtgctgccattccaggagctgcagattgacgataacgaatacgcctacctgaaagcaatcatctttttcgaccccgacgccaagggactgagtgatcctggcaaaattaagcggctgagggctcaggtccaggtgtctctggaggactatatcaatgacagacagtacgattcccgagggcggtttggagaactgctgctgctgctgccaacactgcagagcattacctggcagatgatcgagcagatccagttcattaaactgttcggcatggcaaagatcgacaacctgctgcaggagatgctgctgggagggagcccctccgatgcccctcatgcacaccacccactgcatccccacctgatgcaggaacatatgggcactaatgtgatcgtcgctaacacaatgcctacccacctgtcaaatggacagatgtgtgagtggccacgccccaggggccaggcagccactcctgaaaccccacagccctctcctccagggggaagtggcagcgagccctacaagctgctgcctggagctgtggcaacaattgtgagaccactgtccgccatcccccagcctaccattactaaacaggaagtcatctga

SEQ ID NO: 624 - RNA, 1425 nt, synthetic construct
  misc_feature 1..1425: note = CDS (opt28) from Homo sapiens__NP_000448.3__HNF4A(1-474)(S142A_S143A_S167A_S313A_ S378A_T429A_T432A_S436A_K458R)
  source 1..1425: mol_type = other RNA
atgcggctgagcaagaccctggtggacatggatatggcagactactccgccgctctggatccagcatatacaactctggagttcgaaaacgtccaggtgctgaccatgggaaatgacacatctccctcagagggcactaacctgaatgcccctaacagtctgggggtgagcgctctgtgcgcaatctgcggagacagggccaccggcaaacactacggggcttcctcttgtgatggatgcaagggctttttcagacgcagcgtccggaaaaatcatatgtactcatgccgatttagtaggcagtgcgtggtggacaaggacaagagaaaccagtgccgctattgtcggctgaaaaagtgcttcagggcaggaatgaaaaaggaagccgtccagaatgagagagatcgaatttccacacggcgcgctgcatacgaagacagctctctgccaagcatcaacgccctgctgcaggcagaggtgctgtccaggcagatcactgctcccgtgtcagggattaacggcgatatcagagccaagaaaattgcaagtatcgctgacgtctgcgaaagcatgaaggagcagctgctggtgctggtggagtgggccaaatacatccctgcattttgcgaactgccactggacgatcaggtcgctctgctgcgggcccacgcaggagagcatctgctgctgggcgctaccaagcgatctatggtgttcaaggacgtgctgctgctggggaatgactatattgtccccaggcactgccctgaactggccgagatgtccagagtgagcatccgcatcctggatgaactggtgctgccattccaggagctgcagattgacgataacgaatacgcatacctgaaagccatcatctttttcgaccccgacgctaagggactgtcagatcctggcaaaattaagcggctgagggcacaggtccaggtgagtctggaggactatatcaatgacagacagtacgattctcgagggcggtttggagaactgctgctgctgctgccaacactgcagtccattacctggcagatgatcgagcagatccagttcattaaactgttcggcatggccaagatcgacaacctgctgcaggagatgctgctgggaggggcacccagcgatgctcctcatgcacaccacccactgcatccccacctgatgcaggaacatatgggcactaatgtgatcgtcgccaacacaatgcctacccacctgagcaatggacagatgtgtgagtggccacgccccaggggccaggctgcagcccctgaagctccacagcccgcacctccagggggatccggctcagagccctacaagctgctgcctggagccgtggctactattgtgagaccactgtctgcaatcccccagcctaccattacaaaacaggaagtcatctga

SEQ ID NO: 625 - RNA, 1425 nt, synthetic construct
  misc_feature 1..1425: note = CDS (opt28) from Homo sapiens__NP_000448.3__HNF4A(1-474)(S142A_S143A_S148A_S167A_ S313A_S378A_T429A_T432A_S436A_K458R)
  source 1..1425: mol_type = other RNA
atgcggctgagcaagaccctggtggacatggatatggcagactactccgccgctctggatccagcatatacaactctggagttcgaaaacgtccaggtgctgaccatgggaaatgacacatctccctcagagggcactaacctgaatgcccctaacagtctgggggtgagcgctctgtgcgcaatctgcggagacagggccaccggcaaacactacggggcttcctcttgtgatggatgcaagggctttttcagacgcagcgtccggaaaaatcatatgtactcatgccgatttagtaggcagtgcgtggtggacaaggacaagagaaaccagtgccgctattgtcggctgaaaaagtgcttcagggcaggaatgaaaaaggaagccgtccagaatgagagagatcgaatttccacacggcgcgctgcatacgaagacagcgccctgccatctatcaacgcactgctgcaggctgaggtgctgagcaggcagatcactgcccccgtgtccgggattaacggcgatatcagagcaaagaaaattgcttcaatcgccgacgtctgcgaaagtatgaaggagcagctgctggtgctggtggagtgggcaaaatacatccctgctttttgcgaactgccactggacgatcaggtcgccctgctgcgggcacacgctggagagcatctgctgctgggcgccaccaagcgaagcatggtgttcaaggacgtgctgctgctggggaatgactatattgtccccaggcactgccctgaactggcagagatgtctagagtgtccatccgcatcctggatgaactggtgctgccattccaggagctgcagattgacgataacgaatacgcctacctgaaagctatcatctttttcgaccccgacgcaaagggactgagcgatcctggcaaaattaagcggctgagggcccaggtccaggtgtcactggaggactatatcaatgacagacagtacgatagtcgagggcggtttggagaactgctgctgctgctgccaacactgcagtctattacctggcagatgatcgagcagatccagttcattaaactgttcggcatggcaaagatcgacaacctgctgcaggagatgctgctgggaggggctccctccgatgcacctcatgcccaccacccactgcatccccacctgatgcaggaacatatgggcactaatgtgatcgtcgctaacacaatgcctacccacctgagcaatggacagatgtgtgagtggccacgccccaggggccaggcagccgctcctgaagcaccacagcccgcccctccagggggaagcggctccgagccctacaagctgctgcctggagctgtggcaactattgtgagaccactgtcagccatcccccagcctaccattacaaaacaggaagtcatctga

SEQ ID NO: 626 - RNA, 1425 nt, synthetic construct
  misc_feature 1..1425: note = CDS (opt28) from Homo sapiens__NP_000448.3__HNF4A(1-474)(K106R_K108R_K126R_K127R_ S142A_S143A_S148A_S167A_S313A_S378A_T429A_T432A_S436A_K458R )
  source 1..1425: mol_type = other RNA
atgcggctgagcaagaccctggtggacatggatatggcagactactccgccgctctggatccagcatatacaactctggagttcgaaaacgtccaggtgctgaccatgggaaatgacacatctccctcagagggcactaacctgaatgcccctaacagtctgggggtgagcgctctgtgcgcaatctgcggagacagggccaccggcaaacactacggggcttcctcttgtgatggatgcaagggctttttcagacgcagcgtccggaaaaatcatatgtactcatgccgatttagtaggcagtgcgtggtggacagagaccgccggaaccagtgcaggtattgtagactgaagaagtgcttccgagcaggaatgcggcgcgaagccgtccagaatgagagggatagaatttccacacggcgagctgcatacgaagacagcgccctgccatctatcaacgcactgctgcaggctgaggtgctgagcaggcagatcactgcccccgtgtccgggattaacggcgatatcagagctaaaaagattgcatcaatcgccgacgtctgcgaaagtatgaaagagcagctgctggtgctggtggagtgggcaaagtacatccctgctttttgcgaactgccactggacgatcaggtcgccctgctgcgcgcacacgctggagagcatctgctgctgggcgccaccaagcggagcatggtgttcaaagacgtgctgctgctggggaatgactatattgtccccaggcactgccctgaactggcagagatgtctagagtgtccatccgaatcctggatgaactggtgctgccattccaggagctgcagattgacgataacgaatacgcctacctgaaggctatcatctttttcgaccccgacgcaaaaggactgagcgatcctggcaagattaagcggctgcgcgcccaggtccaggtgtcactggaggactatatcaatgacaggcagtacgatagtagagggcggtttggagaactgctgctgctgctgccaacactgcagtctattacctggcagatgatcgagcagatccagttcattaaactgttcggcatggcaaagatcgacaacctgctgcaggagatgctgctgggaggggctccctccgatgcacctcatgcccaccacccactgcatccccacctgatgcaggaacatatgggcactaatgtgatcgtcgctaacacaatgcctacccacctgagcaatggacagatgtgtgagtggccacgccccaggggccaggcagccgctcctgaagcaccacagcccgcccctccagggggaagcggctccgagccctacaaactgctgcctggagctgtggcaactattgtgagaccactgtcagccatcccccagcctaccattacaaagcaggaagtcatctga

SEQ ID NO: 627 - RNA, 1425 nt, synthetic construct
  misc_feature 1..1425: note = CDS (opt28) from Homo sapiens__NP_000448.3__HNF4A(1-474)(S142A_S143A_S148A_T166A_ S167A_S313A_S378A_T429A_T432A_S436A_K458R)
  source 1..1425: mol_type = other RNA
atgcggctgagcaagaccctggtggacatggatatggcagactactccgccgctctggatccagcatatacaactctggagttcgaaaacgtccaggtgctgaccatgggaaatgacacatctccctcagagggcactaacctgaatgcccctaacagtctgggggtgagcgctctgtgcgcaatctgcggagacagggccaccggcaaacactacggggcttcctcttgtgatggatgcaagggctttttcagacgcagcgtccggaaaaatcatatgtactcatgccgatttagtaggcagtgcgtggtggacaaggacaagagaaaccagtgccgctattgtcggctgaaaaagtgcttcagggcaggaatgaaaaaggaagccgtccagaatgagagagatcgaatttccacacggcgcgctgcatacgaagacagcgccctgccatctatcaacgcactgctgcaggctgaggtgctgagcaggcagatcgccgcacccgtgtccgggattaacggcgatatcagagctaagaaaattgcctcaatcgcagacgtctgcgaaagtatgaaggagcagctgctggtgctggtggagtgggctaaatacatccctgccttttgcgaactgccactggacgatcaggtcgcactgctgcgggctcacgccggagagcatctgctgctgggcgcaactaagcgaagcatggtgttcaaggacgtgctgctgctggggaatgactatattgtccccaggcactgccctgaactggccgagatgtctagagtgtccatccgcatcctggatgaactggtgctgccattccaggagctgcagattgacgataacgaatacgcttacctgaaagcaatcatctttttcgaccccgacgccaagggactgagcgatcctggcaaaattaagcggctgagggcacaggtccaggtgtcactggaggactatatcaatgacagacagtacgatagtcgagggcggtttggagaactgctgctgctgctgccaaccctgcagtctattacatggcagatgatcgagcagatccagttcattaaactgttcggcatggctaagatcgacaacctgctgcaggagatgctgctgggaggggcaccctccgatgcccctcatgctcaccacccactgcatccccacctgatgcaggaacatatgggcaccaatgtgatcgtcgcaaacactatgcctacacacctgagcaatggacagatgtgtgagtggccacgccccaggggccaggccgctgcacctgaagccccacagcccgctcctccagggggaagcggctccgagccctacaagctgctgcctggagcagtggccaccattgtgagaccactgtcagcaatcccccagcctactattaccaaacaggaagtcatctga

SEQ ID NO: 628 - RNA, 1425 nt, synthetic construct
  misc_feature 1..1425: note = CDS (opt28) from Homo sapiens__NP_000448.3__HNF4A(1-474)(S87A_S142A_S143A_S148A_T 166A_S167A_S313A_S378A_T429A_T432A_S436A_K458R)
  source 1..1425: mol_type = other RNA
atgcggctgagcaagaccctggtggacatggatatggcagactactccgccgctctggatccagcatatacaactctggagttcgaaaacgtccaggtgctgaccatgggaaatgacacatctccctcagagggcactaacctgaatgcccctaacagtctgggggtgagcgctctgtgcgcaatctgcggagacagggccaccggcaaacactacggggcttcctcttgtgatggatgcaagggctttttcagacgcgcagtccggaaaaatcatatgtacagctgccgattttcaaggcagtgcgtggtggacaaggacaagagaaaccagtgccgctattgtcggctgaaaaagtgcttcagggccggaatgaaaaaggaagctgtccagaatgagagagatcgaattagtacacggcgcgcagcctacgaagactccgcactgccaagcatcaacgctctgctgcaggccgaggtgctgtctaggcagatcgcagctcccgtgagcgggattaacggcgatatcagagccaagaaaattgcatccatcgctgacgtctgcgaatcaatgaaggagcagctgctggtgctggtggagtgggccaaatacatccctgcattttgcgaactgccactggacgatcaggtcgctctgctgcgggcccacgcaggagagcatctgctgctgggcgccactaagcgaagtatggtgttcaaggacgtgctgctgctggggaatgactatattgtccccaggcactgccctgaactggctgagatgagcagagtgtctatccgcatcctggatgaactggtgctgccattccaggagctgcagattgacgataacgaatacgcatacctgaaagccatcatctttttcgaccccgacgcaaagggactgtccgatcctggcaaaattaagcggctgagggctcaggtccaggtgagcctggaggactatatcaatgacagacagtacgattcacgagggcggtttggagaactgctgctgctgctgccaaccctgcagagtattacatggcagatgatcgagcagatccagttcattaaactgttcggcatggcaaagatcgacaacctgctgcaggagatgctgctgggaggggccccctctgatgctcctcatgcacaccacccactgcatccccacctgatgcaggaacatatgggcaccaatgtgatcgtcgccaacactatgcctacacacctgtccaatggacagatgtgtgagtggccacgccccaggggccaggctgcagcccctgaagctccacagcccgcacctccagggggaagcggcagcgagccctacaagctgctgcctggagccgtggcaaccattgtgagaccactgtccgctatcccccagcctactattaccaaacaggaagtcatctga

SEQ ID NO: 629 - RNA, 1425 nt, synthetic construct
  misc_feature 1..1425: note = CDS (opt28) from Homo sapiens__NP_000448.3__HNF4A(1-474)(S87A_K106R_K108R_K126R_K 127R_S142A_S143A_S148A_T166A_S167A_S313A_S378A_T429A_T432A_ S436A_K458R)
  source 1..1425: mol_type = other RNA
atgcggctgagcaagaccctggtggacatggatatggcagactactccgccgctctggatccagcatatacaactctggagttcgaaaacgtccaggtgctgaccatgggaaatgacacatctccctcagagggcactaacctgaatgcccctaacagtctgggggtgagcgctctgtgcgcaatctgcggagacagggccaccggcaaacactacggggcttcctcttgtgatggatgcaagggctttttcagacgcgcagtccggaaaaatcatatgtacagctgccgattttcaaggcagtgcgtggtggacagagaccgccggaaccagtgcaggtattgtagactgaagaagtgcttccgagccggaatgcggcgcgaagctgtccagaatgagagggatagaattagtacacggcgagcagcctacgaagactccgcactgccaagcatcaacgctctgctgcaggccgaggtgctgtctaggcagatcgcagctcccgtgagcgggattaacggcgatatcagagccaaaaagattgcatccatcgctgacgtctgcgaatcaatgaaagagcagctgctggtgctggtggagtgggccaagtacatccctgcattttgcgaactgccactggacgatcaggtcgctctgctgcgcgcccacgcaggagagcatctgctgctgggcgccactaagcggagtatggtgttcaaagacgtgctgctgctggggaatgactatattgtccccaggcactgccctgaactggctgagatgagcagagtgtctatccgaatcctggatgaactggtgctgccattccaggagctgcagattgacgataacgaatacgcatacctgaaggccatcatctttttcgaccccgacgcaaaaggactgtccgatcctggcaagattaagcggctgcgcgctcaggtccaggtgagcctggaggactatatcaatgacaggcagtacgattcaagagggcggtttggagaactgctgctgctgctgccaaccctgcagagtattacatggcagatgatcgagcagatccagttcattaaactgttcggcatggcaaagatcgacaacctgctgcaggagatgctgctgggaggggccccctctgatgctcctcatgcacaccacccactgcatccccacctgatgcaggaacatatgggcaccaatgtgatcgtcgccaacactatgcctacacacctgtccaatggacagatgtgtgagtggccacgccccaggggccaggctgcagcccctgaagctccacagcccgcacctccagggggaagcggcagcgagccctacaaactgctgcctggagccgtggcaaccattgtgagaccactgtccgctatcccccagcctactattaccaagcaggaagtcatctga

SEQ ID NO: 630 - RNA, 1425 nt, synthetic construct
  misc_feature 1..1425: note = CDS (opt28) from Homo sapiens__NP_000448.3__HNF4A(1-474)(S87A_K106R_K108R_K126R_K 127R)
  source 1..1425: mol_type = other RNA
atgcggctgagcaagaccctggtggacatggatatggcagactactccgccgctctggatccagcatatacaactctggagttcgaaaacgtccaggtgctgaccatgggaaatgacacatctccctcagagggcactaacctgaatgcccctaacagtctgggggtgagcgctctgtgcgcaatctgcggagacagggccaccggcaaacactacggggcttcctcttgtgatggatgcaagggctttttcagacgcgcagtccggaaaaatcatatgtacagctgccgattttcaaggcagtgcgtggtggacagagaccgccggaaccagtgcaggtattgtagactgaagaagtgcttccgagccggaatgcggcgcgaagctgtccagaatgagagggatagaattagtacacggcgatccagctacgaagactctagcctgccatccatcaacgcactgctgcaggccgaggtgctgtcaaggcagatcaccagtcccgtgagcgggattaacggcgatatcagagctaaaaagattgcatctatcgccgacgtctgcgaatccatgaaagagcagctgctggtgctggtggagtgggcaaagtacatccctgctttttgcgaactgccactggacgatcaggtcgccctgctgcgcgcacacgctggagagcatctgctgctgggcgccactaagcggagcatggtgttcaaagacgtgctgctgctggggaatgactatattgtccccaggcactgccctgaactggcagagatgtcaagagtgagtatccgaatcctggatgaactggtgctgccattccaggagctgcagattgacgataacgaatacgcttacctgaaggccatcatctttttcgaccccgacgcaaaaggactgtctgatcctggcaagattaagcggctgcgctcccaggtccaggtgagcctggaggactatatcaatgacaggcagtacgatagcagagggcggtttggagaactgctgctgctgctgccaacactgcagtccattacctggcagatgatcgagcagatccagttcattaaactgttcggcatggccaagatcgacaacctgctgcaggagatgctgctgggagggtcaccctctgatgctcctcatgcacaccacccactgcatccccacctgatgcaggaacatatgggcactaatgtgatcgtcgccaacacaatgcctacccacctgagtaatggacagatgtgtgagtggccacgccccaggggccaggcagctactcctgaaaccccacagcccagccctccagggggatccggctctgagccctacaaactgctgcctggagcagtggccacaattgtgaagccactgagcgctatcccccagcctaccattactaaacaggaagtcatctga

SEQ ID NO: 631 - RNA, 1425 nt, synthetic construct
  misc_feature 1..1425: note = CDS (opt28) from Homo sapiens__NP_000448.3__HNF4A(1-474)(S87A_K106R_K108R_K126R_K 127R_S142A_S143A_S148A_T166A_S167A_S313A_S378A_T429A_T432A_ S436A_K458R_S461A)
  source 1..1425: mol_type = other RNA
atgcggctgagcaagaccctggtggacatggatatggcagactactccgccgctctggatccagcatatacaactctggagttcgaaaacgtccaggtgctgaccatgggaaatgacacatctccctcagagggcactaacctgaatgcccctaacagtctgggggtgagcgctctgtgcgcaatctgcggagacagggccaccggcaaacactacggggcttcctcttgtgatggatgcaagggctttttcagacgcgcagtccggaaaaatcatatgtacagctgccgattttcaaggcagtgcgtggtggacagagaccgccggaaccagtgcaggtattgtagactgaagaagtgcttccgagccggaatgcggcgcgaagctgtccagaatgagagggatagaattagtacacggcgagcagcctacgaagactccgcactgccaagcatcaacgctctgctgcaggccgaggtgctgtctaggcagatcgcagctcccgtgagcgggattaacggcgatatcagagccaaaaagattgcatccatcgctgacgtctgcgaatcaatgaaagagcagctgctggtgctggtggagtgggccaagtacatccctgcattttgcgaactgccactggacgatcaggtcgctctgctgcgcgcccacgcaggagagcatctgctgctgggcgccactaagcggagtatggtgttcaaagacgtgctgctgctggggaatgactatattgtccccaggcactgccctgaactggctgagatgagcagagtgtctatccgaatcctggatgaactggtgctgccattccaggagctgcagattgacgataacgaatacgcatacctgaaggccatcatctttttcgaccccgacgcaaaaggactgtccgatcctggcaagattaagcggctgcgcgctcaggtccaggtgagcctggaggactatatcaatgacaggcagtacgattcaagagggcggtttggagaactgctgctgctgctgccaaccctgcagagtattacatggcagatgatcgagcagatccagttcattaaactgttcggcatggcaaagatcgacaacctgctgcaggagatgctgctgggaggggccccctctgatgctcctcatgcacaccacccactgcatccccacctgatgcaggaacatatgggcaccaatgtgatcgtcgccaacactatgcctacacacctgtccaatggacagatgtgtgagtggccacgccccaggggccaggctgcagcccctgaagctccacagcccgcacctccagggggaagcggcagcgagccctacaaactgctgcctggagccgtggcaaccattgtgagaccactggctgccatcccccagcctactattaccaagcaggaagtcatctga

SEQ ID NO: 632 - RNA, 1425 nt, synthetic construct
  misc_feature 1..1425: note = CDS (opt28) from Homo sapiens__NP_000448.3__HNF4A(1-474)(S87A_K106R_K108R_K126R_K 127R_S142A_S143A_S148A_T166A_S167A_S313A_S378A_T429A_T432A_ S436A_K458R_S461E)
  source 1..1425: mol_type = other RNA
atgcggctgagcaagaccctggtggacatggatatggcagactactccgccgctctggatccagcatatacaactctggagttcgaaaacgtccaggtgctgaccatgggaaatgacacatctccctcagagggcactaacctgaatgcccctaacagtctgggggtgagcgctctgtgcgcaatctgcggagacagggccaccggcaaacactacggggcttcctcttgtgatggatgcaagggctttttcagacgcgcagtccggaaaaatcatatgtacagctgccgattttcaaggcagtgcgtggtggacagagaccgccggaaccagtgcaggtattgtagactgaagaagtgcttccgagccggaatgcggcgcgaagctgtccagaatgagagggatagaattagtacacggcgagcagcctacgaagactccgcactgccaagcatcaacgctctgctgcaggccgaggtgctgtctaggcagatcgcagctcccgtgagcgggattaacggcgatatcagagccaaaaagattgcatccatcgctgacgtctgcgaatcaatgaaagagcagctgctggtgctggtggagtgggccaagtacatccctgcattttgcgaactgccactggacgatcaggtcgctctgctgcgcgcccacgcaggagagcatctgctgctgggcgccactaagcggagtatggtgttcaaagacgtgctgctgctggggaatgactatattgtccccaggcactgccctgaactggctgagatgagcagagtgtctatccgaatcctggatgaactggtgctgccattccaggagctgcagattgacgataacgaatacgcatacctgaaggccatcatctttttcgaccccgacgcaaaaggactgtccgatcctggcaagattaagcggctgcgcgctcaggtccaggtgagcctggaggactatatcaatgacaggcagtacgattcaagagggcggtttggagaactgctgctgctgctgccaaccctgcagagtattacatggcagatgatcgagcagatccagttcattaaactgttcggcatggcaaagatcgacaacctgctgcaggagatgctgctgggaggggccccctctgatgctcctcatgcacaccacccactgcatccccacctgatgcaggaacatatgggcaccaatgtgatcgtcgccaacactatgcctacacacctgtccaatggacagatgtgtgagtggccacgccccaggggccaggctgcagcccctgaagctccacagcccgcacctccagggggaagcggcagcgagccctacaaactgctgcctggagccgtggcaaccattgtgagaccactggaagctatcccccagcctactattaccaagcaggaggtcatctga

SEQ ID NO: 633 - RNA, 1425 nt, synthetic construct
  misc_feature 1..1425: note = CDS (opt28) from Homo sapiens__NP_000448.3__HNF4A(1-474)(S87A_K106R_K108R_K126R_K 127R_S142A_S143A_S148E_T166A_S167E_S313A_S378E_T429E_T432E_ S436E_K458R_S461E)
  source 1..1425: mol_type = other RNA
atgcggctgagcaagaccctggtggacatggatatggcagactactccgccgctctggatccagcatatacaactctggagttcgaaaacgtccaggtgctgaccatgggaaatgacacatctccctcagagggcactaacctgaatgcccctaacagtctgggggtgagcgctctgtgcgcaatctgcggagacagggccaccggcaaacactacggggcttcctcttgtgatggatgcaagggctttttcagacgcgcagtccggaaaaatcatatgtacagctgccgattttcaaggcagtgcgtggtggacagagaccgccggaaccagtgcaggtattgtagactgaagaagtgcttccgagccggaatgcggcgcgaagctgtccagaatgagagggatagaattagtacacggcgagcagcctacgaagactccgagctgccaagcatcaacgcactgctgcaggctgaagtgctgtctaggcagatcgccgagcccgtgagcgggattaacggcgatatcagagctaaaaagattgcatccatcgccgacgtctgcgagtcaatgaaagaacagctgctggtgctggtggagtgggcaaagtacatccctgctttttgcgaactgccactggacgatcaggtcgccctgctgcgcgcacacgctggagagcatctgctgctgggcgccactaagcggagtatggtgttcaaagacgtgctgctgctggggaatgactatattgtccccaggcactgccctgaactggcagagatgagcagagtgtctatccgaatcctggatgaactggtgctgccattccaggagctgcagattgacgataacgaatacgcctacctgaaggctatcatctttttcgaccccgacgcaaaaggactgtccgatcctggcaagattaagcggctgcgcgcccaggtccaggtgagcctggaggactatatcaatgacaggcagtacgattcaagagggcggtttggagagctgctgctgctgctgccaaccctgcagagtattacatggcagatgatcgaacagatccagttcattaaactgttcggcatggcaaagatcgacaacctgctgcaggagatgctgctgggaggggaaccctctgatgctcctcatgcacaccacccactgcatccccacctgatgcaggagcatatgggcaccaatgtgatcgtcgccaacactatgcctacacacctgtccaatggacagatgtgtgaatggccacgccccaggggccaggctgcagagcctgaggaaccacagcccgagcctccagggggaagcggcagcgaaccctacaaactgctgcctggagccgtggctaccattgtgagaccactggaggcaatcccccagcctactattaccaagcaggaagtcatctga

SEQ ID NO: 634 - RNA, 1425 nt, synthetic construct
  misc_feature 1..1425: note = CDS (opt28) from Homo sapiens__NP_000448.3__HNF4A(1-474)(S87A_K106R_K108R_K126R_K 127R_S142A_S143A_S148A_T166A_S167A_K179R_K180R_S313A_S378A_ T429A_T432A_S436A_K458R_S461E)
  source 1..1425: mol_type = other RNA
atgcggctgagcaagaccctggtggacatggatatggcagactactccgccgctctggatccagcatatacaactctggagttcgaaaacgtccaggtgctgaccatgggaaatgacacatctccctcagagggcactaacctgaatgcccctaacagtctgggggtgagcgctctgtgcgcaatctgcggagacagggccaccggcaaacactacggggcttcctcttgtgatggatgcaagggctttttcagacgcgcagtccggaaaaatcatatgtacagctgccgattttcaaggcagtgcgtggtggacagagaccgccggaaccagtgcaggtattgtagactgaagaagtgcttccgagccggaatgcggcgcgaagctgtccagaatgagagggatagaattagtacacggcgagcagcctacgaagactccgcactgccaagcatcaacgctctgctgcaggccgaggtgctgtctaggcagatcgcagctcccgtgagcgggattaacggcgatatcagagcccgccggattgcatccatcgctgacgtctgcgaatcaatgaaagagcagctgctggtgctggtggagtgggccaagtacatccctgcattttgcgaactgccactggacgatcaggtcgctctgctgagggcccacgcaggagagcatctgctgctgggcgccactaaaagaagtatggtgttcaaggacgtgctgctgctggggaatgactatattgtcccccgacactgccctgaactggctgagatgagccgggtgtctatccgcatcctggatgaactggtgctgccattccaggagctgcagattgacgataacgaatacgcatacctgaaggccatcatctttttcgaccccgacgcaaaaggactgtccgatcctggcaagattaaaaggctgagagctcaggtccaggtgagcctggaggactatatcaatgaccggcagtacgattcacgcgggaggtttggagaactgctgctgctgctgccaaccctgcagagtattacatggcagatgatcgagcagatccagttcattaagctgttcggcatggcaaagatcgacaacctgctgcaggagatgctgctgggaggggccccctctgatgctcctcatgcacaccacccactgcatccccacctgatgcaggaacatatgggcaccaatgtgatcgtcgccaacactatgcctacacacctgtccaatggacagatgtgtgagtggccaagaccccgaggccaggctgcagcccctgaagctccacagcccgcacctccagggggaagcggcagcgagccctacaaactgctgcctggagccgtggcaaccattgtgcggccactggaagctatcccccagcctactattaccaagcaggaggtcatctga

SEQ ID NO: 635 - RNA, 1425 nt, synthetic construct
  misc_feature 1..1425: note = CDS (opt28) from Homo sapiens__NP_000448.3__HNF4A(1-474)(S87A_K106R_K108R_K126R_K 127R_S142A_S143A_S148A_T166A_S167A_K300R_K307R_K309R_S313A_ S378A_T429A_T432A_S436A_K458R_S461E)
  source 1..1425: mol_type = other RNA
atgcggctgagcaagaccctggtggacatggatatggcagactactccgccgctctggatccagcatatacaactctggagttcgaaaacgtccaggtgctgaccatgggaaatgacacatctccctcagagggcactaacctgaatgcccctaacagtctgggggtgagcgctctgtgcgcaatctgcggagacagggccaccggcaaacactacggggcttcctcttgtgatggatgcaagggctttttcagacgcgcagtccggaaaaatcatatgtacagctgccgattttcaaggcagtgcgtggtggacagagaccgccggaaccagtgcaggtattgtagactgaagaagtgcttccgagccggaatgcggcgcgaagctgtccagaatgagagggatagaattagtacacggcgagcagcctacgaagactccgcactgccaagcatcaacgctctgctgcaggccgaggtgctgtctaggcagatcgcagctcccgtgagcgggattaacggcgatatcagagccaaaaagattgcatccatcgctgacgtctgcgaatcaatgaaagagcagctgctggtgctggtggagtgggccaagtacatccctgcattttgcgaactgccactggacgatcaggtcgctctgctgcgcgcccacgcaggagagcatctgctgctgggcgccactaagcggagtatggtgttcaaagacgtgctgctgctggggaatgactatattgtccccaggcactgccctgaactggctgagatgagcagagtgtctatccgaatcctggatgaactggtgctgccattccaggagctgcagattgacgataacgaatacgcatacctgaaggccatcatctttttcgaccccgacgcacggggactgtccgatcctggccgcattaggagactgcgggctcaggtccaggtgagcctggaggactatatcaatgaccgccagtacgattcaagggggagatttggagaactgctgctgctgctgccaaccctgcagagtattacatggcagatgatcgagcagatccagttcattaaactgttcggcatggcaaagatcgacaacctgctgcaggagatgctgctgggaggggccccctctgatgctcctcatgcacaccacccactgcatccccacctgatgcaggaacatatgggcaccaatgtgatcgtcgccaacactatgcctacacacctgtccaatggacagatgtgtgagtggccacgaccccggggccaggctgcagcccctgaagctccacagcccgcacctccagggggaagcggcagcgagccctacaagctgctgcctggagccgtggcaaccattgtgaggccactggaagctatcccccagcctactattaccaaacaggaggtcatctga

SEQ ID NO: 636 - RNA, 1425 nt, synthetic construct
  misc_feature 1..1425: note = CDS (opt28) from Homo sapiens__NP_000448.3__HNF4A(1-474)(S87A_K106R_K108R_K126R_K 127R_S142A_S143A_S148A_T166A_S167A_S313A_S378A_T429A_T432A_ S436A_K447R_K458R_S461E_K470R)
  source 1..1425: mol_type = other RNA
atgcggctgagcaagaccctggtggacatggatatggcagactactccgccgctctggatccagcatatacaactctggagttcgaaaacgtccaggtgctgaccatgggaaatgacacatctccctcagagggcactaacctgaatgcccctaacagtctgggggtgagcgctctgtgcgcaatctgcggagacagggccaccggcaaacactacggggcttcctcttgtgatggatgcaagggctttttcagacgcgcagtccggaaaaatcatatgtacagctgccgattttcaaggcagtgcgtggtggacagagaccgccggaaccagtgcaggtattgtagactgaagaagtgcttccgagccggaatgcggcgcgaagctgtccagaatgagagggatagaattagtacacggcgagcagcctacgaagactccgcactgccaagcatcaacgctctgctgcaggccgaggtgctgtctaggcagatcgcagctcccgtgagcgggattaacggcgatatcagagccaaaaagattgcatccatcgctgacgtctgcgaatcaatgaaagagcagctgctggtgctggtggagtgggccaagtacatccctgcattttgcgaactgccactggacgatcaggtcgctctgctgcgcgcccacgcaggagagcatctgctgctgggcgccactaagcggagtatggtgttcaaagacgtgctgctgctggggaatgactatattgtccccaggcactgccctgaactggctgagatgagcagagtgtctatccgaatcctggatgaactggtgctgccattccaggagctgcagattgacgataacgaatacgcatacctgaaggccatcatctttttcgaccccgacgcaaaaggactgtccgatcctggcaagattaagcggctgcgcgctcaggtccaggtgagcctggaggactatatcaatgacaggcagtacgattcaagagggcggtttggagaactgctgctgctgctgccaaccctgcagagtattacatggcagatgatcgagcagatccagttcattaaactgttcggcatggcaaagatcgacaacctgctgcaggagatgctgctgggaggggccccctctgatgctcctcatgcacaccacccactgcatccccacctgatgcaggaacatatgggcaccaatgtgatcgtcgccaacactatgcctacacacctgtccaatggacagatgtgtgagtggccacgccccaggggccaggctgcagcccctgaagctccacagcccgcacctccagggggaagcggcagcgagccctacagactgctgcctggagccgtggcaaccattgtgcgaccactggaagctatcccccagcctactattacccggcaggaggtcatctga

SEQ ID NO: 637 - RNA, 1425 nt, synthetic construct
  misc_feature 1..1425: note = CDS (opt28) from Homo sapiens__NP_000448.3__HNF4A(1-474)(S87A_K106R_K108R_K126R_K 127R_S142A_S143A_S148A_T166A_S167A_K179R_K180R_K234R_K300R_ K307R_K309R_S313A_S378A_T429A_T432A_S436A_K447R_K458R_S461E _K470R)
  source 1..1425: mol_type = other RNA
atgcggctgagcaagaccctggtggacatggatatggcagactactccgccgctctggatccagcatatacaactctggagttcgaaaacgtccaggtgctgaccatgggaaatgacacatctccctcagagggcactaacctgaatgcccctaacagtctgggggtgagcgctctgtgcgcaatctgcggagacagggccaccggcaaacactacggggcttcctcttgtgatggatgcaagggctttttcagacgcgcagtccggaaaaatcatatgtacagctgccgattttcaaggcagtgcgtggtggacagagaccgccggaaccagtgcaggtattgtagactgaagaagtgcttccgagccggaatgcggcgcgaagctgtccagaatgagagggatagaattagtacacggcgagcagcctacgaagactccgcactgccaagcatcaacgctctgctgcaggccgaggtgctgtctaggcagatcgcagctcccgtgagcgggattaacggcgatatcagagcccgccggattgcatccatcgctgacgtctgcgaatcaatgaaagagcagctgctggtgctggtggagtgggccaagtacatccctgcattttgcgaactgccactggacgatcaggtcgctctgctgagggcccacgcaggagagcatctgctgctgggcgccactagacgaagtatggtgttcaaagacgtgctgctgctggggaatgactatattgtcccccggcactgccctgaactggctgagatgagccgcgtgtctatcaggatcctggatgaactggtgctgccattccaggagctgcagattgacgataacgaatacgcatacctgaaggccatcatctttttcgaccccgacgcaagaggactgtccgatcctggccggattcgcaggctgagagctcaggtccaggtgagcctggaggactatatcaatgaccgacagtacgattcacgggggaggtttggagaactgctgctgctgctgccaaccctgcagagtattacatggcagatgatcgagcagatccagttcattaagctgttcggcatggcaaaaatcgacaacctgctgcaggagatgctgctgggaggggccccctctgatgctcctcatgcacaccacccactgcatccccacctgatgcaggaacatatgggcaccaatgtgatcgtcgccaacactatgcctacacacctgtccaatggacagatgtgtgagtggccaagaccccgcggccaggctgcagcccctgaagctccacagcccgcacctccagggggaagcggcagcgagccctaccggctgctgcctggagccgtggcaaccattgtgcgaccactggaagctatcccccagcctactattaccaggcaggaggtcatctga

SEQ ID NO: 638 - RNA, 1425 nt, synthetic construct
  misc_feature 1..1425: note = CDS (opt28) from Homo sapiens__NP_000448.3__HNF4A(1-474)(S87A_S95A_S99A_K106R_K10 8R_K126R_K127R_S142A_S143A_S148A_T166A_S167A_S313A_S378A_T4 29A_T432A_S436A_K458R_S461E)
  source 1..1425: mol_type = other RNA
atgcggctgagcaagaccctggtggacatggatatggcagactactccgccgctctggatccagcatatacaactctggagttcgaaaacgtccaggtgctgaccatgggaaatgacacatctccctcagagggcactaacctgaatgcccctaacagtctgggggtgagcgctctgtgcgcaatctgcggagacagggccaccggcaaacactacggggcttcctcttgtgatggatgcaagggctttttcagacgcgcagtccggaaaaatcatatgtacgcctgccgatttgctaggcagtgcgtggtggacagagaccgccggaaccagtgcaggtattgtagactgaagaagtgcttccgagcaggaatgcggcgcgaagccgtccagaatgagagggatagaattagcacacggcgagcagcttacgaagactcagccctgccaagtatcaacgcactgctgcaggctgaggtgctgtccaggcagatcgccgcacccgtgagcgggattaacggcgatatcagagctaaaaagattgcctctatcgcagacgtctgcgaaagcatgaaagagcagctgctggtgctggtggagtgggctaagtacatccctgccttttgcgaactgccactggacgatcaggtcgcactgctgcgcgcccacgctggagagcatctgctgctgggcgcaactaagcggtccatggtgttcaaagacgtgctgctgctggggaatgactatattgtccccaggcactgccctgaactggccgagatgtcaagagtgagtatccgaatcctggatgaactggtgctgccattccaggagctgcagattgacgataacgaatacgcatacctgaaggctatcatctttttcgaccccgacgcaaaaggactgagcgatcctggcaagattaagcggctgcgcgcccaggtccaggtgtctctggaggactatatcaatgacaggcagtacgattccagagggcggtttggagaactgctgctgctgctgccaaccctgcagagcattacatggcagatgatcgagcagatccagttcattaaactgttcggcatggctaagatcgacaacctgctgcaggagatgctgctgggaggggcaccctcagatgcccctcatgctcaccacccactgcatccccacctgatgcaggaacatatgggcaccaatgtgatcgtcgcaaacactatgcctacacacctgagtaatggacagatgtgtgagtggccacgccccaggggccaggccgctgcacctgaagccccacagcccgcacctccagggggatctggctccgagccctacaaactgctgcctggagctgtggccaccattgtgagaccactggaagcaatcccccagcctactattaccaagcaggaggtcatctga

SEQ ID NO: 639 - RNA, 1425 nt, synthetic construct
  misc_feature 1..1425: note = CDS (opt28) from Homo sapiens__NP_000448.3__HNF4A(1-474)(S87A_K106R_K108R_K126R_K 127R_S138A_T139A_S142A_S143A_S148A_T166A_S167A_S313A_S378A_ T429A_T432A_S436A_K458R_S461E)
  source 1..1425: mol_type = other RNA
atgcggctgagcaagaccctggtggacatggatatggcagactactccgccgctctggatccagcatatacaactctggagttcgaaaacgtccaggtgctgaccatgggaaatgacacatctccctcagagggcactaacctgaatgcccctaacagtctgggggtgagcgctctgtgcgcaatctgcggagacagggccaccggcaaacactacggggcttcctcttgtgatggatgcaagggctttttcagacgcgcagtccggaaaaatcatatgtacagctgccgattttcaaggcagtgcgtggtggacagagaccgccggaaccagtgcaggtattgtagactgaagaagtgcttccgagccggaatgcggcgcgaagctgtccagaatgagagggatagaattgcagcccggcgagcagcttacgaagacagtgccctgccatccatcaacgcactgctgcaggctgaggtgctgagcaggcagatcgccgcacccgtgtctgggattaacggcgatatcagagctaaaaagattgccagcatcgcagacgtctgcgaatccatgaaagagcagctgctggtgctggtggagtgggctaagtacatccctgccttttgcgaactgccactggacgatcaggtcgcactgctgcgcgcccacgctggagagcatctgctgctgggcgcaacaaagcggtcaatggtgttcaaagacgtgctgctgctggggaatgactatattgtccccaggcactgccctgaactggccgagatgagtagagtgagcatccgaatcctggatgaactggtgctgccattccaggagctgcagattgacgataacgaatacgcatacctgaaggctatcatctttttcgaccccgacgcaaaaggactgtctgatcctggcaagattaagcggctgcgcgcccaggtccaggtgtccctggaggactatatcaatgacaggcagtacgatagcagagggcggtttggagaactgctgctgctgctgccaactctgcagtcaattacctggcagatgatcgagcagatccagttcattaaactgttcggcatggctaagatcgacaacctgctgcaggagatgctgctgggaggggcacccagtgatgcccctcatgctcaccacccactgcatccccacctgatgcaggaacatatgggcacaaatgtgatcgtcgcaaacaccatgcctactcacctgtctaatggacagatgtgtgagtggccacgccccaggggccaggccgctgcacctgaagccccacagcccgcacctccagggggatccggcagcgagccctacaaactgctgcctggagctgtggccacaattgtgagaccactggaagcaatcccccagcctaccattactaagcaggaggtcatctga

SEQ ID NO: 640 - RNA, 1425 nt, synthetic construct
  misc_feature 1..1425: note = CDS (opt28) from Homo sapiens__NP_000448.3__HNF4A(1-474)(S87A_S95A_S99A_K106R_K10 8R_K126R_K127R_S138A_T139A_S142A_S143A_S148A_T166A_S167A_S3 13A_S378A_T429A_T432A_S436A_K458R_S461E)
  source 1..1425: mol_type = other RNA
atgcggctgagcaagaccctggtggacatggatatggcagactactccgccgctctggatccagcatatacaactctggagttcgaaaacgtccaggtgctgaccatgggaaatgacacatctccctcagagggcactaacctgaatgcccctaacagtctgggggtgagcgctctgtgcgcaatctgcggagacagggccaccggcaaacactacggggcttcctcttgtgatggatgcaagggctttttcagacgcgcagtccggaaaaatcatatgtacgcctgccgatttgctaggcagtgcgtggtggacagagaccgccggaaccagtgcaggtattgtagactgaagaagtgcttccgagcaggaatgcggcgcgaagccgtccagaatgagagggatagaattgcagctcggcgagccgcatacgaagacagcgctctgccatcaatcaacgccctgctgcaggcagaggtgctgagtaggcagatcgctgcccccgtgtccgggattaacggcgatatcagagctaaaaagattgcaagcatcgccgacgtctgcgaatctatgaaagagcagctgctggtgctggtggagtgggcaaagtacatccctgccttttgcgaactgccactggacgatcaggtcgctctgctgcgcgcacacgccggagagcatctgctgctgggcgcaacaaagcggagcatggtgttcaaagacgtgctgctgctggggaatgactatattgtccccaggcactgccctgaactggctgagatgtccagagtgtcaatccgaatcctggatgaactggtgctgccattccaggagctgcagattgacgataacgaatacgcatacctgaaggccatcatctttttcgaccccgacgctaaaggactgagtgatcctggcaagattaagcggctgcgcgcacaggtccaggtgagcctggaggactatatcaatgacaggcagtacgattctagagggcggtttggagaactgctgctgctgctgccaactctgcagtccattacctggcagatgatcgagcagatccagttcattaaactgttcggcatggccaagatcgacaacctgctgcaggagatgctgctgggaggggctcccagcgatgcacctcatgcccaccacccactgcatccccacctgatgcaggaacatatgggcacaaatgtgatcgtcgctaacaccatgcctactcacctgtcaaatggacagatgtgtgagtggccacgccccaggggccaggcagccgcacctgaagctccacagcccgcccctccagggggaagtggctctgagccctacaaactgctgcctggagcagtggctacaattgtgagaccactggaagccatcccccagcctaccattactaagcaggaggtcatctga

SEQ ID NO: 641 - RNA, 1425 nt, synthetic construct
  misc_feature 1..1425: note = CDS (opt29) from Homo sapiens__NP_000448.3__HNF4A(1-474)
  source 1..1425: mol_type = other RNA
atgagactgagcaagaccctggtggacatggacatggccgactactctgccgccctggaccctgcctacaccaccctggagttcgaaaacgtgcaagtgctgaccatgggcaacgacaccagccctagcgagggcaccaacctgaacgcccctaatagcctgggagtgtccgccctgtgtgccatctgtggcgatagagccaccggcaagcactacggcgccagctcttgtgatggctgcaagggcttcttccggcggagcgtgcggaagaaccacatgtacagctgccggttcagccggcagtgcgtggtggacaaggataagcggaaccagtgccggtactgcagactgaagaagtgcttcagagccggcatgaagaaagaagccgtgcagaacgagcgggaccggatcagcaccagaagaagcagctacgaggacagcagcctgcccagcatcaacgccctgctgcaggccgaggtgctgagcagacagatcaccagcccagtgtccggcatcaacggcgacatccgggccaagaagatcgccagcattgccgacgtgtgcgagagcatgaaggaacagctgctggtgctggtggaatgggccaagtacatccccgccttttgcgagctgcccctggacgatcaggtggccctgctgagagcacacgccggcgaacatctgctgctgggagccaccaagcggagcatggtgttcaaggacgtgctgctgctgggcaacgactacatcgtgcccagacactgccctgagctggccgagatgagccgggtgtccatcagaatcctggacgaactggtgctgccgtttcaggaactgcagatcgacgacaacgagtacgcctacctgaaggccatcatctttttcgaccccgacgccaagggcctgagcgaccctggcaagatcaagcggctgagaagccaggtgcaagtgtccctggaagattacatcaacgaccggcagtacgacagccggggcagatttggcgaactgctcctgctgctgcccaccctgcagagcatcacctggcagatgatcgagcagatccagttcatcaagctgttcggcatggccaagatcgacaatctgctgcaggaaatgctgctcgggggcagcccttctgatgcccctcatgcccaccaccctctgcaccctcacctgatgcaagaacacatgggcaccaatgtgatcgtggccaacacaatgcccacccacctgagcaacggccagatgtgcgagtggcccagacctagaggacaggccgccacacctgagacacctcagccttctccacctggcggctctggcagcgagccttacaaactgctgcctggcgctgtggccaccatcgtgaaacctctgagcgccatcccccagcccaccatcaccaagcaggaagtgatctga

SEQ ID NO: 642 - RNA, 1425 nt, synthetic construct
  misc_feature 1..1425: note = CDS (opt29) from Homo sapiens__NP_000448.3__HNF4A(1-474)(S313A)
  source 1..1425: mol_type = other RNA
atgagactgagcaagaccctggtggacatggacatggccgactactctgccgccctggaccctgcctacaccaccctggagttcgaaaacgtgcaagtgctgaccatgggcaacgacaccagccctagcgagggcaccaacctgaacgcccctaatagcctgggagtgtccgccctgtgtgccatctgtggcgatagagccaccggcaagcactacggcgccagctcttgtgatggctgcaagggcttcttccggcggagcgtgcggaagaaccacatgtacagctgccggttcagccggcagtgcgtggtggacaaggataagcggaaccagtgccggtactgcagactgaagaagtgcttcagagccggcatgaagaaagaagccgtgcagaacgagcgggaccggatcagcaccagaagaagcagctacgaggacagcagcctgcccagcatcaacgccctgctgcaggccgaggtgctgagcagacagatcaccagcccagtgtccggcatcaacggcgacatccgggccaagaagatcgccagcattgccgacgtgtgcgagagcatgaaggaacagctgctggtgctggtggaatgggccaagtacatccccgccttttgcgagctgcccctggacgatcaggtggccctgctgagagcacacgccggcgaacatctgctgctgggagccaccaagcggagcatggtgttcaaggacgtgctgctgctgggcaacgactacatcgtgcccagacactgccctgagctggccgagatgagccgggtgtccatcagaatcctggacgaactggtgctgccgtttcaggaactgcagatcgacgacaacgagtacgcctacctgaaggccatcatctttttcgaccccgacgccaagggcctgagcgaccctggcaagatcaagcggctgagagcccaggtgcaagtgtccctggaagattacatcaacgaccggcagtacgacagccggggcagatttggcgaactgctcctgctgctgcccaccctgcagagcatcacctggcagatgatcgagcagatccagttcatcaagctgttcggcatggccaagatcgacaatctgctgcaggaaatgctgctcgggggcagcccttctgatgcccctcatgcccaccaccctctgcaccctcacctgatgcaagaacacatgggcaccaatgtgatcgtggccaacacaatgcccacccacctgagcaacggccagatgtgcgagtggcccagacctagaggacaggccgccacacctgagacacctcagccttctccacctggcggctctggcagcgagccttacaaactgctgcctggcgctgtggccaccatcgtgaaacctctgagcgccatcccccagcccaccatcaccaagcaggaagtgatctga

SEQ ID NO: 643 - RNA, 1425 nt, synthetic construct
  misc_feature 1..1425: note = CDS (opt29) from Homo sapiens__NP_000448.3__HNF4A(1-474)(S313E)
  source 1..1425: mol_type = other RNA
atgagactgagcaagaccctggtggacatggacatggccgactactctgccgccctggaccctgcctacaccaccctggagttcgaaaacgtgcaagtgctgaccatgggcaacgacaccagccctagcgagggcaccaacctgaacgcccctaatagcctgggagtgtccgccctgtgtgccatctgtggcgatagagccaccggcaagcactacggcgccagctcttgtgatggctgcaagggcttcttccggcggagcgtgcggaagaaccacatgtacagctgccggttcagccggcagtgcgtggtggacaaggataagcggaaccagtgccggtactgcagactgaagaagtgcttcagagccggcatgaagaaagaagccgtgcagaacgagcgggaccggatcagcaccagaagaagcagctacgaggacagcagcctgcccagcatcaacgccctgctgcaggccgaggtgctgagcagacagatcaccagcccagtgtccggcatcaacggcgacatccgggccaagaagatcgccagcattgccgacgtgtgcgagagcatgaaggaacagctgctggtgctggtggaatgggccaagtacatccccgccttttgcgagctgcccctggacgatcaggtggccctgctgagagcacacgccggcgaacatctgctgctgggagccaccaagcggagcatggtgttcaaggacgtgctgctgctgggcaacgactacatcgtgcccagacactgccctgagctggccgagatgagccgggtgtccatcagaatcctggacgaactggtgctgccgtttcaggaactgcagatcgacgacaacgagtacgcctacctgaaggccatcatctttttcgaccccgacgccaagggcctgagcgaccctggcaagatcaagcggctgagagaacaggtgcaagtgtccctggaagattacatcaacgaccggcagtacgacagccggggcagatttggcgaactgctcctgctgctgcccaccctgcagagcatcacctggcagatgatcgagcagatccagttcatcaagctgttcggcatggccaagatcgacaatctgctgcaggaaatgctgctcgggggcagcccttctgatgcccctcatgcccaccaccctctgcaccctcacctgatgcaagaacacatgggcaccaatgtgatcgtggccaacacaatgcccacccacctgagcaacggccagatgtgcgagtggcccagacctagaggacaggccgccacacctgagacacctcagccttctccacctggcggctctggcagcgagccttacaaactgctgcctggcgctgtggccaccatcgtgaaacctctgagcgccatcccccagcccaccatcaccaagcaggaagtgatctga

SEQ ID NO: 644 - RNA, 1425 nt, synthetic construct
  misc_feature 1..1425: note = CDS (opt29) from Homo sapiens__NP_000448.3__HNF4A(1-474)(S142A_S143A)
  source 1..1425: mol_type = other RNA
atgagactgagcaagaccctggtggacatggacatggccgactactctgccgccctggaccctgcctacaccaccctggagttcgaaaacgtgcaagtgctgaccatgggcaacgacaccagccctagcgagggcaccaacctgaacgcccctaatagcctgggagtgtccgccctgtgtgccatctgtggcgatagagccaccggcaagcactacggcgccagctcttgtgatggctgcaagggcttcttccggcggagcgtgcggaagaaccacatgtacagctgccggttcagccggcagtgcgtggtggacaaggataagcggaaccagtgccggtactgcagactgaagaagtgcttcagagccggcatgaagaaagaagccgtgcagaacgagcgggaccggatcagcaccagaagagccgcctacgaggacagcagcctgcccagcatcaacgccctgctgcaggccgaggtgctgagcagacagatcaccagcccagtgtccggcatcaacggcgacatccgggccaagaagatcgccagcattgccgacgtgtgcgagagcatgaaggaacagctgctggtgctggtggaatgggccaagtacatccccgccttttgcgagctgcccctggacgatcaggtggccctgctgagagcacacgccggcgaacatctgctgctgggagccaccaagcggagcatggtgttcaaggacgtgctgctgctgggcaacgactacatcgtgcccagacactgccctgagctggccgagatgagccgggtgtccatcagaatcctggacgaactggtgctgccgtttcaggaactgcagatcgacgacaacgagtacgcctacctgaaggccatcatctttttcgaccccgacgccaagggcctgagcgaccctggcaagatcaagcggctgagaagccaggtgcaagtgtccctggaagattacatcaacgaccggcagtacgacagccggggcagatttggcgaactgctcctgctgctgcccaccctgcagagcatcacctggcagatgatcgagcagatccagttcatcaagctgttcggcatggccaagatcgacaatctgctgcaggaaatgctgctcgggggcagcccttctgatgcccctcatgcccaccaccctctgcaccctcacctgatgcaagaacacatgggcaccaatgtgatcgtggccaacacaatgcccacccacctgagcaacggccagatgtgcgagtggcccagacctagaggacaggccgccacacctgagacacctcagccttctccacctggcggctctggcagcgagccttacaaactgctgcctggcgctgtggccaccatcgtgaaacctctgagcgccatcccccagcccaccatcaccaagcaggaagtgatctga

SEQ ID NO: 645 - RNA, 1425 nt, synthetic construct
  misc_feature 1..1425: note = CDS (opt29) from Homo sapiens__NP_000448.3__HNF4A(1-474)(S142E_S143E)
  source 1..1425: mol_type = other RNA
atgagactgagcaagaccctggtggacatggacatggccgactactctgccgccctggaccctgcctacaccaccctggagttcgaaaacgtgcaagtgctgaccatgggcaacgacaccagccctagcgagggcaccaacctgaacgcccctaatagcctgggagtgtccgccctgtgtgccatctgtggcgatagagccaccggcaagcactacggcgccagctcttgtgatggctgcaagggcttcttccggcggagcgtgcggaagaaccacatgtacagctgccggttcagccggcagtgcgtggtggacaaggataagcggaaccagtgccggtactgcagactgaagaagtgcttcagagccggcatgaagaaagaagccgtgcagaacgagcgggaccggatcagcaccagaagagaagagtacgaggacagcagcctgcccagcatcaacgccctgctgcaggccgaggtgctgagcagacagatcaccagcccagtgtccggcatcaacggcgacatccgggccaagaagatcgccagcattgccgacgtgtgcgagagcatgaaggaacagctgctggtgctggtggaatgggccaagtacatccccgccttttgcgagctgcccctggacgatcaggtggccctgctgagagcacacgccggcgaacatctgctgctgggagccaccaagcggagcatggtgttcaaggacgtgctgctgctgggcaacgactacatcgtgcccagacactgccctgagctggccgagatgagccgggtgtccatcagaatcctggacgaactggtgctgccgtttcaggaactgcagatcgacgacaacgagtacgcctacctgaaggccatcatctttttcgaccccgacgccaagggcctgagcgaccctggcaagatcaagcggctgagaagccaggtgcaagtgtccctggaagattacatcaacgaccggcagtacgacagccggggcagatttggcgaactgctcctgctgctgcccaccctgcagagcatcacctggcagatgatcgagcagatccagttcatcaagctgttcggcatggccaagatcgacaatctgctgcaggaaatgctgctcgggggcagcccttctgatgcccctcatgcccaccaccctctgcaccctcacctgatgcaagaacacatgggcaccaatgtgatcgtggccaacacaatgcccacccacctgagcaacggccagatgtgcgagtggcccagacctagaggacaggccgccacacctgagacacctcagccttctccacctggcggctctggcagcgagccttacaaactgctgcctggcgctgtggccaccatcgtgaaacctctgagcgccatcccccagcccaccatcaccaagcaggaagtgatctga

SEQ ID NO: 646 - RNA, 1425 nt, synthetic construct
  misc_feature 1..1425: note = CDS (opt29) from Homo sapiens__NP_000448.3__HNF4A(1-474)(S143A)
  source 1..1425: mol_type = other RNA
atgagactgagcaagaccctggtggacatggacatggccgactactctgccgccctggaccctgcctacaccaccctggagttcgaaaacgtgcaagtgctgaccatgggcaacgacaccagccctagcgagggcaccaacctgaacgcccctaatagcctgggagtgtccgccctgtgtgccatctgtggcgatagagccaccggcaagcactacggcgccagctcttgtgatggctgcaagggcttcttccggcggagcgtgcggaagaaccacatgtacagctgccggttcagccggcagtgcgtggtggacaaggataagcggaaccagtgccggtactgcagactgaagaagtgcttcagagccggcatgaagaaagaagccgtgcagaacgagcgggaccggatcagcaccagaagaagcgcctacgaggacagcagcctgcccagcatcaacgccctgctgcaggccgaggtgctgagcagacagatcaccagcccagtgtccggcatcaacggcgacatccgggccaagaagatcgccagcattgccgacgtgtgcgagagcatgaaggaacagctgctggtgctggtggaatgggccaagtacatccccgccttttgcgagctgcccctggacgatcaggtggccctgctgagagcacacgccggcgaacatctgctgctgggagccaccaagcggagcatggtgttcaaggacgtgctgctgctgggcaacgactacatcgtgcccagacactgccctgagctggccgagatgagccgggtgtccatcagaatcctggacgaactggtgctgccgtttcaggaactgcagatcgacgacaacgagtacgcctacctgaaggccatcatctttttcgaccccgacgccaagggcctgagcgaccctggcaagatcaagcggctgagaagccaggtgcaagtgtccctggaagattacatcaacgaccggcagtacgacagccggggcagatttggcgaactgctcctgctgctgcccaccctgcagagcatcacctggcagatgatcgagcagatccagttcatcaagctgttcggcatggccaagatcgacaatctgctgcaggaaatgctgctcgggggcagcccttctgatgcccctcatgcccaccaccctctgcaccctcacctgatgcaagaacacatgggcaccaatgtgatcgtggccaacacaatgcccacccacctgagcaacggccagatgtgcgagtggcccagacctagaggacaggccgccacacctgagacacctcagccttctccacctggcggctctggcagcgagccttacaaactgctgcctggcgctgtggccaccatcgtgaaacctctgagcgccatcccccagcccaccatcaccaagcaggaagtgatctga

SEQ ID NO: 647 - RNA, 1425 nt, synthetic construct
  misc_feature 1..1425: note = CDS (opt29) from Homo sapiens__NP_000448.3__HNF4A(1-474)(T166A)
  source 1..1425: mol_type = other RNA
atgagactgagcaagaccctggtggacatggacatggccgactactctgccgccctggaccctgcctacaccaccctggagttcgaaaacgtgcaagtgctgaccatgggcaacgacaccagccctagcgagggcaccaacctgaacgcccctaatagcctgggagtgtccgccctgtgtgccatctgtggcgatagagccaccggcaagcactacggcgccagctcttgtgatggctgcaagggcttcttccggcggagcgtgcggaagaaccacatgtacagctgccggttcagccggcagtgcgtggtggacaaggataagcggaaccagtgccggtactgcagactgaagaagtgcttcagagccggcatgaagaaagaagccgtgcagaacgagcgggaccggatcagcaccagaagaagcagctacgaggacagcagcctgcccagcatcaacgccctgctgcaggccgaggtgctgagcagacagatcgccagcccagtgtccggcatcaacggcgacatccgggccaagaagatcgccagcattgccgacgtgtgcgagagcatgaaggaacagctgctggtgctggtggaatgggccaagtacatccccgccttttgcgagctgcccctggacgatcaggtggccctgctgagagcacacgccggcgaacatctgctgctgggagccaccaagcggagcatggtgttcaaggacgtgctgctgctgggcaacgactacatcgtgcccagacactgccctgagctggccgagatgagccgggtgtccatcagaatcctggacgaactggtgctgccgtttcaggaactgcagatcgacgacaacgagtacgcctacctgaaggccatcatctttttcgaccccgacgccaagggcctgagcgaccctggcaagatcaagcggctgagaagccaggtgcaagtgtccctggaagattacatcaacgaccggcagtacgacagccggggcagatttggcgaactgctcctgctgctgcccaccctgcagagcatcacctggcagatgatcgagcagatccagttcatcaagctgttcggcatggccaagatcgacaatctgctgcaggaaatgctgctcgggggcagcccttctgatgcccctcatgcccaccaccctctgcaccctcacctgatgcaagaacacatgggcaccaatgtgatcgtggccaacacaatgcccacccacctgagcaacggccagatgtgcgagtggcccagacctagaggacaggccgccacacctgagacacctcagccttctccacctggcggctctggcagcgagccttacaaactgctgcctggcgctgtggccaccatcgtgaaacctctgagcgccatcccccagcccaccatcaccaagcaggaagtgatctga

SEQ ID NO: 648 - RNA, 1425 nt, synthetic construct
  misc_feature 1..1425: note = CDS (opt29) from Homo sapiens__NP_000448.3__HNF4A(1-474)(S167E)
  source 1..1425: mol_type = other RNA
atgagactgagcaagaccctggtggacatggacatggccgactactctgccgccctggaccctgcctacaccaccctggagttcgaaaacgtgcaagtgctgaccatgggcaacgacaccagccctagcgagggcaccaacctgaacgcccctaatagcctgggagtgtccgccctgtgtgccatctgtggcgatagagccaccggcaagcactacggcgccagctcttgtgatggctgcaagggcttcttccggcggagcgtgcggaagaaccacatgtacagctgccggttcagccggcagtgcgtggtggacaaggataagcggaaccagtgccggtactgcagactgaagaagtgcttcagagccggcatgaagaaagaagccgtgcagaacgagcgggaccggatcagcaccagaagaagcagctacgaggacagcagcctgcccagcatcaacgccctgctgcaggccgaggtgctgagcagacagatcaccgaaccagtgtccggcatcaacggcgacatccgggccaagaagatcgccagcattgccgacgtgtgcgagagcatgaaggaacagctgctggtgctggtggaatgggccaagtacatccccgccttttgcgagctgcccctggacgatcaggtggccctgctgagagcacacgccggcgaacatctgctgctgggagccaccaagcggagcatggtgttcaaggacgtgctgctgctgggcaacgactacatcgtgcccagacactgccctgagctggccgagatgagccgggtgtccatcagaatcctggacgaactggtgctgccgtttcaggaactgcagatcgacgacaacgagtacgcctacctgaaggccatcatctttttcgaccccgacgccaagggcctgagcgaccctggcaagatcaagcggctgagaagccaggtgcaagtgtccctggaagattacatcaacgaccggcagtacgacagccggggcagatttggcgaactgctcctgctgctgcccaccctgcagagcatcacctggcagatgatcgagcagatccagttcatcaagctgttcggcatggccaagatcgacaatctgctgcaggaaatgctgctcgggggcagcccttctgatgcccctcatgcccaccaccctctgcaccctcacctgatgcaagaacacatgggcaccaatgtgatcgtggccaacacaatgcccacccacctgagcaacggccagatgtgcgagtggcccagacctagaggacaggccgccacacctgagacacctcagccttctccacctggcggctctggcagcgagccttacaaactgctgcctggcgctgtggccaccatcgtgaaacctctgagcgccatcccccagcccaccatcaccaagcaggaagtgatctga

SEQ ID NO: 649 - RNA, 1425 nt, synthetic construct
  misc_feature 1..1425: note = CDS (opt29) from Homo sapiens__NP_000448.3__HNF4A(1-474)(S167A)
  source 1..1425: mol_type = other RNA
atgagactgagcaagaccctggtggacatggacatggccgactactctgccgccctggaccctgcctacaccaccctggagttcgaaaacgtgcaagtgctgaccatgggcaacgacaccagccctagcgagggcaccaacctgaacgcccctaatagcctgggagtgtccgccctgtgtgccatctgtggcgatagagccaccggcaagcactacggcgccagctcttgtgatggctgcaagggcttcttccggcggagcgtgcggaagaaccacatgtacagctgccggttcagccggcagtgcgtggtggacaaggataagcggaaccagtgccggtactgcagactgaagaagtgcttcagagccggcatgaagaaagaagccgtgcagaacgagcgggaccggatcagcaccagaagaagcagctacgaggacagcagcctgcccagcatcaacgccctgctgcaggccgaggtgctgagcagacagatcaccgccccagtgtccggcatcaacggcgacatccgggccaagaagatcgccagcattgccgacgtgtgcgagagcatgaaggaacagctgctggtgctggtggaatgggccaagtacatccccgccttttgcgagctgcccctggacgatcaggtggccctgctgagagcacacgccggcgaacatctgctgctgggagccaccaagcggagcatggtgttcaaggacgtgctgctgctgggcaacgactacatcgtgcccagacactgccctgagctggccgagatgagccgggtgtccatcagaatcctggacgaactggtgctgccgtttcaggaactgcagatcgacgacaacgagtacgcctacctgaaggccatcatctttttcgaccccgacgccaagggcctgagcgaccctggcaagatcaagcggctgagaagccaggtgcaagtgtccctggaagattacatcaacgaccggcagtacgacagccggggcagatttggcgaactgctcctgctgctgcccaccctgcagagcatcacctggcagatgatcgagcagatccagttcatcaagctgttcggcatggccaagatcgacaatctgctgcaggaaatgctgctcgggggcagcccttctgatgcccctcatgcccaccaccctctgcaccctcacctgatgcaagaacacatgggcaccaatgtgatcgtggccaacacaatgcccacccacctgagcaacggccagatgtgcgagtggcccagacctagaggacaggccgccacacctgagacacctcagccttctccacctggcggctctggcagcgagccttacaaactgctgcctggcgctgtggccaccatcgtgaaacctctgagcgccatcccccagcccaccatcaccaagcaggaagtgatctga

SEQ ID NO: 650 - RNA, 1425 nt, synthetic construct
  misc_feature 1..1425: note = CDS (opt29) from Homo sapiens__NP_000448.3__HNF4A(1-474)(S167A_S378A_T429A_T432A_ S436A)
  source 1..1425: mol_type = other RNA
atgagactgagcaagaccctggtggacatggacatggccgactactctgccgccctggaccctgcctacaccaccctggagttcgaaaacgtgcaagtgctgaccatgggcaacgacaccagccctagcgagggcaccaacctgaacgcccctaatagcctgggagtgtccgccctgtgtgccatctgtggcgatagagccaccggcaagcactacggcgccagctcttgtgatggctgcaagggcttcttccggcggagcgtgcggaagaaccacatgtacagctgccggttcagccggcagtgcgtggtggacaaggataagcggaaccagtgccggtactgcagactgaagaagtgcttcagagccggcatgaagaaagaagccgtgcagaacgagcgggaccggatcagcaccagaagaagcagctacgaggacagcagcctgcccagcatcaacgccctgctgcaggccgaggtgctgagcagacagatcaccgccccagtgtccggcatcaacggcgacatccgggccaagaagatcgccagcattgccgacgtgtgcgagagcatgaaggaacagctgctggtgctggtggaatgggccaagtacatccccgccttttgcgagctgcccctggacgatcaggtggccctgctgagagcacacgccggcgaacatctgctgctgggagccaccaagcggagcatggtgttcaaggacgtgctgctgctgggcaacgactacatcgtgcccagacactgccctgagctggccgagatgagccgggtgtccatcagaatcctggacgaactggtgctgccgtttcaggaactgcagatcgacgacaacgagtacgcctacctgaaggccatcatctttttcgaccccgacgccaagggcctgagcgaccctggcaagatcaagcggctgagaagccaggtgcaagtgtccctggaagattacatcaacgaccggcagtacgacagccggggcagatttggcgaactgctcctgctgctgcccaccctgcagagcatcacctggcagatgatcgagcagatccagttcatcaagctgttcggcatggccaagatcgacaatctgctgcaggaaatgctgctcgggggcgccccttctgatgcccctcatgcccaccaccctctgcaccctcacctgatgcaagaacacatgggcaccaatgtgatcgtggccaacacaatgcccacccacctgagcaacggccagatgtgcgagtggcccagacctagaggacaggccgccgcccctgaggcccctcagcctgccccacctggcggctctggcagcgagccttacaaactgctgcctggcgctgtggccaccatcgtgaaacctctgagcgccatcccccagcccaccatcaccaagcaggaagtgatctga

SEQ ID NO: 651 - RNA, 1425 nt, synthetic construct
  misc_feature 1..1425: note = CDS (opt29) from Homo sapiens__NP_000448.3__HNF4A(1-474)(S167E_S378E_T429E_T432E_ S436E)
  source 1..1425: mol_type = other RNA
atgagactgagcaagaccctggtggacatggacatggccgactactctgccgccctggaccctgcctacaccaccctggagttcgaaaacgtgcaagtgctgaccatgggcaacgacaccagccctagcgagggcaccaacctgaacgcccctaatagcctgggagtgtccgccctgtgtgccatctgtggcgatagagccaccggcaagcactacggcgccagctcttgtgatggctgcaagggcttcttccggcggagcgtgcggaagaaccacatgtacagctgccggttcagccggcagtgcgtggtggacaaggataagcggaaccagtgccggtactgcagactgaagaagtgcttcagagccggcatgaagaaagaagccgtgcagaacgagcgggaccggatcagcaccagaagaagcagctacgaggacagcagcctgcccagcatcaacgccctgctgcaggccgaggtgctgagcagacagatcaccgaaccagtgtccggcatcaacggcgacatccgggccaagaagatcgccagcattgccgacgtgtgcgagagcatgaaggaacagctgctggtgctggtggaatgggccaagtacatccccgccttttgcgagctgcccctggacgatcaggtggccctgctgagagcacacgccggcgaacatctgctgctgggagccaccaagcggagcatggtgttcaaggacgtgctgctgctgggcaacgactacatcgtgcccagacactgccctgagctggccgagatgagccgggtgtccatcagaatcctggacgaactggtgctgccgtttcaggaactgcagatcgacgacaacgagtacgcctacctgaaggccatcatctttttcgaccccgacgccaagggcctgagcgaccctggcaagatcaagcggctgagaagccaggtgcaagtgtccctggaagattacatcaacgaccggcagtacgacagccggggcagatttggcgaactgctcctgctgctgcccaccctgcagagcatcacctggcagatgatcgagcagatccagttcatcaagctgttcggcatggccaagatcgacaatctgctgcaggaaatgctgctcgggggcgagccttctgatgcccctcatgcccaccaccctctgcaccctcacctgatgcaagaacacatgggcaccaatgtgatcgtggccaacacaatgcccacccacctgagcaacggccagatgtgcgagtggcccagacctagaggacaggccgccgaacctgaggagcctcagcctgaaccacctggcggctctggcagcgagccttacaaactgctgcctggcgctgtggccaccatcgtgaaacctctgagcgccatcccccagcccaccatcaccaagcaggaagtgatctga

SEQ ID NO: 652 - RNA, 1425 nt, synthetic construct
  misc_feature 1..1425: note = CDS (opt29) from Homo sapiens__NP_000448.3__HNF4A(1-474)(S87A)
  source 1..1425: mol_type = other RNA
atgagactgagcaagaccctggtggacatggacatggccgactactctgccgccctggaccctgcctacaccaccctggagttcgaaaacgtgcaagtgctgaccatgggcaacgacaccagccctagcgagggcaccaacctgaacgcccctaatagcctgggagtgtccgccctgtgtgccatctgtggcgatagagccaccggcaagcactacggcgccagctcttgtgatggctgcaagggcttcttccggcgggccgtgcggaagaaccacatgtacagctgccggttcagccggcagtgcgtggtggacaaggataagcggaaccagtgccggtactgcagactgaagaagtgcttcagagccggcatgaagaaagaagccgtgcagaacgagcgggaccggatcagcaccagaagaagcagctacgaggacagcagcctgcccagcatcaacgccctgctgcaggccgaggtgctgagcagacagatcaccagcccagtgtccggcatcaacggcgacatccgggccaagaagatcgccagcattgccgacgtgtgcgagagcatgaaggaacagctgctggtgctggtggaatgggccaagtacatccccgccttttgcgagctgcccctggacgatcaggtggccctgctgagagcacacgccggcgaacatctgctgctgggagccaccaagcggagcatggtgttcaaggacgtgctgctgctgggcaacgactacatcgtgcccagacactgccctgagctggccgagatgagccgggtgtccatcagaatcctggacgaactggtgctgccgtttcaggaactgcagatcgacgacaacgagtacgcctacctgaaggccatcatctttttcgaccccgacgccaagggcctgagcgaccctggcaagatcaagcggctgagaagccaggtgcaagtgtccctggaagattacatcaacgaccggcagtacgacagccggggcagatttggcgaactgctcctgctgctgcccaccctgcagagcatcacctggcagatgatcgagcagatccagttcatcaagctgttcggcatggccaagatcgacaatctgctgcaggaaatgctgctcgggggcagcccttctgatgcccctcatgcccaccaccctctgcaccctcacctgatgcaagaacacatgggcaccaatgtgatcgtggccaacacaatgcccacccacctgagcaacggccagatgtgcgagtggcccagacctagaggacaggccgccacacctgagacacctcagccttctccacctggcggctctggcagcgagccttacaaactgctgcctggcgctgtggccaccatcgtgaaacctctgagcgccatcccccagcccaccatcaccaagcaggaagtgatctga

SEQ ID NO: 653 - RNA, 1425 nt, synthetic construct
  misc_feature 1..1425: note = CDS (opt29) from Homo sapiens__NP_000448.3__HNF4A(1-474)(S87E)
  source 1..1425: mol_type = other RNA
atgagactgagcaagaccctggtggacatggacatggccgactactctgccgccctggaccctgcctacaccaccctggagttcgaaaacgtgcaagtgctgaccatgggcaacgacaccagccctagcgagggcaccaacctgaacgcccctaatagcctgggagtgtccgccctgtgtgccatctgtggcgatagagccaccggcaagcactacggcgccagctcttgtgatggctgcaagggcttcttccggcgggaggtgcggaagaaccacatgtacagctgccggttcagccggcagtgcgtggtggacaaggataagcggaaccagtgccggtactgcagactgaagaagtgcttcagagccggcatgaagaaagaagccgtgcagaacgagcgggaccggatcagcaccagaagaagcagctacgaggacagcagcctgcccagcatcaacgccctgctgcaggccgaggtgctgagcagacagatcaccagcccagtgtccggcatcaacggcgacatccgggccaagaagatcgccagcattgccgacgtgtgcgagagcatgaaggaacagctgctggtgctggtggaatgggccaagtacatccccgccttttgcgagctgcccctggacgatcaggtggccctgctgagagcacacgccggcgaacatctgctgctgggagccaccaagcggagcatggtgttcaaggacgtgctgctgctgggcaacgactacatcgtgcccagacactgccctgagctggccgagatgagccgggtgtccatcagaatcctggacgaactggtgctgccgtttcaggaactgcagatcgacgacaacgagtacgcctacctgaaggccatcatctttttcgaccccgacgccaagggcctgagcgaccctggcaagatcaagcggctgagaagccaggtgcaagtgtccctggaagattacatcaacgaccggcagtacgacagccggggcagatttggcgaactgctcctgctgctgcccaccctgcagagcatcacctggcagatgatcgagcagatccagttcatcaagctgttcggcatggccaagatcgacaatctgctgcaggaaatgctgctcgggggcagcccttctgatgcccctcatgcccaccaccctctgcaccctcacctgatgcaagaacacatgggcaccaatgtgatcgtggccaacacaatgcccacccacctgagcaacggccagatgtgcgagtggcccagacctagaggacaggccgccacacctgagacacctcagccttctccacctggcggctctggcagcgagccttacaaactgctgcctggcgctgtggccaccatcgtgaaacctctgagcgccatcccccagcccaccatcaccaagcaggaagtgatctga

SEQ ID NO: 654 - RNA, 1425 nt, synthetic construct
  misc_feature 1..1425: note = CDS (opt29) from Homo sapiens__NP_000448.3__HNF4A(1-474)(R2V)
  source 1..1425: mol_type = other RNA
atggtgctgagcaagaccctggtggacatggacatggccgactactctgccgccctggaccctgcctacaccaccctggagttcgaaaacgtgcaagtgctgaccatgggcaacgacaccagccctagcgagggcaccaacctgaacgcccctaatagcctgggagtgtccgccctgtgtgccatctgtggcgatagagccaccggcaagcactacggcgccagctcttgtgatggctgcaagggcttcttccggcggagcgtgcggaagaaccacatgtacagctgccggttcagccggcagtgcgtggtggacaaggataagcggaaccagtgccggtactgcagactgaagaagtgcttcagagccggcatgaagaaagaagccgtgcagaacgagcgggaccggatcagcaccagaagaagcagctacgaggacagcagcctgcccagcatcaacgccctgctgcaggccgaggtgctgagcagacagatcaccagcccagtgtccggcatcaacggcgacatccgggccaagaagatcgccagcattgccgacgtgtgcgagagcatgaaggaacagctgctggtgctggtggaatgggccaagtacatccccgccttttgcgagctgcccctggacgatcaggtggccctgctgagagcacacgccggcgaacatctgctgctgggagccaccaagcggagcatggtgttcaaggacgtgctgctgctgggcaacgactacatcgtgcccagacactgccctgagctggccgagatgagccgggtgtccatcagaatcctggacgaactggtgctgccgtttcaggaactgcagatcgacgacaacgagtacgcctacctgaaggccatcatctttttcgaccccgacgccaagggcctgagcgaccctggcaagatcaagcggctgagaagccaggtgcaagtgtccctggaagattacatcaacgaccggcagtacgacagccggggcagatttggcgaactgctcctgctgctgcccaccctgcagagcatcacctggcagatgatcgagcagatccagttcatcaagctgttcggcatggccaagatcgacaatctgctgcaggaaatgctgctcgggggcagcccttctgatgcccctcatgcccaccaccctctgcaccctcacctgatgcaagaacacatgggcaccaatgtgatcgtggccaacacaatgcccacccacctgagcaacggccagatgtgcgagtggcccagacctagaggacaggccgccacacctgagacacctcagccttctccacctggcggctctggcagcgagccttacaaactgctgcctggcgctgtggccaccatcgtgaaacctctgagcgccatcccccagcccaccatcaccaagcaggaagtgatctga

SEQ ID NO: 655 - RNA, 1425 nt, synthetic construct
  misc_feature 1..1425: note = CDS (opt29) from Homo sapiens__NP_000448.3__HNF4A(1-474)(R2V_K5V)
  source 1..1425: mol_type = other RNA
atggtgctgagcgtgaccctggtggacatggacatggccgactactctgccgccctggaccctgcctacaccaccctggagttcgaaaacgtgcaagtgctgaccatgggcaacgacaccagccctagcgagggcaccaacctgaacgcccctaatagcctgggagtgtccgccctgtgtgccatctgtggcgatagagccaccggcaagcactacggcgccagctcttgtgatggctgcaagggcttcttccggcggagcgtgcggaagaaccacatgtacagctgccggttcagccggcagtgcgtggtggacaaggataagcggaaccagtgccggtactgcagactgaagaagtgcttcagagccggcatgaagaaagaagccgtgcagaacgagcgggaccggatcagcaccagaagaagcagctacgaggacagcagcctgcccagcatcaacgccctgctgcaggccgaggtgctgagcagacagatcaccagcccagtgtccggcatcaacggcgacatccgggccaagaagatcgccagcattgccgacgtgtgcgagagcatgaaggaacagctgctggtgctggtggaatgggccaagtacatccccgccttttgcgagctgcccctggacgatcaggtggccctgctgagagcacacgccggcgaacatctgctgctgggagccaccaagcggagcatggtgttcaaggacgtgctgctgctgggcaacgactacatcgtgcccagacactgccctgagctggccgagatgagccgggtgtccatcagaatcctggacgaactggtgctgccgtttcaggaactgcagatcgacgacaacgagtacgcctacctgaaggccatcatctttttcgaccccgacgccaagggcctgagcgaccctggcaagatcaagcggctgagaagccaggtgcaagtgtccctggaagattacatcaacgaccggcagtacgacagccggggcagatttggcgaactgctcctgctgctgcccaccctgcagagcatcacctggcagatgatcgagcagatccagttcatcaagctgttcggcatggccaagatcgacaatctgctgcaggaaatgctgctcgggggcagcccttctgatgcccctcatgcccaccaccctctgcaccctcacctgatgcaagaacacatgggcaccaatgtgatcgtggccaacacaatgcccacccacctgagcaacggccagatgtgcgagtggcccagacctagaggacaggccgccacacctgagacacctcagccttctccacctggcggctctggcagcgagccttacaaactgctgcctggcgctgtggccaccatcgtgaaacctctgagcgccatcccccagcccaccatcaccaagcaggaagtgatctga

SEQ ID NO: 656 - RNA, 1425 nt, synthetic construct
  misc_feature 1..1425: note = CDS (opt29) from Homo sapiens__NP_000448.3__HNF4A(1-474)(K179R_K180R)
  source 1..1425: mol_type = other RNA
atgagactgagcaagaccctggtggacatggacatggccgactactctgccgccctggaccctgcctacaccaccctggagttcgaaaacgtgcaagtgctgaccatgggcaacgacaccagccctagcgagggcaccaacctgaacgcccctaatagcctgggagtgtccgccctgtgtgccatctgtggcgatagagccaccggcaagcactacggcgccagctcttgtgatggctgcaagggcttcttccggcggagcgtgcggaagaaccacatgtacagctgccggttcagccggcagtgcgtggtggacaaggataagcggaaccagtgccggtactgcagactgaagaagtgcttcagagccggcatgaagaaagaagccgtgcagaacgagcgggaccggatcagcaccagaagaagcagctacgaggacagcagcctgcccagcatcaacgccctgctgcaggccgaggtgctgagcagacagatcaccagcccagtgtccggcatcaacggcgacatccgggcccggagaatcgccagcattgccgacgtgtgcgagagcatgaaggaacagctgctggtgctggtggaatgggccaagtacatccccgccttttgcgagctgcccctggacgatcaggtggccctgctgagagcacacgccggcgaacatctgctgctgggagccaccaagcggagcatggtgttcaaggacgtgctgctgctgggcaacgactacatcgtgcccagacactgccctgagctggccgagatgagccgggtgtccatcagaatcctggacgaactggtgctgccgtttcaggaactgcagatcgacgacaacgagtacgcctacctgaaggccatcatctttttcgaccccgacgccaagggcctgagcgaccctggcaagatcaagcggctgagaagccaggtgcaagtgtccctggaagattacatcaacgaccggcagtacgacagccggggcagatttggcgaactgctcctgctgctgcccaccctgcagagcatcacctggcagatgatcgagcagatccagttcatcaagctgttcggcatggccaagatcgacaatctgctgcaggaaatgctgctcgggggcagcccttctgatgcccctcatgcccaccaccctctgcaccctcacctgatgcaagaacacatgggcaccaatgtgatcgtggccaacacaatgcccacccacctgagcaacggccagatgtgcgagtggcccagacctagaggacaggccgccacacctgagacacctcagccttctccacctggcggctctggcagcgagccttacaaactgctgcctggcgctgtggccaccatcgtgaaacctctgagcgccatcccccagcccaccatcaccaagcaggaagtgatctga

SEQ ID NO: 657 - RNA, 1425 nt, synthetic construct
  misc_feature 1..1425: note = CDS (opt29) from Homo sapiens__NP_000448.3__HNF4A(1-474)(K234R)
  source 1..1425: mol_type = other RNA
atgagactgagcaagaccctggtggacatggacatggccgactactctgccgccctggaccctgcctacaccaccctggagttcgaaaacgtgcaagtgctgaccatgggcaacgacaccagccctagcgagggcaccaacctgaacgcccctaatagcctgggagtgtccgccctgtgtgccatctgtggcgatagagccaccggcaagcactacggcgccagctcttgtgatggctgcaagggcttcttccggcggagcgtgcggaagaaccacatgtacagctgccggttcagccggcagtgcgtggtggacaaggataagcggaaccagtgccggtactgcagactgaagaagtgcttcagagccggcatgaagaaagaagccgtgcagaacgagcgggaccggatcagcaccagaagaagcagctacgaggacagcagcctgcccagcatcaacgccctgctgcaggccgaggtgctgagcagacagatcaccagcccagtgtccggcatcaacggcgacatccgggccaagaagatcgccagcattgccgacgtgtgcgagagcatgaaggaacagctgctggtgctggtggaatgggccaagtacatccccgccttttgcgagctgcccctggacgatcaggtggccctgctgagagcacacgccggcgaacatctgctgctgggagccacccggcggagcatggtgttcaaggacgtgctgctgctgggcaacgactacatcgtgcccagacactgccctgagctggccgagatgagccgggtgtccatcagaatcctggacgaactggtgctgccgtttcaggaactgcagatcgacgacaacgagtacgcctacctgaaggccatcatctttttcgaccccgacgccaagggcctgagcgaccctggcaagatcaagcggctgagaagccaggtgcaagtgtccctggaagattacatcaacgaccggcagtacgacagccggggcagatttggcgaactgctcctgctgctgcccaccctgcagagcatcacctggcagatgatcgagcagatccagttcatcaagctgttcggcatggccaagatcgacaatctgctgcaggaaatgctgctcgggggcagcccttctgatgcccctcatgcccaccaccctctgcaccctcacctgatgcaagaacacatgggcaccaatgtgatcgtggccaacacaatgcccacccacctgagcaacggccagatgtgcgagtggcccagacctagaggacaggccgccacacctgagacacctcagccttctccacctggcggctctggcagcgagccttacaaactgctgcctggcgctgtggccaccatcgtgaaacctctgagcgccatcccccagcccaccatcaccaagcaggaagtgatctga

SEQ ID NO: 658 - RNA, 1425 nt, synthetic construct
  misc_feature 1..1425: note = CDS (opt29) from Homo sapiens__NP_000448.3__HNF4A(1-474)(K300R)
  source 1..1425: mol_type = other RNA
atgagactgagcaagaccctggtggacatggacatggccgactactctgccgccctggaccctgcctacaccaccctggagttcgaaaacgtgcaagtgctgaccatgggcaacgacaccagccctagcgagggcaccaacctgaacgcccctaatagcctgggagtgtccgccctgtgtgccatctgtggcgatagagccaccggcaagcactacggcgccagctcttgtgatggctgcaagggcttcttccggcggagcgtgcggaagaaccacatgtacagctgccggttcagccggcagtgcgtggtggacaaggataagcggaaccagtgccggtactgcagactgaagaagtgcttcagagccggcatgaagaaagaagccgtgcagaacgagcgggaccggatcagcaccagaagaagcagctacgaggacagcagcctgcccagcatcaacgccctgctgcaggccgaggtgctgagcagacagatcaccagcccagtgtccggcatcaacggcgacatccgggccaagaagatcgccagcattgccgacgtgtgcgagagcatgaaggaacagctgctggtgctggtggaatgggccaagtacatccccgccttttgcgagctgcccctggacgatcaggtggccctgctgagagcacacgccggcgaacatctgctgctgggagccaccaagcggagcatggtgttcaaggacgtgctgctgctgggcaacgactacatcgtgcccagacactgccctgagctggccgagatgagccgggtgtccatcagaatcctggacgaactggtgctgccgtttcaggaactgcagatcgacgacaacgagtacgcctacctgaaggccatcatctttttcgaccccgacgccagaggcctgagcgaccctggcaagatcaagcggctgagaagccaggtgcaagtgtccctggaagattacatcaacgaccggcagtacgacagccggggcagatttggcgaactgctcctgctgctgcccaccctgcagagcatcacctggcagatgatcgagcagatccagttcatcaagctgttcggcatggccaagatcgacaatctgctgcaggaaatgctgctcgggggcagcccttctgatgcccctcatgcccaccaccctctgcaccctcacctgatgcaagaacacatgggcaccaatgtgatcgtggccaacacaatgcccacccacctgagcaacggccagatgtgcgagtggcccagacctagaggacaggccgccacacctgagacacctcagccttctccacctggcggctctggcagcgagccttacaaactgctgcctggcgctgtggccaccatcgtgaaacctctgagcgccatcccccagcccaccatcaccaagcaggaagtgatctga

SEQ ID NO: 659 - RNA, 1425 nt, synthetic construct
  misc_feature 1..1425: note = CDS (opt29) from Homo sapiens__NP_000448.3__HNF4A(1-474)(K300R_K307R_K309R)
  source 1..1425: mol_type = other RNA
atgagactgagcaagaccctggtggacatggacatggccgactactctgccgccctggaccctgcctacaccaccctggagttcgaaaacgtgcaagtgctgaccatgggcaacgacaccagccctagcgagggcaccaacctgaacgcccctaatagcctgggagtgtccgccctgtgtgccatctgtggcgatagagccaccggcaagcactacggcgccagctcttgtgatggctgcaagggcttcttccggcggagcgtgcggaagaaccacatgtacagctgccggttcagccggcagtgcgtggtggacaaggataagcggaaccagtgccggtactgcagactgaagaagtgcttcagagccggcatgaagaaagaagccgtgcagaacgagcgggaccggatcagcaccagaagaagcagctacgaggacagcagcctgcccagcatcaacgccctgctgcaggccgaggtgctgagcagacagatcaccagcccagtgtccggcatcaacggcgacatccgggccaagaagatcgccagcattgccgacgtgtgcgagagcatgaaggaacagctgctggtgctggtggaatgggccaagtacatccccgccttttgcgagctgcccctggacgatcaggtggccctgctgagagcacacgccggcgaacatctgctgctgggagccaccaagcggagcatggtgttcaaggacgtgctgctgctgggcaacgactacatcgtgcccagacactgccctgagctggccgagatgagccgggtgtccatcagaatcctggacgaactggtgctgccgtttcaggaactgcagatcgacgacaacgagtacgcctacctgaaggccatcatctttttcgaccccgacgccagaggcctgagcgaccctggccggatcagacggctgagaagccaggtgcaagtgtccctggaagattacatcaacgaccggcagtacgacagccggggcagatttggcgaactgctcctgctgctgcccaccctgcagagcatcacctggcagatgatcgagcagatccagttcatcaagctgttcggcatggccaagatcgacaatctgctgcaggaaatgctgctcgggggcagcccttctgatgcccctcatgcccaccaccctctgcaccctcacctgatgcaagaacacatgggcaccaatgtgatcgtggccaacacaatgcccacccacctgagcaacggccagatgtgcgagtggcccagacctagaggacaggccgccacacctgagacacctcagccttctccacctggcggctctggcagcgagccttacaaactgctgcctggcgctgtggccaccatcgtgaaacctctgagcgccatcccccagcccaccatcaccaagcaggaagtgatctga

SEQ ID NO: 660 - RNA, 1425 nt, synthetic construct
  misc_feature 1..1425: note = CDS (opt29) from Homo sapiens__NP_000448.3__HNF4A(1-474)(K447R_K470R)
  source 1..1425: mol_type = other RNA
atgagactgagcaagaccctggtggacatggacatggccgactactctgccgccctggaccctgcctacaccaccctggagttcgaaaacgtgcaagtgctgaccatgggcaacgacaccagccctagcgagggcaccaacctgaacgcccctaatagcctgggagtgtccgccctgtgtgccatctgtggcgatagagccaccggcaagcactacggcgccagctcttgtgatggctgcaagggcttcttccggcggagcgtgcggaagaaccacatgtacagctgccggttcagccggcagtgcgtggtggacaaggataagcggaaccagtgccggtactgcagactgaagaagtgcttcagagccggcatgaagaaagaagccgtgcagaacgagcgggaccggatcagcaccagaagaagcagctacgaggacagcagcctgcccagcatcaacgccctgctgcaggccgaggtgctgagcagacagatcaccagcccagtgtccggcatcaacggcgacatccgggccaagaagatcgccagcattgccgacgtgtgcgagagcatgaaggaacagctgctggtgctggtggaatgggccaagtacatccccgccttttgcgagctgcccctggacgatcaggtggccctgctgagagcacacgccggcgaacatctgctgctgggagccaccaagcggagcatggtgttcaaggacgtgctgctgctgggcaacgactacatcgtgcccagacactgccctgagctggccgagatgagccgggtgtccatcagaatcctggacgaactggtgctgccgtttcaggaactgcagatcgacgacaacgagtacgcctacctgaaggccatcatctttttcgaccccgacgccaagggcctgagcgaccctggcaagatcaagcggctgagaagccaggtgcaagtgtccctggaagattacatcaacgaccggcagtacgacagccggggcagatttggcgaactgctcctgctgctgcccaccctgcagagcatcacctggcagatgatcgagcagatccagttcatcaagctgttcggcatggccaagatcgacaatctgctgcaggaaatgctgctcgggggcagcccttctgatgcccctcatgcccaccaccctctgcaccctcacctgatgcaagaacacatgggcaccaatgtgatcgtggccaacacaatgcccacccacctgagcaacggccagatgtgcgagtggcccagacctagaggacaggccgccacacctgagacacctcagccttctccacctggcggctctggcagcgagccttaccggctgctgcctggcgctgtggccaccatcgtgaaacctctgagcgccatcccccagcccaccatcacccggcaggaagtgatctga

SEQ ID NO: 661 - RNA, 1425 nt, synthetic construct
  misc_feature 1..1425: note = CDS (opt29) from Homo sapiens__NP_000448.3__HNF4A(1-474)(K458R)
  source 1..1425: mol_type = other RNA
atgagactgagcaagaccctggtggacatggacatggccgactactctgccgccctggaccctgcctacaccaccctggagttcgaaaacgtgcaagtgctgaccatgggcaacgacaccagccctagcgagggcaccaacctgaacgcccctaatagcctgggagtgtccgccctgtgtgccatctgtggcgatagagccaccggcaagcactacggcgccagctcttgtgatggctgcaagggcttcttccggcggagcgtgcggaagaaccacatgtacagctgccggttcagccggcagtgcgtggtggacaaggataagcggaaccagtgccggtactgcagactgaagaagtgcttcagagccggcatgaagaaagaagccgtgcagaacgagcgggaccggatcagcaccagaagaagcagctacgaggacagcagcctgcccagcatcaacgccctgctgcaggccgaggtgctgagcagacagatcaccagcccagtgtccggcatcaacggcgacatccgggccaagaagatcgccagcattgccgacgtgtgcgagagcatgaaggaacagctgctggtgctggtggaatgggccaagtacatccccgccttttgcgagctgcccctggacgatcaggtggccctgctgagagcacacgccggcgaacatctgctgctgggagccaccaagcggagcatggtgttcaaggacgtgctgctgctgggcaacgactacatcgtgcccagacactgccctgagctggccgagatgagccgggtgtccatcagaatcctggacgaactggtgctgccgtttcaggaactgcagatcgacgacaacgagtacgcctacctgaaggccatcatctttttcgaccccgacgccaagggcctgagcgaccctggcaagatcaagcggctgagaagccaggtgcaagtgtccctggaagattacatcaacgaccggcagtacgacagccggggcagatttggcgaactgctcctgctgctgcccaccctgcagagcatcacctggcagatgatcgagcagatccagttcatcaagctgttcggcatggccaagatcgacaatctgctgcaggaaatgctgctcgggggcagcccttctgatgcccctcatgcccaccaccctctgcaccctcacctgatgcaagaacacatgggcaccaatgtgatcgtggccaacacaatgcccacccacctgagcaacggccagatgtgcgagtggcccagacctagaggacaggccgccacacctgagacacctcagccttctccacctggcggctctggcagcgagccttacaaactgctgcctggcgctgtggccaccatcgtgagacctctgagcgccatcccccagcccaccatcaccaagcaggaagtgatctga

SEQ ID NO: 662 - RNA, 1425 nt, synthetic construct
  misc_feature 1..1425: note = CDS (opt29) from Homo sapiens__NP_000448.3__HNF4A(1-474)(K106R_K108R_K126R_K127R)
  source 1..1425: mol_type = other RNA
atgagactgagcaagaccctggtggacatggacatggccgactactctgccgccctggaccctgcctacaccaccctggagttcgaaaacgtgcaagtgctgaccatgggcaacgacaccagccctagcgagggcaccaacctgaacgcccctaatagcctgggagtgtccgccctgtgtgccatctgtggcgatagagccaccggcaagcactacggcgccagctcttgtgatggctgcaagggcttcttccggcggagcgtgcggaagaaccacatgtacagctgccggttcagccggcagtgcgtggtggaccgggatagacggaaccagtgccggtactgcagactgaagaagtgcttcagagccggcatgcggagagaagccgtgcagaacgagcgggaccggatcagcaccagaagaagcagctacgaggacagcagcctgcccagcatcaacgccctgctgcaggccgaggtgctgagcagacagatcaccagcccagtgtccggcatcaacggcgacatccgggccaagaagatcgccagcattgccgacgtgtgcgagagcatgaaggaacagctgctggtgctggtggaatgggccaagtacatccccgccttttgcgagctgcccctggacgatcaggtggccctgctgagagcacacgccggcgaacatctgctgctgggagccaccaagcggagcatggtgttcaaggacgtgctgctgctgggcaacgactacatcgtgcccagacactgccctgagctggccgagatgagccgggtgtccatcagaatcctggacgaactggtgctgccgtttcaggaactgcagatcgacgacaacgagtacgcctacctgaaggccatcatctttttcgaccccgacgccaagggcctgagcgaccctggcaagatcaagcggctgagaagccaggtgcaagtgtccctggaagattacatcaacgaccggcagtacgacagccggggcagatttggcgaactgctcctgctgctgcccaccctgcagagcatcacctggcagatgatcgagcagatccagttcatcaagctgttcggcatggccaagatcgacaatctgctgcaggaaatgctgctcgggggcagcccttctgatgcccctcatgcccaccaccctctgcaccctcacctgatgcaagaacacatgggcaccaatgtgatcgtggccaacacaatgcccacccacctgagcaacggccagatgtgcgagtggcccagacctagaggacaggccgccacacctgagacacctcagccttctccacctggcggctctggcagcgagccttacaaactgctgcctggcgctgtggccaccatcgtgaaacctctgagcgccatcccccagcccaccatcaccaagcaggaagtgatctga

SEQ ID NO: 663 - RNA, 1425 nt, synthetic construct
  misc_feature 1..1425: note = CDS (opt29) from Homo sapiens__NP_000448.3__HNF4A(1-474)(E285Q)
  source 1..1425: mol_type = other RNA
atgagactgagcaagaccctggtggacatggacatggccgactactctgccgccctggaccctgcctacaccaccctggagttcgaaaacgtgcaagtgctgaccatgggcaacgacaccagccctagcgagggcaccaacctgaacgcccctaatagcctgggagtgtccgccctgtgtgccatctgtggcgatagagccaccggcaagcactacggcgccagctcttgtgatggctgcaagggcttcttccggcggagcgtgcggaagaaccacatgtacagctgccggttcagccggcagtgcgtggtggacaaggataagcggaaccagtgccggtactgcagactgaagaagtgcttcagagccggcatgaagaaagaagccgtgcagaacgagcgggaccggatcagcaccagaagaagcagctacgaggacagcagcctgcccagcatcaacgccctgctgcaggccgaggtgctgagcagacagatcaccagcccagtgtccggcatcaacggcgacatccgggccaagaagatcgccagcattgccgacgtgtgcgagagcatgaaggaacagctgctggtgctggtggaatgggccaagtacatccccgccttttgcgagctgcccctggacgatcaggtggccctgctgagagcacacgccggcgaacatctgctgctgggagccaccaagcggagcatggtgttcaaggacgtgctgctgctgggcaacgactacatcgtgcccagacactgccctgagctggccgagatgagccgggtgtccatcagaatcctggacgaactggtgctgccgtttcaggaactgcagatcgacgacaaccagtacgcctacctgaaggccatcatctttttcgaccccgacgccaagggcctgagcgaccctggcaagatcaagcggctgagaagccaggtgcaagtgtccctggaagattacatcaacgaccggcagtacgacagccggggcagatttggcgaactgctcctgctgctgcccaccctgcagagcatcacctggcagatgatcgagcagatccagttcatcaagctgttcggcatggccaagatcgacaatctgctgcaggaaatgctgctcgggggcagcccttctgatgcccctcatgcccaccaccctctgcaccctcacctgatgcaagaacacatgggcaccaatgtgatcgtggccaacacaatgcccacccacctgagcaacggccagatgtgcgagtggcccagacctagaggacaggccgccacacctgagacacctcagccttctccacctggcggctctggcagcgagccttacaaactgctgcctggcgctgtggccaccatcgtgaaacctctgagcgccatcccccagcccaccatcaccaagcaggaagtgatctga

SEQ ID NO: 664 - RNA, 1425 nt, synthetic construct
  misc_feature 1..1425: note = CDS (opt29) from Homo sapiens__NP_000448.3__HNF4A(1-474)(T166E)
  source 1..1425: mol_type = other RNA
atgagactgagcaagaccctggtggacatggacatggccgactactctgccgccctggaccctgcctacaccaccctggagttcgaaaacgtgcaagtgctgaccatgggcaacgacaccagccctagcgagggcaccaacctgaacgcccctaatagcctgggagtgtccgccctgtgtgccatctgtggcgatagagccaccggcaagcactacggcgccagctcttgtgatggctgcaagggcttcttccggcggagcgtgcggaagaaccacatgtacagctgccggttcagccggcagtgcgtggtggacaaggataagcggaaccagtgccggtactgcagactgaagaagtgcttcagagccggcatgaagaaagaagccgtgcagaacgagcgggaccggatcagcaccagaagaagcagctacgaggacagcagcctgcccagcatcaacgccctgctgcaggccgaggtgctgagcagacagatcgagagcccagtgtccggcatcaacggcgacatccgggccaagaagatcgccagcattgccgacgtgtgcgagagcatgaaggaacagctgctggtgctggtggaatgggccaagtacatccccgccttttgcgagctgcccctggacgatcaggtggccctgctgagagcacacgccggcgaacatctgctgctgggagccaccaagcggagcatggtgttcaaggacgtgctgctgctgggcaacgactacatcgtgcccagacactgccctgagctggccgagatgagccgggtgtccatcagaatcctggacgaactggtgctgccgtttcaggaactgcagatcgacgacaacgagtacgcctacctgaaggccatcatctttttcgaccccgacgccaagggcctgagcgaccctggcaagatcaagcggctgagaagccaggtgcaagtgtccctggaagattacatcaacgaccggcagtacgacagccggggcagatttggcgaactgctcctgctgctgcccaccctgcagagcatcacctggcagatgatcgagcagatccagttcatcaagctgttcggcatggccaagatcgacaatctgctgcaggaaatgctgctcgggggcagcccttctgatgcccctcatgcccaccaccctctgcaccctcacctgatgcaagaacacatgggcaccaatgtgatcgtggccaacacaatgcccacccacctgagcaacggccagatgtgcgagtggcccagacctagaggacaggccgccacacctgagacacctcagccttctccacctggcggctctggcagcgagccttacaaactgctgcctggcgctgtggccaccatcgtgaaacctctgagcgccatcccccagcccaccatcaccaagcaggaagtgatctga

SEQ ID NO: 665 - RNA, 1425 nt, synthetic construct
  misc_feature 1..1425: note = CDS (opt29) from Homo sapiens__NP_000448.3__HNF4A(1-474)(S148A)
  source 1..1425: mol_type = other RNA
atgagactgagcaagaccctggtggacatggacatggccgactactctgccgccctggaccctgcctacaccaccctggagttcgaaaacgtgcaagtgctgaccatgggcaacgacaccagccctagcgagggcaccaacctgaacgcccctaatagcctgggagtgtccgccctgtgtgccatctgtggcgatagagccaccggcaagcactacggcgccagctcttgtgatggctgcaagggcttcttccggcggagcgtgcggaagaaccacatgtacagctgccggttcagccggcagtgcgtggtggacaaggataagcggaaccagtgccggtactgcagactgaagaagtgcttcagagccggcatgaagaaagaagccgtgcagaacgagcgggaccggatcagcaccagaagaagcagctacgaggacagcgccctgcccagcatcaacgccctgctgcaggccgaggtgctgagcagacagatcaccagcccagtgtccggcatcaacggcgacatccgggccaagaagatcgccagcattgccgacgtgtgcgagagcatgaaggaacagctgctggtgctggtggaatgggccaagtacatccccgccttttgcgagctgcccctggacgatcaggtggccctgctgagagcacacgccggcgaacatctgctgctgggagccaccaagcggagcatggtgttcaaggacgtgctgctgctgggcaacgactacatcgtgcccagacactgccctgagctggccgagatgagccgggtgtccatcagaatcctggacgaactggtgctgccgtttcaggaactgcagatcgacgacaacgagtacgcctacctgaaggccatcatctttttcgaccccgacgccaagggcctgagcgaccctggcaagatcaagcggctgagaagccaggtgcaagtgtccctggaagattacatcaacgaccggcagtacgacagccggggcagatttggcgaactgctcctgctgctgcccaccctgcagagcatcacctggcagatgatcgagcagatccagttcatcaagctgttcggcatggccaagatcgacaatctgctgcaggaaatgctgctcgggggcagcccttctgatgcccctcatgcccaccaccctctgcaccctcacctgatgcaagaacacatgggcaccaatgtgatcgtggccaacacaatgcccacccacctgagcaacggccagatgtgcgagtggcccagacctagaggacaggccgccacacctgagacacctcagccttctccacctggcggctctggcagcgagccttacaaactgctgcctggcgctgtggccaccatcgtgaaacctctgagcgccatcccccagcccaccatcaccaagcaggaagtgatctga

SEQ ID NO: 666 - RNA, 1425 nt, synthetic construct
  misc_feature 1..1425: note = CDS (opt29) from Homo sapiens__NP_000448.3__HNF4A(1-474)(S148E)
  source 1..1425: mol_type = other RNA
atgagactgagcaagaccctggtggacatggacatggccgactactctgccgccctggaccctgcctacaccaccctggagttcgaaaacgtgcaagtgctgaccatgggcaacgacaccagccctagcgagggcaccaacctgaacgcccctaatagcctgggagtgtccgccctgtgtgccatctgtggcgatagagccaccggcaagcactacggcgccagctcttgtgatggctgcaagggcttcttccggcggagcgtgcggaagaaccacatgtacagctgccggttcagccggcagtgcgtggtggacaaggataagcggaaccagtgccggtactgcagactgaagaagtgcttcagagccggcatgaagaaagaagccgtgcagaacgagcgggaccggatcagcaccagaagaagcagctacgaggacagcgaactgcccagcatcaacgccctgctgcaggccgaggtgctgagcagacagatcaccagcccagtgtccggcatcaacggcgacatccgggccaagaagatcgccagcattgccgacgtgtgcgagagcatgaaggaacagctgctggtgctggtggaatgggccaagtacatccccgccttttgcgagctgcccctggacgatcaggtggccctgctgagagcacacgccggcgaacatctgctgctgggagccaccaagcggagcatggtgttcaaggacgtgctgctgctgggcaacgactacatcgtgcccagacactgccctgagctggccgagatgagccgggtgtccatcagaatcctggacgaactggtgctgccgtttcaggaactgcagatcgacgacaacgagtacgcctacctgaaggccatcatctttttcgaccccgacgccaagggcctgagcgaccctggcaagatcaagcggctgagaagccaggtgcaagtgtccctggaagattacatcaacgaccggcagtacgacagccggggcagatttggcgaactgctcctgctgctgcccaccctgcagagcatcacctggcagatgatcgagcagatccagttcatcaagctgttcggcatggccaagatcgacaatctgctgcaggaaatgctgctcgggggcagcccttctgatgcccctcatgcccaccaccctctgcaccctcacctgatgcaagaacacatgggcaccaatgtgatcgtggccaacacaatgcccacccacctgagcaacggccagatgtgcgagtggcccagacctagaggacaggccgccacacctgagacacctcagccttctccacctggcggctctggcagcgagccttacaaactgctgcctggcgctgtggccaccatcgtgaaacctctgagcgccatcccccagcccaccatcaccaagcaggaagtgatctga

SEQ ID NO: 667 - RNA, 1425 nt, synthetic construct
  misc_feature 1..1425: note = CDS (opt29) from Homo sapiens__NP_000448.3__HNF4A(1-474)(S183A)
  source 1..1425: mol_type = other RNA
atgagactgagcaagaccctggtggacatggacatggccgactactctgccgccctggaccctgcctacaccaccctggagttcgaaaacgtgcaagtgctgaccatgggcaacgacaccagccctagcgagggcaccaacctgaacgcccctaatagcctgggagtgtccgccctgtgtgccatctgtggcgatagagccaccggcaagcactacggcgccagctcttgtgatggctgcaagggcttcttccggcggagcgtgcggaagaaccacatgtacagctgccggttcagccggcagtgcgtggtggacaaggataagcggaaccagtgccggtactgcagactgaagaagtgcttcagagccggcatgaagaaagaagccgtgcagaacgagcgggaccggatcagcaccagaagaagcagctacgaggacagcagcctgcccagcatcaacgccctgctgcaggccgaggtgctgagcagacagatcaccagcccagtgtccggcatcaacggcgacatccgggccaagaagatcgccgccattgccgacgtgtgcgagagcatgaaggaacagctgctggtgctggtggaatgggccaagtacatccccgccttttgcgagctgcccctggacgatcaggtggccctgctgagagcacacgccggcgaacatctgctgctgggagccaccaagcggagcatggtgttcaaggacgtgctgctgctgggcaacgactacatcgtgcccagacactgccctgagctggccgagatgagccgggtgtccatcagaatcctggacgaactggtgctgccgtttcaggaactgcagatcgacgacaacgagtacgcctacctgaaggccatcatctttttcgaccccgacgccaagggcctgagcgaccctggcaagatcaagcggctgagaagccaggtgcaagtgtccctggaagattacatcaacgaccggcagtacgacagccggggcagatttggcgaactgctcctgctgctgcccaccctgcagagcatcacctggcagatgatcgagcagatccagttcatcaagctgttcggcatggccaagatcgacaatctgctgcaggaaatgctgctcgggggcagcccttctgatgcccctcatgcccaccaccctctgcaccctcacctgatgcaagaacacatgggcaccaatgtgatcgtggccaacacaatgcccacccacctgagcaacggccagatgtgcgagtggcccagacctagaggacaggccgccacacctgagacacctcagccttctccacctggcggctctggcagcgagccttacaaactgctgcctggcgctgtggccaccatcgtgaaacctctgagcgccatcccccagcccaccatcaccaagcaggaagtgatctga

SEQ ID NO: 668 - RNA, 1425 nt, synthetic construct
  misc_feature 1..1425: note = CDS (opt29) from Homo sapiens__NP_000448.3__HNF4A(1-474)(S183E)
  source 1..1425: mol_type = other RNA
atgagactgagcaagaccctggtggacatggacatggccgactactctgccgccctggaccctgcctacaccaccctggagttcgaaaacgtgcaagtgctgaccatgggcaacgacaccagccctagcgagggcaccaacctgaacgcccctaatagcctgggagtgtccgccctgtgtgccatctgtggcgatagagccaccggcaagcactacggcgccagctcttgtgatggctgcaagggcttcttccggcggagcgtgcggaagaaccacatgtacagctgccggttcagccggcagtgcgtggtggacaaggataagcggaaccagtgccggtactgcagactgaagaagtgcttcagagccggcatgaagaaagaagccgtgcagaacgagcgggaccggatcagcaccagaagaagcagctacgaggacagcagcctgcccagcatcaacgccctgctgcaggccgaggtgctgagcagacagatcaccagcccagtgtccggcatcaacggcgacatccgggccaagaagatcgccgagattgccgacgtgtgcgagagcatgaaggaacagctgctggtgctggtggaatgggccaagtacatccccgccttttgcgagctgcccctggacgatcaggtggccctgctgagagcacacgccggcgaacatctgctgctgggagccaccaagcggagcatggtgttcaaggacgtgctgctgctgggcaacgactacatcgtgcccagacactgccctgagctggccgagatgagccgggtgtccatcagaatcctggacgaactggtgctgccgtttcaggaactgcagatcgacgacaacgagtacgcctacctgaaggccatcatctttttcgaccccgacgccaagggcctgagcgaccctggcaagatcaagcggctgagaagccaggtgcaagtgtccctggaagattacatcaacgaccggcagtacgacagccggggcagatttggcgaactgctcctgctgctgcccaccctgcagagcatcacctggcagatgatcgagcagatccagttcatcaagctgttcggcatggccaagatcgacaatctgctgcaggaaatgctgctcgggggcagcccttctgatgcccctcatgcccaccaccctctgcaccctcacctgatgcaagaacacatgggcaccaatgtgatcgtggccaacacaatgcccacccacctgagcaacggccagatgtgcgagtggcccagacctagaggacaggccgccacacctgagacacctcagccttctccacctggcggctctggcagcgagccttacaaactgctgcctggcgctgtggccaccatcgtgaaacctctgagcgccatcccccagcccaccatcaccaagcaggaagtgatctga

SEQ ID NO: 669 - RNA, 1425 nt, synthetic construct
  misc_feature 1..1425: note = CDS (opt29) from Homo sapiens__NP_000448.3__HNF4A(1-474)(S461A)
  source 1..1425: mol_type = other RNA
atgagactgagcaagaccctggtggacatggacatggccgactactctgccgccctggaccctgcctacaccaccctggagttcgaaaacgtgcaagtgctgaccatgggcaacgacaccagccctagcgagggcaccaacctgaacgcccctaatagcctgggagtgtccgccctgtgtgccatctgtggcgatagagccaccggcaagcactacggcgccagctcttgtgatggctgcaagggcttcttccggcggagcgtgcggaagaaccacatgtacagctgccggttcagccggcagtgcgtggtggacaaggataagcggaaccagtgccggtactgcagactgaagaagtgcttcagagccggcatgaagaaagaagccgtgcagaacgagcgggaccggatcagcaccagaagaagcagctacgaggacagcagcctgcccagcatcaacgccctgctgcaggccgaggtgctgagcagacagatcaccagcccagtgtccggcatcaacggcgacatccgggccaagaagatcgccagcattgccgacgtgtgcgagagcatgaaggaacagctgctggtgctggtggaatgggccaagtacatccccgccttttgcgagctgcccctggacgatcaggtggccctgctgagagcacacgccggcgaacatctgctgctgggagccaccaagcggagcatggtgttcaaggacgtgctgctgctgggcaacgactacatcgtgcccagacactgccctgagctggccgagatgagccgggtgtccatcagaatcctggacgaactggtgctgccgtttcaggaactgcagatcgacgacaacgagtacgcctacctgaaggccatcatctttttcgaccccgacgccaagggcctgagcgaccctggcaagatcaagcggctgagaagccaggtgcaagtgtccctggaagattacatcaacgaccggcagtacgacagccggggcagatttggcgaactgctcctgctgctgcccaccctgcagagcatcacctggcagatgatcgagcagatccagttcatcaagctgttcggcatggccaagatcgacaatctgctgcaggaaatgctgctcgggggcagcccttctgatgcccctcatgcccaccaccctctgcaccctcacctgatgcaagaacacatgggcaccaatgtgatcgtggccaacacaatgcccacccacctgagcaacggccagatgtgcgagtggcccagacctagaggacaggccgccacacctgagacacctcagccttctccacctggcggctctggcagcgagccttacaaactgctgcctggcgctgtggccaccatcgtgaaacctctggccgccatcccccagcccaccatcaccaagcaggaagtgatctga

SEQ ID NO: 670 - RNA, 1425 nt, synthetic construct
  misc_feature 1..1425: note = CDS (opt29) from Homo sapiens__NP_000448.3__HNF4A(1-474)(S461E)
  source 1..1425: mol_type = other RNA
atgagactgagcaagaccctggtggacatggacatggccgactactctgccgccctggaccctgcctacaccaccctggagttcgaaaacgtgcaagtgctgaccatgggcaacgacaccagccctagcgagggcaccaacctgaacgcccctaatagcctgggagtgtccgccctgtgtgccatctgtggcgatagagccaccggcaagcactacggcgccagctcttgtgatggctgcaagggcttcttccggcggagcgtgcggaagaaccacatgtacagctgccggttcagccggcagtgcgtggtggacaaggataagcggaaccagtgccggtactgcagactgaagaagtgcttcagagccggcatgaagaaagaagccgtgcagaacgagcgggaccggatcagcaccagaagaagcagctacgaggacagcagcctgcccagcatcaacgccctgctgcaggccgaggtgctgagcagacagatcaccagcccagtgtccggcatcaacggcgacatccgggccaagaagatcgccagcattgccgacgtgtgcgagagcatgaaggaacagctgctggtgctggtggaatgggccaagtacatccccgccttttgcgagctgcccctggacgatcaggtggccctgctgagagcacacgccggcgaacatctgctgctgggagccaccaagcggagcatggtgttcaaggacgtgctgctgctgggcaacgactacatcgtgcccagacactgccctgagctggccgagatgagccgggtgtccatcagaatcctggacgaactggtgctgccgtttcaggaactgcagatcgacgacaacgagtacgcctacctgaaggccatcatctttttcgaccccgacgccaagggcctgagcgaccctggcaagatcaagcggctgagaagccaggtgcaagtgtccctggaagattacatcaacgaccggcagtacgacagccggggcagatttggcgaactgctcctgctgctgcccaccctgcagagcatcacctggcagatgatcgagcagatccagttcatcaagctgttcggcatggccaagatcgacaatctgctgcaggaaatgctgctcgggggcagcccttctgatgcccctcatgcccaccaccctctgcaccctcacctgatgcaagaacacatgggcaccaatgtgatcgtggccaacacaatgcccacccacctgagcaacggccagatgtgcgagtggcccagacctagaggacaggccgccacacctgagacacctcagccttctccacctggcggctctggcagcgagccttacaaactgctgcctggcgctgtggccaccatcgtgaaacctctggaggccatcccccagcccaccatcaccaagcaggaagtgatctga

SEQ ID NO: 671 - RNA, 1425 nt, synthetic construct
  misc_feature 1..1425: note = CDS (opt29) from Homo sapiens__NP_000448.3__HNF4A(1-474)(S142A_S143A_S313A)
  source 1..1425: mol_type = other RNA
atgagactgagcaagaccctggtggacatggacatggccgactactctgccgccctggaccctgcctacaccaccctggagttcgaaaacgtgcaagtgctgaccatgggcaacgacaccagccctagcgagggcaccaacctgaacgcccctaatagcctgggagtgtccgccctgtgtgccatctgtggcgatagagccaccggcaagcactacggcgccagctcttgtgatggctgcaagggcttcttccggcggagcgtgcggaagaaccacatgtacagctgccggttcagccggcagtgcgtggtggacaaggataagcggaaccagtgccggtactgcagactgaagaagtgcttcagagccggcatgaagaaagaagccgtgcagaacgagcgggaccggatcagcaccagaagagccgcctacgaggacagcagcctgcccagcatcaacgccctgctgcaggccgaggtgctgagcagacagatcaccagcccagtgtccggcatcaacggcgacatccgggccaagaagatcgccagcattgccgacgtgtgcgagagcatgaaggaacagctgctggtgctggtggaatgggccaagtacatccccgccttttgcgagctgcccctggacgatcaggtggccctgctgagagcacacgccggcgaacatctgctgctgggagccaccaagcggagcatggtgttcaaggacgtgctgctgctgggcaacgactacatcgtgcccagacactgccctgagctggccgagatgagccgggtgtccatcagaatcctggacgaactggtgctgccgtttcaggaactgcagatcgacgacaacgagtacgcctacctgaaggccatcatctttttcgaccccgacgccaagggcctgagcgaccctggcaagatcaagcggctgagagcccaggtgcaagtgtccctggaagattacatcaacgaccggcagtacgacagccggggcagatttggcgaactgctcctgctgctgcccaccctgcagagcatcacctggcagatgatcgagcagatccagttcatcaagctgttcggcatggccaagatcgacaatctgctgcaggaaatgctgctcgggggcagcccttctgatgcccctcatgcccaccaccctctgcaccctcacctgatgcaagaacacatgggcaccaatgtgatcgtggccaacacaatgcccacccacctgagcaacggccagatgtgcgagtggcccagacctagaggacaggccgccacacctgagacacctcagccttctccacctggcggctctggcagcgagccttacaaactgctgcctggcgctgtggccaccatcgtgaaacctctgagcgccatcccccagcccaccatcaccaagcaggaagtgatctga

SEQ ID NO: 672 - RNA, 1425 nt, synthetic construct
  misc_feature 1..1425: note = CDS (opt29) from Homo sapiens__NP_000448.3__HNF4A(1-474)(S142A_S143A_S313A_K458R)
  source 1..1425: mol_type = other RNA
atgagactgagcaagaccctggtggacatggacatggccgactactctgccgccctggaccctgcctacaccaccctggagttcgaaaacgtgcaagtgctgaccatgggcaacgacaccagccctagcgagggcaccaacctgaacgcccctaatagcctgggagtgtccgccctgtgtgccatctgtggcgatagagccaccggcaagcactacggcgccagctcttgtgatggctgcaagggcttcttccggcggagcgtgcggaagaaccacatgtacagctgccggttcagccggcagtgcgtggtggacaaggataagcggaaccagtgccggtactgcagactgaagaagtgcttcagagccggcatgaagaaagaagccgtgcagaacgagcgggaccggatcagcaccagaagagccgcctacgaggacagcagcctgcccagcatcaacgccctgctgcaggccgaggtgctgagcagacagatcaccagcccagtgtccggcatcaacggcgacatccgggccaagaagatcgccagcattgccgacgtgtgcgagagcatgaaggaacagctgctggtgctggtggaatgggccaagtacatccccgccttttgcgagctgcccctggacgatcaggtggccctgctgagagcacacgccggcgaacatctgctgctgggagccaccaagcggagcatggtgttcaaggacgtgctgctgctgggcaacgactacatcgtgcccagacactgccctgagctggccgagatgagccgggtgtccatcagaatcctggacgaactggtgctgccgtttcaggaactgcagatcgacgacaacgagtacgcctacctgaaggccatcatctttttcgaccccgacgccaagggcctgagcgaccctggcaagatcaagcggctgagagcccaggtgcaagtgtccctggaagattacatcaacgaccggcagtacgacagccggggcagatttggcgaactgctcctgctgctgcccaccctgcagagcatcacctggcagatgatcgagcagatccagttcatcaagctgttcggcatggccaagatcgacaatctgctgcaggaaatgctgctcgggggcagcccttctgatgcccctcatgcccaccaccctctgcaccctcacctgatgcaagaacacatgggcaccaatgtgatcgtggccaacacaatgcccacccacctgagcaacggccagatgtgcgagtggcccagacctagaggacaggccgccacacctgagacacctcagccttctccacctggcggctctggcagcgagccttacaaactgctgcctggcgctgtggccaccatcgtgagacctctgagcgccatcccccagcccaccatcaccaagcaggaagtgatctga

SEQ ID NO: 673 - RNA, 1425 nt, synthetic construct
  misc_feature 1..1425: note = CDS (opt29) from Homo sapiens__NP_000448.3__HNF4A(1-474)(S142A_S143A_S167A_S313A_ S378A_T429A_T432A_S436A_K458R)
  source 1..1425: mol_type = other RNA
atgagactgagcaagaccctggtggacatggacatggccgactactctgccgccctggaccctgcctacaccaccctggagttcgaaaacgtgcaagtgctgaccatgggcaacgacaccagccctagcgagggcaccaacctgaacgcccctaatagcctgggagtgtccgccctgtgtgccatctgtggcgatagagccaccggcaagcactacggcgccagctcttgtgatggctgcaagggcttcttccggcggagcgtgcggaagaaccacatgtacagctgccggttcagccggcagtgcgtggtggacaaggataagcggaaccagtgccggtactgcagactgaagaagtgcttcagagccggcatgaagaaagaagccgtgcagaacgagcgggaccggatcagcaccagaagagccgcctacgaggacagcagcctgcccagcatcaacgccctgctgcaggccgaggtgctgagcagacagatcaccgccccagtgtccggcatcaacggcgacatccgggccaagaagatcgccagcattgccgacgtgtgcgagagcatgaaggaacagctgctggtgctggtggaatgggccaagtacatccccgccttttgcgagctgcccctggacgatcaggtggccctgctgagagcacacgccggcgaacatctgctgctgggagccaccaagcggagcatggtgttcaaggacgtgctgctgctgggcaacgactacatcgtgcccagacactgccctgagctggccgagatgagccgggtgtccatcagaatcctggacgaactggtgctgccgtttcaggaactgcagatcgacgacaacgagtacgcctacctgaaggccatcatctttttcgaccccgacgccaagggcctgagcgaccctggcaagatcaagcggctgagagcccaggtgcaagtgtccctggaagattacatcaacgaccggcagtacgacagccggggcagatttggcgaactgctcctgctgctgcccaccctgcagagcatcacctggcagatgatcgagcagatccagttcatcaagctgttcggcatggccaagatcgacaatctgctgcaggaaatgctgctcgggggcgccccttctgatgcccctcatgcccaccaccctctgcaccctcacctgatgcaagaacacatgggcaccaatgtgatcgtggccaacacaatgcccacccacctgagcaacggccagatgtgcgagtggcccagacctagaggacaggccgccgcccctgaggcccctcagcctgccccacctggcggctctggcagcgagccttacaaactgctgcctggcgctgtggccaccatcgtgagacctctgagcgccatcccccagcccaccatcaccaagcaggaagtgatctga

SEQ ID NO: 674 - RNA, 1425 nt, synthetic construct
  misc_feature 1..1425: note = CDS (opt29) from Homo sapiens__NP_000448.3__HNF4A(1-474)(S142A_S143A_S148A_S167A_ S313A_S378A_T429A_T432A_S436A_K458R)
  source 1..1425: mol_type = other RNA
atgagactgagcaagaccctggtggacatggacatggccgactactctgccgccctggaccctgcctacaccaccctggagttcgaaaacgtgcaagtgctgaccatgggcaacgacaccagccctagcgagggcaccaacctgaacgcccctaatagcctgggagtgtccgccctgtgtgccatctgtggcgatagagccaccggcaagcactacggcgccagctcttgtgatggctgcaagggcttcttccggcggagcgtgcggaagaaccacatgtacagctgccggttcagccggcagtgcgtggtggacaaggataagcggaaccagtgccggtactgcagactgaagaagtgcttcagagccggcatgaagaaagaagccgtgcagaacgagcgggaccggatcagcaccagaagagccgcctacgaggacagcgccctgcccagcatcaacgccctgctgcaggccgaggtgctgagcagacagatcaccgccccagtgtccggcatcaacggcgacatccgggccaagaagatcgccagcattgccgacgtgtgcgagagcatgaaggaacagctgctggtgctggtggaatgggccaagtacatccccgccttttgcgagctgcccctggacgatcaggtggccctgctgagagcacacgccggcgaacatctgctgctgggagccaccaagcggagcatggtgttcaaggacgtgctgctgctgggcaacgactacatcgtgcccagacactgccctgagctggccgagatgagccgggtgtccatcagaatcctggacgaactggtgctgccgtttcaggaactgcagatcgacgacaacgagtacgcctacctgaaggccatcatctttttcgaccccgacgccaagggcctgagcgaccctggcaagatcaagcggctgagagcccaggtgcaagtgtccctggaagattacatcaacgaccggcagtacgacagccggggcagatttggcgaactgctcctgctgctgcccaccctgcagagcatcacctggcagatgatcgagcagatccagttcatcaagctgttcggcatggccaagatcgacaatctgctgcaggaaatgctgctcgggggcgccccttctgatgcccctcatgcccaccaccctctgcaccctcacctgatgcaagaacacatgggcaccaatgtgatcgtggccaacacaatgcccacccacctgagcaacggccagatgtgcgagtggcccagacctagaggacaggccgccgcccctgaggcccctcagcctgccccacctggcggctctggcagcgagccttacaaactgctgcctggcgctgtggccaccatcgtgagacctctgagcgccatcccccagcccaccatcaccaagcaggaagtgatctga

SEQ ID NO: 675 - RNA, 1425 nt, synthetic construct
  misc_feature 1..1425: note = CDS (opt29) from Homo sapiens__NP_000448.3__HNF4A(1-474)(K106R_K108R_K126R_K127R_ S142A_S143A_S148A_S167A_S313A_S378A_T429A_T432A_S436A_K458R )
  source 1..1425: mol_type = other RNA
atgagactgagcaagaccctggtggacatggacatggccgactactctgccgccctggaccctgcctacaccaccctggagttcgaaaacgtgcaagtgctgaccatgggcaacgacaccagccctagcgagggcaccaacctgaacgcccctaatagcctgggagtgtccgccctgtgtgccatctgtggcgatagagccaccggcaagcactacggcgccagctcttgtgatggctgcaagggcttcttccggcggagcgtgcggaagaaccacatgtacagctgccggttcagccggcagtgcgtggtggaccgggatagacggaaccagtgccggtactgcagactgaagaagtgcttcagagccggcatgcggagagaagccgtgcagaacgagcgggaccggatcagcaccagaagagccgcctacgaggacagcgccctgcccagcatcaacgccctgctgcaggccgaggtgctgagcagacagatcaccgccccagtgtccggcatcaacggcgacatccgggccaagaagatcgccagcattgccgacgtgtgcgagagcatgaaggaacagctgctggtgctggtggaatgggccaagtacatccccgccttttgcgagctgcccctggacgatcaggtggccctgctgagagcacacgccggcgaacatctgctgctgggagccaccaagcggagcatggtgttcaaggacgtgctgctgctgggcaacgactacatcgtgcccagacactgccctgagctggccgagatgagccgggtgtccatcagaatcctggacgaactggtgctgccgtttcaggaactgcagatcgacgacaacgagtacgcctacctgaaggccatcatctttttcgaccccgacgccaagggcctgagcgaccctggcaagatcaagcggctgagagcccaggtgcaagtgtccctggaagattacatcaacgaccggcagtacgacagccggggcagatttggcgaactgctcctgctgctgcccaccctgcagagcatcacctggcagatgatcgagcagatccagttcatcaagctgttcggcatggccaagatcgacaatctgctgcaggaaatgctgctcgggggcgccccttctgatgcccctcatgcccaccaccctctgcaccctcacctgatgcaagaacacatgggcaccaatgtgatcgtggccaacacaatgcccacccacctgagcaacggccagatgtgcgagtggcccagacctagaggacaggccgccgcccctgaggcccctcagcctgccccacctggcggctctggcagcgagccttacaaactgctgcctggcgctgtggccaccatcgtgagacctctgagcgccatcccccagcccaccatcaccaagcaggaagtgatctga

SEQ ID NO: 676 - RNA, 1425 nt, synthetic construct
  misc_feature 1..1425: note = CDS (opt29) from Homo sapiens__NP_000448.3__HNF4A(1-474)(S142A_S143A_S148A_T166A_ S167A_S313A_S378A_T429A_T432A_S436A_K458R)
  source 1..1425: mol_type = other RNA
atgagactgagcaagaccctggtggacatggacatggccgactactctgccgccctggaccctgcctacaccaccctggagttcgaaaacgtgcaagtgctgaccatgggcaacgacaccagccctagcgagggcaccaacctgaacgcccctaatagcctgggagtgtccgccctgtgtgccatctgtggcgatagagccaccggcaagcactacggcgccagctcttgtgatggctgcaagggcttcttccggcggagcgtgcggaagaaccacatgtacagctgccggttcagccggcagtgcgtggtggacaaggataagcggaaccagtgccggtactgcagactgaagaagtgcttcagagccggcatgaagaaagaagccgtgcagaacgagcgggaccggatcagcaccagaagagccgcctacgaggacagcgccctgcccagcatcaacgccctgctgcaggccgaggtgctgagcagacagatcgccgccccagtgtccggcatcaacggcgacatccgggccaagaagatcgccagcattgccgacgtgtgcgagagcatgaaggaacagctgctggtgctggtggaatgggccaagtacatccccgccttttgcgagctgcccctggacgatcaggtggccctgctgagagcacacgccggcgaacatctgctgctgggagccaccaagcggagcatggtgttcaaggacgtgctgctgctgggcaacgactacatcgtgcccagacactgccctgagctggccgagatgagccgggtgtccatcagaatcctggacgaactggtgctgccgtttcaggaactgcagatcgacgacaacgagtacgcctacctgaaggccatcatctttttcgaccccgacgccaagggcctgagcgaccctggcaagatcaagcggctgagagcccaggtgcaagtgtccctggaagattacatcaacgaccggcagtacgacagccggggcagatttggcgaactgctcctgctgctgcccaccctgcagagcatcacctggcagatgatcgagcagatccagttcatcaagctgttcggcatggccaagatcgacaatctgctgcaggaaatgctgctcgggggcgccccttctgatgcccctcatgcccaccaccctctgcaccctcacctgatgcaagaacacatgggcaccaatgtgatcgtggccaacacaatgcccacccacctgagcaacggccagatgtgcgagtggcccagacctagaggacaggccgccgcccctgaggcccctcagcctgccccacctggcggctctggcagcgagccttacaaactgctgcctggcgctgtggccaccatcgtgagacctctgagcgccatcccccagcccaccatcaccaagcaggaagtgatctga

SEQ ID NO: 677 - RNA, 1425 nt, synthetic construct
  misc_feature 1..1425: note = CDS (opt29) from Homo sapiens__NP_000448.3__HNF4A(1-474)(S87A_S142A_S143A_S148A_T 166A_S167A_S313A_S378A_T429A_T432A_S436A_K458R)
  source 1..1425: mol_type = other RNA
atgagactgagcaagaccctggtggacatggacatggccgactactctgccgccctggaccctgcctacaccaccctggagttcgaaaacgtgcaagtgctgaccatgggcaacgacaccagccctagcgagggcaccaacctgaacgcccctaatagcctgggagtgtccgccctgtgtgccatctgtggcgatagagccaccggcaagcactacggcgccagctcttgtgatggctgcaagggcttcttccggcgggccgtgcggaagaaccacatgtacagctgccggttcagccggcagtgcgtggtggacaaggataagcggaaccagtgccggtactgcagactgaagaagtgcttcagagccggcatgaagaaagaagccgtgcagaacgagcgggaccggatcagcaccagaagagccgcctacgaggacagcgccctgcccagcatcaacgccctgctgcaggccgaggtgctgagcagacagatcgccgccccagtgtccggcatcaacggcgacatccgggccaagaagatcgccagcattgccgacgtgtgcgagagcatgaaggaacagctgctggtgctggtggaatgggccaagtacatccccgccttttgcgagctgcccctggacgatcaggtggccctgctgagagcacacgccggcgaacatctgctgctgggagccaccaagcggagcatggtgttcaaggacgtgctgctgctgggcaacgactacatcgtgcccagacactgccctgagctggccgagatgagccgggtgtccatcagaatcctggacgaactggtgctgccgtttcaggaactgcagatcgacgacaacgagtacgcctacctgaaggccatcatctttttcgaccccgacgccaagggcctgagcgaccctggcaagatcaagcggctgagagcccaggtgcaagtgtccctggaagattacatcaacgaccggcagtacgacagccggggcagatttggcgaactgctcctgctgctgcccaccctgcagagcatcacctggcagatgatcgagcagatccagttcatcaagctgttcggcatggccaagatcgacaatctgctgcaggaaatgctgctcgggggcgccccttctgatgcccctcatgcccaccaccctctgcaccctcacctgatgcaagaacacatgggcaccaatgtgatcgtggccaacacaatgcccacccacctgagcaacggccagatgtgcgagtggcccagacctagaggacaggccgccgcccctgaggcccctcagcctgccccacctggcggctctggcagcgagccttacaaactgctgcctggcgctgtggccaccatcgtgagacctctgagcgccatcccccagcccaccatcaccaagcaggaagtgatctga

SEQ ID NO: 678 - RNA, 1425 nt, synthetic construct
  misc_feature 1..1425: note = CDS (opt29) from Homo sapiens__NP_000448.3__HNF4A(1-474)(S87A_K106R_K108R_K126R_K 127R_S142A_S143A_S148A_T166A_S167A_S313A_S378A_T429A_T432A_ S436A_K458R)
  source 1..1425: mol_type = other RNA
atgagactgagcaagaccctggtggacatggacatggccgactactctgccgccctggaccctgcctacaccaccctggagttcgaaaacgtgcaagtgctgaccatgggcaacgacaccagccctagcgagggcaccaacctgaacgcccctaatagcctgggagtgtccgccctgtgtgccatctgtggcgatagagccaccggcaagcactacggcgccagctcttgtgatggctgcaagggcttcttccggcgggccgtgcggaagaaccacatgtacagctgccggttcagccggcagtgcgtggtggaccgggatagacggaaccagtgccggtactgcagactgaagaagtgcttcagagccggcatgcggagagaagccgtgcagaacgagcgggaccggatcagcaccagaagagccgcctacgaggacagcgccctgcccagcatcaacgccctgctgcaggccgaggtgctgagcagacagatcgccgccccagtgtccggcatcaacggcgacatccgggccaagaagatcgccagcattgccgacgtgtgcgagagcatgaaggaacagctgctggtgctggtggaatgggccaagtacatccccgccttttgcgagctgcccctggacgatcaggtggccctgctgagagcacacgccggcgaacatctgctgctgggagccaccaagcggagcatggtgttcaaggacgtgctgctgctgggcaacgactacatcgtgcccagacactgccctgagctggccgagatgagccgggtgtccatcagaatcctggacgaactggtgctgccgtttcaggaactgcagatcgacgacaacgagtacgcctacctgaaggccatcatctttttcgaccccgacgccaagggcctgagcgaccctggcaagatcaagcggctgagagcccaggtgcaagtgtccctggaagattacatcaacgaccggcagtacgacagccggggcagatttggcgaactgctcctgctgctgcccaccctgcagagcatcacctggcagatgatcgagcagatccagttcatcaagctgttcggcatggccaagatcgacaatctgctgcaggaaatgctgctcgggggcgccccttctgatgcccctcatgcccaccaccctctgcaccctcacctgatgcaagaacacatgggcaccaatgtgatcgtggccaacacaatgcccacccacctgagcaacggccagatgtgcgagtggcccagacctagaggacaggccgccgcccctgaggcccctcagcctgccccacctggcggctctggcagcgagccttacaaactgctgcctggcgctgtggccaccatcgtgagacctctgagcgccatcccccagcccaccatcaccaagcaggaagtgatctga

SEQ ID NO: 679 - RNA, 1425 nt, synthetic construct
  misc_feature 1..1425: note = CDS (opt29) from Homo sapiens__NP_000448.3__HNF4A(1-474)(S87A_K106R_K108R_K126R_K 127R)
  source 1..1425: mol_type = other RNA
atgagactgagcaagaccctggtggacatggacatggccgactactctgccgccctggaccctgcctacaccaccctggagttcgaaaacgtgcaagtgctgaccatgggcaacgacaccagccctagcgagggcaccaacctgaacgcccctaatagcctgggagtgtccgccctgtgtgccatctgtggcgatagagccaccggcaagcactacggcgccagctcttgtgatggctgcaagggcttcttccggcgggccgtgcggaagaaccacatgtacagctgccggttcagccggcagtgcgtggtggaccgggatagacggaaccagtgccggtactgcagactgaagaagtgcttcagagccggcatgcggagagaagccgtgcagaacgagcgggaccggatcagcaccagaagaagcagctacgaggacagcagcctgcccagcatcaacgccctgctgcaggccgaggtgctgagcagacagatcaccagcccagtgtccggcatcaacggcgacatccgggccaagaagatcgccagcattgccgacgtgtgcgagagcatgaaggaacagctgctggtgctggtggaatgggccaagtacatccccgccttttgcgagctgcccctggacgatcaggtggccctgctgagagcacacgccggcgaacatctgctgctgggagccaccaagcggagcatggtgttcaaggacgtgctgctgctgggcaacgactacatcgtgcccagacactgccctgagctggccgagatgagccgggtgtccatcagaatcctggacgaactggtgctgccgtttcaggaactgcagatcgacgacaacgagtacgcctacctgaaggccatcatctttttcgaccccgacgccaagggcctgagcgaccctggcaagatcaagcggctgagaagccaggtgcaagtgtccctggaagattacatcaacgaccggcagtacgacagccggggcagatttggcgaactgctcctgctgctgcccaccctgcagagcatcacctggcagatgatcgagcagatccagttcatcaagctgttcggcatggccaagatcgacaatctgctgcaggaaatgctgctcgggggcagcccttctgatgcccctcatgcccaccaccctctgcaccctcacctgatgcaagaacacatgggcaccaatgtgatcgtggccaacacaatgcccacccacctgagcaacggccagatgtgcgagtggcccagacctagaggacaggccgccacacctgagacacctcagccttctccacctggcggctctggcagcgagccttacaaactgctgcctggcgctgtggccaccatcgtgaaacctctgagcgccatcccccagcccaccatcaccaagcaggaagtgatctga

SEQ ID NO: 680 - RNA, 1425 nt, synthetic construct
  misc_feature 1..1425: note = CDS (opt29) from Homo sapiens__NP_000448.3__HNF4A(1-474)(S87A_K106R_K108R_K126R_K 127R_S142A_S143A_S148A_T166A_S167A_S313A_S378A_T429A_T432A_ S436A_K458R_S461A)
  source 1..1425: mol_type = other RNA
atgagactgagcaagaccctggtggacatggacatggccgactactctgccgccctggaccctgcctacaccaccctggagttcgaaaacgtgcaagtgctgaccatgggcaacgacaccagccctagcgagggcaccaacctgaacgcccctaatagcctgggagtgtccgccctgtgtgccatctgtggcgatagagccaccggcaagcactacggcgccagctcttgtgatggctgcaagggcttcttccggcgggccgtgcggaagaaccacatgtacagctgccggttcagccggcagtgcgtggtggaccgggatagacggaaccagtgccggtactgcagactgaagaagtgcttcagagccggcatgcggagagaagccgtgcagaacgagcgggaccggatcagcaccagaagagccgcctacgaggacagcgccctgcccagcatcaacgccctgctgcaggccgaggtgctgagcagacagatcgccgccccagtgtccggcatcaacggcgacatccgggccaagaagatcgccagcattgccgacgtgtgcgagagcatgaaggaacagctgctggtgctggtggaatgggccaagtacatccccgccttttgcgagctgcccctggacgatcaggtggccctgctgagagcacacgccggcgaacatctgctgctgggagccaccaagcggagcatggtgttcaaggacgtgctgctgctgggcaacgactacatcgtgcccagacactgccctgagctggccgagatgagccgggtgtccatcagaatcctggacgaactggtgctgccgtttcaggaactgcagatcgacgacaacgagtacgcctacctgaaggccatcatctttttcgaccccgacgccaagggcctgagcgaccctggcaagatcaagcggctgagagcccaggtgcaagtgtccctggaagattacatcaacgaccggcagtacgacagccggggcagatttggcgaactgctcctgctgctgcccaccctgcagagcatcacctggcagatgatcgagcagatccagttcatcaagctgttcggcatggccaagatcgacaatctgctgcaggaaatgctgctcgggggcgccccttctgatgcccctcatgcccaccaccctctgcaccctcacctgatgcaagaacacatgggcaccaatgtgatcgtggccaacacaatgcccacccacctgagcaacggccagatgtgcgagtggcccagacctagaggacaggccgccgcccctgaggcccctcagcctgccccacctggcggctctggcagcgagccttacaaactgctgcctggcgctgtggccaccatcgtgagacctctggccgccatcccccagcccaccatcaccaagcaggaagtgatctga

SEQ ID NO: 681 - RNA, 1425 nt, synthetic construct
  misc_feature 1..1425: note = CDS (opt29) from Homo sapiens__NP_000448.3__HNF4A(1-474)(S87A_K106R_K108R_K126R_K 127R_S142A_S143A_S148A_T166A_S167A_S313A_S378A_T429A_T432A_ S436A_K458R_S461E)
  source 1..1425: mol_type = other RNA
atgagactgagcaagaccctggtggacatggacatggccgactactctgccgccctggaccctgcctacaccaccctggagttcgaaaacgtgcaagtgctgaccatgggcaacgacaccagccctagcgagggcaccaacctgaacgcccctaatagcctgggagtgtccgccctgtgtgccatctgtggcgatagagccaccggcaagcactacggcgccagctcttgtgatggctgcaagggcttcttccggcgggccgtgcggaagaaccacatgtacagctgccggttcagccggcagtgcgtggtggaccgggatagacggaaccagtgccggtactgcagactgaagaagtgcttcagagccggcatgcggagagaagccgtgcagaacgagcgggaccggatcagcaccagaagagccgcctacgaggacagcgccctgcccagcatcaacgccctgctgcaggccgaggtgctgagcagacagatcgccgccccagtgtccggcatcaacggcgacatccgggccaagaagatcgccagcattgccgacgtgtgcgagagcatgaaggaacagctgctggtgctggtggaatgggccaagtacatccccgccttttgcgagctgcccctggacgatcaggtggccctgctgagagcacacgccggcgaacatctgctgctgggagccaccaagcggagcatggtgttcaaggacgtgctgctgctgggcaacgactacatcgtgcccagacactgccctgagctggccgagatgagccgggtgtccatcagaatcctggacgaactggtgctgccgtttcaggaactgcagatcgacgacaacgagtacgcctacctgaaggccatcatctttttcgaccccgacgccaagggcctgagcgaccctggcaagatcaagcggctgagagcccaggtgcaagtgtccctggaagattacatcaacgaccggcagtacgacagccggggcagatttggcgaactgctcctgctgctgcccaccctgcagagcatcacctggcagatgatcgagcagatccagttcatcaagctgttcggcatggccaagatcgacaatctgctgcaggaaatgctgctcgggggcgccccttctgatgcccctcatgcccaccaccctctgcaccctcacctgatgcaagaacacatgggcaccaatgtgatcgtggccaacacaatgcccacccacctgagcaacggccagatgtgcgagtggcccagacctagaggacaggccgccgcccctgaggcccctcagcctgccccacctggcggctctggcagcgagccttacaaactgctgcctggcgctgtggccaccatcgtgagacctctggaggccatcccccagcccaccatcaccaagcaggaagtgatctga

SEQ ID NO: 682 - RNA, 1425 nt, synthetic construct
  misc_feature 1..1425: note = CDS (opt29) from Homo sapiens__NP_000448.3__HNF4A(1-474)(S87A_K106R_K108R_K126R_K 127R_S142A_S143A_S148E_T166A_S167E_S313A_S378E_T429E_T432E_ S436E_K458R_S461E)
  source 1..1425: mol_type = other RNA
atgagactgagcaagaccctggtggacatggacatggccgactactctgccgccctggaccctgcctacaccaccctggagttcgaaaacgtgcaagtgctgaccatgggcaacgacaccagccctagcgagggcaccaacctgaacgcccctaatagcctgggagtgtccgccctgtgtgccatctgtggcgatagagccaccggcaagcactacggcgccagctcttgtgatggctgcaagggcttcttccggcgggccgtgcggaagaaccacatgtacagctgccggttcagccggcagtgcgtggtggaccgggatagacggaaccagtgccggtactgcagactgaagaagtgcttcagagccggcatgcggagagaagccgtgcagaacgagcgggaccggatcagcaccagaagagccgcctacgaggacagcgaactgcccagcatcaacgccctgctgcaggccgaggtgctgagcagacagatcgccgaaccagtgtccggcatcaacggcgacatccgggccaagaagatcgccagcattgccgacgtgtgcgagagcatgaaggaacagctgctggtgctggtggaatgggccaagtacatccccgccttttgcgagctgcccctggacgatcaggtggccctgctgagagcacacgccggcgaacatctgctgctgggagccaccaagcggagcatggtgttcaaggacgtgctgctgctgggcaacgactacatcgtgcccagacactgccctgagctggccgagatgagccgggtgtccatcagaatcctggacgaactggtgctgccgtttcaggaactgcagatcgacgacaacgagtacgcctacctgaaggccatcatctttttcgaccccgacgccaagggcctgagcgaccctggcaagatcaagcggctgagagcccaggtgcaagtgtccctggaagattacatcaacgaccggcagtacgacagccggggcagatttggcgaactgctcctgctgctgcccaccctgcagagcatcacctggcagatgatcgagcagatccagttcatcaagctgttcggcatggccaagatcgacaatctgctgcaggaaatgctgctcgggggcgagccttctgatgcccctcatgcccaccaccctctgcaccctcacctgatgcaagaacacatgggcaccaatgtgatcgtggccaacacaatgcccacccacctgagcaacggccagatgtgcgagtggcccagacctagaggacaggccgccgaacctgaggagcctcagcctgaaccacctggcggctctggcagcgagccttacaaactgctgcctggcgctgtggccaccatcgtgagacctctggaggccatcccccagcccaccatcaccaagcaggaagtgatctga

SEQ ID NO: 683 - RNA, 1425 nt, synthetic construct
  misc_feature 1..1425: note = CDS (opt29) from Homo sapiens__NP_000448.3__HNF4A(1-474)(S87A_K106R_K108R_K126R_K 127R_S142A_S143A_S148A_T166A_S167A_K179R_K180R_S313A_S378A_ T429A_T432A_S436A_K458R_S461E)
  source 1..1425: mol_type = other RNA
atgagactgagcaagaccctggtggacatggacatggccgactactctgccgccctggaccctgcctacaccaccctggagttcgaaaacgtgcaagtgctgaccatgggcaacgacaccagccctagcgagggcaccaacctgaacgcccctaatagcctgggagtgtccgccctgtgtgccatctgtggcgatagagccaccggcaagcactacggcgccagctcttgtgatggctgcaagggcttcttccggcgggccgtgcggaagaaccacatgtacagctgccggttcagccggcagtgcgtggtggaccgggatagacggaaccagtgccggtactgcagactgaagaagtgcttcagagccggcatgcggagagaagccgtgcagaacgagcgggaccggatcagcaccagaagagccgcctacgaggacagcgccctgcccagcatcaacgccctgctgcaggccgaggtgctgagcagacagatcgccgccccagtgtccggcatcaacggcgacatccgggcccggagaatcgccagcattgccgacgtgtgcgagagcatgaaggaacagctgctggtgctggtggaatgggccaagtacatccccgccttttgcgagctgcccctggacgatcaggtggccctgctgagagcacacgccggcgaacatctgctgctgggagccaccaagcggagcatggtgttcaaggacgtgctgctgctgggcaacgactacatcgtgcccagacactgccctgagctggccgagatgagccgggtgtccatcagaatcctggacgaactggtgctgccgtttcaggaactgcagatcgacgacaacgagtacgcctacctgaaggccatcatctttttcgaccccgacgccaagggcctgagcgaccctggcaagatcaagcggctgagagcccaggtgcaagtgtccctggaagattacatcaacgaccggcagtacgacagccggggcagatttggcgaactgctcctgctgctgcccaccctgcagagcatcacctggcagatgatcgagcagatccagttcatcaagctgttcggcatggccaagatcgacaatctgctgcaggaaatgctgctcgggggcgccccttctgatgcccctcatgcccaccaccctctgcaccctcacctgatgcaagaacacatgggcaccaatgtgatcgtggccaacacaatgcccacccacctgagcaacggccagatgtgcgagtggcccagacctagaggacaggccgccgcccctgaggcccctcagcctgccccacctggcggctctggcagcgagccttacaaactgctgcctggcgctgtggccaccatcgtgagacctctggaggccatcccccagcccaccatcaccaagcaggaagtgatctga

SEQ ID NO: 684 - RNA, 1425 nt, synthetic construct
  misc_feature 1..1425: note = CDS (opt29) from Homo sapiens__NP_000448.3__HNF4A(1-474)(S87A_K106R_K108R_K126R_K 127R_S142A_S143A_S148A_T166A_S167A_K300R_K307R_K309R_S313A_ S378A_T429A_T432A_S436A_K458R_S461E)
  source 1..1425: mol_type = other RNA
atgagactgagcaagaccctggtggacatggacatggccgactactctgccgccctggaccctgcctacaccaccctggagttcgaaaacgtgcaagtgctgaccatgggcaacgacaccagccctagcgagggcaccaacctgaacgcccctaatagcctgggagtgtccgccctgtgtgccatctgtggcgatagagccaccggcaagcactacggcgccagctcttgtgatggctgcaagggcttcttccggcgggccgtgcggaagaaccacatgtacagctgccggttcagccggcagtgcgtggtggaccgggatagacggaaccagtgccggtactgcagactgaagaagtgcttcagagccggcatgcggagagaagccgtgcagaacgagcgggaccggatcagcaccagaagagccgcctacgaggacagcgccctgcccagcatcaacgccctgctgcaggccgaggtgctgagcagacagatcgccgccccagtgtccggcatcaacggcgacatccgggccaagaagatcgccagcattgccgacgtgtgcgagagcatgaaggaacagctgctggtgctggtggaatgggccaagtacatccccgccttttgcgagctgcccctggacgatcaggtggccctgctgagagcacacgccggcgaacatctgctgctgggagccaccaagcggagcatggtgttcaaggacgtgctgctgctgggcaacgactacatcgtgcccagacactgccctgagctggccgagatgagccgggtgtccatcagaatcctggacgaactggtgctgccgtttcaggaactgcagatcgacgacaacgagtacgcctacctgaaggccatcatctttttcgaccccgacgccagaggcctgagcgaccctggccggatcagacggctgagagcccaggtgcaagtgtccctggaagattacatcaacgaccggcagtacgacagccggggcagatttggcgaactgctcctgctgctgcccaccctgcagagcatcacctggcagatgatcgagcagatccagttcatcaagctgttcggcatggccaagatcgacaatctgctgcaggaaatgctgctcgggggcgccccttctgatgcccctcatgcccaccaccctctgcaccctcacctgatgcaagaacacatgggcaccaatgtgatcgtggccaacacaatgcccacccacctgagcaacggccagatgtgcgagtggcccagacctagaggacaggccgccgcccctgaggcccctcagcctgccccacctggcggctctggcagcgagccttacaaactgctgcctggcgctgtggccaccatcgtgagacctctggaggccatcccccagcccaccatcaccaagcaggaagtgatctga

SEQ ID NO: 685 - RNA, 1425 nt, synthetic construct
  misc_feature 1..1425: note = CDS (opt29) from Homo sapiens__NP_000448.3__HNF4A(1-474)(S87A_K106R_K108R_K126R_K 127R_S142A_S143A_S148A_T166A_S167A_S313A_S378A_T429A_T432A_ S436A_K447R_K458R_S461E_K470R)
  source 1..1425: mol_type = other RNA
atgagactgagcaagaccctggtggacatggacatggccgactactctgccgccctggaccctgcctacaccaccctggagttcgaaaacgtgcaagtgctgaccatgggcaacgacaccagccctagcgagggcaccaacctgaacgcccctaatagcctgggagtgtccgccctgtgtgccatctgtggcgatagagccaccggcaagcactacggcgccagctcttgtgatggctgcaagggcttcttccggcgggccgtgcggaagaaccacatgtacagctgccggttcagccggcagtgcgtggtggaccgggatagacggaaccagtgccggtactgcagactgaagaagtgcttcagagccggcatgcggagagaagccgtgcagaacgagcgggaccggatcagcaccagaagagccgcctacgaggacagcgccctgcccagcatcaacgccctgctgcaggccgaggtgctgagcagacagatcgccgccccagtgtccggcatcaacggcgacatccgggccaagaagatcgccagcattgccgacgtgtgcgagagcatgaaggaacagctgctggtgctggtggaatgggccaagtacatccccgccttttgcgagctgcccctggacgatcaggtggccctgctgagagcacacgccggcgaacatctgctgctgggagccaccaagcggagcatggtgttcaaggacgtgctgctgctgggcaacgactacatcgtgcccagacactgccctgagctggccgagatgagccgggtgtccatcagaatcctggacgaactggtgctgccgtttcaggaactgcagatcgacgacaacgagtacgcctacctgaaggccatcatctttttcgaccccgacgccaagggcctgagcgaccctggcaagatcaagcggctgagagcccaggtgcaagtgtccctggaagattacatcaacgaccggcagtacgacagccggggcagatttggcgaactgctcctgctgctgcccaccctgcagagcatcacctggcagatgatcgagcagatccagttcatcaagctgttcggcatggccaagatcgacaatctgctgcaggaaatgctgctcgggggcgccccttctgatgcccctcatgcccaccaccctctgcaccctcacctgatgcaagaacacatgggcaccaatgtgatcgtggccaacacaatgcccacccacctgagcaacggccagatgtgcgagtggcccagacctagaggacaggccgccgcccctgaggcccctcagcctgccccacctggcggctctggcagcgagccttaccggctgctgcctggcgctgtggccaccatcgtgagacctctggaggccatcccccagcccaccatcacccggcaggaagtgatctga

SEQ ID NO: 686 - RNA, 1425 nt, synthetic construct
  misc_feature 1..1425: note = CDS (opt29) from Homo sapiens__NP_000448.3__HNF4A(1-474)(S87A_K106R_K108R_K126R_K 127R_S142A_S143A_S148A_T166A_S167A_K179R_K180R_K234R_K300R_ K307R_K309R_S313A_S378A_T429A_T432A_S436A_K447R_K458R_S461E _K470R)
  source 1..1425: mol_type = other RNA
atgagactgagcaagaccctggtggacatggacatggccgactactctgccgccctggaccctgcctacaccaccctggagttcgaaaacgtgcaagtgctgaccatgggcaacgacaccagccctagcgagggcaccaacctgaacgcccctaatagcctgggagtgtccgccctgtgtgccatctgtggcgatagagccaccggcaagcactacggcgccagctcttgtgatggctgcaagggcttcttccggcgggccgtgcggaagaaccacatgtacagctgccggttcagccggcagtgcgtggtggaccgggatagacggaaccagtgccggtactgcagactgaagaagtgcttcagagccggcatgcggagagaagccgtgcagaacgagcgggaccggatcagcaccagaagagccgcctacgaggacagcgccctgcccagcatcaacgccctgctgcaggccgaggtgctgagcagacagatcgccgccccagtgtccggcatcaacggcgacatccgggcccggagaatcgccagcattgccgacgtgtgcgagagcatgaaggaacagctgctggtgctggtggaatgggccaagtacatccccgccttttgcgagctgcccctggacgatcaggtggccctgctgagagcacacgccggcgaacatctgctgctgggagccacccggcggagcatggtgttcaaggacgtgctgctgctgggcaacgactacatcgtgcccagacactgccctgagctggccgagatgagccgggtgtccatcagaatcctggacgaactggtgctgccgtttcaggaactgcagatcgacgacaacgagtacgcctacctgaaggccatcatctttttcgaccccgacgccagaggcctgagcgaccctggccggatcagacggctgagagcccaggtgcaagtgtccctggaagattacatcaacgaccggcagtacgacagccggggcagatttggcgaactgctcctgctgctgcccaccctgcagagcatcacctggcagatgatcgagcagatccagttcatcaagctgttcggcatggccaagatcgacaatctgctgcaggaaatgctgctcgggggcgccccttctgatgcccctcatgcccaccaccctctgcaccctcacctgatgcaagaacacatgggcaccaatgtgatcgtggccaacacaatgcccacccacctgagcaacggccagatgtgcgagtggcccagacctagaggacaggccgccgcccctgaggcccctcagcctgccccacctggcggctctggcagcgagccttaccggctgctgcctggcgctgtggccaccatcgtgagacctctggaggccatcccccagcccaccatcacccggcaggaagtgatctga

SEQ ID NO: 687 - RNA, 1425 nt, synthetic construct
  misc_feature 1..1425: note = CDS (opt29) from Homo sapiens__NP_000448.3__HNF4A(1-474)(S87A_S95A_S99A_K106R_K10 8R_K126R_K127R_S142A_S143A_S148A_T166A_S167A_S313A_S378A_T4 29A_T432A_S436A_K458R_S461E)
  source 1..1425: mol_type = other RNA
atgagactgagcaagaccctggtggacatggacatggccgactactctgccgccctggaccctgcctacaccaccctggagttcgaaaacgtgcaagtgctgaccatgggcaacgacaccagccctagcgagggcaccaacctgaacgcccctaatagcctgggagtgtccgccctgtgtgccatctgtggcgatagagccaccggcaagcactacggcgccagctcttgtgatggctgcaagggcttcttccggcgggccgtgcggaagaaccacatgtacgcctgccggttcgcccggcagtgcgtggtggaccgggatagacggaaccagtgccggtactgcagactgaagaagtgcttcagagccggcatgcggagagaagccgtgcagaacgagcgggaccggatcagcaccagaagagccgcctacgaggacagcgccctgcccagcatcaacgccctgctgcaggccgaggtgctgagcagacagatcgccgccccagtgtccggcatcaacggcgacatccgggccaagaagatcgccagcattgccgacgtgtgcgagagcatgaaggaacagctgctggtgctggtggaatgggccaagtacatccccgccttttgcgagctgcccctggacgatcaggtggccctgctgagagcacacgccggcgaacatctgctgctgggagccaccaagcggagcatggtgttcaaggacgtgctgctgctgggcaacgactacatcgtgcccagacactgccctgagctggccgagatgagccgggtgtccatcagaatcctggacgaactggtgctgccgtttcaggaactgcagatcgacgacaacgagtacgcctacctgaaggccatcatctttttcgaccccgacgccaagggcctgagcgaccctggcaagatcaagcggctgagagcccaggtgcaagtgtccctggaagattacatcaacgaccggcagtacgacagccggggcagatttggcgaactgctcctgctgctgcccaccctgcagagcatcacctggcagatgatcgagcagatccagttcatcaagctgttcggcatggccaagatcgacaatctgctgcaggaaatgctgctcgggggcgccccttctgatgcccctcatgcccaccaccctctgcaccctcacctgatgcaagaacacatgggcaccaatgtgatcgtggccaacacaatgcccacccacctgagcaacggccagatgtgcgagtggcccagacctagaggacaggccgccgcccctgaggcccctcagcctgccccacctggcggctctggcagcgagccttacaaactgctgcctggcgctgtggccaccatcgtgagacctctggaggccatcccccagcccaccatcaccaagcaggaagtgatctga

SEQ ID NO: 688 - RNA, 1425 nt, synthetic construct
  misc_feature 1..1425: note = CDS (opt29) from Homo sapiens__NP_000448.3__HNF4A(1-474)(S87A_K106R_K108R_K126R_K 127R_S138A_T139A_S142A_S143A_S148A_T166A_S167A_S313A_S378A_ T429A_T432A_S436A_K458R_S461E)
  source 1..1425: mol_type = other RNA
atgagactgagcaagaccctggtggacatggacatggccgactactctgccgccctggaccctgcctacaccaccctggagttcgaaaacgtgcaagtgctgaccatgggcaacgacaccagccctagcgagggcaccaacctgaacgcccctaatagcctgggagtgtccgccctgtgtgccatctgtggcgatagagccaccggcaagcactacggcgccagctcttgtgatggctgcaagggcttcttccggcgggccgtgcggaagaaccacatgtacagctgccggttcagccggcagtgcgtggtggaccgggatagacggaaccagtgccggtactgcagactgaagaagtgcttcagagccggcatgcggagagaagccgtgcagaacgagcgggaccggatcgccgccagaagagccgcctacgaggacagcgccctgcccagcatcaacgccctgctgcaggccgaggtgctgagcagacagatcgccgccccagtgtccggcatcaacggcgacatccgggccaagaagatcgccagcattgccgacgtgtgcgagagcatgaaggaacagctgctggtgctggtggaatgggccaagtacatccccgccttttgcgagctgcccctggacgatcaggtggccctgctgagagcacacgccggcgaacatctgctgctgggagccaccaagcggagcatggtgttcaaggacgtgctgctgctgggcaacgactacatcgtgcccagacactgccctgagctggccgagatgagccgggtgtccatcagaatcctggacgaactggtgctgccgtttcaggaactgcagatcgacgacaacgagtacgcctacctgaaggccatcatctttttcgaccccgacgccaagggcctgagcgaccctggcaagatcaagcggctgagagcccaggtgcaagtgtccctggaagattacatcaacgaccggcagtacgacagccggggcagatttggcgaactgctcctgctgctgcccaccctgcagagcatcacctggcagatgatcgagcagatccagttcatcaagctgttcggcatggccaagatcgacaatctgctgcaggaaatgctgctcgggggcgccccttctgatgcccctcatgcccaccaccctctgcaccctcacctgatgcaagaacacatgggcaccaatgtgatcgtggccaacacaatgcccacccacctgagcaacggccagatgtgcgagtggcccagacctagaggacaggccgccgcccctgaggcccctcagcctgccccacctggcggctctggcagcgagccttacaaactgctgcctggcgctgtggccaccatcgtgagacctctggaggccatcccccagcccaccatcaccaagcaggaagtgatctga

SEQ ID NO: 689 - RNA, 1425 nt, synthetic construct
  misc_feature 1..1425: note = CDS (opt29) from Homo sapiens__NP_000448.3__HNF4A(1-474)(S87A_S95A_S99A_K106R_K10 8R_K126R_K127R_S138A_T139A_S142A_S143A_S148A_T166A_S167A_S3 13A_S378A_T429A_T432A_S436A_K458R_S461E)
  source 1..1425: mol_type = other RNA
atgagactgagcaagaccctggtggacatggacatggccgactactctgccgccctggaccctgcctacaccaccctggagttcgaaaacgtgcaagtgctgaccatgggcaacgacaccagccctagcgagggcaccaacctgaacgcccctaatagcctgggagtgtccgccctgtgtgccatctgtggcgatagagccaccggcaagcactacggcgccagctcttgtgatggctgcaagggcttcttccggcgggccgtgcggaagaaccacatgtacgcctgccggttcgcccggcagtgcgtggtggaccgggatagacggaaccagtgccggtactgcagactgaagaagtgcttcagagccggcatgcggagagaagccgtgcagaacgagcgggaccggatcgccgccagaagagccgcctacgaggacagcgccctgcccagcatcaacgccctgctgcaggccgaggtgctgagcagacagatcgccgccccagtgtccggcatcaacggcgacatccgggccaagaagatcgccagcattgccgacgtgtgcgagagcatgaaggaacagctgctggtgctggtggaatgggccaagtacatccccgccttttgcgagctgcccctggacgatcaggtggccctgctgagagcacacgccggcgaacatctgctgctgggagccaccaagcggagcatggtgttcaaggacgtgctgctgctgggcaacgactacatcgtgcccagacactgccctgagctggccgagatgagccgggtgtccatcagaatcctggacgaactggtgctgccgtttcaggaactgcagatcgacgacaacgagtacgcctacctgaaggccatcatctttttcgaccccgacgccaagggcctgagcgaccctggcaagatcaagcggctgagagcccaggtgcaagtgtccctggaagattacatcaacgaccggcagtacgacagccggggcagatttggcgaactgctcctgctgctgcccaccctgcagagcatcacctggcagatgatcgagcagatccagttcatcaagctgttcggcatggccaagatcgacaatctgctgcaggaaatgctgctcgggggcgccccttctgatgcccctcatgcccaccaccctctgcaccctcacctgatgcaagaacacatgggcaccaatgtgatcgtggccaacacaatgcccacccacctgagcaacggccagatgtgcgagtggcccagacctagaggacaggccgccgcccctgaggcccctcagcctgccccacctggcggctctggcagcgagccttacaaactgctgcctggcgctgtggccaccatcgtgagacctctggaggccatcccccagcccaccatcaccaagcaggaagtgatctga

SEQ ID NO: 690 - RNA, 1128 nt, Homo sapiens
  misc_feature 1..1128: note = CDS (wt) from Homo sapiens__NP_000448.3__HNF4A(1-375)
  source 1..1128: mol_type = mRNA
atgcgactctccaaaaccctcgtcgacatggacatggccgactacagtgctgcactggacccagcctacaccaccctggaatttgagaatgtgcaggtgttgacgatgggcaatgacacgtccccatcagaaggcaccaacctcaacgcgcccaacagcctgggtgtcagcgccctgtgtgccatctgcggggaccgggccacgggcaaacactacggtgcctcgagctgtgacggctgcaagggcttcttccggaggagcgtgcggaagaaccacatgtactcctgcagatttagccggcagtgcgtggtggacaaagacaagaggaaccagtgccgctactgcaggctcaagaaatgcttccgggctggcatgaagaaggaagccgtccagaatgagcgggaccggatcagcactcgaaggtcaagctatgaggacagcagcctgccctccatcaatgcgctcctgcaggcggaggtcctgtcccgacagatcacctcccccgtctccgggatcaacggcgacattcgggcgaagaagattgccagcatcgcagatgtgtgtgagtccatgaaggagcagctgctggttctcgttgagtgggccaagtacatcccagctttctgcgagctccccctggacgaccaggtggccctgctcagagcccatgctggcgagcacctgctgctcggagccaccaagagatccatggtgttcaaggacgtgctgctcctaggcaatgactacattgtccctcggcactgcccggagctggcggagatgagccgggtgtccatacgcatccttgacgagctggtgctgcccttccaggagctgcagatcgatgacaatgagtatgcctacctcaaagccatcatcttctttgacccagatgccaaggggctgagcgatccagggaagatcaagcggctgcgttcccaggtgcaggtgagcttggaggactacatcaacgaccgccagtatgactcgcgtggccgctttggagagctgctgctgctgctgcccaccttgcagagcatcacctggcagatgatcgagcagatccagttcatcaagctcttcggcatggccaagattgacaacctgttgcaggagatgctgctgtga

SEQ ID NO: 691 - RNA, 1128 nt, synthetic construct
  misc_feature 1..1128: note = CDS (wt mod) from Homo sapiens__NP_000448.3__HNF4A(1-375)
  source 1..1128: mol_type = other RNA
atgcgactctccaaaaccctcgtcgacatggacatggccgactacagtgctgcactggacccagcctacaccaccctggaatttgagaatgtccaggtgttgacgatgggcaatgacacgtccccatcagaaggcaccaacctcaacgcgcccaacagcctgggtgtgagcgccctgtgtgccatctgcggggaccgggccacgggcaaacactacggtgcctcgagctgtgacggctgcaagggcttcttccggaggagcgtgcggaagaaccacatgtactcctgcagatttagccggcagtgcgtggtggacaaagacaagaggaaccagtgccgctactgcaggctcaagaaatgcttccgggctggcatgaagaaggaagccgtccagaatgagcgggaccggatcagcactcgaaggtcaagctatgaggacagcagcctgccctccatcaatgcgctcctgcaggcggaggtcctgtcccgacagatcacctcccccgtctccgggatcaacggcgacattcgggcgaagaagattgccagcatcgcagatgtgtgtgagtccatgaaggagcagctgctggttctcgttgagtgggccaagtacatcccagctttctgcgagctccccctggacgaccaggtggccctgctcagagcccatgctggcgagcacctcctgctcggagccaccaagagatccatggtgttcaaggacgtgctgctcctaggcaatgactacattgtccctcggcactgcccggagctggcggagatgagccgggtgtccatacgcatccttgacgagctggtgctgcccttccaggagctgcagatcgatgacaatgagtatgcctacctcaaagccatcatcttctttgacccagatgccaaggggctgagcgatccagggaagatcaagcggctgcgttcccaggtccaggtgagcttggaggactacatcaacgaccgccagtatgactcgcgtggccgctttggagagctgctgctgctgctgcccaccttgcagagcatcacctggcagatgatcgagcagatccagttcatcaagctgttcggcatggccaagattgacaacctgttgcaggagatgctgctgtga

SEQ ID NO: 692 - RNA, 1128 nt, synthetic construct
  misc_feature 1..1128: note = CDS (opt1) from Homo sapiens__NP_000448.3__HNF4A(1-375)
  source 1..1128: mol_type = other RNA
atgcgcctgagcaagaccctcgtggacatggacatggccgactactccgccgcgctggaccccgcctacaccacgctggagttcgagaacgtccaggtgctcaccatgggcaacgacaccagcccgtccgaggggaccaacctgaacgcccccaacagcctgggcgtgtccgccctctgcgccatctgcggggaccgggcgacgggcaagcactacggggccagctcctgcgacggctgcaagggcttcttccgccggagcgtccgcaagaaccacatgtactcctgccggttcagccgccagtgcgtggtggacaaggacaagcggaaccagtgccgctactgccggctgaagaagtgcttccgcgccgggatgaagaaggaggccgtccagaacgagcgggaccgcatctccacccggcgcagctcctacgaggacagctccctgcccagcatcaacgcgctcctgcaggccgaggtgctgtcccggcagatcaccagccccgtgtccggcatcaacggggacatccgcgccaagaagatcgccagcatcgccgacgtctgcgagagcatgaaggagcagctcctggtgctggtggagtgggcgaagtacatcccggccttctgcgagctccccctggacgaccaggtcgccctgctccgggcccacgccggcgagcacctcctgctgggggcgaccaagcgctccatggtgttcaaggacgtgctgctgctcggcaacgactacatcgtcccccggcactgccccgagctggccgagatgagccgcgtgtccatccggatcctggacgagctcgtgctgccgttccaggagctgcagatcgacgacaacgagtacgcctacctcaaggccatcatcttcttcgaccccgacgccaagggcctgagcgaccccgggaagatcaagcgcctgcgctcccaggtccaggtgagcctcgaggactacatcaacgaccggcagtacgactcccgcggccggttcggggagctgctgctcctgctgcccacgctccagagcatcacctggcagatgatcgagcagatccagttcatcaagctgttcggcatggcgaagatcgacaacctgctccaggagatgctgctgtga

SEQ ID NO: 693 - RNA, 1128 nt, synthetic construct
  misc_feature 1..1128: note = CDS (opt1) from Homo sapiens__NP_000448.3__HNF4A(1-375)(S313A)
  source 1..1128: mol_type = other RNA
atgcgcctgagcaagaccctcgtggacatggacatggccgactactccgccgcgctggaccccgcctacaccacgctggagttcgagaacgtccaggtgctcaccatgggcaacgacaccagcccgtccgaggggaccaacctgaacgcccccaacagcctgggcgtgtccgccctctgcgccatctgcggggaccgggcgacgggcaagcactacggggccagctcctgcgacggctgcaagggcttcttccgccggagcgtccgcaagaaccacatgtactcctgccggttcagccgccagtgcgtggtggacaaggacaagcggaaccagtgccgctactgccggctgaagaagtgcttccgcgccgggatgaagaaggaggccgtccagaacgagcgggaccgcatctccacccggcgcagctcctacgaggacagctccctgcccagcatcaacgcgctcctgcaggccgaggtgctgtcccggcagatcaccagccccgtgtccggcatcaacggggacatccgcgccaagaagatcgccagcatcgccgacgtctgcgagagcatgaaggagcagctcctggtgctggtggagtgggcgaagtacatcccggccttctgcgagctccccctggacgaccaggtcgccctgctccgggcccacgccggcgagcacctcctgctgggggcgaccaagcgctccatggtgttcaaggacgtgctgctgctcggcaacgactacatcgtcccccggcactgccccgagctggccgagatgagccgcgtgtccatccggatcctggacgagctcgtgctgccgttccaggagctgcagatcgacgacaacgagtacgcctacctcaaggccatcatcttcttcgaccccgacgccaagggcctgagcgaccccgggaagatcaagcgcctgcgcgcgcaggtccaggtgagcctcgaggactacatcaacgaccggcagtacgactcccgcggccggttcggggagctgctgctcctgctgcccacgctccagagcatcacctggcagatgatcgagcagatccagttcatcaagctgttcggcatggcgaagatcgacaacctgctccaggagatgctgctgtga

SEQ ID NO: 694 - RNA, 1128 nt, synthetic construct
  misc_feature 1..1128: note = CDS (opt1) from Homo sapiens__NP_000448.3__HNF4A(1-375)(S313E)
  source 1..1128: mol_type = other RNA
atgcgcctgagcaagaccctcgtggacatggacatggccgactactccgccgcgctggaccccgcctacaccacgctggagttcgagaacgtccaggtgctcaccatgggcaacgacaccagcccgtccgaggggaccaacctgaacgcccccaacagcctgggcgtgtccgccctctgcgccatctgcggggaccgggcgacgggcaagcactacggggccagctcctgcgacggctgcaagggcttcttccgccggagcgtccgcaagaaccacatgtactcctgccggttcagccgccagtgcgtggtggacaaggacaagcggaaccagtgccgctactgccggctgaagaagtgcttccgcgccgggatgaagaaggaggccgtccagaacgagcgggaccgcatctccacccggcgcagctcctacgaggacagctccctgcccagcatcaacgcgctcctgcaggccgaggtgctgtcccggcagatcaccagccccgtgtccggcatcaacggggacatccgcgccaagaagatcgccagcatcgccgacgtctgcgagagcatgaaggagcagctcctggtgctggtggagtgggcgaagtacatcccggccttctgcgagctccccctggacgaccaggtcgccctgctccgggcccacgccggcgagcacctcctgctgggggcgaccaagcgctccatggtgttcaaggacgtgctgctgctcggcaacgactacatcgtcccccggcactgccccgagctggccgagatgagccgcgtgtccatccggatcctggacgagctcgtgctgccgttccaggagctgcagatcgacgacaacgagtacgcctacctcaaggccatcatcttcttcgaccccgacgccaagggcctgagcgaccccgggaagatcaagcgcctgcgcgagcaggtccaggtgagcctcgaggactacatcaacgaccggcagtacgactcccgcggccggttcggggagctgctgctcctgctgcccacgctccagagcatcacctggcagatgatcgagcagatccagttcatcaagctgttcggcatggcgaagatcgacaacctgctccaggagatgctgctgtga

SEQ ID NO: 695 - RNA, 1128 nt, synthetic construct
  misc_feature 1..1128: note = CDS (opt1) from Homo sapiens__NP_000448.3__HNF4A(1-375)(S142A_S143A)
  source 1..1128: mol_type = other RNA
atgcgcctgagcaagaccctcgtggacatggacatggccgactactccgccgcgctggaccccgcctacaccacgctggagttcgagaacgtccaggtgctcaccatgggcaacgacaccagcccgtccgaggggaccaacctgaacgcccccaacagcctgggcgtgtccgccctctgcgccatctgcggggaccgggcgacgggcaagcactacggggccagctcctgcgacggctgcaagggcttcttccgccggagcgtccgcaagaaccacatgtactcctgccggttcagccgccagtgcgtggtggacaaggacaagcggaaccagtgccgctactgccggctgaagaagtgcttccgcgccgggatgaagaaggaggccgtccagaacgagcgggaccgcatctccacccggcgcgcggcctacgaggacagctccctgcccagcatcaacgcgctcctgcaggccgaggtgctgtcccggcagatcaccagccccgtgtccggcatcaacggggacatccgcgccaagaagatcgccagcatcgccgacgtctgcgagagcatgaaggagcagctcctggtgctggtggagtgggcgaagtacatcccggccttctgcgagctccccctggacgaccaggtcgccctgctccgggcccacgccggcgagcacctcctgctgggggcgaccaagcgctccatggtgttcaaggacgtgctgctgctcggcaacgactacatcgtcccccggcactgccccgagctggccgagatgagccgcgtgtccatccggatcctggacgagctcgtgctgccgttccaggagctgcagatcgacgacaacgagtacgcctacctcaaggccatcatcttcttcgaccccgacgccaagggcctgagcgaccccgggaagatcaagcgcctgcgctcccaggtccaggtgagcctcgaggactacatcaacgaccggcagtacgactcccgcggccggttcggggagctgctgctcctgctgcccacgctccagagcatcacctggcagatgatcgagcagatccagttcatcaagctgttcggcatggcgaagatcgacaacctgctccaggagatgctgctgtga

SEQ ID NO: 696 - RNA, 1128 nt, synthetic construct
  misc_feature 1..1128: note = CDS (opt1) from Homo sapiens__NP_000448.3__HNF4A(1-375)(S142E_S143E)
  source 1..1128: mol_type = other RNA
atgcgcctgagcaagaccctcgtggacatggacatggccgactactccgccgcgctggaccccgcctacaccacgctggagttcgagaacgtccaggtgctcaccatgggcaacgacaccagcccgtccgaggggaccaacctgaacgcccccaacagcctgggcgtgtccgccctctgcgccatctgcggggaccgggcgacgggcaagcactacggggccagctcctgcgacggctgcaagggcttcttccgccggagcgtccgcaagaaccacatgtactcctgccggttcagccgccagtgcgtggtggacaaggacaagcggaaccagtgccgctactgccggctgaagaagtgcttccgcgccgggatgaagaaggaggccgtccagaacgagcgggaccgcatctccacccggcgcgaggagtacgaggacagctccctgcccagcatcaacgcgctcctgcaggccgaggtgctgtcccggcagatcaccagccccgtgtccggcatcaacggggacatccgcgccaagaagatcgccagcatcgccgacgtctgcgagagcatgaaggagcagctcctggtgctggtggagtgggcgaagtacatcccggccttctgcgagctccccctggacgaccaggtcgccctgctccgggcccacgccggcgagcacctcctgctgggggcgaccaagcgctccatggtgttcaaggacgtgctgctgctcggcaacgactacatcgtcccccggcactgccccgagctggccgagatgagccgcgtgtccatccggatcctggacgagctcgtgctgccgttccaggagctgcagatcgacgacaacgagtacgcctacctcaaggccatcatcttcttcgaccccgacgccaagggcctgagcgaccccgggaagatcaagcgcctgcgctcccaggtccaggtgagcctcgaggactacatcaacgaccggcagtacgactcccgcggccggttcggggagctgctgctcctgctgcccacgctccagagcatcacctggcagatgatcgagcagatccagttcatcaagctgttcggcatggcgaagatcgacaacctgctccaggagatgctgctgtga

SEQ ID NO: 697 - RNA, 1128 nt, synthetic construct
  misc_feature 1..1128: note = CDS (opt1) from Homo sapiens__NP_000448.3__HNF4A(1-375)(S143A)
  source 1..1128: mol_type = other RNA
atgcgcctgagcaagaccctcgtggacatggacatggccgactactccgccgcgctggaccccgcctacaccacgctggagttcgagaacgtccaggtgctcaccatgggcaacgacaccagcccgtccgaggggaccaacctgaacgcccccaacagcctgggcgtgtccgccctctgcgccatctgcggggaccgggcgacgggcaagcactacggggccagctcctgcgacggctgcaagggcttcttccgccggagcgtccgcaagaaccacatgtactcctgccggttcagccgccagtgcgtggtggacaaggacaagcggaaccagtgccgctactgccggctgaagaagtgcttccgcgccgggatgaagaaggaggccgtccagaacgagcgggaccgcatctccacccggcgcagcgcgtacgaggacagctccctgcccagcatcaacgcgctcctgcaggccgaggtgctgtcccggcagatcaccagccccgtgtccggcatcaacggggacatccgcgccaagaagatcgccagcatcgccgacgtctgcgagagcatgaaggagcagctcctggtgctggtggagtgggcgaagtacatcccggccttctgcgagctccccctggacgaccaggtcgccctgctccgggcccacgccggcgagcacctcctgctgggggcgaccaagcgctccatggtgttcaaggacgtgctgctgctcggcaacgactacatcgtcccccggcactgccccgagctggccgagatgagccgcgtgtccatccggatcctggacgagctcgtgctgccgttccaggagctgcagatcgacgacaacgagtacgcctacctcaaggccatcatcttcttcgaccccgacgccaagggcctgagcgaccccgggaagatcaagcgcctgcgctcccaggtccaggtgagcctcgaggactacatcaacgaccggcagtacgactcccgcggccggttcggggagctgctgctcctgctgcccacgctccagagcatcacctggcagatgatcgagcagatccagttcatcaagctgttcggcatggcgaagatcgacaacctgctccaggagatgctgctgtga

SEQ ID NO: 698 - RNA, 1128 nt, synthetic construct
  misc_feature 1..1128: note = CDS (opt1) from Homo sapiens__NP_000448.3__HNF4A(1-375)(T166A)
  source 1..1128: mol_type = other RNA
atgcgcctgagcaagaccctcgtggacatggacatggccgactactccgccgcgctggaccccgcctacaccacgctggagttcgagaacgtccaggtgctcaccatgggcaacgacaccagcccgtccgaggggaccaacctgaacgcccccaacagcctgggcgtgtccgccctctgcgccatctgcggggaccgggcgacgggcaagcactacggggccagctcctgcgacggctgcaagggcttcttccgccggagcgtccgcaagaaccacatgtactcctgccggttcagccgccagtgcgtggtggacaaggacaagcggaaccagtgccgctactgccggctgaagaagtgcttccgcgccgggatgaagaaggaggccgtccagaacgagcgggaccgcatctccacccggcgcagctcctacgaggacagctccctgcccagcatcaacgcgctcctgcaggccgaggtgctgtcccggcagatcgcgagccccgtgtccggcatcaacggggacatccgcgccaagaagatcgccagcatcgccgacgtctgcgagagcatgaaggagcagctcctggtgctggtggagtgggcgaagtacatcccggccttctgcgagctccccctggacgaccaggtcgccctgctccgggcccacgccggcgagcacctcctgctgggggcgaccaagcgctccatggtgttcaaggacgtgctgctgctcggcaacgactacatcgtcccccggcactgccccgagctggccgagatgagccgcgtgtccatccggatcctggacgagctcgtgctgccgttccaggagctgcagatcgacgacaacgagtacgcctacctcaaggccatcatcttcttcgaccccgacgccaagggcctgagcgaccccgggaagatcaagcgcctgcgctcccaggtccaggtgagcctcgaggactacatcaacgaccggcagtacgactcccgcggccggttcggggagctgctgctcctgctgcccacgctccagagcatcacctggcagatgatcgagcagatccagttcatcaagctgttcggcatggcgaagatcgacaacctgctccaggagatgctgctgtga

SEQ ID NO: 699 - RNA, 1128 nt, synthetic construct
  misc_feature 1..1128: note = CDS (opt1) from Homo sapiens__NP_000448.3__HNF4A(1-375)(S167E)
  source 1..1128: mol_type = other RNA
atgcgcctgagcaagaccctcgtggacatggacatggccgactactccgccgcgctggaccccgcctacaccacgctggagttcgagaacgtccaggtgctcaccatgggcaacgacaccagcccgtccgaggggaccaacctgaacgcccccaacagcctgggcgtgtccgccctctgcgccatctgcggggaccgggcgacgggcaagcactacggggccagctcctgcgacggctgcaagggcttcttccgccggagcgtccgcaagaaccacatgtactcctgccggttcagccgccagtgcgtggtggacaaggacaagcggaaccagtgccgctactgccggctgaagaagtgcttccgcgccgggatgaagaaggaggccgtccagaacgagcgggaccgcatctccacccggcgcagctcctacgaggacagctccctgcccagcatcaacgcgctcctgcaggccgaggtgctgtcccggcagatcaccgagcccgtgtccggcatcaacggggacatccgcgccaagaagatcgccagcatcgccgacgtctgcgagagcatgaaggagcagctcctggtgctggtggagtgggcgaagtacatcccggccttctgcgagctccccctggacgaccaggtcgccctgctccgggcccacgccggcgagcacctcctgctgggggcgaccaagcgctccatggtgttcaaggacgtgctgctgctcggcaacgactacatcgtcccccggcactgccccgagctggccgagatgagccgcgtgtccatccggatcctggacgagctcgtgctgccgttccaggagctgcagatcgacgacaacgagtacgcctacctcaaggccatcatcttcttcgaccccgacgccaagggcctgagcgaccccgggaagatcaagcgcctgcgctcccaggtccaggtgagcctcgaggactacatcaacgaccggcagtacgactcccgcggccggttcggggagctgctgctcctgctgcccacgctccagagcatcacctggcagatgatcgagcagatccagttcatcaagctgttcggcatggcgaagatcgacaacctgctccaggagatgctgctgtga

SEQ ID NO: 700 - RNA, 1128 nt, synthetic construct
  misc_feature 1..1128: note = CDS (opt1) from Homo sapiens__NP_000448.3__HNF4A(1-375)(S167A)
  source 1..1128: mol_type = other RNA
atgcgcctgagcaagaccctcgtggacatggacatggccgactactccgccgcgctggaccccgcctacaccacgctggagttcgagaacgtccaggtgctcaccatgggcaacgacaccagcccgtccgaggggaccaacctgaacgcccccaacagcctgggcgtgtccgccctctgcgccatctgcggggaccgggcgacgggcaagcactacggggccagctcctgcgacggctgcaagggcttcttccgccggagcgtccgcaagaaccacatgtactcctgccggttcagccgccagtgcgtggtggacaaggacaagcggaaccagtgccgctactgccggctgaagaagtgcttccgcgccgggatgaagaaggaggccgtccagaacgagcgggaccgcatctccacccggcgcagctcctacgaggacagctccctgcccagcatcaacgcgctcctgcaggccgaggtgctgtcccggcagatcaccgcgcccgtgtccggcatcaacggggacatccgcgccaagaagatcgccagcatcgccgacgtctgcgagagcatgaaggagcagctcctggtgctggtggagtgggcgaagtacatcccggccttctgcgagctccccctggacgaccaggtcgccctgctccgggcccacgccggcgagcacctcctgctgggggcgaccaagcgctccatggtgttcaaggacgtgctgctgctcggcaacgactacatcgtcccccggcactgccccgagctggccgagatgagccgcgtgtccatccggatcctggacgagctcgtgctgccgttccaggagctgcagatcgacgacaacgagtacgcctacctcaaggccatcatcttcttcgaccccgacgccaagggcctgagcgaccccgggaagatcaagcgcctgcgctcccaggtccaggtgagcctcgaggactacatcaacgaccggcagtacgactcccgcggccggttcggggagctgctgctcctgctgcccacgctccagagcatcacctggcagatgatcgagcagatccagttcatcaagctgttcggcatggcgaagatcgacaacctgctccaggagatgctgctgtga

SEQ ID NO: 701 - RNA, 1128 nt, synthetic construct; identical to SEQ ID NO: 700
  misc_feature 1..1128: note = CDS (opt1) from Homo sapiens__NP_000448.3__HNF4A(1-375)(S167A_S378A_T429A_T432A_ S436A)
  source 1..1128: mol_type = other RNA

SEQ ID NO: 702 - RNA, 1128 nt, synthetic construct; identical to SEQ ID NO: 699
  misc_feature 1..1128: note = CDS (opt1) from Homo sapiens__NP_000448.3__HNF4A(1-375)(S167E_S378E_T429E_T432E_ S436E)
  source 1..1128: mol_type = other RNA

SEQ ID NO: 703 - RNA, 1128 nt, synthetic construct
  misc_feature 1..1128: note = CDS (opt1) from Homo sapiens__NP_000448.3__HNF4A(1-375)(S87A)
  source 1..1128: mol_type = other RNA
atgcgcctgagcaagaccctcgtggacatggacatggccgactactccgccgcgctggaccccgcctacaccacgctggagttcgagaacgtccaggtgctcaccatgggcaacgacaccagcccgtccgaggggaccaacctgaacgcccccaacagcctgggcgtgtccgccctctgcgccatctgcggggaccgggcgacgggcaagcactacggggccagctcctgcgacggctgcaagggcttcttccgccgggcggtccgcaagaaccacatgtactcctgccggttcagccgccagtgcgtggtggacaaggacaagcggaaccagtgccgctactgccggctgaagaagtgcttccgcgccgggatgaagaaggaggccgtccagaacgagcgggaccgcatctccacccggcgcagctcctacgaggacagctccctgcccagcatcaacgcgctcctgcaggccgaggtgctgtcccggcagatcaccagccccgtgtccggcatcaacggggacatccgcgccaagaagatcgccagcatcgccgacgtctgcgagagcatgaaggagcagctcctggtgctggtggagtgggcgaagtacatcccggccttctgcgagctccccctggacgaccaggtcgccctgctccgggcccacgccggcgagcacctcctgctgggggcgaccaagcgctccatggtgttcaaggacgtgctgctgctcggcaacgactacatcgtcccccggcactgccccgagctggccgagatgagccgcgtgtccatccggatcctggacgagctcgtgctgccgttccaggagctgcagatcgacgacaacgagtacgcctacctcaaggccatcatcttcttcgaccccgacgccaagggcctgagcgaccccgggaagatcaagcgcctgcgctcccaggtccaggtgagcctcgaggactacatcaacgaccggcagtacgactcccgcggccggttcggggagctgctgctcctgctgcccacgctccagagcatcacctggcagatgatcgagcagatccagttcatcaagctgttcggcatggcgaagatcgacaacctgctccaggagatgctgctgtga

SEQ ID NO: 704 - RNA, 1128 nt, synthetic construct
  misc_feature 1..1128: note = CDS (opt1) from Homo sapiens__NP_000448.3__HNF4A(1-375)(S87E)
  source 1..1128: mol_type = other RNA
atgcgcctgagcaagaccctcgtggacatggacatggccgactactccgccgcgctggaccccgcctacaccacgctggagttcgagaacgtccaggtgctcaccatgggcaacgacaccagcccgtccgaggggaccaacctgaacgcccccaacagcctgggcgtgtccgccctctgcgccatctgcggggaccgggcgacgggcaagcactacggggccagctcctgcgacggctgcaagggcttcttccgccgggaggtccgcaagaaccacatgtactcctgccggttcagccgccagtgcgtggtggacaaggacaagcggaaccagtgccgctactgccggctgaagaagtgcttccgcgccgggatgaagaaggaggccgtccagaacgagcgggaccgcatctccacccggcgcagctcctacgaggacagctccctgcccagcatcaacgcgctcctgcaggccgaggtgctgtcccggcagatcaccagccccgtgtccggcatcaacggggacatccgcgccaagaagatcgccagcatcgccgacgtctgcgagagcatgaaggagcagctcctggtgctggtggagtgggcgaagtacatcccggccttctgcgagctccccctggacgaccaggtcgccctgctccgggcccacgccggcgagcacctcctgctgggggcgaccaagcgctccatggtgttcaaggacgtgctgctgctcggcaacgactacatcgtcccccggcactgccccgagctggccgagatgagccgcgtgtccatccggatcctggacgagctcgtgctgccgttccaggagctgcagatcgacgacaacgagtacgcctacctcaaggccatcatcttcttcgaccccgacgccaagggcctgagcgaccccgggaagatcaagcgcctgcgctcccaggtccaggtgagcctcgaggactacatcaacgaccggcagtacgactcccgcggccggttcggggagctgctgctcctgctgcccacgctccagagcatcacctggcagatgatcgagcagatccagttcatcaagctgttcggcatggcgaagatcgacaacctgctccaggagatgctgctgtga

SEQ ID NO: 705 - RNA, 1128 nt, synthetic construct
  misc_feature 1..1128: note = CDS (opt1) from Homo sapiens__NP_000448.3__HNF4A(1-375)(R2V)
  source 1..1128: mol_type = other RNA
atggtgctgagcaagaccctcgtggacatggacatggccgactactccgccgcgctggaccccgcctacaccacgctggagttcgagaacgtccaggtgctcaccatgggcaacgacaccagcccgtccgaggggaccaacctgaacgcccccaacagcctgggcgtgtccgccctctgcgccatctgcggggaccgggcgacgggcaagcactacggggccagctcctgcgacggctgcaagggcttcttccgccggagcgtccgcaagaaccacatgtactcctgccggttcagccgccagtgcgtggtggacaaggacaagcggaaccagtgccgctactgccggctgaagaagtgcttccgcgccgggatgaagaaggaggccgtccagaacgagcgggaccgcatctccacccggcgcagctcctacgaggacagctccctgcccagcatcaacgcgctcctgcaggccgaggtgctgtcccggcagatcaccagccccgtgtccggcatcaacggggacatccgcgccaagaagatcgccagcatcgccgacgtctgcgagagcatgaaggagcagctcctggtgctggtggagtgggcgaagtacatcccggccttctgcgagctccccctggacgaccaggtcgccctgctccgggcccacgccggcgagcacctcctgctgggggcgaccaagcgctccatggtgttcaaggacgtgctgctgctcggcaacgactacatcgtcccccggcactgccccgagctggccgagatgagccgcgtgtccatccggatcctggacgagctcgtgctgccgttccaggagctgcagatcgacgacaacgagtacgcctacctcaaggccatcatcttcttcgaccccgacgccaagggcctgagcgaccccgggaagatcaagcgcctgcgctcccaggtccaggtgagcctcgaggactacatcaacgaccggcagtacgactcccgcggccggttcggggagctgctgctcctgctgcccacgctccagagcatcacctggcagatgatcgagcagatccagttcatcaagctgttcggcatggcgaagatcgacaacctgctccaggagatgctgctgtga

SEQ ID NO: 706 - RNA, 1128 nt, synthetic construct
  misc_feature 1..1128: note = CDS (opt1) from Homo sapiens__NP_000448.3__HNF4A(1-375)(R2V_K5V)
  source 1..1128: mol_type = other RNA
atggtgctgagcgtgaccctcgtggacatggacatggccgactactccgccgcgctggaccccgcctacaccacgctggagttcgagaacgtccaggtgctcaccatgggcaacgacaccagcccgtccgaggggaccaacctgaacgcccccaacagcctgggcgtgtccgccctctgcgccatctgcggggaccgggcgacgggcaagcactacggggccagctcctgcgacggctgcaagggcttcttccgccggagcgtccgcaagaaccacatgtactcctgccggttcagccgccagtgcgtggtggacaaggacaagcggaaccagtgccgctactgccggctgaagaagtgcttccgcgccgggatgaagaaggaggccgtccagaacgagcgggaccgcatctccacccggcgcagctcctacgaggacagctccctgcccagcatcaacgcgctcctgcaggccgaggtgctgtcccggcagatcaccagccccgtgtccggcatcaacggggacatccgcgccaagaagatcgccagcatcgccgacgtctgcgagagcatgaaggagcagctcctggtgctggtggagtgggcgaagtacatcccggccttctgcgagctccccctggacgaccaggtcgccctgctccgggcccacgccggcgagcacctcctgctgggggcgaccaagcgctccatggtgttcaaggacgtgctgctgctcggcaacgactacatcgtcccccggcactgccccgagctggccgagatgagccgcgtgtccatccggatcctggacgagctcgtgctgccgttccaggagctgcagatcgacgacaacgagtacgcctacctcaaggccatcatcttcttcgaccccgacgccaagggcctgagcgaccccgggaagatcaagcgcctgcgctcccaggtccaggtgagcctcgaggactacatcaacgaccggcagtacgactcccgcggccggttcggggagctgctgctcctgctgcccacgctccagagcatcacctggcagatgatcgagcagatccagttcatcaagctgttcggcatggcgaagatcgacaacctgctccaggagatgctgctgtga

SEQ ID NO: 707 - RNA, 1128 nt, synthetic construct
  misc_feature 1..1128: note = CDS (opt1) from Homo sapiens__NP_000448.3__HNF4A(1-375)(K179R_K180R)
  source 1..1128: mol_type = other RNA
atgcgcctgagcaagaccctcgtggacatggacatggccgactactccgccgcgctggaccccgcctacaccacgctggagttcgagaacgtccaggtgctcaccatgggcaacgacaccagcccgtccgaggggaccaacctgaacgcccccaacagcctgggcgtgtccgccctctgcgccatctgcggggaccgggcgacgggcaagcactacggggccagctcctgcgacggctgcaagggcttcttccgccggagcgtccgcaagaaccacatgtactcctgccggttcagccgccagtgcgtggtggacaaggacaagcggaaccagtgccgctactgccggctgaagaagtgcttccgcgccgggatgaagaaggaggccgtccagaacgagcgggaccgcatctccacccggcgcagctcctacgaggacagctccctgcccagcatcaacgcgctcctgcaggccgaggtgctgtcccggcagatcaccagccccgtgtccggcatcaacggggacatccgcgcccggcgcatcgccagcatcgccgacgtctgcgagagcatgaaggagcagctcctggtgctggtggagtgggcgaagtacatcccggccttctgcgagctccccctggacgaccaggtcgccctgctccgggcccacgccggcgagcacctcctgctgggggcgaccaagcgctccatggtgttcaaggacgtgctgctgctcggcaacgactacatcgtcccccggcactgccccgagctggccgagatgagccgcgtgtccatccggatcctggacgagctcgtgctgccgttccaggagctgcagatcgacgacaacgagtacgcctacctcaaggccatcatcttcttcgaccccgacgccaagggcctgagcgaccccgggaagatcaagcgcctgcgctcccaggtccaggtgagcctcgaggactacatcaacgaccggcagtacgactcccgcggccggttcggggagctgctgctcctgctgcccacgctccagagcatcacctggcagatgatcgagcagatccagttcatcaagctgttcggcatggcgaagatcgacaacctgctccaggagatgctgctgtga

SEQ ID NO: 708 - RNA, 1128 nt, synthetic construct
  misc_feature 1..1128: note = CDS (opt1) from Homo sapiens__NP_000448.3__HNF4A(1-375)(K234R)
  source 1..1128: mol_type = other RNA
atgcgcctgagcaagaccctcgtggacatggacatggccgactactccgccgcgctggaccccgcctacaccacgctggagttcgagaacgtccaggtgctcaccatgggcaacgacaccagcccgtccgaggggaccaacctgaacgcccccaacagcctgggcgtgtccgccctctgcgccatctgcggggaccgggcgacgggcaagcactacggggccagctcctgcgacggctgcaagggcttcttccgccggagcgtccgcaagaaccacatgtactcctgccggttcagccgccagtgcgtggtggacaaggacaagcggaaccagtgccgctactgccggctgaagaagtgcttccgcgccgggatgaagaaggaggccgtccagaacgagcgggaccgcatctccacccggcgcagctcctacgaggacagctccctgcccagcatcaacgcgctcctgcaggccgaggtgctgtcccggcagatcaccagccccgtgtccggcatcaacggggacatccgcgccaagaagatcgccagcatcgccgacgtctgcgagagcatgaaggagcagctcctggtgctggtggagtgggcgaagtacatcccggccttctgcgagctccccctggacgaccaggtcgccctgctccgggcccacgccggcgagcacctcctgctgggggcgacccgccgctccatggtgttcaaggacgtgctgctgctcggcaacgactacatcgtcccccggcactgccccgagctggccgagatgagccgcgtgtccatccggatcctggacgagctcgtgctgccgttccaggagctgcagatcgacgacaacgagtacgcctacctcaaggccatcatcttcttcgaccccgacgccaagggcctgagcgaccccgggaagatcaagcgcctgcgctcccaggtccaggtgagcctcgaggactacatcaacgaccggcagtacgactcccgcggccggttcggggagctgctgctcctgctgcccacgctccagagcatcacctggcagatgatcgagcagatccagttcatcaagctgttcggcatggcgaagatcgacaacctgctccaggagatgctgctgtga

SEQ ID NO: 709 - RNA, 1128 nt, synthetic construct
  misc_feature 1..1128: note = CDS (opt1) from Homo sapiens__NP_000448.3__HNF4A(1-375)(K300R)
  source 1..1128: mol_type = other RNA
atgcgcctgagcaagaccctcgtggacatggacatggccgactactccgccgcgctggaccccgcctacaccacgctggagttcgagaacgtccaggtgctcaccatgggcaacgacaccagcccgtccgaggggaccaacctgaacgcccccaacagcctgggcgtgtccgccctctgcgccatctgcggggaccgggcgacgggcaagcactacggggccagctcctgcgacggctgcaagggcttcttccgccggagcgtccgcaagaaccacatgtactcctgccggttcagccgccagtgcgtggtggacaaggacaagcggaaccagtgccgctactgccggctgaagaagtgcttccgcgccgggatgaagaaggaggccgtccagaacgagcgggaccgcatctccacccggcgcagctcctacgaggacagctccctgcccagcatcaacgcgctcctgcaggccgaggtgctgtcccggcagatcaccagccccgtgtccggcatcaacggggacatccgcgccaagaagatcgccagcatcgccgacgtctgcgagagcatgaaggagcagctcctggtgctggtggagtgggcgaagtacatcccggccttctgcgagctccccctggacgaccaggtcgccctgctccgggcccacgccggcgagcacctcctgctgggggcgaccaagcgctccatggtgttcaaggacgtgctgctgctcggcaacgactacatcgtcccccggcactgccccgagctggccgagatgagccgcgtgtccatccggatcctggacgagctcgtgctgccgttccaggagctgcagatcgacgacaacgagtacgcctacctcaaggccatcatcttcttcgaccccgacgcccgcggcctgagcgaccccgggaagatcaagcgcctgcgctcccaggtccaggtgagcctcgaggactacatcaacgaccggcagtacgactcccgcggccggttcggggagctgctgctcctgctgcccacgctccagagcatcacctggcagatgatcgagcagatccagttcatcaagctgttcggcatggcgaagatcgacaacctgctccaggagatgctgctgtga

SEQ ID NO: 710 - RNA, 1128 nt, synthetic construct
  misc_feature 1..1128: note = CDS (opt1) from Homo sapiens__NP_000448.3__HNF4A(1-375)(K300R_K307R_K309R)
  source 1..1128: mol_type = other RNA
atgcgcctgagcaagaccctcgtggacatggacatggccgactactccgccgcgctggaccccgcctacaccacgctggagttcgagaacgtccaggtgctcaccatgggcaacgacaccagcccgtccgaggggaccaacctgaacgcccccaacagcctgggcgtgtccgccctctgcgccatctgcggggaccgggcgacgggcaagcactacggggccagctcctgcgacggctgcaagggcttcttccgccggagcgtccgcaagaaccacatgtactcctgccggttcagccgccagtgcgtggtggacaaggacaagcggaaccagtgccgctactgccggctgaagaagtgcttccgcgccgggatgaagaaggaggccgtccagaacgagcgggaccgcatctccacccggcgcagctcctacgaggacagctccctgcccagcatcaacgcgctcctgcaggccgaggtgctgtcccggcagatcaccagccccgtgtccggcatcaacggggacatccgcgccaagaagatcgccagcatcgccgacgtctgcgagagcatgaaggagcagctcctggtgctggtggagtgggcgaagtacatcccggccttctgcgagctccccctggacgaccaggtcgccctgctccgggcccacgccggcgagcacctcctgctgggggcgaccaagcgctccatggtgttcaaggacgtgctgctgctcggcaacgactacatcgtcccccggcactgccccgagctggccgagatgagccgcgtgtccatccggatcctggacgagctcgtgctgccgttccaggagctgcagatcgacgacaacgagtacgcctacctcaaggccatcatcttcttcgaccccgacgcccgcggcctgagcgaccccgggcgcatccggcgcctgcgctcccaggtccaggtgagcctcgaggactacatcaacgaccggcagtacgactcccgcggccggttcggggagctgctgctcctgctgcccacgctccagagcatcacctggcagatgatcgagcagatccagttcatcaagctgttcggcatggcgaagatcgacaacctgctccaggagatgctgctgtga

SEQ ID NO: 711 - RNA, 1128 nt, synthetic construct; identical to SEQ ID NO: 692
  misc_feature 1..1128: note = CDS (opt1) from Homo sapiens__NP_000448.3__HNF4A(1-375)(K447R_K470R)
  source 1..1128: mol_type = other RNA

SEQ ID NO: 712 - RNA, 1128 nt, synthetic construct; identical to SEQ ID NO: 692
  misc_feature 1..1128: note = CDS (opt1) from Homo sapiens__NP_000448.3__HNF4A(1-375)(K458R)
  source 1..1128: mol_type = other RNA

SEQ ID NO: 713 - RNA, 1128 nt, synthetic construct
  misc_feature 1..1128: note = CDS (opt1) from Homo sapiens__NP_000448.3__HNF4A(1-375)(K106R_K108R_K126R_K127R)
  source 1..1128: mol_type = other RNA
atgcgcctgagcaagaccctcgtggacatggacatggccgactactccgccgcgctggaccccgcctacaccacgctggagttcgagaacgtccaggtgctcaccatgggcaacgacaccagcccgtccgaggggaccaacctgaacgcccccaacagcctgggcgtgtccgccctctgcgccatctgcggggaccgggcgacgggcaagcactacggggccagctcctgcgacggctgcaagggcttcttccgccggagcgtccgcaagaaccacatgtactcctgccggttcagccgccagtgcgtggtggaccgcgaccggcggaaccagtgccgctactgccggctgaagaagtgcttccgcgccgggatgcgccgcgaggccgtccagaacgagcgggaccgcatctccacccggcgcagctcctacgaggacagctccctgcccagcatcaacgcgctcctgcaggccgaggtgctgtcccggcagatcaccagccccgtgtccggcatcaacggggacatccgcgccaagaagatcgccagcatcgccgacgtctgcgagagcatgaaggagcagctcctggtgctggtggagtgggcgaagtacatcccggccttctgcgagctccccctggacgaccaggtcgccctgctccgggcccacgccggcgagcacctcctgctgggggcgaccaagcgctccatggtgttcaaggacgtgctgctgctcggcaacgactacatcgtcccccggcactgccccgagctggccgagatgagccgcgtgtccatccggatcctggacgagctcgtgctgccgttccaggagctgcagatcgacgacaacgagtacgcctacctcaaggccatcatcttcttcgaccccgacgccaagggcctgagcgaccccgggaagatcaagcgcctgcgctcccaggtccaggtgagcctcgaggactacatcaacgaccggcagtacgactcccgcggccggttcggggagctgctgctcctgctgcccacgctccagagcatcacctggcagatgatcgagcagatccagttcatcaagctgttcggcatggcgaagatcgacaacctgctccaggagatgctgctgtga

SEQ ID NO: 714 - RNA, 1128 nt, synthetic construct
  misc_feature 1..1128: note = CDS (opt1) from Homo sapiens__NP_000448.3__HNF4A(1-375)(E285Q)
  source 1..1128: mol_type = other RNA
atgcgcctgagcaagaccctcgtggacatggacatggccgactactccgccgcgctggaccccgcctacaccacgctggagttcgagaacgtccaggtgctcaccatgggcaacgacaccagcccgtccgaggggaccaacctgaacgcccccaacagcctgggcgtgtccgccctctgcgccatctgcggggaccgggcgacgggcaagcactacggggccagctcctgcgacggctgcaagggcttcttccgccggagcgtccgcaagaaccacatgtactcctgccggttcagccgccagtgcgtggtggacaaggacaagcggaaccagtgccgctactgccggctgaagaagtgcttccgcgccgggatgaagaaggaggccgtccagaacgagcgggaccgcatctccacccggcgcagctcctacgaggacagctccctgcccagcatcaacgcgctcctgcaggccgaggtgctgtcccggcagatcaccagccccgtgtccggcatcaacggggacatccgcgccaagaagatcgccagcatcgccgacgtctgcgagagcatgaaggagcagctcctggtgctggtggagtgggcgaagtacatcccggccttctgcgagctccccctggacgaccaggtcgccctgctccgggcccacgccggcgagcacctcctgctgggggcgaccaagcgctccatggtgttcaaggacgtgctgctgctcggcaacgactacatcgtcccccggcactgccccgagctggccgagatgagccgcgtgtccatccggatcctggacgagctcgtgctgccgttccaggagctgcagatcgacgacaaccagtacgcctacctcaaggccatcatcttcttcgaccccgacgccaagggcctgagcgaccccgggaagatcaagcgcctgcgctcccaggtccaggtgagcctcgaggactacatcaacgaccggcagtacgactcccgcggccggttcggggagctgctgctcctgctgcccacgctccagagcatcacctggcagatgatcgagcagatccagttcatcaagctgttcggcatggcgaagatcgacaacctgctccaggagatgctgctgtga

SEQ ID NO: 715 - RNA, 1128 nt, synthetic construct
  misc_feature 1..1128: note = CDS (opt1) from Homo sapiens__NP_000448.3__HNF4A(1-375)(T166E)
  source 1..1128: mol_type = other RNA
atgcgcctgagcaagaccctcgtggacatggacatggccgactactccgccgcgctggaccccgcctacaccacgctggagttcgagaacgtccaggtgctcaccatgggcaacgacaccagcccgtccgaggggaccaacctgaacgcccccaacagcctgggcgtgtccgccctctgcgccatctgcggggaccgggcgacgggcaagcactacggggccagctcctgcgacggctgcaagggcttcttccgccggagcgtccgcaagaaccacatgtactcctgccggttcagccgccagtgcgtggtggacaaggacaagcggaaccagtgccgctactgccggctgaagaagtgcttccgcgccgggatgaagaaggaggccgtccagaacgagcgggaccgcatctccacccggcgcagctcctacgaggacagctccctgcccagcatcaacgcgctcctgcaggccgaggtgctgtcccggcagatcgagagccccgtgtccggcatcaacggggacatccgcgccaagaagatcgccagcatcgccgacgtctgcgagagcatgaaggagcagctcctggtgctggtggagtgggcgaagtacatcccggccttctgcgagctccccctggacgaccaggtcgccctgctccgggcccacgccggcgagcacctcctgctgggggcgaccaagcgctccatggtgttcaaggacgtgctgctgctcggcaacgactacatcgtcccccggcactgccccgagctggccgagatgagccgcgtgtccatccggatcctggacgagctcgtgctgccgttccaggagctgcagatcgacgacaacgagtacgcctacctcaaggccatcatcttcttcgaccccgacgccaagggcctgagcgaccccgggaagatcaagcgcctgcgctcccaggtccaggtgagcctcgaggactacatcaacgaccggcagtacgactcccgcggccggttcggggagctgctgctcctgctgcccacgctccagagcatcacctggcagatgatcgagcagatccagttcatcaagctgttcggcatggcgaagatcgacaacctgctccaggagatgctgctgtga

SEQ ID NO: 716 - RNA, 1128 nt, synthetic construct
  misc_feature 1..1128: note = CDS (opt1) from Homo sapiens__NP_000448.3__HNF4A(1-375)(S148A)
  source 1..1128: mol_type = other RNA
atgcgcctgagcaagaccctcgtggacatggacatggccgactactccgccgcgctggaccccgcctacaccacgctggagttcgagaacgtccaggtgctcaccatgggcaacgacaccagcccgtccgaggggaccaacctgaacgcccccaacagcctgggcgtgtccgccctctgcgccatctgcggggaccgggcgacgggcaagcactacggggccagctcctgcgacggctgcaagggcttcttccgccggagcgtccgcaagaaccacatgtactcctgccggttcagccgccagtgcgtggtggacaaggacaagcggaaccagtgccgctactgccggctgaagaagtgcttccgcgccgggatgaagaaggaggccgtccagaacgagcgggaccgcatctccacccggcgcagctcctacgaggacagcgcgctgcccagcatcaacgcgctcctgcaggccgaggtgctgtcccggcagatcaccagccccgtgtccggcatcaacggggacatccgcgccaagaagatcgccagcatcgccgacgtctgcgagagcatgaaggagcagctcctggtgctggtggagtgggcgaagtacatcccggccttctgcgagctccccctggacgaccaggtcgccctgctccgggcccacgccggcgagcacctcctgctgggggcgaccaagcgctccatggtgttcaaggacgtgctgctgctcggcaacgactacatcgtcccccggcactgccccgagctggccgagatgagccgcgtgtccatccggatcctggacgagctcgtgctgccgttccaggagctgcagatcgacgacaacgagtacgcctacctcaaggccatcatcttcttcgaccccgacgccaagggcctgagcgaccccgggaagatcaagcgcctgcgctcccaggtccaggtgagcctcgaggactacatcaacgaccggcagtacgactcccgcggccggttcggggagctgctgctcctgctgcccacgctccagagcatcacctggcagatgatcgagcagatccagttcatcaagctgttcggcatggcgaagatcgacaacctgctccaggagatgctgctgtga

SEQ ID NO: 717 - RNA, 1128 nt, synthetic construct
  misc_feature 1..1128: note = CDS (opt1) from Homo sapiens__NP_000448.3__HNF4A(1-375)(S148E)
  source 1..1128: mol_type = other RNA
atgcgcctgagcaagaccctcgtggacatggacatggccgactactccgccgcgctggaccccgcctacaccacgctggagttcgagaacgtccaggtgctcaccatgggcaacgacaccagcccgtccgaggggaccaacctgaacgcccccaacagcctgggcgtgtccgccctctgcgccatctgcggggaccgggcgacgggcaagcactacggggccagctcctgcgacggctgcaagggcttcttccgccggagcgtccgcaagaaccacatgtactcctgccggttcagccgccagtgcgtggtggacaaggacaagcggaaccagtgccgctactgccggctgaagaagtgcttccgcgccgggatgaagaaggaggccgtccagaacgagcgggaccgcatctccacccggcgcagctcctacgaggacagcgagctgcccagcatcaacgcgctcctgcaggccgaggtgctgtcccggcagatcaccagccccgtgtccggcatcaacggggacatccgcgccaagaagatcgccagcatcgccgacgtctgcgagagcatgaaggagcagctcctggtgctggtggagtgggcgaagtacatcccggccttctgcgagctccccctggacgaccaggtcgccctgctccgggcccacgccggcgagcacctcctgctgggggcgaccaagcgctccatggtgttcaaggacgtgctgctgctcggcaacgactacatcgtcccccggcactgccccgagctggccgagatgagccgcgtgtccatccggatcctggacgagctcgtgctgccgttccaggagctgcagatcgacgacaacgagtacgcctacctcaaggccatcatcttcttcgaccccgacgccaagggcctgagcgaccccgggaagatcaagcgcctgcgctcccaggtccaggtgagcctcgaggactacatcaacgaccggcagtacgactcccgcggccggttcggggagctgctgctcctgctgcccacgctccagagcatcacctggcagatgatcgagcagatccagttcatcaagctgttcggcatggcgaagatcgacaacctgctccaggagatgctgctgtga

SEQ ID NO: 718 - RNA, 1128 nt, synthetic construct
  misc_feature 1..1128: note = CDS (opt1) from Homo sapiens__NP_000448.3__HNF4A(1-375)(S183A)
  source 1..1128: mol_type = other RNA
atgcgcctgagcaagaccctcgtggacatggacatggccgactactccgccgcgctggaccccgcctacaccacgctggagttcgagaacgtccaggtgctcaccatgggcaacgacaccagcccgtccgaggggaccaacctgaacgcccccaacagcctgggcgtgtccgccctctgcgccatctgcggggaccgggcgacgggcaagcactacggggccagctcctgcgacggctgcaagggcttcttccgccggagcgtccgcaagaaccacatgtactcctgccggttcagccgccagtgcgtggtggacaaggacaagcggaaccagtgccgctactgccggctgaagaagtgcttccgcgccgggatgaagaaggaggccgtccagaacgagcgggaccgcatctccacccggcgcagctcctacgaggacagctccctgcccagcatcaacgcgctcctgcaggccgaggtgctgtcccggcagatcaccagccccgtgtccggcatcaacggggacatccgcgccaagaagatcgccgcgatcgccgacgtctgcgagagcatgaaggagcagctcctggtgctggtggagtgggcgaagtacatcccggccttctgcgagctccccctggacgaccaggtcgccctgctccgggcccacgccggcgagcacctcctgctgggggcgaccaagcgctccatggtgttcaaggacgtgctgctgctcggcaacgactacatcgtcccccggcactgccccgagctggccgagatgagccgcgtgtccatccggatcctggacgagctcgtgctgccgttccaggagctgcagatcgacgacaacgagtacgcctacctcaaggccatcatcttcttcgaccccgacgccaagggcctgagcgaccccgggaagatcaagcgcctgcgctcccaggtccaggtgagcctcgaggactacatcaacgaccggcagtacgactcccgcggccggttcggggagctgctgctcctgctgcccacgctccagagcatcacctggcagatgatcgagcagatccagttcatcaagctgttcggcatggcgaagatcgacaacctgctccaggagatgctgctgtga

SEQ ID NO: 719 - RNA, 1128 nt, synthetic construct
  misc_feature 1..1128: note = CDS (opt1) from Homo sapiens__NP_000448.3__HNF4A(1-375)(S183E)
  source 1..1128: mol_type = other RNA
atgcgcctgagcaagaccctcgtggacatggacatggccgactactccgccgcgctggaccccgcctacaccacgctggagttcgagaacgtccaggtgctcaccatgggcaacgacaccagcccgtccgaggggaccaacctgaacgcccccaacagcctgggcgtgtccgccctctgcgccatctgcggggaccgggcgacgggcaagcactacggggccagctcctgcgacggctgcaagggcttcttccgccggagcgtccgcaagaaccacatgtactcctgccggttcagccgccagtgcgtggtggacaaggacaagcggaaccagtgccgctactgccggctgaagaagtgcttccgcgccgggatgaagaaggaggccgtccagaacgagcgggaccgcatctccacccggcgcagctcctacgaggacagctccctgcccagcatcaacgcgctcctgcaggccgaggtgctgtcccggcagatcaccagccccgtgtccggcatcaacggggacatccgcgccaagaagatcgccgagatcgccgacgtctgcgagagcatgaaggagcagctcctggtgctggtggagtgggcgaagtacatcccggccttctgcgagctccccctggacgaccaggtcgccctgctccgggcccacgccggcgagcacctcctgctgggggcgaccaagcgctccatggtgttcaaggacgtgctgctgctcggcaacgactacatcgtcccccggcactgccccgagctggccgagatgagccgcgtgtccatccggatcctggacgagctcgtgctgccgttccaggagctgcagatcgacgacaacgagtacgcctacctcaaggccatcatcttcttcgaccccgacgccaagggcctgagcgaccccgggaagatcaagcgcctgcgctcccaggtccaggtgagcctcgaggactacatcaacgaccggcagtacgactcccgcggccggttcggggagctgctgctcctgctgcccacgctccagagcatcacctggcagatgatcgagcagatccagttcatcaagctgttcggcatggcgaagatcgacaacctgctccaggagatgctgctgtga

SEQ ID NO: 720 - RNA, 1128 nt, synthetic construct; identical to SEQ ID NO: 692
  misc_feature 1..1128: note = CDS (opt1) from Homo sapiens__NP_000448.3__HNF4A(1-375)(S461A)
  source 1..1128: mol_type = other RNA

SEQ ID NO: 721 - RNA, 1128 nt, synthetic construct; identical to SEQ ID NO: 692
  misc_feature 1..1128: note = CDS (opt1) from Homo sapiens__NP_000448.3__HNF4A(1-375)(S461E)
  source 1..1128: mol_type = other RNA

SEQ ID NO: 722 - RNA, 1128 nt, synthetic construct
  misc_feature 1..1128: note = CDS (opt1) from Homo sapiens__NP_000448.3__HNF4A(1-375)(S142A_S143A_S313A)
  source 1..1128: mol_type = other RNA
atgcgcctgagcaagaccctcgtggacatggacatggccgactactccgccgcgctggaccccgcctacaccacgctggagttcgagaacgtccaggtgctcaccatgggcaacgacaccagcccgtccgaggggaccaacctgaacgcccccaacagcctgggcgtgtccgccctctgcgccatctgcggggaccgggcgacgggcaagcactacggggccagctcctgcgacggctgcaagggcttcttccgccggagcgtccgcaagaaccacatgtactcctgccggttcagccgccagtgcgtggtggacaaggacaagcggaaccagtgccgctactgccggctgaagaagtgcttccgcgccgggatgaagaaggaggccgtccagaacgagcgggaccgcatctccacccggcgcgcggcctacgaggacagctccctgcccagcatcaacgcgctcctgcaggccgaggtgctgtcccggcagatcaccagccccgtgtccggcatcaacggggacatccgcgccaagaagatcgccagcatcgccgacgtctgcgagagcatgaaggagcagctcctggtgctggtggagtgggcgaagtacatcccggccttctgcgagctccccctggacgaccaggtcgccctgctccgggcccacgccggcgagcacctcctgctgggggcgaccaagcgctccatggtgttcaaggacgtgctgctgctcggcaacgactacatcgtcccccggcactgccccgagctggccgagatgagccgcgtgtccatccggatcctggacgagctcgtgctgccgttccaggagctgcagatcgacgacaacgagtacgcctacctcaaggccatcatcttcttcgaccccgacgccaagggcctgagcgaccccgggaagatcaagcgcctgcgcgcgcaggtccaggtgagcctcgaggactacatcaacgaccggcagtacgactcccgcggccggttcggggagctgctgctcctgctgcccacgctccagagcatcacctggcagatgatcgagcagatccagttcatcaagctgttcggcatggcgaagatcgacaacctgctccaggagatgctgctgtga

SEQ ID NO: 723 - RNA, 1128 nt, synthetic construct; identical to SEQ ID NO: 722
  misc_feature 1..1128: note = CDS (opt1) from Homo sapiens__NP_000448.3__HNF4A(1-375)(S142A_S143A_S313A_K458R)
  source 1..1128: mol_type = other RNA

SEQ ID NO: 724 - RNA, 1128 nt, synthetic construct
  misc_feature 1..1128: note = CDS (opt1) from Homo sapiens__NP_000448.3__HNF4A(1-375)(S142A_S143A_S167A_S313A_ S378A_T429A_T432A_S436A_K458R)
  source 1..1128: mol_type = other RNA
atgcgcctgagcaagaccctcgtggacatggacatggccgactactccgccgcgctggaccccgcctacaccacgctggagttcgagaacgtccaggtgctcaccatgggcaacgacaccagcccgtccgaggggaccaacctgaacgcccccaacagcctgggcgtgtccgccctctgcgccatctgcggggaccgggcgacgggcaagcactacggggccagctcctgcgacggctgcaagggcttcttccgccggagcgtccgcaagaaccacatgtactcctgccggttcagccgccagtgcgtggtggacaaggacaagcggaaccagtgccgctactgccggctgaagaagtgcttccgcgccgggatgaagaaggaggccgtccagaacgagcgggaccgcatctccacccggcgcgcggcctacgaggacagctccctgcccagcatcaacgcgctcctgcaggccgaggtgctgtcccggcagatcaccgcgcccgtgtccggcatcaacggggacatccgcgccaagaagatcgccagcatcgccgacgtctgcgagagcatgaaggagcagctcctggtgctggtggagtgggcgaagtacatcccggccttctgcgagctccccctggacgaccaggtcgccctgctccgggcccacgccggcgagcacctcctgctgggggcgaccaagcgctccatggtgttcaaggacgtgctgctgctcggcaacgactacatcgtcccccggcactgccccgagctggccgagatgagccgcgtgtccatccggatcctggacgagctcgtgctgccgttccaggagctgcagatcgacgacaacgagtacgcctacctcaaggccatcatcttcttcgaccccgacgccaagggcctgagcgaccccgggaagatcaagcgcctgcgcgcgcaggtccaggtgagcctcgaggactacatcaacgaccggcagtacgactcccgcggccggttcggggagctgctgctcctgctgcccacgctccagagcatcacctggcagatgatcgagcagatccagttcatcaagctgttcggcatggcgaagatcgacaacctgctccaggagatgctgctgtga

SEQ ID NO: 725 - RNA, 1128 nt, synthetic construct
  misc_feature 1..1128: note = CDS (opt1) from Homo sapiens__NP_000448.3__HNF4A(1-375)(S142A_S143A_S148A_S167A_ S313A_S378A_T429A_T432A_S436A_K458R)
  source 1..1128: mol_type = other RNA
atgcgcctgagcaagaccctcgtggacatggacatggccgactactccgccgcgctggaccccgcctacaccacgctggagttcgagaacgtccaggtgctcaccatgggcaacgacaccagcccgtccgaggggaccaacctgaacgcccccaacagcctgggcgtgtccgccctctgcgccatctgcggggaccgggcgacgggcaagcactacggggccagctcctgcgacggctgcaagggcttcttccgccggagcgtccgcaagaaccacatgtactcctgccggttcagccgccagtgcgtggtggacaaggacaagcggaaccagtgccgctactgccggctgaagaagtgcttccgcgccgggatgaagaaggaggccgtccagaacgagcgggaccgcatctccacccggcgcgcggcctacgaggacagcgcgctgcccagcatcaacgcgctcctgcaggccgaggtgctgtcccggcagatcaccgcgcccgtgtccggcatcaacggggacatccgcgccaagaagatcgccagcatcgccgacgtctgcgagagcatgaaggagcagctcctggtgctggtggagtgggcgaagtacatcccggccttctgcgagctccccctggacgaccaggtcgccctgctccgggcccacgccggcgagcacctcctgctgggggcgaccaagcgctccatggtgttcaaggacgtgctgctgctcggcaacgactacatcgtcccccggcactgccccgagctggccgagatgagccgcgtgtccatccggatcctggacgagctcgtgctgccgttccaggagctgcagatcgacgacaacgagtacgcctacctcaaggccatcatcttcttcgaccccgacgccaagggcctgagcgaccccgggaagatcaagcgcctgcgcgcgcaggtccaggtgagcctcgaggactacatcaacgaccggcagtacgactcccgcggccggttcggggagctgctgctcctgctgcccacgctccagagcatcacctggcagatgatcgagcagatccagttcatcaagctgttcggcatggcgaagatcgacaacctgctccaggagatgctgctgtga

SEQ ID NO: 726 - RNA, 1128 nt, synthetic construct
  misc_feature 1..1128: note = CDS (opt1) from Homo sapiens__NP_000448.3__HNF4A(1-375)(K106R_K108R_K126R_K127R_ S142A_S143A_S148A_S167A_S313A_S378A_T429A_T432A_S436A_K458R )
  source 1..1128: mol_type = other RNA
atgcgcctgagcaagaccctcgtggacatggacatggccgactactccgccgcgctggaccccgcctacaccacgctggagttcgagaacgtccaggtgctcaccatgggcaacgacaccagcccgtccgaggggaccaacctgaacgcccccaacagcctgggcgtgtccgccctctgcgccatctgcggggaccgggcgacgggcaagcactacggggccagctcctgcgacggctgcaagggcttcttccgccggagcgtccgcaagaaccacatgtactcctgccggttcagccgccagtgcgtggtggaccgcgaccggcggaaccagtgccgctactgccggctgaagaagtgcttccgcgccgggatgcgccgcgaggccgtccagaacgagcgggaccgcatctccacccggcgcgcggcctacgaggacagcgcgctgcccagcatcaacgcgctcctgcaggccgaggtgctgtcccggcagatcaccgcgcccgtgtccggcatcaacggggacatccgcgccaagaagatcgccagcatcgccgacgtctgcgagagcatgaaggagcagctcctggtgctggtggagtgggcgaagtacatcccggccttctgcgagctccccctggacgaccaggtcgccctgctccgggcccacgccggcgagcacctcctgctgggggcgaccaagcgctccatggtgttcaaggacgtgctgctgctcggcaacgactacatcgtcccccggcactgccccgagctggccgagatgagccgcgtgtccatccggatcctggacgagctcgtgctgccgttccaggagctgcagatcgacgacaacgagtacgcctacctcaaggccatcatcttcttcgaccccgacgccaagggcctgagcgaccccgggaagatcaagcgcctgcgcgcgcaggtccaggtgagcctcgaggactacatcaacgaccggcagtacgactcccgcggccggttcggggagctgctgctcctgctgcccacgctccagagcatcacctggcagatgatcgagcagatccagttcatcaagctgttcggcatggcgaagatcgacaacctgctccaggagatgctgctgtga

SEQ ID NO: 727 - RNA, 1128 nt, synthetic construct
  misc_feature 1..1128: note = CDS (opt1) from Homo sapiens__NP_000448.3__HNF4A(1-375)(S142A_S143A_S148A_T166A_ S167A_S313A_S378A_T429A_T432A_S436A_K458R)
  source 1..1128: mol_type = other RNA
atgcgcctgagcaagaccctcgtggacatggacatggccgactactccgccgcgctggaccccgcctacaccacgctggagttcgagaacgtccaggtgctcaccatgggcaacgacaccagcccgtccgaggggaccaacctgaacgcccccaacagcctgggcgtgtccgccctctgcgccatctgcggggaccgggcgacgggcaagcactacggggccagctcctgcgacggctgcaagggcttcttccgccggagcgtccgcaagaaccacatgtactcctgccggttcagccgccagtgcgtggtggacaaggacaagcggaaccagtgccgctactgccggctgaagaagtgcttccgcgccgggatgaagaaggaggccgtccagaacgagcgggaccgcatctccacccggcgcgcggcctacgaggacagcgcgctgcccagcatcaacgcgctcctgcaggccgaggtgctgtcccggcagatcgcggcgcccgtgtccggcatcaacggggacatccgcgccaagaagatcgccagcatcgccgacgtctgcgagagcatgaaggagcagctcctggtgctggtggagtgggcgaagtacatcccggccttctgcgagctccccctggacgaccaggtcgccctgctccgggcccacgccggcgagcacctcctgctgggggcgaccaagcgctccatggtgttcaaggacgtgctgctgctcggcaacgactacatcgtcccccggcactgccccgagctggccgagatgagccgcgtgtccatccggatcctggacgagctcgtgctgccgttccaggagctgcagatcgacgacaacgagtacgcctacctcaaggccatcatcttcttcgaccccgacgccaagggcctgagcgaccccgggaagatcaagcgcctgcgcgcgcaggtccaggtgagcctcgaggactacatcaacgaccggcagtacgactcccgcggccggttcggggagctgctgctcctgctgcccacgctccagagcatcacctggcagatgatcgagcagatccagttcatcaagctgttcggcatggcgaagatcgacaacctgctccaggagatgctgctgtga

SEQ ID NO: 728 - RNA, 1128 nt, synthetic construct
  misc_feature 1..1128: note = CDS (opt1) from Homo sapiens__NP_000448.3__HNF4A(1-375)(S87A_S142A_S143A_S148A_T 166A_S167A_S313A_S378A_T429A_T432A_S436A_K458R)
  source 1..1128: mol_type = other RNA
atgcgcctgagcaagaccctcgtggacatggacatggccgactactccgccgcgctggaccccgcctacaccacgctggagttcgagaacgtccaggtgctcaccatgggcaacgacaccagcccgtccgaggggaccaacctgaacgcccccaacagcctgggcgtgtccgccctctgcgccatctgcggggaccgggcgacgggcaagcactacggggccagctcctgcgacggctgcaagggcttcttccgccgggcggtccgcaagaaccacatgtactcctgccggttcagccgccagtgcgtggtggacaaggacaagcggaaccagtgccgctactgccggctgaagaagtgcttccgcgccgggatgaagaaggaggccgtccagaacgagcgggaccgcatctccacccggcgcgcggcctacgaggacagcgcgctgcccagcatcaacgcgctcctgcaggccgaggtgctgtcccggcagatcgcggcgcccgtgtccggcatcaacggggacatccgcgccaagaagatcgccagcatcgccgacgtctgcgagagcatgaaggagcagctcctggtgctggtggagtgggcgaagtacatcccggccttctgcgagctccccctggacgaccaggtcgccctgctccgggcccacgccggcgagcacctcctgctgggggcgaccaagcgctccatggtgttcaaggacgtgctgctgctcggcaacgactacatcgtcccccggcactgccccgagctggccgagatgagccgcgtgtccatccggatcctggacgagctcgtgctgccgttccaggagctgcagatcgacgacaacgagtacgcctacctcaaggccatcatcttcttcgaccccgacgccaagggcctgagcgaccccgggaagatcaagcgcctgcgcgcgcaggtccaggtgagcctcgaggactacatcaacgaccggcagtacgactcccgcggccggttcggggagctgctgctcctgctgcccacgctccagagcatcacctggcagatgatcgagcagatccagttcatcaagctgttcggcatggcgaagatcgacaacctgctccaggagatgctgctgtga

SEQ ID NO: 729 - RNA, 1128 nt, synthetic construct
  misc_feature 1..1128: note = CDS (opt1) from Homo sapiens__NP_000448.3__HNF4A(1-375)(S87A_K106R_K108R_K126R_K 127R_S142A_S143A_S148A_T166A_S167A_S313A_S378A_T429A_T432A_ S436A_K458R)
  source 1..1128: mol_type = other RNA
atgcgcctgagcaagaccctcgtggacatggacatggccgactactccgccgcgctggaccccgcctacaccacgctggagttcgagaacgtccaggtgctcaccatgggcaacgacaccagcccgtccgaggggaccaacctgaacgcccccaacagcctgggcgtgtccgccctctgcgccatctgcggggaccgggcgacgggcaagcactacggggccagctcctgcgacggctgcaagggcttcttccgccgggcggtccgcaagaaccacatgtactcctgccggttcagccgccagtgcgtggtggaccgcgaccggcggaaccagtgccgctactgccggctgaagaagtgcttccgcgccgggatgcgccgcgaggccgtccagaacgagcgggaccgcatctccacccggcgcgcggcctacgaggacagcgcgctgcccagcatcaacgcgctcctgcaggccgaggtgctgtcccggcagatcgcggcgcccgtgtccggcatcaacggggacatccgcgccaagaagatcgccagcatcgccgacgtctgcgagagcatgaaggagcagctcctggtgctggtggagtgggcgaagtacatcccggccttctgcgagctccccctggacgaccaggtcgccctgctccgggcccacgccggcgagcacctcctgctgggggcgaccaagcgctccatggtgttcaaggacgtgctgctgctcggcaacgactacatcgtcccccggcactgccccgagctggccgagatgagccgcgtgtccatccggatcctggacgagctcgtgctgccgttccaggagctgcagatcgacgacaacgagtacgcctacctcaaggccatcatcttcttcgaccccgacgccaagggcctgagcgaccccgggaagatcaagcgcctgcgcgcgcaggtccaggtgagcctcgaggactacatcaacgaccggcagtacgactcccgcggccggttcggggagctgctgctcctgctgcccacgctccagagcatcacctggcagatgatcgagcagatccagttcatcaagctgttcggcatggcgaagatcgacaacctgctccaggagatgctgctgtga

SEQ ID NO: 730 - RNA, 1128 nt, synthetic construct
  misc_feature 1..1128: note = CDS (opt1) from Homo sapiens__NP_000448.3__HNF4A(1-375)(S87A_K106R_K108R_K126R_K 127R)
  source 1..1128: mol_type = other RNA
atgcgcctgagcaagaccctcgtggacatggacatggccgactactccgccgcgctggaccccgcctacaccacgctggagttcgagaacgtccaggtgctcaccatgggcaacgacaccagcccgtccgaggggaccaacctgaacgcccccaacagcctgggcgtgtccgccctctgcgccatctgcggggaccgggcgacgggcaagcactacggggccagctcctgcgacggctgcaagggcttcttccgccgggcggtccgcaagaaccacatgtactcctgccggttcagccgccagtgcgtggtggaccgcgaccggcggaaccagtgccgctactgccggctgaagaagtgcttccgcgccgggatgcgccgggaggccgtccagaacgagcgggaccgcatctccacccggcgcagctcctacgaggacagctccctgcccagcatcaacgcgctcctgcaggccgaggtgctgtcccggcagatcaccagccccgtgtccggcatcaacggggacatccgcgccaagaagatcgccagcatcgccgacgtctgcgagagcatgaaggagcagctcctggtgctggtggagtgggcgaagtacatcccggccttctgcgagctccccctggacgaccaggtcgccctgctccgggcccacgccggcgagcacctcctgctgggggcgaccaagcgctccatggtgttcaaggacgtgctgctgctcggcaacgactacatcgtcccccggcactgccccgagctggccgagatgagccgcgtgtccatccggatcctggacgagctcgtgctgccgttccaggagctgcagatcgacgacaacgagtacgcctacctcaaggccatcatcttcttcgaccccgacgccaagggcctgagcgaccccgggaagatcaagcgcctgcgctcccaggtccaggtgagcctcgaggactacatcaacgaccggcagtacgactcccgcggccggttcggggagctgctgctcctgctgcccacgctccagagcatcacctggcagatgatcgagcagatccagttcatcaagctgttcggcatggcgaagatcgacaacctgctccaggagatgctgctgtga

SEQ ID NO: 731 - RNA, 1128 nt, synthetic construct
  misc_feature 1..1128: note = CDS (opt1) from Homo sapiens__NP_000448.3__HNF4A(1-375)(S87A_K106R_K108R_K126R_K 127R_S142A_S143A_S148A_T166A_S167A_S313A_S378A_T429A_T432A_ S436A_K458R_S461A)
  source 1..1128: mol_type = other RNA
atgcgcctgagcaagaccctcgtggacatggacatggccgactactccgccgcgctggaccccgcctacaccacgctggagttcgagaacgtccaggtgctcaccatgggcaacgacaccagcccgtccgaggggaccaacctgaacgcccccaacagcctgggcgtgtccgccctctgcgccatctgcggggaccgggcgacgggcaagcactacggggccagctcctgcgacggctgcaagggcttcttccgccgggcggtccgcaagaaccacatgtactcctgccggttcagccgccagtgcgtggtggaccgcgaccggcggaaccagtgccgctactgccggctgaagaagtgcttccgcgccgggatgcgccgggaggccgtccagaacgagcgggaccgcatctccacccggcgcgccgcctacgaggacagcgccctgcccagcatcaacgcgctcctgcaggccgaggtgctgtcccggcagatcgccgcgcccgtgtccggcatcaacggggacatccgcgccaagaagatcgccagcatcgccgacgtctgcgagagcatgaaggagcagctcctggtgctggtggagtgggcgaagtacatcccggccttctgcgagctccccctggacgaccaggtcgccctgctccgggcccacgccggcgagcacctcctgctgggggcgaccaagcgctccatggtgttcaaggacgtgctgctgctcggcaacgactacatcgtcccccggcactgccccgagctggccgagatgagccgcgtgtccatccggatcctggacgagctcgtgctgccgttccaggagctgcagatcgacgacaacgagtacgcctacctcaaggccatcatcttcttcgaccccgacgccaagggcctgagcgaccccgggaagatcaagcgcctgcgcgcccaggtccaggtgagcctcgaggactacatcaacgaccggcagtacgactcccgcggccggttcggggagctgctgctcctgctgcccacgctccagagcatcacctggcagatgatcgagcagatccagttcatcaagctgttcggcatggcgaagatcgacaacctgctccaggagatgctgctgtga

SEQ ID NO: 732 - RNA, 1128 nt, synthetic construct; identical to SEQ ID NO: 731
  misc_feature 1..1128: note = CDS (opt1) from Homo sapiens__NP_000448.3__HNF4A(1-375)(S87A_K106R_K108R_K126R_K 127R_S142A_S143A_S148A_T166A_S167A_S313A_S378A_T429A_T432A_ S436A_K458R_S461E)
  source 1..1128: mol_type = other RNA

SEQ ID NO: 733 - RNA, 1128 nt, synthetic construct
  misc_feature 1..1128: note = CDS (opt1) from Homo sapiens__NP_000448.3__HNF4A(1-375)(S87A_K106R_K108R_K126R_K 127R_S142A_S143A_S148E_T166A_S167E_S313A_S378E_T429E_T432E_ S436E_K458R_S461E)
  source 1..1128: mol_type = other RNA
atgcgcctgagcaagaccctcgtggacatggacatggccgactactccgccgcgctggaccccgcctacaccacgctggagttcgagaacgtccaggtgctcaccatgggcaacgacaccagcccgtccgaggggaccaacctgaacgcccccaacagcctgggcgtgtccgccctctgcgccatctgcggggaccgggcgacgggcaagcactacggggccagctcctgcgacggctgcaagggcttcttccgccgggcggtccgcaagaaccacatgtactcctgccggttcagccgccagtgcgtggtggaccgcgaccggcggaaccagtgccgctactgccggctgaagaagtgcttccgcgccgggatgcgccgggaggccgtccagaacgagcgggaccgcatctccacccggcgcgccgcctacgaggacagcgagctgcccagcatcaacgcgctcctgcaggccgaggtgctgtcccggcagatcgccgagcccgtgtccggcatcaacggggacatccgcgccaagaagatcgccagcatcgccgacgtctgcgagagcatgaaggagcagctcctggtgctggtggagtgggcgaagtacatcccggccttctgcgagctccccctggacgaccaggtcgccctgctccgggcccacgccggcgagcacctcctgctgggggcgaccaagcgctccatggtgttcaaggacgtgctgctgctcggcaacgactacatcgtcccccggcactgccccgagctggccgagatgagccgcgtgtccatccggatcctggacgagctcgtgctgccgttccaggagctgcagatcgacgacaacgagtacgcctacctcaaggccatcatcttcttcgaccccgacgccaagggcctgagcgaccccgggaagatcaagcgcctgcgcgcccaggtccaggtgagcctcgaggactacatcaacgaccggcagtacgactcccgcggccggttcggggagctgctgctcctgctgcccacgctccagagcatcacctggcagatgatcgagcagatccagttcatcaagctgttcggcatggcgaagatcgacaacctgctccaggagatgctgctgtga

SEQ ID NO: 734 - RNA, 1128 nt, synthetic construct
  misc_feature 1..1128: note = CDS (opt1) from Homo sapiens__NP_000448.3__HNF4A(1-375)(S87A_K106R_K108R_K126R_K 127R_S142A_S143A_S148A_T166A_S167A_K179R_K180R_S313A_S378A_ T429A_T432A_S436A_K458R_S461E)
  source 1..1128: mol_type = other RNA
atgcgcctgagcaagaccctcgtggacatggacatggccgactactccgccgcgctggaccccgcctacaccacgctggagttcgagaacgtccaggtgctcaccatgggcaacgacaccagcccgtccgaggggaccaacctgaacgcccccaacagcctgggcgtgtccgccctctgcgccatctgcggggaccgggcgacgggcaagcactacggggccagctcctgcgacggctgcaagggcttcttccgccgggcggtccgcaagaaccacatgtactcctgccggttcagccgccagtgcgtggtggaccgcgaccggcggaaccagtgccgctactgccggctgaagaagtgcttccgcgccgggatgcgccgggaggccgtccagaacgagcgggaccgcatctccacccggcgcgccgcctacgaggacagcgccctgcccagcatcaacgcgctcctgcaggccgaggtgctgtcccggcagatcgccgcgcccgtgtccggcatcaacggggacatccgcgcccgccggatcgccagcatcgccgacgtctgcgagagcatgaaggagcagctcctggtgctggtggagtgggcgaagtacatcccggccttctgcgagctccccctggacgaccaggtcgccctgctccgggcccacgccggcgagcacctcctgctgggggcgaccaagcgctccatggtgttcaaggacgtgctgctgctcggcaacgactacatcgtcccccggcactgccccgagctggccgagatgagccgcgtgtccatccggatcctggacgagctcgtgctgccgttccaggagctgcagatcgacgacaacgagtacgcctacctcaaggccatcatcttcttcgaccccgacgccaagggcctgagcgaccccgggaagatcaagcgcctgcgcgcccaggtccaggtgagcctcgaggactacatcaacgaccggcagtacgactcccgcggccggttcggggagctgctgctcctgctgcccacgctccagagcatcacctggcagatgatcgagcagatccagttcatcaagctgttcggcatggcgaagatcgacaacctgctccaggagatgctgctgtga

SEQ ID NO: 735 - RNA, 1128 nt, synthetic construct
  misc_feature 1..1128: note = CDS (opt1) from Homo sapiens__NP_000448.3__HNF4A(1-375)(S87A_K106R_K108R_K126R_K 127R_S142A_S143A_S148A_T166A_S167A_K300R_K307R_K309R_S313A_ S378A_T429A_T432A_S436A_K458R_S461E)
  source 1..1128: mol_type = other RNA
atgcgcctgagcaagaccctcgtggacatggacatggccgactactccgccgcgctggaccccgcctacaccacgctggagttcgagaacgtccaggtgctcaccatgggcaacgacaccagcccgtccgaggggaccaacctgaacgcccccaacagcctgggcgtgtccgccctctgcgccatctgcggggaccgggcgacgggcaagcactacggggccagctcctgcgacggctgcaagggcttcttccgccgggcggtccgcaagaaccacatgtactcctgccggttcagccgccagtgcgtggtggaccgcgaccggcggaaccagtgccgctactgccggctgaagaagtgcttccgcgccgggatgcgccgggaggccgtccagaacgagcgggaccgcatctccacccggcgcgccgcctacgaggacagcgccctgcccagcatcaacgcgctcctgcaggccgaggtgctgtcccggcagatcgccgcgcccgtgtccggcatcaacggggacatccgcgccaagaagatcgccagcatcgccgacgtctgcgagagcatgaaggagcagctcctggtgctggtggagtgggcgaagtacatcccggccttctgcgagctccccctggacgaccaggtcgccctgctccgggcccacgccggcgagcacctcctgctgggggcgaccaagcgctccatggtgttcaaggacgtgctgctgctcggcaacgactacatcgtcccccggcactgccccgagctggccgagatgagccgcgtgtccatccggatcctggacgagctcgtgctgccgttccaggagctgcagatcgacgacaacgagtacgcctacctcaaggccatcatcttcttcgaccccgacgcccgcggcctgagcgaccccgggcggatccgccgcctgcgcgcccaggtccaggtgagcctcgaggactacatcaacgaccggcagtacgactcccgcggccggttcggggagctgctgctcctgctgcccacgctccagagcatcacctggcagatgatcgagcagatccagttcatcaagctgttcggcatggcgaagatcgacaacctgctccaggagatgctgctgtga

SEQ ID NO: 736 - RNA, 1128 nt, synthetic construct; identical to SEQ ID NO: 731
  misc_feature 1..1128: note = CDS (opt1) from Homo sapiens__NP_000448.3__HNF4A(1-375)(S87A_K106R_K108R_K126R_K 127R_S142A_S143A_S148A_T166A_S167A_S313A_S378A_T429A_T432A_ S436A_K447R_K458R_S461E_K470R)
  source 1..1128: mol_type = other RNA

SEQ ID NO: 737 - RNA, 1128 nt, synthetic construct
  misc_feature 1..1128: note = CDS (opt1) from Homo sapiens__NP_000448.3__HNF4A(1-375)(S87A_K106R_K108R_K126R_K 127R_S142A_S143A_S148A_T166A_S167A_K179R_K180R_K234R_K300R_ K307R_K309R_S313A_S378A_T429A_T432A_S436A_K447R_K458R_S461E _K470R)
  source 1..1128: mol_type = other RNA
atgcgcctgagcaagaccctcgtggacatggacatggccgactactccgccgcgctggaccccgcctacaccacgctggagttcgagaacgtccaggtgctcaccatgggcaacgacaccagcccgtccgaggggaccaacctgaacgcccccaacagcctgggcgtgtccgccctctgcgccatctgcggggaccgggcgacgggcaagcactacggggccagctcctgcgacggctgcaagggcttcttccgccgggcggtccgcaagaaccacatgtactcctgccggttcagccgccagtgcgtggtggaccgcgaccggcggaaccagtgccgctactgccggctgaagaagtgcttccgcgccgggatgcgccgggaggccgtccagaacgagcgggaccgcatctccacccggcgcgccgcctacgaggacagcgccctgcccagcatcaacgcgctcctgcaggccgaggtgctgtcccggcagatcgccgcgcccgtgtccggcatcaacggggacatccgcgcccgccggatcgccagcatcgccgacgtctgcgagagcatgaaggagcagctcctggtgctggtggagtgggcgaagtacatcccggccttctgcgagctccccctggacgaccaggtcgccctgctccgggcccacgccggcgagcacctcctgctgggggcgacccggcgctccatggtgttcaaggacgtgctgctgctcggcaacgactacatcgtcccccggcactgccccgagctggccgagatgagccgcgtgtccatccggatcctggacgagctcgtgctgccgttccaggagctgcagatcgacgacaacgagtacgcctacctcaaggccatcatcttcttcgaccccgacgcccgcggcctgagcgaccccgggcggatccgccgcctgcgcgcccaggtccaggtgagcctcgaggactacatcaacgaccggcagtacgactcccgcggccggttcggggagctgctgctcctgctgcccacgctccagagcatcacctggcagatgatcgagcagatccagttcatcaagctgttcggcatggcgaagatcgacaacctgctccaggagatgctgctgtga

SEQ ID NO: 738 - RNA, 1128 nt, synthetic construct
  misc_feature 1..1128: note = CDS (opt1) from Homo sapiens__NP_000448.3__HNF4A(1-375)(S87A_S95A_S99A_K106R_K10 8R_K126R_K127R_S142A_S143A_S148A_T166A_S167A_S313A_S378A_T4 29A_T432A_S436A_K458R_S461E)
  source 1..1128: mol_type = other RNA
atgcgcctgagcaagaccctcgtggacatggacatggccgactactccgccgcgctggaccccgcctacaccacgctggagttcgagaacgtccaggtgctcaccatgggcaacgacaccagcccgtccgaggggaccaacctgaacgcccccaacagcctgggcgtgtccgccctctgcgccatctgcggggaccgggcgacgggcaagcactacggggccagctcctgcgacggctgcaagggcttcttccgccgggcggtccgcaagaaccacatgtacgcctgccggttcgcccgccagtgcgtggtggaccgcgaccggcggaaccagtgccgctactgccggctgaagaagtgcttccgcgccgggatgcgccgggaggccgtccagaacgagcgggaccgcatctccacccggcgcgccgcctacgaggacagcgccctgcccagcatcaacgcgctcctgcaggccgaggtgctgtcccggcagatcgccgcgcccgtgtccggcatcaacggggacatccgcgccaagaagatcgccagcatcgccgacgtctgcgagagcatgaaggagcagctcctggtgctggtggagtgggcgaagtacatcccggccttctgcgagctccccctggacgaccaggtcgccctgctccgggcccacgccggcgagcacctcctgctgggggcgaccaagcgctccatggtgttcaaggacgtgctgctgctcggcaacgactacatcgtcccccggcactgccccgagctggccgagatgagccgcgtgtccatccggatcctggacgagctcgtgctgccgttccaggagctgcagatcgacgacaacgagtacgcctacctcaaggccatcatcttcttcgaccccgacgccaagggcctgagcgaccccgggaagatcaagcgcctgcgcgcccaggtccaggtgagcctcgaggactacatcaacgaccggcagtacgactcccgcggccggttcggggagctgctgctcctgctgcccacgctccagagcatcacctggcagatgatcgagcagatccagttcatcaagctgttcggcatggcgaagatcgacaacctgctccaggagatgctgctgtga

SEQ ID NO: 739 - RNA, 1128 nt, synthetic construct
  misc_feature 1..1128: note = CDS (opt1) from Homo sapiens__NP_000448.3__HNF4A(1-375)(S87A_K106R_K108R_K126R_K 127R_S138A_T139A_S142A_S143A_S148A_T166A_S167A_S313A_S378A_ T429A_T432A_S436A_K458R_S461E)
  source 1..1128: mol_type = other RNA
atgcgcctgagcaagaccctcgtggacatggacatggccgactactccgccgcgctggaccccgcctacaccacgctggagttcgagaacgtccaggtgctcaccatgggcaacgacaccagcccgtccgaggggaccaacctgaacgcccccaacagcctgggcgtgtccgccctctgcgccatctgcggggaccgggcgacgggcaagcactacggggccagctcctgcgacggctgcaagggcttcttccgccgggcggtccgcaagaaccacatgtactcctgccggttcagccgccagtgcgtggtggaccgcgaccggcggaaccagtgccgctactgccggctgaagaagtgcttccgcgccgggatgcgccgggaggccgtccagaacgagcgggaccgcatcgccgcccggcgcgccgcctacgaggacagcgccctgcccagcatcaacgcgctcctgcaggccgaggtgctgtcccggcagatcgccgcgcccgtgtccggcatcaacggggacatccgcgccaagaagatcgccagcatcgccgacgtctgcgagagcatgaaggagcagctcctggtgctggtggagtgggcgaagtacatcccggccttctgcgagctccccctggacgaccaggtcgccctgctccgggcccacgccggcgagcacctcctgctgggggcgaccaagcgctccatggtgttcaaggacgtgctgctgctcggcaacgactacatcgtcccccggcactgccccgagctggccgagatgagccgcgtgtccatccggatcctggacgagctcgtgctgccgttccaggagctgcagatcgacgacaacgagtacgcctacctcaaggccatcatcttcttcgaccccgacgccaagggcctgagcgaccccgggaagatcaagcgcctgcgcgcccaggtccaggtgagcctcgaggactacatcaacgaccggcagtacgactcccgcggccggttcggggagctgctgctcctgctgcccacgctccagagcatcacctggcagatgatcgagcagatccagttcatcaagctgttcggcatggcgaagatcgacaacctgctccaggagatgctgctgtga

SEQ ID NO: 740 - RNA, 1128 nt, synthetic construct
  misc_feature 1..1128: note = CDS (opt1) from Homo sapiens__NP_000448.3__HNF4A(1-375)(S87A_S95A_S99A_K106R_K10 8R_K126R_K127R_S138A_T139A_S142A_S143A_S148A_T166A_S167A_S3 13A_S378A_T429A_T432A_S436A_K458R_S461E)
  source 1..1128: mol_type = other RNA
atgcgcctgagcaagaccctcgtggacatggacatggccgactactccgccgcgctggaccccgcctacaccacgctggagttcgagaacgtccaggtgctcaccatgggcaacgacaccagcccgtccgaggggaccaacctgaacgcccccaacagcctgggcgtgtccgccctctgcgccatctgcggggaccgggcgacgggcaagcactacggggccagctcctgcgacggctgcaagggcttcttccgccgggcggtccgcaagaaccacatgtacgcctgccggttcgcccgccagtgcgtggtggaccgcgaccggcggaaccagtgccgctactgccggctgaagaagtgcttccgcgccgggatgcgccgggaggccgtccagaacgagcgggaccgcatcgccgcccggcgcgccgcctacgaggacagcgccctgcccagcatcaacgcgctcctgcaggccgaggtgctgtcccggcagatcgccgcgcccgtgtccggcatcaacggggacatccgcgccaagaagatcgccagcatcgccgacgtctgcgagagcatgaaggagcagctcctggtgctggtggagtgggcgaagtacatcccggccttctgcgagctccccctggacgaccaggtcgccctgctccgggcccacgccggcgagcacctcctgctgggggcgaccaagcgctccatggtgttcaaggacgtgctgctgctcggcaacgactacatcgtcccccggcactgccccgagctggccgagatgagccgcgtgtccatccggatcctggacgagctcgtgctgccgttccaggagctgcagatcgacgacaacgagtacgcctacctcaaggccatcatcttcttcgaccccgacgccaagggcctgagcgaccccgggaagatcaagcgcctgcgcgcccaggtccaggtgagcctcgaggactacatcaacgaccggcagtacgactcccgcggccggttcggggagctgctgctcctgctgcccacgctccagagcatcacctggcagatgatcgagcagatccagttcatcaagctgttcggcatggcgaagatcgacaacctgctccaggagatgctgctgtga

SEQ ID NO: 741 - RNA, 1128 nt, synthetic construct; identical to SEQ ID NO: 692
  misc_feature 1..1128: note = CDS (opt1) from Homo sapiens__NP_000448.3__HNF4A(1-375)
  source 1..1128: mol_type = other RNA

SEQ ID NO: 742 - RNA, 1128 nt, synthetic construct
  misc_feature 1..1128: note = CDS (opt1) from Homo sapiens__NP_000448.3__HNF4A(1-375)(S313A)
  source 1..1128: mol_type = other RNA
atgcgcctgagcaagaccctcgtggacatggacatggccgactactccgccgcgctggaccccgcctacaccacgctggagttcgagaacgtccaggtgctcaccatgggcaacgacaccagcccgtccgaggggaccaacctgaacgcccccaacagcctgggcgtgtccgccctctgcgccatctgcggggaccgggcgacgggcaagcactacggggccagctcctgcgacggctgcaagggcttcttccgccggagcgtccgcaagaaccacatgtactcctgccggttcagccgccagtgcgtggtggacaaggacaagcggaaccagtgccgctactgccggctgaagaagtgcttccgcgccgggatgaagaaggaggccgtccagaacgagcgggaccgcatctccacccggcgcagctcctacgaggacagctccctgcccagcatcaacgcgctcctgcaggccgaggtgctgtcccggcagatcaccagccccgtgtccggcatcaacggggacatccgcgccaagaagatcgccagcatcgccgacgtctgcgagagcatgaaggagcagctcctggtgctggtggagtgggcgaagtacatcccggccttctgcgagctccccctggacgaccaggtcgccctgctccgggcccacgccggcgagcacctcctgctgggggcgaccaagcgctccatggtgttcaaggacgtgctgctgctcggcaacgactacatcgtcccccggcactgccccgagctggccgagatgagccgcgtgtccatccggatcctggacgagctcgtgctgccgttccaggagctgcagatcgacgacaacgagtacgcctacctcaaggccatcatcttcttcgaccccgacgccaagggcctgagcgaccccgggaagatcaagcgcctgcgcgcgcaggtccaggtgtccctcgaggactacatcaacgaccggcagtacgacagccgcggccggttcggggagctgctgctcctgctgcccacgctccagtccatcacctggcagatgatcgagcagatccagttcatcaagctgttcggcatggccaagatcgacaacctgctccaggagatgctgctgtga

SEQ ID NO: 743 - RNA, 1128 nt, synthetic construct
  misc_feature 1..1128: note = CDS (opt1) from Homo sapiens__NP_000448.3__HNF4A(1-375)(S313E)
  source 1..1128: mol_type = other RNA
atgcgcctgagcaagaccctcgtggacatggacatggccgactactccgccgcgctggaccccgcctacaccacgctggagttcgagaacgtccaggtgctcaccatgggcaacgacaccagcccgtccgaggggaccaacctgaacgcccccaacagcctgggcgtgtccgccctctgcgccatctgcggggaccgggcgacgggcaagcactacggggccagctcctgcgacggctgcaagggcttcttccgccggagcgtccgcaagaaccacatgtactcctgccggttcagccgccagtgcgtggtggacaaggacaagcggaaccagtgccgctactgccggctgaagaagtgcttccgcgccgggatgaagaaggaggccgtccagaacgagcgggaccgcatctccacccggcgcagctcctacgaggacagctccctgcccagcatcaacgcgctcctgcaggccgaggtgctgtcccggcagatcaccagccccgtgtccggcatcaacggggacatccgcgccaagaagatcgccagcatcgccgacgtctgcgagagcatgaaggagcagctcctggtgctggtggagtgggcgaagtacatcccggccttctgcgagctccccctggacgaccaggtcgccctgctccgggcccacgccggcgagcacctcctgctgggggcgaccaagcgctccatggtgttcaaggacgtgctgctgctcggcaacgactacatcgtcccccggcactgccccgagctggccgagatgagccgcgtgtccatccggatcctggacgagctcgtgctgccgttccaggagctgcagatcgacgacaacgagtacgcctacctcaaggccatcatcttcttcgaccccgacgccaagggcctgagcgaccccgggaagatcaagcgcctgcgcgagcaggtccaggtgtccctcgaggactacatcaacgaccggcagtacgacagccgcggccggttcggggagctgctgctcctgctgcccacgctccagtccatcacctggcagatgatcgagcagatccagttcatcaagctgttcggcatggcgaagatcgacaacctgctccaggagatgctgctgtga

SEQ ID NO: 744 - RNA, 1128 nt, synthetic construct
  misc_feature 1..1128: note = CDS (opt1) from Homo sapiens__NP_000448.3__HNF4A(1-375)(S142A_S143A)
  source 1..1128: mol_type = other RNA
atgcgcctgagcaagaccctcgtggacatggacatggccgactactccgccgcgctggaccccgcctacaccacgctggagttcgagaacgtccaggtgctcaccatgggcaacgacaccagcccgtccgaggggaccaacctgaacgcccccaacagcctgggcgtgtccgccctctgcgccatctgcggggaccgggcgacgggcaagcactacggggccagctcctgcgacggctgcaagggcttcttccgccggagcgtccgcaagaaccacatgtactcctgccggttcagccgccagtgcgtggtggacaaggacaagcggaaccagtgccgctactgccggctgaagaagtgcttccgcgccgggatgaagaaggaggccgtccagaacgagcgggaccgcatctccacccggcgcgcggcctacgaggacagctccctgcccagcatcaacgccctcctgcaggccgaggtgctgtcccggcagatcaccagccccgtgtccggcatcaacggggacatccgcgccaagaagatcgcgagcatcgccgacgtctgcgagtccatgaaggagcagctcctggtgctggtggagtgggccaagtacatcccggccttctgcgagctccccctggacgaccaggtcgccctgctccgggcgcacgccggcgagcacctcctgctgggggccaccaagcgcagcatggtgttcaaggacgtgctgctgctcggcaacgactacatcgtcccccggcactgccccgagctggccgagatgagccgcgtgtccatccggatcctggacgagctcgtgctgccgttccaggagctgcagatcgacgacaacgagtacgcctacctcaaggcgatcatcttcttcgaccccgacgccaagggcctgagcgaccccgggaagatcaagcgcctgcgctcccaggtccaggtgagcctcgaggactacatcaacgaccggcagtacgactcccgcggccggttcggggagctgctgctcctgctgcccacgctccagagcatcacctggcagatgatcgagcagatccagttcatcaagctgttcggcatggccaagatcgacaacctgctccaggagatgctgctgtga

SEQ ID NO: 745 - RNA, 1128 nt, synthetic construct
  misc_feature 1..1128: note = CDS (opt1) from Homo sapiens__NP_000448.3__HNF4A(1-375)(S142E_S143E)
  source 1..1128: mol_type = other RNA
atgcgcctgagcaagaccctcgtggacatggacatggccgactactccgccgcgctggaccccgcctacaccacgctggagttcgagaacgtccaggtgctcaccatgggcaacgacaccagcccgtccgaggggaccaacctgaacgcccccaacagcctgggcgtgtccgccctctgcgccatctgcggggaccgggcgacgggcaagcactacggggccagctcctgcgacggctgcaagggcttcttccgccggagcgtccgcaagaaccacatgtactcctgccggttcagccgccagtgcgtggtggacaaggacaagcggaaccagtgccgctactgccggctgaagaagtgcttccgcgccgggatgaagaaggaggccgtccagaacgagcgggaccgcatctccacccggcgcgaggagtacgaggacagctccctgcccagcatcaacgcgctcctgcaggccgaggtgctgtcccggcagatcaccagccccgtgtccggcatcaacggggacatccgcgccaagaagatcgccagcatcgccgacgtctgcgagtccatgaaggagcagctcctggtgctggtggagtgggcgaagtacatcccggccttctgcgagctccccctggacgaccaggtcgccctgctccgggcccacgccggcgagcacctcctgctgggggcgaccaagcgcagcatggtgttcaaggacgtgctgctgctcggcaacgactacatcgtcccccggcactgccccgagctggccgagatgagccgcgtgtccatccggatcctggacgagctcgtgctgccgttccaggagctgcagatcgacgacaacgagtacgcctacctcaaggccatcatcttcttcgaccccgacgccaagggcctgagcgaccccgggaagatcaagcgcctgcgctcccaggtccaggtgagcctcgaggactacatcaacgaccggcagtacgactcccgcggccggttcggggagctgctgctcctgctgcccacgctccagagcatcacctggcagatgatcgagcagatccagttcatcaagctgttcggcatggcgaagatcgacaacctgctccaggagatgctgctgtga

SEQ ID NO: 746 - RNA, 1128 nt, synthetic construct
  misc_feature 1..1128: note = CDS (opt1) from Homo sapiens__NP_000448.3__HNF4A(1-375)(S143A)
  source 1..1128: mol_type = other RNA
atgcgcctgagcaagaccctcgtggacatggacatggccgactactccgccgcgctggaccccgcctacaccacgctggagttcgagaacgtccaggtgctcaccatgggcaacgacaccagcccgtccgaggggaccaacctgaacgcccccaacagcctgggcgtgtccgccctctgcgccatctgcggggaccgggcgacgggcaagcactacggggccagctcctgcgacggctgcaagggcttcttccgccggagcgtccgcaagaaccacatgtactcctgccggttcagccgccagtgcgtggtggacaaggacaagcggaaccagtgccgctactgccggctgaagaagtgcttccgcgccgggatgaagaaggaggccgtccagaacgagcgggaccgcatctccacccggcgcagcgcgtacgaggactccagcctgccctccatcaacgccctcctgcaggccgaggtgctgagccggcagatcacctcccccgtgagcggcatcaacggggacatccgcgccaagaagatcgcctccatcgcggacgtctgcgagagcatgaaggagcagctcctggtgctggtggagtgggccaagtacatcccggccttctgcgagctccccctggacgaccaggtcgccctgctccgggcccacgcgggcgagcacctcctgctgggggccaccaagcgcagcatggtgttcaaggacgtgctgctgctcggcaacgactacatcgtcccccggcactgccccgagctggccgagatgtcccgcgtgagcatccggatcctggacgagctcgtgctgccgttccaggagctgcagatcgacgacaacgagtacgcctacctcaaggccatcatcttcttcgaccccgacgcgaagggcctgtccgaccccgggaagatcaagcgcctgcgcagccaggtccaggtgtccctcgaggactacatcaacgaccggcagtacgacagccgcggccggttcggggagctgctgctcctgctgcccacgctccagtccatcacctggcagatgatcgagcagatccagttcatcaagctgttcggcatggccaagatcgacaacctgctccaggagatgctgctgtga

SEQ ID NO: 747 - RNA, 1128 nt, synthetic construct
  misc_feature 1..1128: note = CDS (opt1) from Homo sapiens__NP_000448.3__HNF4A(1-375)(T166A)
  source 1..1128: mol_type = other RNA
atgcgcctgagcaagaccctcgtggacatggacatggccgactactccgccgcgctggaccccgcctacaccacgctggagttcgagaacgtccaggtgctcaccatgggcaacgacaccagcccgtccgaggggaccaacctgaacgcccccaacagcctgggcgtgtccgccctctgcgccatctgcggggaccgggcgacgggcaagcactacggggccagctcctgcgacggctgcaagggcttcttccgccggagcgtccgcaagaaccacatgtactcctgccggttcagccgccagtgcgtggtggacaaggacaagcggaaccagtgccgctactgccggctgaagaagtgcttccgcgccgggatgaagaaggaggccgtccagaacgagcgggaccgcatctccacccggcgcagctcctacgaggacagctccctgcccagcatcaacgcgctcctgcaggccgaggtgctgtcccggcagatcgccagccccgtgtccggcatcaacggggacatccgcgccaagaagatcgccagcatcgcggacgtctgcgagagcatgaaggagcagctcctggtgctggtggagtgggccaagtacatcccggccttctgcgagctccccctggacgaccaggtcgccctgctccgggcccacgcgggcgagcacctcctgctgggggccaccaagcgctccatggtgttcaaggacgtgctgctgctcggcaacgactacatcgtcccccggcactgccccgagctggccgagatgagccgcgtgtccatccggatcctggacgagctcgtgctgccgttccaggagctgcagatcgacgacaacgagtacgcctacctcaaggccatcatcttcttcgaccccgacgcgaagggcctgagcgaccccgggaagatcaagcgcctgcgctcccaggtccaggtgagcctcgaggactacatcaacgaccggcagtacgactcccgcggccggttcggggagctgctgctcctgctgcccaccctccagagcatcacgtggcagatgatcgagcagatccagttcatcaagctgttcggcatggccaagatcgacaacctgctccaggagatgctgctgtga

SEQ ID NO: 748 - RNA, 1128 nt, synthetic construct
  misc_feature 1..1128: note = CDS (opt1) from Homo sapiens__NP_000448.3__HNF4A(1-375)(S167E)
  source 1..1128: mol_type = other RNA
atgcgcctgagcaagaccctcgtggacatggacatggccgactactccgccgcgctggaccccgcctacaccacgctggagttcgagaacgtccaggtgctcaccatgggcaacgacaccagcccgtccgaggggaccaacctgaacgcccccaacagcctgggcgtgtccgccctctgcgccatctgcggggaccgggcgacgggcaagcactacggggccagctcctgcgacggctgcaagggcttcttccgccggagcgtccgcaagaaccacatgtactcctgccggttcagccgccagtgcgtggtggacaaggacaagcggaaccagtgccgctactgccggctgaagaagtgcttccgcgccgggatgaagaaggaggccgtccagaacgagcgggaccgcatctccacccggcgcagctcctacgaggacagctccctgcccagcatcaacgcgctcctgcaggccgaggtgctgtcccggcagatcaccgagcccgtgagcggcatcaacggggacatccgcgccaagaagatcgcctccatcgccgacgtctgcgagagcatgaaggagcagctcctggtgctggtggagtgggcgaagtacatcccggccttctgcgagctccccctggacgaccaggtcgccctgctccgggcccacgccggcgagcacctcctgctgggggcgaccaagcgcagcatggtgttcaaggacgtgctgctgctcggcaacgactacatcgtcccccggcactgccccgagctggccgagatgtcccgcgtgagcatccggatcctggacgagctcgtgctgccgttccaggagctgcagatcgacgacaacgagtacgcctacctcaaggccatcatcttcttcgaccccgacgccaagggcctgtccgaccccgggaagatcaagcgcctgcgcagccaggtccaggtgtccctcgaggactacatcaacgaccggcagtacgacagccgcggccggttcggggagctgctgctcctgctgcccacgctccagtccatcacctggcagatgatcgagcagatccagttcatcaagctgttcggcatggcgaagatcgacaacctgctccaggagatgctgctgtga

SEQ ID NO: 749 - RNA, 1128 nt, synthetic construct
  misc_feature 1..1128: note = CDS (opt1) from Homo sapiens__NP_000448.3__HNF4A(1-375)(S167A)
  source 1..1128: mol_type = other RNA
atgcgcctgagcaagaccctcgtggacatggacatggccgactactccgccgcgctggaccccgcctacaccacgctggagttcgagaacgtccaggtgctcaccatgggcaacgacaccagcccgtccgaggggaccaacctgaacgcccccaacagcctgggcgtgtccgccctctgcgccatctgcggggaccgggcgacgggcaagcactacggggccagctcctgcgacggctgcaagggcttcttccgccggagcgtccgcaagaaccacatgtactcctgccggttcagccgccagtgcgtggtggacaaggacaagcggaaccagtgccgctactgccggctgaagaagtgcttccgcgccgggatgaagaaggaggccgtccagaacgagcgggaccgcatctccacccggcgcagctcctacgaggacagctccctgcccagcatcaacgcgctcctgcaggccgaggtgctgtcccggcagatcaccgcccccgtgagcggcatcaacggggacatccgcgccaagaagatcgcctccatcgcggacgtctgcgagagcatgaaggagcagctcctggtgctggtggagtgggccaagtacatcccggccttctgcgagctccccctggacgaccaggtcgccctgctccgggcccacgcgggcgagcacctcctgctgggggccaccaagcgcagcatggtgttcaaggacgtgctgctgctcggcaacgactacatcgtcccccggcactgccccgagctggccgagatgtcccgcgtgagcatccggatcctggacgagctcgtgctgccgttccaggagctgcagatcgacgacaacgagtacgcctacctcaaggccatcatcttcttcgaccccgacgcgaagggcctgtccgaccccgggaagatcaagcgcctgcgcagccaggtccaggtgtccctcgaggactacatcaacgaccggcagtacgacagccgcggccggttcggggagctgctgctcctgctgcccacgctccagtccatcacctggcagatgatcgagcagatccagttcatcaagctgttcggcatggccaagatcgacaacctgctccaggagatgctgctgtga

SEQ ID NO: 750 - RNA, 1128 nt, synthetic construct; identical to SEQ ID NO: 749
  misc_feature 1..1128: note = CDS (opt1) from Homo sapiens__NP_000448.3__HNF4A(1-375)(S167A_S378A_T429A_T432A_ S436A)
  source 1..1128: mol_type = other RNA

SEQ ID NO: 751 - RNA, 1128 nt, synthetic construct; identical to SEQ ID NO: 748
  misc_feature 1..1128: note = CDS (opt1) from Homo sapiens__NP_000448.3__HNF4A(1-375)(S167E_S378E_T429E_T432E_ S436E)
  source 1..1128: mol_type = other RNA

SEQ ID NO: 752 - RNA, 1128 nt, synthetic construct
  misc_feature 1..1128: note = CDS (opt1) from Homo sapiens__NP_000448.3__HNF4A(1-375)(S87A)
  source 1..1128: mol_type = other RNA
atgcgcctgagcaagaccctcgtggacatggacatggccgactactccgccgcgctggaccccgcctacaccacgctggagttcgagaacgtccaggtgctcaccatgggcaacgacaccagcccgtccgaggggaccaacctgaacgcccccaacagcctgggcgtgtccgccctctgcgccatctgcggggaccgggcgacgggcaagcactacggggccagctcctgcgacggctgcaagggcttcttccgccgggccgtccgcaagaaccacatgtacagctgccggttctcccgccagtgcgtggtggacaaggacaagcggaaccagtgccgctactgccggctgaagaagtgcttccgcgccgggatgaagaaggaggcggtccagaacgagcgggaccgcatcagcacccggcgctccagctacgaggactccagcctgccctccatcaacgccctcctgcaggccgaggtgctgagccggcagatcacctcccccgtgagcggcatcaacggggacatccgcgccaagaagatcgcctccatcgcggacgtctgcgagagcatgaaggagcagctcctggtgctggtggagtgggccaagtacatcccggccttctgcgagctccccctggacgaccaggtcgccctgctccgggcccacgcgggcgagcacctcctgctgggggccaccaagcgcagcatggtgttcaaggacgtgctgctgctcggcaacgactacatcgtcccccggcactgccccgagctggccgagatgtcccgcgtgagcatccggatcctggacgagctcgtgctgccgttccaggagctgcagatcgacgacaacgagtacgcctacctcaaggccatcatcttcttcgaccccgacgcgaagggcctgtccgaccccgggaagatcaagcgcctgcgcagccaggtccaggtgtccctcgaggactacatcaacgaccggcagtacgacagccgcggccggttcggggagctgctgctcctgctgcccacgctccagtccatcacctggcagatgatcgagcagatccagttcatcaagctgttcggcatggccaagatcgacaacctgctccaggagatgctgctgtga

SEQ ID NO: 753 - RNA, 1128 nt, synthetic construct
  misc_feature 1..1128: note = CDS (opt1) from Homo sapiens__NP_000448.3__HNF4A(1-375)(S87E)
  source 1..1128: mol_type = other RNA
atgcgcctgagcaagaccctcgtggacatggacatggccgactactccgccgcgctggaccccgcctacaccacgctggagttcgagaacgtccaggtgctcaccatgggcaacgacaccagcccgtccgaggggaccaacctgaacgcccccaacagcctgggcgtgtccgccctctgcgccatctgcggggaccgggcgacgggcaagcactacggggccagctcctgcgacggctgcaagggcttcttccgccgggaggtccgcaagaaccacatgtacagctgccggttctcccgccagtgcgtggtggacaaggacaagcggaaccagtgccgctactgccggctgaagaagtgcttccgcgccgggatgaagaaggaggccgtccagaacgagcgggaccgcatcagcacccggcgctccagctacgaggactccagcctgccctccatcaacgcgctcctgcaggccgaggtgctgagccggcagatcacctcccccgtgagcggcatcaacggggacatccgcgccaagaagatcgcctccatcgccgacgtctgcgagagcatgaaggagcagctcctggtgctggtggagtgggcgaagtacatcccggccttctgcgagctccccctggacgaccaggtcgccctgctccgggcccacgccggcgagcacctcctgctgggggcgaccaagcgcagcatggtgttcaaggacgtgctgctgctcggcaacgactacatcgtcccccggcactgccccgagctggccgagatgtcccgcgtgagcatccggatcctggacgagctcgtgctgccgttccaggagctgcagatcgacgacaacgagtacgcctacctcaaggccatcatcttcttcgaccccgacgccaagggcctgtccgaccccgggaagatcaagcgcctgcgcagccaggtccaggtgtccctcgaggactacatcaacgaccggcagtacgacagccgcggccggttcggggagctgctgctcctgctgcccacgctccagtccatcacctggcagatgatcgagcagatccagttcatcaagctgttcggcatggcgaagatcgacaacctgctccaggagatgctgctgtga

SEQ ID NO: 754 - RNA, 1128 nt, synthetic construct
  misc_feature 1..1128: note = CDS (opt1) from Homo sapiens__NP_000448.3__HNF4A(1-375)(R2V)
  source 1..1128: mol_type = other RNA
atggtgctgagcaagaccctcgtcgacatggacatggccgactactccgccgcgctggaccccgcctacaccacgctggagttcgagaacgtccaggtgctcaccatgggcaacgacaccagcccgtccgaggggaccaacctgaacgcccccaacagcctgggcgtgtccgccctctgcgccatctgcggggaccgcgcgacgggcaagcactacggggccagctcctgcgacggctgcaagggcttcttccggcgcagcgtgcggaagaaccacatgtactcctgccgcttcagccggcagtgcgtggtcgacaaggacaagcgcaaccagtgccggtactgccgcctgaagaagtgcttccgggccgggatgaagaaggaggccgtgcagaacgagcgcgaccggatctccacccgccggagctcctacgaggacagctccctgcccagcatcaacgcgctcctgcaggccgaggtgctgtcccgccagatcaccagccccgtctccggcatcaacggggacatccgggccaagaagatcgccagcatcgccgacgtgtgcgagagcatgaaggagcagctcctggtgctggtcgagtgggcgaagtacatcccggccttctgcgagctccccctggacgaccaggtggccctgctccgcgcccacgccggcgagcacctcctgctgggggcgaccaagcggtccatggtgttcaaggacgtcctgctgctcggcaacgactacatcgtgccccgccactgccccgagctggccgagatgagccgggtgtccatccgcatcctggacgagctcgtcctgccgttccaggagctgcagatcgacgacaacgagtacgcctacctcaaggccatcatcttcttcgaccccgacgccaagggcctgagcgaccccgggaagatcaagcggctgcgctcccaggtccaggtgagcctcgaggactacatcaacgaccgccagtacgactcccggggccgcttcggggagctgctgctcctgctgcccacgctccagagcatcacctggcagatgatcgagcagatccagttcatcaagctgttcggcatggcgaagatcgacaacctgctccaggagatgctgctgtga

SEQ ID NO: 755 - RNA, 1128 nt, synthetic construct
  misc_feature 1..1128: note = CDS (opt1) from Homo sapiens__NP_000448.3__HNF4A(1-375)(R2V_K5V)
  source 1..1128: mol_type = other RNA
atggtgctgagcgtcaccctcgtggacatggacatggccgactactccgccgcgctggaccccgcctacaccacgctggagttcgagaacgtgcaggtcctcaccatgggcaacgacaccagcccgtccgaggggaccaacctgaacgcccccaacagcctgggcgtgtccgccctctgcgccatctgcggggaccgcgcgacgggcaagcactacggggccagctcctgcgacggctgcaagggcttcttccggcgcagcgtgcggaagaaccacatgtactcctgccgcttcagccggcagtgcgtcgtggacaaggacaagcgcaaccagtgccggtactgccgcctgaagaagtgcttccgggccgggatgaagaaggaggccgtgcagaacgagcgcgaccggatctccacccgccggagctcctacgaggacagctccctgcccagcatcaacgcgctcctgcaggccgaggtcctgtcccgccagatcaccagccccgtgtccggcatcaacggggacatccgggccaagaagatcgccagcatcgccgacgtgtgcgagagcatgaaggagcagctcctggtcctggtggagtgggcgaagtacatcccggccttctgcgagctccccctggacgaccaggtggccctgctccgcgcccacgccggcgagcacctcctgctgggggcgaccaagcggtccatggtcttcaaggacgtgctgctgctcggcaacgactacatcgtgccccgccactgccccgagctggccgagatgagccgggtctccatccgcatcctggacgagctcgtgctgccgttccaggagctgcagatcgacgacaacgagtacgcctacctcaaggccatcatcttcttcgaccccgacgccaagggcctgagcgaccccgggaagatcaagcggctgcgctcccaggtgcaggtcagcctcgaggactacatcaacgaccgccagtacgactcccggggccgcttcggggagctgctgctcctgctgcccacgctccagagcatcacctggcagatgatcgagcagatccagttcatcaagctgttcggcatggcgaagatcgacaacctgctccaggagatgctgctgtga

SEQ ID NO: 756 - RNA, 1128 nt, synthetic construct
  misc_feature 1..1128: note = CDS (opt1) from Homo sapiens__NP_000448.3__HNF4A(1-375)(K179R_K180R)
  source 1..1128: mol_type = other RNA
atgcgcctgagcaagaccctcgtggacatggacatggccgactactccgccgcgctggaccccgcctacaccacgctggagttcgagaacgtccaggtgctcaccatgggcaacgacaccagcccgtccgaggggaccaacctgaacgcccccaacagcctgggcgtgtccgccctctgcgccatctgcggggaccgggcgacgggcaagcactacggggccagctcctgcgacggctgcaagggcttcttccgccggagcgtccgcaagaaccacatgtactcctgccggttcagccgccagtgcgtggtggacaaggacaagcggaaccagtgccgctactgccggctgaagaagtgcttccgcgccgggatgaagaaggaggccgtccagaacgagcgggaccgcatctccacccggcgcagctcctacgaggacagctccctgcccagcatcaacgcgctcctgcaggccgaggtgctgtcccggcagatcaccagccccgtgtccggcatcaacggggacatccgcgcccggcgcatcgccagcatcgccgacgtctgcgagagcatgaaggagcagctcctggtgctggtggagtgggcgaagtacatcccggccttctgcgagctccccctggacgaccaggtcgccctgctccgggcccacgccggcgagcacctcctgctgggggcgaccaagcgctccatggtgttcaaggacgtgctgctgctcggcaacgactacatcgtcccccggcactgccccgagctggccgagatgagccgcgtgtccatccgcatcctggacgagctcgtgctgccgttccaggagctgcagatcgacgacaacgagtacgcctacctcaaggccatcatcttcttcgaccccgacgccaagggcctgagcgaccccgggaagatcaagcggctgcgctcccaggtccaggtgagcctcgaggactacatcaacgaccggcagtacgactcccgcggccggttcggggagctgctgctcctgctgcccacgctccagagcatcacctggcagatgatcgagcagatccagttcatcaagctgttcggcatggcgaagatcgacaacctgctccaggagatgctgctgtga

SEQ ID NO: 757 - RNA, 1128 nt, synthetic construct
  misc_feature 1..1128: note = CDS (opt1) from Homo sapiens__NP_000448.3__HNF4A(1-375)(K234R)
  source 1..1128: mol_type = other RNA
atgcgcctgagcaagaccctcgtggacatggacatggccgactactccgccgcgctggaccccgcctacaccacgctggagttcgagaacgtccaggtgctcaccatgggcaacgacaccagcccgtccgaggggaccaacctgaacgcccccaacagcctgggcgtgtccgccctctgcgccatctgcggggaccgggcgacgggcaagcactacggggccagctcctgcgacggctgcaagggcttcttccgccggagcgtccgcaagaaccacatgtactcctgccggttcagccgccagtgcgtggtggacaaggacaagcggaaccagtgccgctactgccggctgaagaagtgcttccgcgccgggatgaagaaggaggccgtccagaacgagcgggaccgcatctccacccggcgcagctcctacgaggacagctccctgcccagcatcaacgcgctcctgcaggccgaggtgctgtcccggcagatcaccagccccgtgtccggcatcaacggggacatccgcgccaagaagatcgccagcatcgccgacgtctgcgagagcatgaaggagcagctcctggtgctggtggagtgggcgaagtacatcccggccttctgcgagctccccctggacgaccaggtcgccctgctccgggcccacgccggcgagcacctcctgctgggggcgacccgccggtccatggtgttcaaggacgtgctgctgctcggcaacgactacatcgtcccccgccactgccccgagctggccgagatgagccgggtgtccatccgcatcctggacgagctcgtgctgccgttccaggagctgcagatcgacgacaacgagtacgcctacctcaaggccatcatcttcttcgaccccgacgccaagggcctgagcgaccccgggaagatcaagcgcctgcggtcccaggtccaggtgagcctcgaggactacatcaacgaccgccagtacgactcccggggccgcttcggggagctgctgctcctgctgcccacgctccagagcatcacctggcagatgatcgagcagatccagttcatcaagctgttcggcatggcgaagatcgacaacctgctccaggagatgctgctgtga

SEQ ID NO: 758 - RNA, 1128 nt, synthetic construct
  misc_feature 1..1128: note = CDS (opt1) from Homo sapiens__NP_000448.3__HNF4A(1-375)(K300R)
  source 1..1128: mol_type = other RNA
atgcgcctgagcaagaccctcgtggacatggacatggccgactactccgccgcgctggaccccgcctacaccacgctggagttcgagaacgtccaggtgctcaccatgggcaacgacaccagcccgtccgaggggaccaacctgaacgcccccaacagcctgggcgtgtccgccctctgcgccatctgcggggaccgggcgacgggcaagcactacggggccagctcctgcgacggctgcaagggcttcttccgccggagcgtccgcaagaaccacatgtactcctgccggttcagccgccagtgcgtggtggacaaggacaagcggaaccagtgccgctactgccggctgaagaagtgcttccgcgccgggatgaagaaggaggccgtccagaacgagcgggaccgcatctccacccggcgcagctcctacgaggacagctccctgcccagcatcaacgcgctcctgcaggccgaggtgctgtcccggcagatcaccagccccgtgtccggcatcaacggggacatccgcgccaagaagatcgccagcatcgccgacgtctgcgagagcatgaaggagcagctcctggtgctggtggagtgggcgaagtacatcccggccttctgcgagctccccctggacgaccaggtcgccctgctccgggcccacgccggcgagcacctcctgctgggggcgaccaagcgctccatggtgttcaaggacgtgctgctgctcggcaacgactacatcgtcccccggcactgccccgagctggccgagatgagccgcgtgtccatccggatcctggacgagctcgtgctgccgttccaggagctgcagatcgacgacaacgagtacgcctacctcaaggccatcatcttcttcgaccccgacgcccgcggcctgagcgaccccgggaagatcaagcgcctgcggtcccaggtccaggtgagcctcgaggactacatcaacgaccgccagtacgactcccggggccgcttcggggagctgctgctcctgctgcccacgctccagagcatcacctggcagatgatcgagcagatccagttcatcaagctgttcggcatggcgaagatcgacaacctgctccaggagatgctgctgtga

SEQ ID NO: 759 - RNA, 1128 nt, synthetic construct
  misc_feature 1..1128: note = CDS (opt1) from Homo sapiens__NP_000448.3__HNF4A(1-375)(K300R_K307R_K309R)
  source 1..1128: mol_type = other RNA
atgcgcctgagcaagaccctcgtggacatggacatggccgactactccgccgcgctggaccccgcctacaccacgctggagttcgagaacgtccaggtgctcaccatgggcaacgacaccagcccgtccgaggggaccaacctgaacgcccccaacagcctgggcgtgtccgccctctgcgccatctgcggggaccgggcgacgggcaagcactacggggccagctcctgcgacggctgcaagggcttcttccgccggagcgtccgcaagaaccacatgtactcctgccggttcagccgccagtgcgtggtggacaaggacaagcggaaccagtgccgctactgccggctgaagaagtgcttccgcgccgggatgaagaaggaggccgtccagaacgagcgggaccgcatctccacccggcgcagctcctacgaggacagctccctgcccagcatcaacgcgctcctgcaggccgaggtgctgtcccggcagatcaccagccccgtgtccggcatcaacggggacatccgcgccaagaagatcgccagcatcgccgacgtctgcgagagcatgaaggagcagctcctggtgctggtggagtgggcgaagtacatcccggccttctgcgagctccccctggacgaccaggtcgccctgctccgggcccacgccggcgagcacctcctgctgggggcgaccaagcgctccatggtgttcaaggacgtgctgctgctcggcaacgactacatcgtcccccggcactgccccgagctggccgagatgagccgcgtgtccatccggatcctggacgagctcgtgctgccgttccaggagctgcagatcgacgacaacgagtacgcctacctcaaggccatcatcttcttcgaccccgacgcccgcggcctgagcgaccccgggcgcatccggcgcctgcggtcccaggtccaggtgagcctcgaggactacatcaacgaccgccagtacgactcccggggccgcttcggggagctgctgctcctgctgcccacgctccagagcatcacctggcagatgatcgagcagatccagttcatcaagctgttcggcatggcgaagatcgacaacctgctccaggagatgctgctgtga

SEQ ID NO: 760 - RNA, 1128 nt, synthetic construct; identical to SEQ ID NO: 692
  misc_feature 1..1128: note = CDS (opt1) from Homo sapiens__NP_000448.3__HNF4A(1-375)(K447R_K470R)
  source 1..1128: mol_type = other RNA

SEQ ID NO: 761 - RNA, 1128 nt, synthetic construct; identical to SEQ ID NO: 692
  misc_feature 1..1128: note = CDS (opt1) from Homo sapiens__NP_000448.3__HNF4A(1-375)(K458R)
  source 1..1128: mol_type = other RNA

SEQ ID NO: 762 - RNA, 1128 nt, synthetic construct
  misc_feature 1..1128: note = CDS (opt1) from Homo sapiens__NP_000448.3__HNF4A(1-375)(K106R_K108R_K126R_K127R)
  source 1..1128: mol_type = other RNA
atgcgcctgagcaagaccctcgtggacatggacatggccgactactccgccgcgctggaccccgcctacaccacgctggagttcgagaacgtccaggtgctcaccatgggcaacgacaccagcccgtccgaggggaccaacctgaacgcccccaacagcctgggcgtgtccgccctctgcgccatctgcggggaccgggcgacgggcaagcactacggggccagctcctgcgacggctgcaagggcttcttccgccggagcgtccgcaagaaccacatgtactcctgccggttcagccgccagtgcgtggtggaccgggaccgccggaaccagtgccgctactgccggctgaagaagtgcttccgcgccgggatgcggcgcgaggccgtccagaacgagcgggaccgcatctccacccggcgcagctcctacgaggacagctccctgcccagcatcaacgcgctcctgcaggccgaggtgctgtcccggcagatcaccagccccgtgtccggcatcaacggggacatccgcgccaagaagatcgccagcatcgccgacgtctgcgagagcatgaaggagcagctcctggtgctggtggagtgggcgaagtacatcccggccttctgcgagctccccctggacgaccaggtcgccctgctccgggcccacgccggcgagcacctcctgctgggggcgaccaagcgctccatggtgttcaaggacgtgctgctgctcggcaacgactacatcgtcccccgccactgccccgagctggccgagatgagccgggtgtccatccgcatcctggacgagctcgtgctgccgttccaggagctgcagatcgacgacaacgagtacgcctacctcaaggccatcatcttcttcgaccccgacgccaagggcctgagcgaccccgggaagatcaagcggctgcgctcccaggtccaggtgagcctcgaggactacatcaacgaccggcagtacgactcccgcggccggttcggggagctgctgctcctgctgcccacgctccagagcatcacctggcagatgatcgagcagatccagttcatcaagctgttcggcatggcgaagatcgacaacctgctccaggagatgctgctgtga

SEQ ID NO: 763 - RNA, 1128 nt, synthetic construct; identical to SEQ ID NO: 714
  misc_feature 1..1128: note = CDS (opt1) from Homo sapiens__NP_000448.3__HNF4A(1-375)(E285Q)
  source 1..1128: mol_type = other RNA

SEQ ID NO: 764 - RNA, 1128 nt, synthetic construct
  misc_feature 1..1128: note = CDS (opt1) from Homo sapiens__NP_000448.3__HNF4A(1-375)(T166E)
  source 1..1128: mol_type = other RNA
atgcgcctgagcaagaccctcgtggacatggacatggccgactactccgccgcgctggaccccgcctacaccacgctggagttcgagaacgtccaggtgctcaccatgggcaacgacaccagcccgtccgaggggaccaacctgaacgcccccaacagcctgggcgtgtccgccctctgcgccatctgcggggaccgggcgacgggcaagcactacggggccagctcctgcgacggctgcaagggcttcttccgccggagcgtccgcaagaaccacatgtactcctgccggttcagccgccagtgcgtggtggacaaggacaagcggaaccagtgccgctactgccggctgaagaagtgcttccgcgccgggatgaagaaggaggccgtccagaacgagcgggaccgcatctccacccggcgcagctcctacgaggacagctccctgcccagcatcaacgcgctcctgcaggccgaggtgctgtcccggcagatcgagagccccgtgtccggcatcaacggggacatccgcgccaagaagatcgccagcatcgccgacgtctgcgagagcatgaaggagcagctcctggtgctggtggagtgggcgaagtacatcccggccttctgcgagctccccctggacgaccaggtcgccctgctccgggcccacgccggcgagcacctcctgctgggggcgaccaagcgctccatggtgttcaaggacgtgctgctgctcggcaacgactacatcgtcccccggcactgccccgagctggccgagatgagccgcgtgtccatccggatcctggacgagctcgtgctgccgttccaggagctgcagatcgacgacaacgagtacgcctacctcaaggccatcatcttcttcgaccccgacgccaagggcctgagcgaccccgggaagatcaagcgcctgcgctcccaggtccaggtgagcctcgaggactacatcaacgaccggcagtacgactcccgcggccggttcggggagctgctgctcctgctgcccaccctccagagcatcacgtggcagatgatcgagcagatccagttcatcaagctgttcggcatggcgaagatcgacaacctgctccaggagatgctgctgtga

SEQ ID NO: 765 - RNA, 1128 nt, synthetic construct
  misc_feature 1..1128: note = CDS (opt1) from Homo sapiens__NP_000448.3__HNF4A(1-375)(S148A)
  source 1..1128: mol_type = other RNA
atgcgcctgagcaagaccctcgtggacatggacatggccgactactccgccgcgctggaccccgcctacaccacgctggagttcgagaacgtccaggtgctcaccatgggcaacgacaccagcccgtccgaggggaccaacctgaacgcccccaacagcctgggcgtgtccgccctctgcgccatctgcggggaccgggcgacgggcaagcactacggggccagctcctgcgacggctgcaagggcttcttccgccggagcgtccgcaagaaccacatgtactcctgccggttcagccgccagtgcgtggtggacaaggacaagcggaaccagtgccgctactgccggctgaagaagtgcttccgcgccgggatgaagaaggaggccgtccagaacgagcgggaccgcatctccacccggcgcagctcctacgaggacagcgcgctgccctccatcaacgccctcctgcaggccgaggtgctgagccggcagatcacctcccccgtgagcggcatcaacggggacatccgcgccaagaagatcgcctccatcgcggacgtctgcgagagcatgaaggagcagctcctggtgctggtggagtgggccaagtacatcccggccttctgcgagctccccctggacgaccaggtcgccctgctccgggcccacgcgggcgagcacctcctgctgggggccaccaagcgcagcatggtgttcaaggacgtgctgctgctcggcaacgactacatcgtcccccggcactgccccgagctggccgagatgtcccgcgtgagcatccggatcctggacgagctcgtgctgccgttccaggagctgcagatcgacgacaacgagtacgcctacctcaaggccatcatcttcttcgaccccgacgcgaagggcctgtccgaccccgggaagatcaagcgcctgcgcagccaggtccaggtgtccctcgaggactacatcaacgaccggcagtacgacagccgcggccggttcggggagctgctgctcctgctgcccacgctccagtccatcacctggcagatgatcgagcagatccagttcatcaagctgttcggcatggccaagatcgacaacctgctccaggagatgctgctgtga

SEQ ID NO: 766 - RNA, 1128 nt, synthetic construct
  misc_feature 1..1128: note = CDS (opt1) from Homo sapiens__NP_000448.3__HNF4A(1-375)(S148E)
  source 1..1128: mol_type = other RNA
atgcgcctgagcaagaccctcgtggacatggacatggccgactactccgccgcgctggaccccgcctacaccacgctggagttcgagaacgtccaggtgctcaccatgggcaacgacaccagcccgtccgaggggaccaacctgaacgcccccaacagcctgggcgtgtccgccctctgcgccatctgcggggaccgggcgacgggcaagcactacggggccagctcctgcgacggctgcaagggcttcttccgccggagcgtccgcaagaaccacatgtactcctgccggttcagccgccagtgcgtggtggacaaggacaagcggaaccagtgccgctactgccggctgaagaagtgcttccgcgccgggatgaagaaggaggccgtccagaacgagcgggaccgcatctccacccggcgcagctcctacgaggacagcgagctgccctccatcaacgcgctcctgcaggccgaggtgctgagccggcagatcacctcccccgtgagcggcatcaacggggacatccgcgccaagaagatcgcctccatcgccgacgtctgcgagagcatgaaggagcagctcctggtgctggtggagtgggcgaagtacatcccggccttctgcgagctccccctggacgaccaggtcgccctgctccgggcccacgccggcgagcacctcctgctgggggcgaccaagcgcagcatggtgttcaaggacgtgctgctgctcggcaacgactacatcgtcccccggcactgccccgagctggccgagatgtcccgcgtgagcatccggatcctggacgagctcgtgctgccgttccaggagctgcagatcgacgacaacgagtacgcctacctcaaggccatcatcttcttcgaccccgacgccaagggcctgtccgaccccgggaagatcaagcgcctgcgcagccaggtccaggtgtccctcgaggactacatcaacgaccggcagtacgacagccgcggccggttcggggagctgctgctcctgctgcccacgctccagtccatcacctggcagatgatcgagcagatccagttcatcaagctgttcggcatggcgaagatcgacaacctgctccaggagatgctgctgtga

SEQ ID NO: 767 - RNA, 1128 nt, synthetic construct
  misc_feature 1..1128: note = CDS (opt1) from Homo sapiens__NP_000448.3__HNF4A(1-375)(S183A)
  source 1..1128: mol_type = other RNA
atgcgcctgagcaagaccctcgtggacatggacatggccgactactccgccgcgctggaccccgcctacaccacgctggagttcgagaacgtccaggtgctcaccatgggcaacgacaccagcccgtccgaggggaccaacctgaacgcccccaacagcctgggcgtgtccgccctctgcgccatctgcggggaccgggcgacgggcaagcactacggggccagctcctgcgacggctgcaagggcttcttccgccggagcgtccgcaagaaccacatgtactcctgccggttcagccgccagtgcgtggtggacaaggacaagcggaaccagtgccgctactgccggctgaagaagtgcttccgcgccgggatgaagaaggaggccgtccagaacgagcgggaccgcatctccacccggcgcagctcctacgaggacagctccctgcccagcatcaacgcgctcctgcaggccgaggtgctgtcccggcagatcaccagccccgtgtccggcatcaacggggacatccgcgccaagaagatcgccgccatcgcggacgtctgcgagagcatgaaggagcagctcctggtgctggtggagtgggccaagtacatcccggccttctgcgagctccccctggacgaccaggtcgccctgctccgggcccacgcgggcgagcacctcctgctgggggccaccaagcgcagcatggtgttcaaggacgtgctgctgctcggcaacgactacatcgtcccccggcactgccccgagctggccgagatgtcccgcgtgagcatccggatcctggacgagctcgtgctgccgttccaggagctgcagatcgacgacaacgagtacgcctacctcaaggccatcatcttcttcgaccccgacgcgaagggcctgtccgaccccgggaagatcaagcgcctgcgcagccaggtccaggtgtccctcgaggactacatcaacgaccggcagtacgacagccgcggccggttcggggagctgctgctcctgctgcccacgctccagtccatcacctggcagatgatcgagcagatccagttcatcaagctgttcggcatggccaagatcgacaacctgctccaggagatgctgctgtga

SEQ ID NO: 768 - RNA, 1128 nt, synthetic construct
  misc_feature 1..1128: note = CDS (opt1) from Homo sapiens__NP_000448.3__HNF4A(1-375)(S183E)
  source 1..1128: mol_type = other RNA
atgcgcctgagcaagaccctcgtggacatggacatggccgactactccgccgcgctggaccccgcctacaccacgctggagttcgagaacgtccaggtgctcaccatgggcaacgacaccagcccgtccgaggggaccaacctgaacgcccccaacagcctgggcgtgtccgccctctgcgccatctgcggggaccgggcgacgggcaagcactacggggccagctcctgcgacggctgcaagggcttcttccgccggagcgtccgcaagaaccacatgtactcctgccggttcagccgccagtgcgtggtggacaaggacaagcggaaccagtgccgctactgccggctgaagaagtgcttccgcgccgggatgaagaaggaggccgtccagaacgagcgggaccgcatctccacccggcgcagctcctacgaggacagctccctgcccagcatcaacgcgctcctgcaggccgaggtgctgtcccggcagatcaccagccccgtgtccggcatcaacggggacatccgcgccaagaagatcgccgagatcgccgacgtctgcgagagcatgaaggagcagctcctggtgctggtggagtgggcgaagtacatcccggccttctgcgagctccccctggacgaccaggtcgccctgctccgggcccacgccggcgagcacctcctgctgggggcgaccaagcgcagcatggtgttcaaggacgtgctgctgctcggcaacgactacatcgtcccccggcactgccccgagctggccgagatgtcccgcgtgagcatccggatcctggacgagctcgtgctgccgttccaggagctgcagatcgacgacaacgagtacgcctacctcaaggccatcatcttcttcgaccccgacgccaagggcctgtccgaccccgggaagatcaagcgcctgcgcagccaggtccaggtgtccctcgaggactacatcaacgaccggcagtacgacagccgcggccggttcggggagctgctgctcctgctgcccacgctccagtccatcacctggcagatgatcgagcagatccagttcatcaagctgttcggcatggcgaagatcgacaacctgctccaggagatgctgctgtga

SEQ ID NO: 769 - RNA, 1128 nt, synthetic construct; identical to SEQ ID NO: 692
  misc_feature 1..1128: note = CDS (opt1) from Homo sapiens__NP_000448.3__HNF4A(1-375)(S461A)
  source 1..1128: mol_type = other RNA

SEQ ID NO: 770 - RNA, 1128 nt, synthetic construct; identical to SEQ ID NO: 692
  misc_feature 1..1128: note = CDS (opt1) from Homo sapiens__NP_000448.3__HNF4A(1-375)(S461E)
  source 1..1128: mol_type = other RNA

SEQ ID NO: 771 - RNA, 1128 nt, synthetic construct
  misc_feature 1..1128: note = CDS (opt1) from Homo sapiens__NP_000448.3__HNF4A(1-375)(S142A_S143A_S313A)
  source 1..1128: mol_type = other RNA
atgcgcctgagcaagaccctcgtggacatggacatggccgactactccgccgcgctggaccccgcctacaccacgctggagttcgagaacgtccaggtgctcaccatgggcaacgacaccagcccgtccgaggggaccaacctgaacgcccccaacagcctgggcgtgtccgccctctgcgccatctgcggggaccgggcgacgggcaagcactacggggccagctcctgcgacggctgcaagggcttcttccgccggagcgtccgcaagaaccacatgtactcctgccggttcagccgccagtgcgtggtggacaaggacaagcggaaccagtgccgctactgccggctgaagaagtgcttccgcgccgggatgaagaaggaggccgtccagaacgagcgggaccgcatctccacccggcgcgcggcctacgaggacagctccctgcccagcatcaacgccctcctgcaggccgaggtgctgtcccggcagatcaccagccccgtgtccggcatcaacggggacatccgcgccaagaagatcgcgagcatcgccgacgtctgcgagtccatgaaggagcagctcctggtgctggtggagtgggccaagtacatcccggccttctgcgagctccccctggacgaccaggtcgccctgctccgggcgcacgccggcgagcacctcctgctgggggccaccaagcgcagcatggtgttcaaggacgtgctgctgctcggcaacgactacatcgtcccccggcactgccccgagctggccgagatgagccgcgtgtccatccggatcctggacgagctcgtgctgccgttccaggagctgcagatcgacgacaacgagtacgcctacctcaaggcgatcatcttcttcgaccccgacgccaagggcctgagcgaccccgggaagatcaagcgcctgcgcgcccaggtccaggtgtccctcgaggactacatcaacgaccggcagtacgacagccgcggccggttcggggagctgctgctcctgctgcccacgctccagtccatcacctggcagatgatcgagcagatccagttcatcaagctgttcggcatggccaagatcgacaacctgctccaggagatgctgctgtga

SEQ ID NO: 772 - RNA, 1128 nt, synthetic construct; identical to SEQ ID NO: 771
  misc_feature 1..1128: note = CDS (opt1) from Homo sapiens__NP_000448.3__HNF4A(1-375)(S142A_S143A_S313A_K458R)
  source 1..1128: mol_type = other RNA

SEQ ID NO: 773 - RNA, 1128 nt, synthetic construct
  misc_feature 1..1128: note = CDS (opt1) from Homo sapiens__NP_000448.3__HNF4A(1-375)(S142A_S143A_S167A_S313A_ S378A_T429A_T432A_S436A_K458R)
  source 1..1128: mol_type = other RNA
atgcgcctgagcaagaccctcgtggacatggacatggccgactactccgccgcgctggaccccgcctacaccacgctggagttcgagaacgtccaggtgctcaccatgggcaacgacaccagcccgtccgaggggaccaacctgaacgcccccaacagcctgggcgtgtccgccctctgcgccatctgcggggaccgggcgacgggcaagcactacggggccagctcctgcgacggctgcaagggcttcttccgccggagcgtccgcaagaaccacatgtactcctgccggttcagccgccagtgcgtggtggacaaggacaagcggaaccagtgccgctactgccggctgaagaagtgcttccgcgccgggatgaagaaggaggccgtccagaacgagcgggaccgcatctccacccggcgcgcggcctacgaggacagctccctgcccagcatcaacgccctcctgcaggccgaggtgctgtcccggcagatcaccgcccccgtgagcggcatcaacggggacatccgcgcgaagaagatcgcctccatcgccgacgtctgcgagagcatgaaggagcagctcctggtgctggtggagtgggccaagtacatcccggccttctgcgagctccccctggacgaccaggtcgcgctgctccgggcccacgccggcgagcacctcctgctgggggccaccaagcgctccatggtgttcaaggacgtgctgctgctcggcaacgactacatcgtcccccggcactgccccgagctggccgagatgagccgcgtgagcatccggatcctggacgagctcgtgctgccgttccaggagctgcagatcgacgacaacgagtacgcgtacctcaaggccatcatcttcttcgaccccgacgccaagggcctgtccgaccccgggaagatcaagcgcctgcgcgcccaggtccaggtgagcctcgaggactacatcaacgaccggcagtacgactcccgcggccggttcggggagctgctgctcctgctgcccacgctccagagcatcacctggcagatgatcgagcagatccagttcatcaagctgttcggcatggccaagatcgacaacctgctccaggagatgctgctgtga

SEQ ID NO: 774 - RNA, 1128 nt, synthetic construct
  misc_feature 1..1128: note = CDS (opt1) from Homo sapiens__NP_000448.3__HNF4A(1-375)(S142A_S143A_S148A_S167A_ S313A_S378A_T429A_T432A_S436A_K458R)
  source 1..1128: mol_type = other RNA
atgcgcctgagcaagaccctcgtggacatggacatggccgactactccgccgcgctggaccccgcctacaccacgctggagttcgagaacgtccaggtgctcaccatgggcaacgacaccagcccgtccgaggggaccaacctgaacgcccccaacagcctgggcgtgtccgccctctgcgccatctgcggggaccgggcgacgggcaagcactacggggccagctcctgcgacggctgcaagggcttcttccgccggagcgtccgcaagaaccacatgtactcctgccggttcagccgccagtgcgtggtggacaaggacaagcggaaccagtgccgctactgccggctgaagaagtgcttccgcgccgggatgaagaaggaggccgtccagaacgagcgggaccgcatctccacccggcgcgcggcctacgaggacagcgccctgccctccatcaacgccctcctgcaggccgaggtgctgagccggcagatcaccgcgcccgtgtccggcatcaacggggacatccgcgccaagaagatcgccagcatcgccgacgtctgcgagtccatgaaggagcagctcctggtgctggtggagtgggccaagtacatcccggcgttctgcgagctccccctggacgaccaggtcgccctgctccgggcccacgccggcgagcacctcctgctgggggccaccaagcgcagcatggtgttcaaggacgtgctgctgctcggcaacgactacatcgtcccccggcactgccccgagctggcggagatgtcccgcgtgagcatccggatcctggacgagctcgtgctgccgttccaggagctgcagatcgacgacaacgagtacgcctacctcaaggccatcatcttcttcgaccccgacgccaagggcctgagcgaccccgggaagatcaagcgcctgcgcgcccaggtccaggtgtccctcgaggactacatcaacgaccggcagtacgacagccgcggccggttcggggagctgctgctcctgctgcccacgctccagtccatcacctggcagatgatcgagcagatccagttcatcaagctgttcggcatggcgaagatcgacaacctgctccaggagatgctgctgtga

SEQ ID NO: 775 - RNA, 1128 nt, synthetic construct
  misc_feature 1..1128: note = CDS (opt1) from Homo sapiens__NP_000448.3__HNF4A(1-375)(K106R_K108R_K126R_K127R_ S142A_S143A_S148A_S167A_S313A_S378A_T429A_T432A_S436A_K458R )
  source 1..1128: mol_type = other RNA
atgcgcctgagcaagaccctcgtggacatggacatggccgactactccgccgcgctggaccccgcctacaccacgctggagttcgagaacgtccaggtgctcaccatgggcaacgacaccagcccgtccgaggggaccaacctgaacgcccccaacagcctgggcgtgtccgccctctgcgccatctgcggggaccgggcgacgggcaagcactacggggccagctcctgcgacggctgcaagggcttcttccgccggagcgtccgcaagaaccacatgtactcctgccggttcagccgccagtgcgtggtggaccgggaccgccggaaccagtgccgctactgccggctgaagaagtgcttccgcgccgggatgcggcgcgaggccgtccagaacgagcgggaccgcatctccacccggcgcgcggcctacgaggacagcgccctgccctccatcaacgccctcctgcaggccgaggtgctgagccggcagatcaccgcgcccgtgtccggcatcaacggggacatccgcgccaagaagatcgccagcatcgccgacgtctgcgagtccatgaaggagcagctcctggtgctggtggagtgggccaagtacatcccggcgttctgcgagctccccctggacgaccaggtcgccctgctccgggcccacgccggcgagcacctcctgctgggggccaccaagcgcagcatggtgttcaaggacgtgctgctgctcggcaacgactacatcgtcccccgccactgccccgagctggcggagatgtcccgggtgagcatccgcatcctggacgagctcgtgctgccgttccaggagctgcagatcgacgacaacgagtacgcctacctcaaggccatcatcttcttcgaccccgacgccaagggcctgagcgaccccgggaagatcaagcggctgcgcgcccaggtccaggtgtccctcgaggactacatcaacgaccggcagtacgacagccgcggccggttcggggagctgctgctcctgctgcccacgctccagtccatcacctggcagatgatcgagcagatccagttcatcaagctgttcggcatggcgaagatcgacaacctgctccaggagatgctgctgtga

SEQ ID NO: 776 - RNA, 1128 nt, synthetic construct
  misc_feature 1..1128: note = CDS (opt1) from Homo sapiens__NP_000448.3__HNF4A(1-375)(S142A_S143A_S148A_T166A_ S167A_S313A_S378A_T429A_T432A_S436A_K458R)
  source 1..1128: mol_type = other RNA
atgcgcctgagcaagaccctcgtggacatggacatggccgactactccgccgcgctggaccccgcctacaccacgctggagttcgagaacgtccaggtgctcaccatgggcaacgacaccagcccgtccgaggggaccaacctgaacgcccccaacagcctgggcgtgtccgccctctgcgccatctgcggggaccgggcgacgggcaagcactacggggccagctcctgcgacggctgcaagggcttcttccgccggagcgtccgcaagaaccacatgtactcctgccggttcagccgccagtgcgtggtggacaaggacaagcggaaccagtgccgctactgccggctgaagaagtgcttccgcgccgggatgaagaaggaggccgtccagaacgagcgggaccgcatctccacccggcgcgcggcctacgaggacagcgccctgccctccatcaacgccctcctgcaggccgaggtgctgagccggcagatcgcggcccccgtgtccggcatcaacggggacatccgcgccaagaagatcgccagcatcgccgacgtctgcgagtccatgaaggagcagctcctggtgctggtggagtgggcgaagtacatcccggccttctgcgagctccccctggacgaccaggtcgccctgctccgggcccacgccggcgagcacctcctgctgggggcgaccaagcgcagcatggtgttcaaggacgtgctgctgctcggcaacgactacatcgtcccccggcactgccccgagctggccgagatgtcccgcgtgagcatccggatcctggacgagctcgtgctgccgttccaggagctgcagatcgacgacaacgagtacgcctacctcaaggccatcatcttcttcgaccccgacgccaagggcctgagcgaccccgggaagatcaagcgcctgcgcgcgcaggtccaggtgtccctcgaggactacatcaacgaccggcagtacgacagccgcggccggttcggggagctgctgctcctgctgcccaccctccagtccatcacgtggcagatgatcgagcagatccagttcatcaagctgttcggcatggccaagatcgacaacctgctccaggagatgctgctgtga

SEQ ID NO: 777 - RNA, 1128 nt, synthetic construct
  misc_feature 1..1128: note = CDS (opt1) from Homo sapiens__NP_000448.3__HNF4A(1-375)(S87A_S142A_S143A_S148A_T 166A_S167A_S313A_S378A_T429A_T432A_S436A_K458R)
  source 1..1128: mol_type = other RNA
atgcgcctgagcaagaccctcgtggacatggacatggccgactactccgccgcgctggaccccgcctacaccacgctggagttcgagaacgtccaggtgctcaccatgggcaacgacaccagcccgtccgaggggaccaacctgaacgcccccaacagcctgggcgtgtccgccctctgcgccatctgcggggaccgggcgacgggcaagcactacggggccagctcctgcgacggctgcaagggcttcttccgccgggccgtccgcaagaaccacatgtacagctgccggttctcccgccagtgcgtggtggacaaggacaagcggaaccagtgccgctactgccggctgaagaagtgcttccgcgccgggatgaagaaggaggcggtccagaacgagcgggaccgcatcagcacccggcgcgccgcctacgaggactccgccctgcccagcatcaacgccctcctgcaggcggaggtgctgtcccggcagatcgccgcccccgtgagcggcatcaacggggacatccgcgccaagaagatcgcctccatcgcggacgtctgcgagagcatgaaggagcagctcctggtgctggtggagtgggccaagtacatcccggccttctgcgagctccccctggacgaccaggtcgccctgctccgggcccacgcgggcgagcacctcctgctgggggccaccaagcgctccatggtgttcaaggacgtgctgctgctcggcaacgactacatcgtcccccggcactgccccgagctggccgagatgagccgcgtgtccatccggatcctggacgagctcgtgctgccgttccaggagctgcagatcgacgacaacgagtacgcctacctcaaggccatcatcttcttcgaccccgacgcgaagggcctgagcgaccccgggaagatcaagcgcctgcgcgcccaggtccaggtgagcctcgaggactacatcaacgaccggcagtacgactcccgcggccggttcggggagctgctgctcctgctgcccaccctccagagcatcacgtggcagatgatcgagcagatccagttcatcaagctgttcggcatggccaagatcgacaacctgctccaggagatgctgctgtga

SEQ ID NO: 778 - RNA, 1128 nt, synthetic construct
  misc_feature 1..1128: note = CDS (opt1) from Homo sapiens__NP_000448.3__HNF4A(1-375)(S87A_K106R_K108R_K126R_K 127R_S142A_S143A_S148A_T166A_S167A_S313A_S378A_T429A_T432A_ S436A_K458R)
  source 1..1128: mol_type = other RNA
atgcgcctgagcaagaccctcgtggacatggacatggccgactactccgccgcgctggaccccgcctacaccacgctggagttcgagaacgtccaggtgctcaccatgggcaacgacaccagcccgtccgaggggaccaacctgaacgcccccaacagcctgggcgtgtccgccctctgcgccatctgcggggaccgggcgacgggcaagcactacggggccagctcctgcgacggctgcaagggcttcttccgccgggccgtccgcaagaaccacatgtacagctgccggttctcccgccagtgcgtggtggaccgggaccgccggaaccagtgccgctactgccggctgaagaagtgcttccgcgccgggatgcggcgcgaggcggtccagaacgagcgggaccgcatcagcacccggcgcgccgcctacgaggactccgccctgcccagcatcaacgccctcctgcaggcggaggtgctgtcccggcagatcgccgcccccgtgagcggcatcaacggggacatccgcgccaagaagatcgcctccatcgcggacgtctgcgagagcatgaaggagcagctcctggtgctggtggagtgggccaagtacatcccggccttctgcgagctccccctggacgaccaggtcgccctgctccgggcccacgcgggcgagcacctcctgctgggggccaccaagcgctccatggtgttcaaggacgtgctgctgctcggcaacgactacatcgtcccccgccactgccccgagctggccgagatgagccgggtgtccatccgcatcctggacgagctcgtgctgccgttccaggagctgcagatcgacgacaacgagtacgcctacctcaaggccatcatcttcttcgaccccgacgcgaagggcctgagcgaccccgggaagatcaagcggctgcgcgcccaggtccaggtgagcctcgaggactacatcaacgaccggcagtacgactcccgcggccggttcggggagctgctgctcctgctgcccaccctccagagcatcacgtggcagatgatcgagcagatccagttcatcaagctgttcggcatggccaagatcgacaacctgctccaggagatgctgctgtga

SEQ ID NO: 779 - RNA, 1128 nt, synthetic construct
  misc_feature 1..1128: note = CDS (opt1) from Homo sapiens__NP_000448.3__HNF4A(1-375)(S87A_K106R_K108R_K126R_K 127R)
  source 1..1128: mol_type = other RNA
atgcgcctgagcaagaccctcgtggacatggacatggccgactactccgccgcgctggaccccgcctacaccacgctggagttcgagaacgtccaggtgctcaccatgggcaacgacaccagcccgtccgaggggaccaacctgaacgcccccaacagcctgggcgtgtccgccctctgcgccatctgcggggaccgggcgacgggcaagcactacggggccagctcctgcgacggctgcaagggcttcttccgccgggccgtccgcaagaaccacatgtacagctgccggttctcccgccagtgcgtggtggaccgggaccgccggaaccagtgccgctactgccggctgaagaagtgcttccgcgccgggatgcggcgcgaggcggtccagaacgagcgggaccgcatcagcacccggcgctccagctacgaggactccagcctgccctccatcaacgccctcctgcaggccgaggtgctgagccggcagatcacctcccccgtgagcggcatcaacggggacatccgcgccaagaagatcgcctccatcgcggacgtctgcgagagcatgaaggagcagctcctggtgctggtggagtgggccaagtacatcccggccttctgcgagctccccctggacgaccaggtcgccctgctccgggcccacgcgggcgagcacctcctgctgggggccaccaagcgcagcatggtgttcaaggacgtgctgctgctcggcaacgactacatcgtcccccgccactgccccgagctggccgagatgtcccgggtgagcatccgcatcctggacgagctcgtgctgccgttccaggagctgcagatcgacgacaacgagtacgcctacctcaaggccatcatcttcttcgaccccgacgcgaagggcctgtccgaccccgggaagatcaagcggctgcgcagccaggtccaggtgtccctcgaggactacatcaacgaccggcagtacgacagccgcggccggttcggggagctgctgctcctgctgcccacgctccagtccatcacctggcagatgatcgagcagatccagttcatcaagctgttcggcatggccaagatcgacaacctgctccaggagatgctgctgtga

SEQ ID NO: 780 - RNA, 1128 nt, synthetic construct; identical to SEQ ID NO: 778
  misc_feature 1..1128: note = CDS (opt1) from Homo sapiens__NP_000448.3__HNF4A(1-375)(S87A_K106R_K108R_K126R_K 127R_S142A_S143A_S148A_T166A_S167A_S313A_S378A_T429A_T432A_ S436A_K458R_S461A)
  source 1..1128: mol_type = other RNA

SEQ ID NO: 781 - RNA, 1128 nt, synthetic construct; identical to SEQ ID NO: 778
  misc_feature 1..1128: note = CDS (opt1) from Homo sapiens__NP_000448.3__HNF4A(1-375)(S87A_K106R_K108R_K126R_K 127R_S142A_S143A_S148A_T166A_S167A_S313A_S378A_T429A_T432A_ S436A_K458R_S461E)
  source 1..1128: mol_type = other RNA

SEQ ID NO: 782 - RNA, 1128 nt, synthetic construct
  misc_feature 1..1128: note = CDS (opt1) from Homo sapiens__NP_000448.3__HNF4A(1-375)(S87A_K106R_K108R_K126R_K 127R_S142A_S143A_S148E_T166A_S167E_S313A_S378E_T429E_T432E_ S436E_K458R_S461E)
  source 1..1128: mol_type = other RNA
atgcgcctgagcaagaccctcgtggacatggacatggccgactactccgccgcgctggaccccgcctacaccacgctggagttcgagaacgtccaggtgctcaccatgggcaacgacaccagcccgtccgaggggaccaacctgaacgcccccaacagcctgggcgtgtccgccctctgcgccatctgcggggaccgggcgacgggcaagcactacggggccagctcctgcgacggctgcaagggcttcttccgccgggccgtccgcaagaaccacatgtacagctgccggttctcccgccagtgcgtggtggaccgggaccgccggaaccagtgccgctactgccggctgaagaagtgcttccgcgccgggatgcggcgcgaggcggtccagaacgagcgggaccgcatcagcacccggcgcgccgcctacgaggactccgagctgcccagcatcaacgccctcctgcaggccgaggtgctgtcccggcagatcgcggagcccgtgagcggcatcaacggggacatccgcgccaagaagatcgcctccatcgccgacgtctgcgagagcatgaaggagcagctcctggtgctggtggagtgggccaagtacatcccggcgttctgcgagctccccctggacgaccaggtcgccctgctccgggcccacgccggcgagcacctcctgctgggggccaccaagcgctccatggtgttcaaggacgtgctgctgctcggcaacgactacatcgtcccccgccactgccccgagctggcggagatgagccgggtgtccatccgcatcctggacgagctcgtgctgccgttccaggagctgcagatcgacgacaacgagtacgcctacctcaaggccatcatcttcttcgaccccgacgccaagggcctgagcgaccccgggaagatcaagcggctgcgcgcccaggtccaggtgagcctcgaggactacatcaacgaccggcagtacgactcccgcggccggttcggggagctgctgctcctgctgcccaccctccagagcatcacgtggcagatgatcgagcagatccagttcatcaagctgttcggcatggcgaagatcgacaacctgctccaggagatgctgctgtga

SEQ ID NO: 783 - RNA, 1128 nt, synthetic construct
  misc_feature 1..1128: note = CDS (opt1) from Homo sapiens__NP_000448.3__HNF4A(1-375)(S87A_K106R_K108R_K126R_K 127R_S142A_S143A_S148A_T166A_S167A_K179R_K180R_S313A_S378A_ T429A_T432A_S436A_K458R_S461E)
  source 1..1128: mol_type = other RNA
atgcgcctgagcaagaccctcgtggacatggacatggccgactactccgccgcgctggaccccgcctacaccacgctggagttcgagaacgtccaggtgctcaccatgggcaacgacaccagcccgtccgaggggaccaacctgaacgcccccaacagcctgggcgtgtccgccctctgcgccatctgcggggaccgggcgacgggcaagcactacggggccagctcctgcgacggctgcaagggcttcttccgccgggccgtccgcaagaaccacatgtacagctgccggttctcccgccagtgcgtggtggaccgggaccgccggaaccagtgccgctactgccggctgaagaagtgcttccgcgccgggatgcggcgcgaggcggtccagaacgagcgggaccgcatcagcacccggcgcgccgcctacgaggactccgccctgcccagcatcaacgccctcctgcaggcggaggtgctgtcccggcagatcgccgcccccgtgagcggcatcaacggggacatccgcgcccggcgcatcgcctccatcgcggacgtctgcgagagcatgaaggagcagctcctggtgctggtggagtgggccaagtacatcccggccttctgcgagctccccctggacgaccaggtcgccctgctccgcgcccacgcgggcgagcacctcctgctgggggccaccaagcggtccatggtgttcaaggacgtgctgctgctcggcaacgactacatcgtcccccgccactgccccgagctggccgagatgagccgggtgtccatccgcatcctggacgagctcgtgctgccgttccaggagctgcagatcgacgacaacgagtacgcctacctcaaggccatcatcttcttcgaccccgacgcgaagggcctgagcgaccccgggaagatcaagcggctgcgcgcccaggtccaggtgagcctcgaggactacatcaacgaccggcagtacgactcccgcggccggttcggggagctgctgctcctgctgcccaccctccagagcatcacgtggcagatgatcgagcagatccagttcatcaagctgttcggcatggccaagatcgacaacctgctccaggagatgctgctgtga

SEQ ID NO: 784 - RNA, 1128 nt, synthetic construct
  misc_feature 1..1128: note = CDS (opt1) from Homo sapiens__NP_000448.3__HNF4A(1-375)(S87A_K106R_K108R_K126R_K 127R_S142A_S143A_S148A_T166A_S167A_K300R_K307R_K309R_S313A_ S378A_T429A_T432A_S436A_K458R_S461E)
  source 1..1128: mol_type = other RNA
atgcgcctgagcaagaccctcgtggacatggacatggccgactactccgccgcgctggaccccgcctacaccacgctggagttcgagaacgtccaggtgctcaccatgggcaacgacaccagcccgtccgaggggaccaacctgaacgcccccaacagcctgggcgtgtccgccctctgcgccatctgcggggaccgggcgacgggcaagcactacggggccagctcctgcgacggctgcaagggcttcttccgccgggccgtccgcaagaaccacatgtacagctgccggttctcccgccagtgcgtggtggaccgggaccgccggaaccagtgccgctactgccggctgaagaagtgcttccgcgccgggatgcggcgcgaggcggtccagaacgagcgggaccgcatcagcacccggcgcgccgcctacgaggactccgccctgcccagcatcaacgccctcctgcaggcggaggtgctgtcccggcagatcgccgcccccgtgagcggcatcaacggggacatccgcgccaagaagatcgcctccatcgcggacgtctgcgagagcatgaaggagcagctcctggtgctggtggagtgggccaagtacatcccggccttctgcgagctccccctggacgaccaggtcgccctgctccgggcccacgcgggcgagcacctcctgctgggggccaccaagcgctccatggtgttcaaggacgtgctgctgctcggcaacgactacatcgtcccccgccactgccccgagctggccgagatgagccgggtgtccatccgcatcctggacgagctcgtgctgccgttccaggagctgcagatcgacgacaacgagtacgcctacctcaaggccatcatcttcttcgaccccgacgcgcggggcctgagcgaccccgggcgcatccggcgcctgcgggcccaggtccaggtgagcctcgaggactacatcaacgaccgccagtacgactcccggggccgcttcggggagctgctgctcctgctgcccaccctccagagcatcacgtggcagatgatcgagcagatccagttcatcaagctgttcggcatggccaagatcgacaacctgctccaggagatgctgctgtga

SEQ ID NO: 785 - RNA, 1128 nt, synthetic construct; identical to SEQ ID NO: 778
  misc_feature 1..1128: note = CDS (opt1) from Homo sapiens__NP_000448.3__HNF4A(1-375)(S87A_K106R_K108R_K126R_K 127R_S142A_S143A_S148A_T166A_S167A_S313A_S378A_T429A_T432A_ S436A_K447R_K458R_S461E_K470R)
  source 1..1128: mol_type = other RNA

SEQ ID NO: 786 - RNA, 1128 nt, synthetic construct
  misc_feature 1..1128: note = CDS (opt1) from Homo sapiens__NP_000448.3__HNF4A(1-375)(S87A_K106R_K108R_K126R_K 127R_S142A_S143A_S148A_T166A_S167A_K179R_K180R_K234R_K300R_ K307R_K309R_S313A_S378A_T429A_T432A_S436A_K447R_K458R_S461E _K470R)
  source 1..1128: mol_type = other RNA
atgcgcctgagcaagaccctcgtggacatggacatggccgactactccgccgcgctggaccccgcctacaccacgctggagttcgagaacgtccaggtgctcaccatgggcaacgacaccagcccgtccgaggggaccaacctgaacgcccccaacagcctgggcgtgtccgccctctgcgccatctgcggggaccgggcgacgggcaagcactacggggccagctcctgcgacggctgcaagggcttcttccgccgggccgtccgcaagaaccacatgtacagctgccggttctcccgccagtgcgtggtggaccgggaccgccggaaccagtgccgctactgccggctgaagaagtgcttccgcgccgggatgcggcgcgaggcggtccagaacgagcgggaccgcatcagcacccggcgcgccgcctacgaggactccgccctgcccagcatcaacgccctcctgcaggcggaggtgctgtcccggcagatcgccgcccccgtgagcggcatcaacggggacatccgcgcccggcgcatcgcctccatcgcggacgtctgcgagagcatgaaggagcagctcctggtgctggtggagtgggccaagtacatcccggccttctgcgagctccccctggacgaccaggtcgccctgctccgcgcccacgcgggcgagcacctcctgctgggggccacccggcgctccatggtgttcaaggacgtgctgctgctcggcaacgactacatcgtcccccggcactgccccgagctggccgagatgagccgcgtgtccatccggatcctggacgagctcgtgctgccgttccaggagctgcagatcgacgacaacgagtacgcctacctcaaggccatcatcttcttcgaccccgacgcgcgcggcctgagcgaccccgggcggatccgccggctgcgcgcccaggtccaggtgagcctcgaggactacatcaacgaccggcagtacgactcccgcggccggttcggggagctgctgctcctgctgcccaccctccagagcatcacgtggcagatgatcgagcagatccagttcatcaagctgttcggcatggccaagatcgacaacctgctccaggagatgctgctgtga

SEQ ID NO: 787 - RNA, 1128 nt, synthetic construct
  misc_feature 1..1128: note = CDS (opt1) from Homo sapiens__NP_000448.3__HNF4A(1-375)(S87A_S95A_S99A_K106R_K10 8R_K126R_K127R_S142A_S143A_S148A_T166A_S167A_S313A_S378A_T4 29A_T432A_S436A_K458R_S461E)
  source 1..1128: mol_type = other RNA
atgcgcctgagcaagaccctcgtggacatggacatggccgactactccgccgcgctggaccccgcctacaccacgctggagttcgagaacgtccaggtgctcaccatgggcaacgacaccagcccgtccgaggggaccaacctgaacgcccccaacagcctgggcgtgtccgccctctgcgccatctgcggggaccgggcgacgggcaagcactacggggccagctcctgcgacggctgcaagggcttcttccgccgggccgtccgcaagaaccacatgtacgcctgccggttcgcgcgccagtgcgtggtggaccgggaccgccggaaccagtgccgctactgccggctgaagaagtgcttccgcgccgggatgcggcgcgaggccgtccagaacgagcgggaccgcatcagcacccggcgcgccgcctacgaggactccgcgctgcccagcatcaacgccctcctgcaggccgaggtgctgtcccggcagatcgccgcccccgtgagcggcatcaacggggacatccgcgcgaagaagatcgcctccatcgccgacgtctgcgagagcatgaaggagcagctcctggtgctggtggagtgggccaagtacatcccggccttctgcgagctccccctggacgaccaggtcgcgctgctccgggcccacgccggcgagcacctcctgctgggggccaccaagcgctccatggtgttcaaggacgtgctgctgctcggcaacgactacatcgtcccccgccactgccccgagctggccgagatgagccgggtgtccatccgcatcctggacgagctcgtgctgccgttccaggagctgcagatcgacgacaacgagtacgcgtacctcaaggccatcatcttcttcgaccccgacgccaagggcctgagcgaccccgggaagatcaagcggctgcgcgcccaggtccaggtgtccctcgaggactacatcaacgaccggcagtacgacagccgcggccggttcggggagctgctgctcctgctgcccaccctccagagcatcacgtggcagatgatcgagcagatccagttcatcaagctgttcggcatggcgaagatcgacaacctgctccaggagatgctgctgtga

SEQ ID NO: 788 - RNA, 1128 nt, synthetic construct
  misc_feature 1..1128: note = CDS (opt1) from Homo sapiens__NP_000448.3__HNF4A(1-375)(S87A_K106R_K108R_K126R_K 127R_S138A_T139A_S142A_S143A_S148A_T166A_S167A_S313A_S378A_ T429A_T432A_S436A_K458R_S461E)
  source 1..1128: mol_type = other RNA
atgcgcctgagcaagaccctcgtggacatggacatggccgactactccgccgcgctggaccccgcctacaccacgctggagttcgagaacgtccaggtgctcaccatgggcaacgacaccagcccgtccgaggggaccaacctgaacgcccccaacagcctgggcgtgtccgccctctgcgccatctgcggggaccgggcgacgggcaagcactacggggccagctcctgcgacggctgcaagggcttcttccgccgggccgtccgcaagaaccacatgtacagctgccggttctcccgccagtgcgtggtggaccgggaccgccggaaccagtgccgctactgccggctgaagaagtgcttccgcgccgggatgcggcgcgaggcggtccagaacgagcgggaccgcatcgccgcccggcgcgccgcctacgaggacagcgcgctgccctccatcaacgccctcctgcaggccgaggtgctgagccggcagatcgccgcccccgtgtccggcatcaacggggacatccgcgcgaagaagatcgccagcatcgccgacgtctgcgagtccatgaaggagcagctcctggtgctggtggagtgggccaagtacatcccggccttctgcgagctccccctggacgaccaggtcgcgctgctccgggcccacgccggcgagcacctcctgctgggggccaccaagcgcagcatggtgttcaaggacgtgctgctgctcggcaacgactacatcgtcccccgccactgccccgagctggccgagatgtcccgggtgagcatccgcatcctggacgagctcgtgctgccgttccaggagctgcagatcgacgacaacgagtacgcgtacctcaaggccatcatcttcttcgaccccgacgccaagggcctgtccgaccccgggaagatcaagcggctgcgcgcccaggtccaggtgagcctcgaggactacatcaacgaccggcagtacgacagccgcggccggttcggggagctgctgctcctgctgcccaccctccagtccatcacctggcagatgatcgagcagatccagttcatcaagctgttcggcatggcgaagatcgacaacctgctccaggagatgctgctgtga

SEQ ID NO: 789 - RNA, 1128 nt, synthetic construct
  misc_feature 1..1128: note = CDS (opt1) from Homo sapiens__NP_000448.3__HNF4A(1-375)(S87A_S95A_S99A_K106R_K10 8R_K126R_K127R_S138A_T139A_S142A_S143A_S148A_T166A_S167A_S3 13A_S378A_T429A_T432A_S436A_K458R_S461E)
  source 1..1128: mol_type = other RNA
atgcgcctgagcaagaccctcgtggacatggacatggccgactactccgccgcgctggaccccgcctacaccacgctggagttcgagaacgtccaggtgctcaccatgggcaacgacaccagcccgtccgaggggaccaacctgaacgcccccaacagcctgggcgtgtccgccctctgcgccatctgcggggaccgggcgacgggcaagcactacggggccagctcctgcgacggctgcaagggcttcttccgccgggccgtccgcaagaaccacatgtacgcctgccggttcgcgcgccagtgcgtggtggaccgggaccgccggaaccagtgccgctactgccggctgaagaagtgcttccgcgccgggatgcggcgcgaggccgtccagaacgagcgggaccgcatcgccgcccggcgcgcggcctacgaggacagcgccctgccctccatcaacgccctcctgcaggccgaggtgctgagccggcagatcgcggcccccgtgtccggcatcaacggggacatccgcgccaagaagatcgccagcatcgccgacgtctgcgagtccatgaaggagcagctcctggtgctggtggagtgggcgaagtacatcccggccttctgcgagctccccctggacgaccaggtcgccctgctccgggcccacgccggcgagcacctcctgctgggggcgaccaagcgcagcatggtgttcaaggacgtgctgctgctcggcaacgactacatcgtcccccgccactgccccgagctggccgagatgtcccgggtgagcatccgcatcctggacgagctcgtgctgccgttccaggagctgcagatcgacgacaacgagtacgcctacctcaaggccatcatcttcttcgaccccgacgcgaagggcctgtccgaccccgggaagatcaagcggctgcgcgcccaggtccaggtgagcctcgaggactacatcaacgaccggcagtacgactcccgcggccggttcggggagctgctgctcctgctgcccaccctccagagcatcacctggcagatgatcgagcagatccagttcatcaagctgttcggcatggccaagatcgacaacctgctccaggagatgctgctgtga

SEQ ID NO: 790 - RNA, 1128 nt, synthetic construct
  misc_feature 1..1128: note = CDS (opt2) from Homo sapiens__NP_000448.3__HNF4A(1-375)
  source 1..1128: mol_type = other RNA
atgcgcctctccaagaccctcgtcgacatggacatggccgactactccgccgccctcgaccccgcctacaccaccctcgagttcgagaacgtccaggtcctcaccatgggcaacgacacctccccctccgagggcaccaacctcaacgcccccaactccctcggcgtctccgccctctgcgccatctgcggcgaccgcgccaccggcaagcactacggcgcctcctcctgcgacggctgcaagggcttcttccgccgctccgtccgcaagaaccacatgtactcctgccgcttctcccgccagtgcgtcgtcgacaaggacaagcgcaaccagtgccgctactgccgcctcaagaagtgcttccgcgccggcatgaagaaggaggccgtccagaacgagcgcgaccgcatctccacccgccgctcctcctacgaggactcctccctcccctccatcaacgccctcctccaggccgaggtcctctcccgccagatcacctcccccgtctccggcatcaacggcgacatccgcgccaagaagatcgcctccatcgccgacgtctgcgagtccatgaaggagcagctcctcgtcctcgtcgagtgggccaagtacatccccgccttctgcgagctccccctcgacgaccaggtcgccctcctccgcgcccacgccggcgagcacctcctcctcggcgccaccaagcgctccatggtcttcaaggacgtcctcctcctcggcaacgactacatcgtcccccgccactgccccgagctcgccgagatgtcccgcgtctccatccgcatcctcgacgagctcgtcctccccttccaggagctccagatcgacgacaacgagtacgcctacctcaaggccatcatcttcttcgaccccgacgccaagggcctctccgaccccggcaagatcaagcgcctccgctcccaggtccaggtctccctcgaggactacatcaacgaccgccagtacgactcgcgcgggcgcttcggcgagctcctcctcctcctccccaccctccagtccatcacctggcagatgatcgagcagatccagttcatcaagctgttcggcatggccaagatcgacaacctcctccaggagatgctcctctga

SEQ ID NO: 791 - RNA, 1128 nt, synthetic construct
  misc_feature 1..1128: note = CDS (opt2) from Homo sapiens__NP_000448.3__HNF4A(1-375)(S313A)
  source 1..1128: mol_type = other RNA
atgcgcctctccaagaccctcgtcgacatggacatggccgactactccgccgccctcgaccccgcctacaccaccctcgagttcgagaacgtccaggtcctcaccatgggcaacgacacctccccctccgagggcaccaacctcaacgcccccaactccctcggcgtctccgccctctgcgccatctgcggcgaccgcgccaccggcaagcactacggcgcctcctcctgcgacggctgcaagggcttcttccgccgctccgtccgcaagaaccacatgtactcctgccgcttctcccgccagtgcgtcgtcgacaaggacaagcgcaaccagtgccgctactgccgcctcaagaagtgcttccgcgccggcatgaagaaggaggccgtccagaacgagcgcgaccgcatctccacccgccgctcctcctacgaggactcctccctcccctccatcaacgccctcctccaggccgaggtcctctcccgccagatcacctcccccgtctccggcatcaacggcgacatccgcgccaagaagatcgcctccatcgccgacgtctgcgagtccatgaaggagcagctcctcgtcctcgtcgagtgggccaagtacatccccgccttctgcgagctccccctcgacgaccaggtcgccctcctccgcgcccacgccggcgagcacctcctcctcggcgccaccaagcgctccatggtcttcaaggacgtcctcctcctcggcaacgactacatcgtcccccgccactgccccgagctcgccgagatgtcccgcgtctccatccgcatcctcgacgagctcgtcctccccttccaggagctccagatcgacgacaacgagtacgcctacctcaaggccatcatcttcttcgaccccgacgccaagggcctctccgaccccggcaagatcaagcgcctccgcgcccaggtccaggtctccctcgaggactacatcaacgaccgccagtacgactcccgcggccgcttcggcgagctcctcctcctcctccccaccctccagtccatcacctggcagatgatcgagcagatccagttcatcaagctcttcggcatggccaagatcgacaacctcctccaggagatgctcctctga

SEQ ID NO: 792 - RNA, 1128 nt, synthetic construct
  misc_feature 1..1128: note = CDS (opt2) from Homo sapiens__NP_000448.3__HNF4A(1-375)(S313E)
  source 1..1128: mol_type = other RNA
atgcgcctctccaagaccctcgtcgacatggacatggccgactactccgccgccctcgaccccgcctacaccaccctcgagttcgagaacgtccaggtcctcaccatgggcaacgacacctccccctccgagggcaccaacctcaacgcccccaactccctcggcgtctccgccctctgcgccatctgcggcgaccgcgccaccggcaagcactacggcgcctcctcctgcgacggctgcaagggcttcttccgccgctccgtccgcaagaaccacatgtactcctgccgcttctcccgccagtgcgtcgtcgacaaggacaagcgcaaccagtgccgctactgccgcctcaagaagtgcttccgcgccggcatgaagaaggaggccgtccagaacgagcgcgaccgcatctccacccgccgctcctcctacgaggactcctccctcccctccatcaacgccctcctccaggccgaggtcctctcccgccagatcacctcccccgtctccggcatcaacggcgacatccgcgccaagaagatcgcctccatcgccgacgtctgcgagtccatgaaggagcagctcctcgtcctcgtcgagtgggccaagtacatccccgccttctgcgagctccccctcgacgaccaggtcgccctcctccgcgcccacgccggcgagcacctcctcctcggcgccaccaagcgctccatggtcttcaaggacgtcctcctcctcggcaacgactacatcgtcccccgccactgccccgagctcgccgagatgtcccgcgtctccatccgcatcctcgacgagctcgtcctccccttccaggagctccagatcgacgacaacgagtacgcctacctcaaggccatcatcttcttcgaccccgacgccaagggcctctccgaccccggcaagatcaagcgcctccgcgagcaggtccaggtctccctcgaggactacatcaacgaccgccagtacgactcccgcggccgcttcggcgagctcctcctcctcctccccaccctccagtccatcacctggcagatgatcgagcagatccagttcatcaagctcttcggcatggccaagatcgacaacctcctccaggagatgctcctctga

SEQ ID NO: 793 - RNA, 1128 nt, synthetic construct
  misc_feature 1..1128: note = CDS (opt2) from Homo sapiens__NP_000448.3__HNF4A(1-375)(S142A_S143A)
  source 1..1128: mol_type = other RNA
atgcgcctctccaagaccctcgtcgacatggacatggccgactactccgccgccctcgaccccgcctacaccaccctcgagttcgagaacgtccaggtcctcaccatgggcaacgacacctccccctccgagggcaccaacctcaacgcccccaactccctcggcgtctccgccctctgcgccatctgcggcgaccgcgccaccggcaagcactacggcgcctcctcctgcgacggctgcaagggcttcttccgccgctccgtccgcaagaaccacatgtactcctgccgcttctcccgccagtgcgtcgtcgacaaggacaagcgcaaccagtgccgctactgccgcctcaagaagtgcttccgcgccggcatgaagaaggaggccgtccagaacgagcgcgaccgcatctccacccgccgcgccgcctacgaggactcctccctcccctccatcaacgccctcctccaggccgaggtcctctcccgccagatcacctcccccgtctccggcatcaacggcgacatccgcgccaagaagatcgcctccatcgccgacgtctgcgagtccatgaaggagcagctcctcgtcctcgtcgagtgggccaagtacatccccgccttctgcgagctccccctcgacgaccaggtcgccctcctccgcgcccacgccggcgagcacctcctcctcggcgccaccaagcgctccatggtcttcaaggacgtcctcctcctcggcaacgactacatcgtcccccgccactgccccgagctcgccgagatgtcccgcgtctccatccgcatcctcgacgagctcgtcctccccttccaggagctccagatcgacgacaacgagtacgcctacctcaaggccatcatcttcttcgaccccgacgccaagggcctctccgaccccggcaagatcaagcgcctccgctcccaggtccaggtctccctcgaggactacatcaacgaccgccagtacgactcccgcggccgcttcggcgagctcctcctcctcctccccaccctccagtccatcacctggcagatgatcgagcagatccagttcatcaagctcttcggcatggccaagatcgacaacctcctccaggagatgctcctctga

SEQ ID NO: 794 - RNA, 1128 nt, synthetic construct
  misc_feature 1..1128: note = CDS (opt2) from Homo sapiens__NP_000448.3__HNF4A(1-375)(S142E_S143E)
  source 1..1128: mol_type = other RNA
atgcgcctctccaagaccctcgtcgacatggacatggccgactactccgccgccctcgaccccgcctacaccaccctcgagttcgagaacgtccaggtcctcaccatgggcaacgacacctccccctccgagggcaccaacctcaacgcccccaactccctcggcgtctccgccctctgcgccatctgcggcgaccgcgccaccggcaagcactacggcgcctcctcctgcgacggctgcaagggcttcttccgccgctccgtccgcaagaaccacatgtactcctgccgcttctcccgccagtgcgtcgtcgacaaggacaagcgcaaccagtgccgctactgccgcctcaagaagtgcttccgcgccggcatgaagaaggaggccgtccagaacgagcgcgaccgcatctccacccgccgcgaggagtacgaggactcctccctcccctccatcaacgccctcctccaggccgaggtcctctcccgccagatcacctcccccgtctccggcatcaacggcgacatccgcgccaagaagatcgcctccatcgccgacgtctgcgagtccatgaaggagcagctcctcgtcctcgtcgagtgggccaagtacatccccgccttctgcgagctccccctcgacgaccaggtcgccctcctccgcgcccacgccggcgagcacctcctcctcggcgccaccaagcgctccatggtcttcaaggacgtcctcctcctcggcaacgactacatcgtcccccgccactgccccgagctcgccgagatgtcccgcgtctccatccgcatcctcgacgagctcgtcctccccttccaggagctccagatcgacgacaacgagtacgcctacctcaaggccatcatcttcttcgaccccgacgccaagggcctctccgaccccggcaagatcaagcgcctccgctcccaggtccaggtctccctcgaggactacatcaacgaccgccagtacgactcccgcggccgcttcggcgagctcctcctcctcctccccaccctccagtccatcacctggcagatgatcgagcagatccagttcatcaagctcttcggcatggccaagatcgacaacctcctccaggagatgctcctctga

SEQ ID NO: 795 - RNA, 1128 nt, synthetic construct
  misc_feature 1..1128: note = CDS (opt2) from Homo sapiens__NP_000448.3__HNF4A(1-375)(S143A)
  source 1..1128: mol_type = other RNA
atgcgcctctccaagaccctcgtcgacatggacatggccgactactccgccgccctcgaccccgcctacaccaccctcgagttcgagaacgtccaggtcctcaccatgggcaacgacacctccccctccgagggcaccaacctcaacgcccccaactccctcggcgtctccgccctctgcgccatctgcggcgaccgcgccaccggcaagcactacggcgcctcctcctgcgacggctgcaagggcttcttccgccgctccgtccgcaagaaccacatgtactcctgccgcttctcccgccagtgcgtcgtcgacaaggacaagcgcaaccagtgccgctactgccgcctcaagaagtgcttccgcgccggcatgaagaaggaggccgtccagaacgagcgcgaccgcatctccacccgccgctccgcctacgaggactcctccctcccctccatcaacgccctcctccaggccgaggtcctctcccgccagatcacctcccccgtctccggcatcaacggcgacatccgcgccaagaagatcgcctccatcgccgacgtctgcgagtccatgaaggagcagctcctcgtcctcgtcgagtgggccaagtacatccccgccttctgcgagctccccctcgacgaccaggtcgccctcctccgcgcccacgccggcgagcacctcctcctcggcgccaccaagcgctccatggtcttcaaggacgtcctcctcctcggcaacgactacatcgtcccccgccactgccccgagctcgccgagatgtcccgcgtctccatccgcatcctcgacgagctcgtcctccccttccaggagctccagatcgacgacaacgagtacgcctacctcaaggccatcatcttcttcgaccccgacgccaagggcctctccgaccccggcaagatcaagcgcctccgctcccaggtccaggtctccctcgaggactacatcaacgaccgccagtacgactcccgcggccgcttcggcgagctcctcctcctcctccccaccctccagtccatcacctggcagatgatcgagcagatccagttcatcaagctcttcggcatggccaagatcgacaacctcctccaggagatgctcctctga

SEQ ID NO: 796 - RNA, 1128 nt, synthetic construct
  misc_feature 1..1128: note = CDS (opt2) from Homo sapiens__NP_000448.3__HNF4A(1-375)(T166A)
  source 1..1128: mol_type = other RNA
atgcgcctctccaagaccctcgtcgacatggacatggccgactactccgccgccctcgaccccgcctacaccaccctcgagttcgagaacgtccaggtcctcaccatgggcaacgacacctccccctccgagggcaccaacctcaacgcccccaactccctcggcgtctccgccctctgcgccatctgcggcgaccgcgccaccggcaagcactacggcgcctcctcctgcgacggctgcaagggcttcttccgccgctccgtccgcaagaaccacatgtactcctgccgcttctcccgccagtgcgtcgtcgacaaggacaagcgcaaccagtgccgctactgccgcctcaagaagtgcttccgcgccggcatgaagaaggaggccgtccagaacgagcgcgaccgcatctccacccgccgctcctcctacgaggactcctccctcccctccatcaacgccctcctccaggccgaggtcctctcccgccagatcgcctcccccgtctccggcatcaacggcgacatccgcgccaagaagatcgcctccatcgccgacgtctgcgagtccatgaaggagcagctcctcgtcctcgtcgagtgggccaagtacatccccgccttctgcgagctccccctcgacgaccaggtcgccctcctccgcgcccacgccggcgagcacctcctcctcggcgccaccaagcgctccatggtcttcaaggacgtcctcctcctcggcaacgactacatcgtcccccgccactgccccgagctcgccgagatgtcccgcgtctccatccgcatcctcgacgagctcgtcctccccttccaggagctccagatcgacgacaacgagtacgcctacctcaaggccatcatcttcttcgaccccgacgccaagggcctctccgaccccggcaagatcaagcgcctccgctcccaggtccaggtctccctcgaggactacatcaacgaccgccagtacgactcccgcggccgcttcggcgagctcctcctcctcctccccaccctccagtccatcacctggcagatgatcgagcagatccagttcatcaagctcttcggcatggccaagatcgacaacctcctccaggagatgctcctctga

SEQ ID NO: 797 - RNA, 1128 nt, synthetic construct
  misc_feature 1..1128: note = CDS (opt2) from Homo sapiens__NP_000448.3__HNF4A(1-375)(S167E)
  source 1..1128: mol_type = other RNA
atgcgcctctccaagaccctcgtcgacatggacatggccgactactccgccgccctcgaccccgcctacaccaccctcgagttcgagaacgtccaggtcctcaccatgggcaacgacacctccccctccgagggcaccaacctcaacgcccccaactccctcggcgtctccgccctctgcgccatctgcggcgaccgcgccaccggcaagcactacggcgcctcctcctgcgacggctgcaagggcttcttccgccgctccgtccgcaagaaccacatgtactcctgccgcttctcccgccagtgcgtcgtcgacaaggacaagcgcaaccagtgccgctactgccgcctcaagaagtgcttccgcgccggcatgaagaaggaggccgtccagaacgagcgcgaccgcatctccacccgccgctcctcctacgaggactcctccctcccctccatcaacgccctcctccaggccgaggtcctctcccgccagatcaccgagcccgtctccggcatcaacggcgacatccgcgccaagaagatcgcctccatcgccgacgtctgcgagtccatgaaggagcagctcctcgtcctcgtcgagtgggccaagtacatccccgccttctgcgagctccccctcgacgaccaggtcgccctcctccgcgcccacgccggcgagcacctcctcctcggcgccaccaagcgctccatggtcttcaaggacgtcctcctcctcggcaacgactacatcgtcccccgccactgccccgagctcgccgagatgtcccgcgtctccatccgcatcctcgacgagctcgtcctccccttccaggagctccagatcgacgacaacgagtacgcctacctcaaggccatcatcttcttcgaccccgacgccaagggcctctccgaccccggcaagatcaagcgcctccgctcccaggtccaggtctccctcgaggactacatcaacgaccgccagtacgactcccgcggccgcttcggcgagctcctcctcctcctccccaccctccagtccatcacctggcagatgatcgagcagatccagttcatcaagctcttcggcatggccaagatcgacaacctcctccaggagatgctcctctga

SEQ ID NO: 798 - RNA, 1128 nt, synthetic construct
  misc_feature 1..1128: note = CDS (opt2) from Homo sapiens__NP_000448.3__HNF4A(1-375)(S167A)
  source 1..1128: mol_type = other RNA
atgcgcctctccaagaccctcgtcgacatggacatggccgactactccgccgccctcgaccccgcctacaccaccctcgagttcgagaacgtccaggtcctcaccatgggcaacgacacctccccctccgagggcaccaacctcaacgcccccaactccctcggcgtctccgccctctgcgccatctgcggcgaccgcgccaccggcaagcactacggcgcctcctcctgcgacggctgcaagggcttcttccgccgctccgtccgcaagaaccacatgtactcctgccgcttctcccgccagtgcgtcgtcgacaaggacaagcgcaaccagtgccgctactgccgcctcaagaagtgcttccgcgccggcatgaagaaggaggccgtccagaacgagcgcgaccgcatctccacccgccgctcctcctacgaggactcctccctcccctccatcaacgccctcctccaggccgaggtcctctcccgccagatcaccgcccccgtctccggcatcaacggcgacatccgcgccaagaagatcgcctccatcgccgacgtctgcgagtccatgaaggagcagctcctcgtcctcgtcgagtgggccaagtacatccccgccttctgcgagctccccctcgacgaccaggtcgccctcctccgcgcccacgccggcgagcacctcctcctcggcgccaccaagcgctccatggtcttcaaggacgtcctcctcctcggcaacgactacatcgtcccccgccactgccccgagctcgccgagatgtcccgcgtctccatccgcatcctcgacgagctcgtcctccccttccaggagctccagatcgacgacaacgagtacgcctacctcaaggccatcatcttcttcgaccccgacgccaagggcctctccgaccccggcaagatcaagcgcctccgctcccaggtccaggtctccctcgaggactacatcaacgaccgccagtacgactcccgcggccgcttcggcgagctcctcctcctcctccccaccctccagtccatcacctggcagatgatcgagcagatccagttcatcaagctcttcggcatggccaagatcgacaacctcctccaggagatgctcctctga

SEQ ID NO: 799 - RNA, 1128 nt, synthetic construct; identical to SEQ ID NO: 798
  misc_feature 1..1128: note = CDS (opt2) from Homo sapiens__NP_000448.3__HNF4A(1-375)(S167A_S378A_T429A_T432A_ S436A)
  source 1..1128: mol_type = other RNA

SEQ ID NO: 800 - RNA, 1128 nt, synthetic construct; identical to SEQ ID NO: 797
  misc_feature 1..1128: note = CDS (opt2) from Homo sapiens__NP_000448.3__HNF4A(1-375)(S167E_S378E_T429E_T432E_ S436E)
  source 1..1128: mol_type = other RNA

SEQ ID NO: 801 - RNA, 1128 nt, synthetic construct
  misc_feature 1..1128: note = CDS (opt2) from Homo sapiens__NP_000448.3__HNF4A(1-375)(S87A)
  source 1..1128: mol_type = other RNA
atgcgcctctccaagaccctcgtcgacatggacatggccgactactccgccgccctcgaccccgcctacaccaccctcgagttcgagaacgtccaggtcctcaccatgggcaacgacacctccccctccgagggcaccaacctcaacgcccccaactccctcggcgtctccgccctctgcgccatctgcggcgaccgcgccaccggcaagcactacggcgcctcctcctgcgacggctgcaagggcttcttccgccgcgccgtccgcaagaaccacatgtactcctgccgcttctcccgccagtgcgtcgtcgacaaggacaagcgcaaccagtgccgctactgccgcctcaagaagtgcttccgcgccggcatgaagaaggaggccgtccagaacgagcgcgaccgcatctccacccgccgctcctcctacgaggactcctccctcccctccatcaacgccctcctccaggccgaggtcctctcccgccagatcacctcccccgtctccggcatcaacggcgacatccgcgccaagaagatcgcctccatcgccgacgtctgcgagtccatgaaggagcagctcctcgtcctcgtcgagtgggccaagtacatccccgccttctgcgagctccccctcgacgaccaggtcgccctcctccgcgcccacgccggcgagcacctcctcctcggcgccaccaagcgctccatggtcttcaaggacgtcctcctcctcggcaacgactacatcgtcccccgccactgccccgagctcgccgagatgtcccgcgtctccatccgcatcctcgacgagctcgtcctccccttccaggagctccagatcgacgacaacgagtacgcctacctcaaggccatcatcttcttcgaccccgacgccaagggcctctccgaccccggcaagatcaagcgcctccgctcccaggtccaggtctccctcgaggactacatcaacgaccgccagtacgactcccgcggccgcttcggcgagctcctcctcctcctccccaccctccagtccatcacctggcagatgatcgagcagatccagttcatcaagctcttcggcatggccaagatcgacaacctcctccaggagatgctcctctga

SEQ ID NO: 802 - RNA, 1128 nt, synthetic construct
  misc_feature 1..1128: note = CDS (opt2) from Homo sapiens__NP_000448.3__HNF4A(1-375)(S87E)
  source 1..1128: mol_type = other RNA
atgcgcctctccaagaccctcgtcgacatggacatggccgactactccgccgccctcgaccccgcctacaccaccctcgagttcgagaacgtccaggtcctcaccatgggcaacgacacctccccctccgagggcaccaacctcaacgcccccaactccctcggcgtctccgccctctgcgccatctgcggcgaccgcgccaccggcaagcactacggcgcctcctcctgcgacggctgcaagggcttcttccgccgcgaggtccgcaagaaccacatgtactcctgccgcttctcccgccagtgcgtcgtcgacaaggacaagcgcaaccagtgccgctactgccgcctcaagaagtgcttccgcgccggcatgaagaaggaggccgtccagaacgagcgcgaccgcatctccacccgccgctcctcctacgaggactcctccctcccctccatcaacgccctcctccaggccgaggtcctctcccgccagatcacctcccccgtctccggcatcaacggcgacatccgcgccaagaagatcgcctccatcgccgacgtctgcgagtccatgaaggagcagctcctcgtcctcgtcgagtgggccaagtacatccccgccttctgcgagctccccctcgacgaccaggtcgccctcctccgcgcccacgccggcgagcacctcctcctcggcgccaccaagcgctccatggtcttcaaggacgtcctcctcctcggcaacgactacatcgtcccccgccactgccccgagctcgccgagatgtcccgcgtctccatccgcatcctcgacgagctcgtcctccccttccaggagctccagatcgacgacaacgagtacgcctacctcaaggccatcatcttcttcgaccccgacgccaagggcctctccgaccccggcaagatcaagcgcctccgctcccaggtccaggtctccctcgaggactacatcaacgaccgccagtacgactcccgcggccgcttcggcgagctcctcctcctcctccccaccctccagtccatcacctggcagatgatcgagcagatccagttcatcaagctcttcggcatggccaagatcgacaacctcctccaggagatgctcctctga

SEQ ID NO: 803 - RNA, 1128 nt, synthetic construct
  misc_feature 1..1128: note = CDS (opt2) from Homo sapiens__NP_000448.3__HNF4A(1-375)(R2V)
  source 1..1128: mol_type = other RNA
atggtcctctccaagaccctcgtcgacatggacatggccgactactccgccgccctcgaccccgcctacaccaccctcgagttcgagaacgtccaggtcctcaccatgggcaacgacacctccccctccgagggcaccaacctcaacgcccccaactccctcggcgtctccgccctctgcgccatctgcggcgaccgcgccaccggcaagcactacggcgcctcctcctgcgacggctgcaagggcttcttccgccgctccgtccgcaagaaccacatgtactcctgccgcttctcccgccagtgcgtcgtcgacaaggacaagcgcaaccagtgccgctactgccgcctcaagaagtgcttccgcgccggcatgaagaaggaggccgtccagaacgagcgcgaccgcatctccacccgccgctcctcctacgaggactcctccctcccctccatcaacgccctcctccaggccgaggtcctctcccgccagatcacctcccccgtctccggcatcaacggcgacatccgcgccaagaagatcgcctccatcgccgacgtctgcgagtccatgaaggagcagctcctcgtcctcgtcgagtgggccaagtacatccccgccttctgcgagctccccctcgacgaccaggtcgccctcctccgcgcccacgccggcgagcacctcctcctcggcgccaccaagcgctccatggtcttcaaggacgtcctcctcctcggcaacgactacatcgtcccccgccactgccccgagctcgccgagatgtcccgcgtctccatccgcatcctcgacgagctcgtcctccccttccaggagctccagatcgacgacaacgagtacgcctacctcaaggccatcatcttcttcgaccccgacgccaagggcctctccgaccccggcaagatcaagcgcctccgctcccaggtccaggtctccctcgaggactacatcaacgaccgccagtacgactcccgcggccgcttcggcgagctcctcctcctcctccccaccctccagtccatcacctggcagatgatcgagcagatccagttcatcaagctcttcggcatggccaagatcgacaacctcctccaggagatgctcctctga

SEQ ID NO: 804 - RNA, 1128 nt, synthetic construct
  misc_feature 1..1128: note = CDS (opt2) from Homo sapiens__NP_000448.3__HNF4A(1-375)(R2V_K5V)
  source 1..1128: mol_type = other RNA
atggtcctctccgtcaccctcgtcgacatggacatggccgactactccgccgccctcgaccccgcctacaccaccctcgagttcgagaacgtccaggtcctcaccatgggcaacgacacctccccctccgagggcaccaacctcaacgcccccaactccctcggcgtctccgccctctgcgccatctgcggcgaccgcgccaccggcaagcactacggcgcctcctcctgcgacggctgcaagggcttcttccgccgctccgtccgcaagaaccacatgtactcctgccgcttctcccgccagtgcgtcgtcgacaaggacaagcgcaaccagtgccgctactgccgcctcaagaagtgcttccgcgccggcatgaagaaggaggccgtccagaacgagcgcgaccgcatctccacccgccgctcctcctacgaggactcctccctcccctccatcaacgccctcctccaggccgaggtcctctcccgccagatcacctcccccgtctccggcatcaacggcgacatccgcgccaagaagatcgcctccatcgccgacgtctgcgagtccatgaaggagcagctcctcgtcctcgtcgagtgggccaagtacatccccgccttctgcgagctccccctcgacgaccaggtcgccctcctccgcgcccacgccggcgagcacctcctcctcggcgccaccaagcgctccatggtcttcaaggacgtcctcctcctcggcaacgactacatcgtcccccgccactgccccgagctcgccgagatgtcccgcgtctccatccgcatcctcgacgagctcgtcctccccttccaggagctccagatcgacgacaacgagtacgcctacctcaaggccatcatcttcttcgaccccgacgccaagggcctctccgaccccggcaagatcaagcgcctccgctcccaggtccaggtctccctcgaggactacatcaacgaccgccagtacgactcccgcggccgcttcggcgagctcctcctcctcctccccaccctccagtccatcacctggcagatgatcgagcagatccagttcatcaagctcttcggcatggccaagatcgacaacctcctccaggagatgctcctctga

SEQ ID NO: 805 - RNA, 1128 nt, synthetic construct
  misc_feature 1..1128: note = CDS (opt2) from Homo sapiens__NP_000448.3__HNF4A(1-375)(K179R_K180R)
  source 1..1128: mol_type = other RNA
atgcgcctctccaagaccctcgtcgacatggacatggccgactactccgccgccctcgaccccgcctacaccaccctcgagttcgagaacgtccaggtcctcaccatgggcaacgacacctccccctccgagggcaccaacctcaacgcccccaactccctcggcgtctccgccctctgcgccatctgcggcgaccgcgccaccggcaagcactacggcgcctcctcctgcgacggctgcaagggcttcttccgccgctccgtccgcaagaaccacatgtactcctgccgcttctcccgccagtgcgtcgtcgacaaggacaagcgcaaccagtgccgctactgccgcctcaagaagtgcttccgcgccggcatgaagaaggaggccgtccagaacgagcgcgaccgcatctccacccgccgctcctcctacgaggactcctccctcccctccatcaacgccctcctccaggccgaggtcctctcccgccagatcacctcccccgtctccggcatcaacggcgacatccgcgcccgccgcatcgcctccatcgccgacgtctgcgagtccatgaaggagcagctcctcgtcctcgtcgagtgggccaagtacatccccgccttctgcgagctccccctcgacgaccaggtcgccctcctccgcgcccacgccggcgagcacctcctcctcggcgccaccaagcgctccatggtcttcaaggacgtcctcctcctcggcaacgactacatcgtcccccgccactgccccgagctcgccgagatgtcccgcgtctccatccgcatcctcgacgagctcgtcctccccttccaggagctccagatcgacgacaacgagtacgcctacctcaaggccatcatcttcttcgaccccgacgccaagggcctctccgaccccggcaagatcaagcgcctccgctcccaggtccaggtctccctcgaggactacatcaacgaccgccagtacgactcccgcggccgcttcggcgagctcctcctcctcctccccaccctccagtccatcacctggcagatgatcgagcagatccagttcatcaagctcttcggcatggccaagatcgacaacctcctccaggagatgctcctctga

SEQ ID NO: 806 - RNA, 1128 nt, synthetic construct
  misc_feature 1..1128: note = CDS (opt2) from Homo sapiens__NP_000448.3__HNF4A(1-375)(K234R)
  source 1..1128: mol_type = other RNA
atgcgcctctccaagaccctcgtcgacatggacatggccgactactccgccgccctcgaccccgcctacaccaccctcgagttcgagaacgtccaggtcctcaccatgggcaacgacacctccccctccgagggcaccaacctcaacgcccccaactccctcggcgtctccgccctctgcgccatctgcggcgaccgcgccaccggcaagcactacggcgcctcctcctgcgacggctgcaagggcttcttccgccgctccgtccgcaagaaccacatgtactcctgccgcttctcccgccagtgcgtcgtcgacaaggacaagcgcaaccagtgccgctactgccgcctcaagaagtgcttccgcgccggcatgaagaaggaggccgtccagaacgagcgcgaccgcatctccacccgccgctcctcctacgaggactcctccctcccctccatcaacgccctcctccaggccgaggtcctctcccgccagatcacctcccccgtctccggcatcaacggcgacatccgcgccaagaagatcgcctccatcgccgacgtctgcgagtccatgaaggagcagctcctcgtcctcgtcgagtgggccaagtacatccccgccttctgcgagctccccctcgacgaccaggtcgccctcctccgcgcccacgccggcgagcacctcctcctcggcgccacccgccgctccatggtcttcaaggacgtcctcctcctcggcaacgactacatcgtcccccgccactgccccgagctcgccgagatgtcccgcgtctccatccgcatcctcgacgagctcgtcctccccttccaggagctccagatcgacgacaacgagtacgcctacctcaaggccatcatcttcttcgaccccgacgccaagggcctctccgaccccggcaagatcaagcgcctccgctcccaggtccaggtctccctcgaggactacatcaacgaccgccagtacgactcccgcggccgcttcggcgagctcctcctcctcctccccaccctccagtccatcacctggcagatgatcgagcagatccagttcatcaagctcttcggcatggccaagatcgacaacctcctccaggagatgctcctctga

SEQ ID NO: 807 - RNA, 1128 nt, synthetic construct
  misc_feature 1..1128: note = CDS (opt2) from Homo sapiens__NP_000448.3__HNF4A(1-375)(K300R)
  source 1..1128: mol_type = other RNA
atgcgcctctccaagaccctcgtcgacatggacatggccgactactccgccgccctcgaccccgcctacaccaccctcgagttcgagaacgtccaggtcctcaccatgggcaacgacacctccccctccgagggcaccaacctcaacgcccccaactccctcggcgtctccgccctctgcgccatctgcggcgaccgcgccaccggcaagcactacggcgcctcctcctgcgacggctgcaagggcttcttccgccgctccgtccgcaagaaccacatgtactcctgccgcttctcccgccagtgcgtcgtcgacaaggacaagcgcaaccagtgccgctactgccgcctcaagaagtgcttccgcgccggcatgaagaaggaggccgtccagaacgagcgcgaccgcatctccacccgccgctcctcctacgaggactcctccctcccctccatcaacgccctcctccaggccgaggtcctctcccgccagatcacctcccccgtctccggcatcaacggcgacatccgcgccaagaagatcgcctccatcgccgacgtctgcgagtccatgaaggagcagctcctcgtcctcgtcgagtgggccaagtacatccccgccttctgcgagctccccctcgacgaccaggtcgccctcctccgcgcccacgccggcgagcacctcctcctcggcgccaccaagcgctccatggtcttcaaggacgtcctcctcctcggcaacgactacatcgtcccccgccactgccccgagctcgccgagatgtcccgcgtctccatccgcatcctcgacgagctcgtcctccccttccaggagctccagatcgacgacaacgagtacgcctacctcaaggccatcatcttcttcgaccccgacgcccgcggcctctccgaccccggcaagatcaagcgcctccgctcccaggtccaggtctccctcgaggactacatcaacgaccgccagtacgactcccgcggccgcttcggcgagctcctcctcctcctccccaccctccagtccatcacctggcagatgatcgagcagatccagttcatcaagctcttcggcatggccaagatcgacaacctcctccaggagatgctcctctga

SEQ ID NO: 808 - RNA, 1128 nt, synthetic construct
  misc_feature 1..1128: note = CDS (opt2) from Homo sapiens__NP_000448.3__HNF4A(1-375)(K300R_K307R_K309R)
  source 1..1128: mol_type = other RNA
atgcgcctctccaagaccctcgtcgacatggacatggccgactactccgccgccctcgaccccgcctacaccaccctcgagttcgagaacgtccaggtcctcaccatgggcaacgacacctccccctccgagggcaccaacctcaacgcccccaactccctcggcgtctccgccctctgcgccatctgcggcgaccgcgccaccggcaagcactacggcgcctcctcctgcgacggctgcaagggcttcttccgccgctccgtccgcaagaaccacatgtactcctgccgcttctcccgccagtgcgtcgtcgacaaggacaagcgcaaccagtgccgctactgccgcctcaagaagtgcttccgcgccggcatgaagaaggaggccgtccagaacgagcgcgaccgcatctccacccgccgctcctcctacgaggactcctccctcccctccatcaacgccctcctccaggccgaggtcctctcccgccagatcacctcccccgtctccggcatcaacggcgacatccgcgccaagaagatcgcctccatcgccgacgtctgcgagtccatgaaggagcagctcctcgtcctcgtcgagtgggccaagtacatccccgccttctgcgagctccccctcgacgaccaggtcgccctcctccgcgcccacgccggcgagcacctcctcctcggcgccaccaagcgctccatggtcttcaaggacgtcctcctcctcggcaacgactacatcgtcccccgccactgccccgagctcgccgagatgtcccgcgtctccatccgcatcctcgacgagctcgtcctccccttccaggagctccagatcgacgacaacgagtacgcctacctcaaggccatcatcttcttcgaccccgacgcccgcggcctctccgaccccggccgcatccgccgcctccgctcccaggtccaggtctccctcgaggactacatcaacgaccgccagtacgactcccgcggccgcttcggcgagctcctcctcctcctccccaccctccagtccatcacctggcagatgatcgagcagatccagttcatcaagctcttcggcatggccaagatcgacaacctcctccaggagatgctcctctga

SEQ ID NO: 809 - RNA, 1128 nt, synthetic construct
  misc_feature 1..1128: note = CDS (opt2) from Homo sapiens__NP_000448.3__HNF4A(1-375)(K447R_K470R)
  source 1..1128: mol_type = other RNA
atgcgcctctccaagaccctcgtcgacatggacatggccgactactccgccgccctcgaccccgcctacaccaccctcgagttcgagaacgtccaggtcctcaccatgggcaacgacacctccccctccgagggcaccaacctcaacgcccccaactccctcggcgtctccgccctctgcgccatctgcggcgaccgcgccaccggcaagcactacggcgcctcctcctgcgacggctgcaagggcttcttccgccgctccgtccgcaagaaccacatgtactcctgccgcttctcccgccagtgcgtcgtcgacaaggacaagcgcaaccagtgccgctactgccgcctcaagaagtgcttccgcgccggcatgaagaaggaggccgtccagaacgagcgcgaccgcatctccacccgccgctcctcctacgaggactcctccctcccctccatcaacgccctcctccaggccgaggtcctctcccgccagatcacctcccccgtctccggcatcaacggcgacatccgcgccaagaagatcgcctccatcgccgacgtctgcgagtccatgaaggagcagctcctcgtcctcgtcgagtgggccaagtacatccccgccttctgcgagctccccctcgacgaccaggtcgccctcctccgcgcccacgccggcgagcacctcctcctcggcgccaccaagcgctccatggtcttcaaggacgtcctcctcctcggcaacgactacatcgtcccccgccactgccccgagctcgccgagatgtcccgcgtctccatccgcatcctcgacgagctcgtcctccccttccaggagctccagatcgacgacaacgagtacgcctacctcaaggccatcatcttcttcgaccccgacgccaagggcctctccgaccccggcaagatcaagcgcctccgctcccaggtccaggtctccctcgaggactacatcaacgaccgccagtacgactcccgcggccgcttcggcgagctcctcctcctcctccccaccctccagtccatcacctggcagatgatcgagcagatccagttcatcaagctcttcggcatggccaagatcgacaacctcctccaggagatgctcctctga

SEQ ID NO: 810 - RNA, 1128 nt, synthetic construct; identical to SEQ ID NO: 809
  misc_feature 1..1128: note = CDS (opt2) from Homo sapiens__NP_000448.3__HNF4A(1-375)(K458R)
  source 1..1128: mol_type = other RNA

SEQ ID NO: 811 - RNA, 1128 nt, synthetic construct
  misc_feature 1..1128: note = CDS (opt2) from Homo sapiens__NP_000448.3__HNF4A(1-375)(K106R_K108R_K126R_K127R)
  source 1..1128: mol_type = other RNA
atgcgcctctccaagaccctcgtcgacatggacatggccgactactccgccgccctcgaccccgcctacaccaccctcgagttcgagaacgtccaggtcctcaccatgggcaacgacacctccccctccgagggcaccaacctcaacgcccccaactccctcggcgtctccgccctctgcgccatctgcggcgaccgcgccaccggcaagcactacggcgcctcctcctgcgacggctgcaagggcttcttccgccgctccgtccgcaagaaccacatgtactcctgccgcttctcccgccagtgcgtcgtcgaccgcgaccgccgcaaccagtgccgctactgccgcctcaagaagtgcttccgcgccggcatgcgccgcgaggccgtccagaacgagcgcgaccgcatctccacccgccgctcctcctacgaggactcctccctcccctccatcaacgccctcctccaggccgaggtcctctcccgccagatcacctcccccgtctccggcatcaacggcgacatccgcgccaagaagatcgcctccatcgccgacgtctgcgagtccatgaaggagcagctcctcgtcctcgtcgagtgggccaagtacatccccgccttctgcgagctccccctcgacgaccaggtcgccctcctccgcgcccacgccggcgagcacctcctcctcggcgccaccaagcgctccatggtcttcaaggacgtcctcctcctcggcaacgactacatcgtcccccgccactgccccgagctcgccgagatgtcccgcgtctccatccgcatcctcgacgagctcgtcctccccttccaggagctccagatcgacgacaacgagtacgcctacctcaaggccatcatcttcttcgaccccgacgccaagggcctctccgaccccggcaagatcaagcgcctccgctcccaggtccaggtctccctcgaggactacatcaacgaccgccagtacgactcccgcggccgcttcggcgagctcctcctcctcctccccaccctccagtccatcacctggcagatgatcgagcagatccagttcatcaagctcttcggcatggccaagatcgacaacctcctccaggagatgctcctctga

SEQ ID NO: 812 - RNA, 1128 nt, synthetic construct
  misc_feature 1..1128: note = CDS (opt2) from Homo sapiens__NP_000448.3__HNF4A(1-375)(E285Q)
  source 1..1128: mol_type = other RNA
atgcgcctctccaagaccctcgtcgacatggacatggccgactactccgccgccctcgaccccgcctacaccaccctcgagttcgagaacgtccaggtcctcaccatgggcaacgacacctccccctccgagggcaccaacctcaacgcccccaactccctcggcgtctccgccctctgcgccatctgcggcgaccgcgccaccggcaagcactacggcgcctcctcctgcgacggctgcaagggcttcttccgccgctccgtccgcaagaaccacatgtactcctgccgcttctcccgccagtgcgtcgtcgacaaggacaagcgcaaccagtgccgctactgccgcctcaagaagtgcttccgcgccggcatgaagaaggaggccgtccagaacgagcgcgaccgcatctccacccgccgctcctcctacgaggactcctccctcccctccatcaacgccctcctccaggccgaggtcctctcccgccagatcacctcccccgtctccggcatcaacggcgacatccgcgccaagaagatcgcctccatcgccgacgtctgcgagtccatgaaggagcagctcctcgtcctcgtcgagtgggccaagtacatccccgccttctgcgagctccccctcgacgaccaggtcgccctcctccgcgcccacgccggcgagcacctcctcctcggcgccaccaagcgctccatggtcttcaaggacgtcctcctcctcggcaacgactacatcgtcccccgccactgccccgagctcgccgagatgtcccgcgtctccatccgcatcctcgacgagctcgtcctccccttccaggagctccagatcgacgacaaccagtacgcctacctcaaggccatcatcttcttcgaccccgacgccaagggcctctccgaccccggcaagatcaagcgcctccgctcccaggtccaggtctccctcgaggactacatcaacgaccgccagtacgactcccgcggccgcttcggcgagctcctcctcctcctccccaccctccagtccatcacctggcagatgatcgagcagatccagttcatcaagctcttcggcatggccaagatcgacaacctcctccaggagatgctcctctga

SEQ ID NO: 813 - RNA, 1128 nt, synthetic construct
  misc_feature 1..1128: note = CDS (opt2) from Homo sapiens__NP_000448.3__HNF4A(1-375)(T166E)
  source 1..1128: mol_type = other RNA
atgcgcctctccaagaccctcgtcgacatggacatggccgactactccgccgccctcgaccccgcctacaccaccctcgagttcgagaacgtccaggtcctcaccatgggcaacgacacctccccctccgagggcaccaacctcaacgcccccaactccctcggcgtctccgccctctgcgccatctgcggcgaccgcgccaccggcaagcactacggcgcctcctcctgcgacggctgcaagggcttcttccgccgctccgtccgcaagaaccacatgtactcctgccgcttctcccgccagtgcgtcgtcgacaaggacaagcgcaaccagtgccgctactgccgcctcaagaagtgcttccgcgccggcatgaagaaggaggccgtccagaacgagcgcgaccgcatctccacccgccgctcctcctacgaggactcctccctcccctccatcaacgccctcctccaggccgaggtcctctcccgccagatcgagtcccccgtctccggcatcaacggcgacatccgcgccaagaagatcgcctccatcgccgacgtctgcgagtccatgaaggagcagctcctcgtcctcgtcgagtgggccaagtacatccccgccttctgcgagctccccctcgacgaccaggtcgccctcctccgcgcccacgccggcgagcacctcctcctcggcgccaccaagcgctccatggtcttcaaggacgtcctcctcctcggcaacgactacatcgtcccccgccactgccccgagctcgccgagatgtcccgcgtctccatccgcatcctcgacgagctcgtcctccccttccaggagctccagatcgacgacaacgagtacgcctacctcaaggccatcatcttcttcgaccccgacgccaagggcctctccgaccccggcaagatcaagcgcctccgctcccaggtccaggtctccctcgaggactacatcaacgaccgccagtacgactcccgcggccgcttcggcgagctcctcctcctcctccccaccctccagtccatcacctggcagatgatcgagcagatccagttcatcaagctcttcggcatggccaagatcgacaacctcctccaggagatgctcctctga

SEQ ID NO: 814 - RNA, 1128 nt, synthetic construct
  misc_feature 1..1128: note = CDS (opt2) from Homo sapiens__NP_000448.3__HNF4A(1-375)(S148A)
  source 1..1128: mol_type = other RNA
atgcgcctctccaagaccctcgtcgacatggacatggccgactactccgccgccctcgaccccgcctacaccaccctcgagttcgagaacgtccaggtcctcaccatgggcaacgacacctccccctccgagggcaccaacctcaacgcccccaactccctcggcgtctccgccctctgcgccatctgcggcgaccgcgccaccggcaagcactacggcgcctcctcctgcgacggctgcaagggcttcttccgccgctccgtccgcaagaaccacatgtactcctgccgcttctcccgccagtgcgtcgtcgacaaggacaagcgcaaccagtgccgctactgccgcctcaagaagtgcttccgcgccggcatgaagaaggaggccgtccagaacgagcgcgaccgcatctccacccgccgctcctcctacgaggactccgccctcccctccatcaacgccctcctccaggccgaggtcctctcccgccagatcacctcccccgtctccggcatcaacggcgacatccgcgccaagaagatcgcctccatcgccgacgtctgcgagtccatgaaggagcagctcctcgtcctcgtcgagtgggccaagtacatccccgccttctgcgagctccccctcgacgaccaggtcgccctcctccgcgcccacgccggcgagcacctcctcctcggcgccaccaagcgctccatggtcttcaaggacgtcctcctcctcggcaacgactacatcgtcccccgccactgccccgagctcgccgagatgtcccgcgtctccatccgcatcctcgacgagctcgtcctccccttccaggagctccagatcgacgacaacgagtacgcctacctcaaggccatcatcttcttcgaccccgacgccaagggcctctccgaccccggcaagatcaagcgcctccgctcccaggtccaggtctccctcgaggactacatcaacgaccgccagtacgactcccgcggccgcttcggcgagctcctcctcctcctccccaccctccagtccatcacctggcagatgatcgagcagatccagttcatcaagctcttcggcatggccaagatcgacaacctcctccaggagatgctcctctga

SEQ ID NO: 815 - RNA, 1128 nt, synthetic construct
  misc_feature 1..1128: note = CDS (opt2) from Homo sapiens__NP_000448.3__HNF4A(1-375)(S148E)
  source 1..1128: mol_type = other RNA
atgcgcctctccaagaccctcgtcgacatggacatggccgactactccgccgccctcgaccccgcctacaccaccctcgagttcgagaacgtccaggtcctcaccatgggcaacgacacctccccctccgagggcaccaacctcaacgcccccaactccctcggcgtctccgccctctgcgccatctgcggcgaccgcgccaccggcaagcactacggcgcctcctcctgcgacggctgcaagggcttcttccgccgctccgtccgcaagaaccacatgtactcctgccgcttctcccgccagtgcgtcgtcgacaaggacaagcgcaaccagtgccgctactgccgcctcaagaagtgcttccgcgccggcatgaagaaggaggccgtccagaacgagcgcgaccgcatctccacccgccgctcctcctacgaggactccgagctcccctccatcaacgccctcctccaggccgaggtcctctcccgccagatcacctcccccgtctccggcatcaacggcgacatccgcgccaagaagatcgcctccatcgccgacgtctgcgagtccatgaaggagcagctcctcgtcctcgtcgagtgggccaagtacatccccgccttctgcgagctccccctcgacgaccaggtcgccctcctccgcgcccacgccggcgagcacctcctcctcggcgccaccaagcgctccatggtcttcaaggacgtcctcctcctcggcaacgactacatcgtcccccgccactgccccgagctcgccgagatgtcccgcgtctccatccgcatcctcgacgagctcgtcctccccttccaggagctccagatcgacgacaacgagtacgcctacctcaaggccatcatcttcttcgaccccgacgccaagggcctctccgaccccggcaagatcaagcgcctccgctcccaggtccaggtctccctcgaggactacatcaacgaccgccagtacgactcccgcggccgcttcggcgagctcctcctcctcctccccaccctccagtccatcacctggcagatgatcgagcagatccagttcatcaagctcttcggcatggccaagatcgacaacctcctccaggagatgctcctctga

SEQ ID NO: 816 - RNA, 1128 nt, synthetic construct
  misc_feature 1..1128: note = CDS (opt2) from Homo sapiens__NP_000448.3__HNF4A(1-375)(S183A)
  source 1..1128: mol_type = other RNA
atgcgcctctccaagaccctcgtcgacatggacatggccgactactccgccgccctcgaccccgcctacaccaccctcgagttcgagaacgtccaggtcctcaccatgggcaacgacacctccccctccgagggcaccaacctcaacgcccccaactccctcggcgtctccgccctctgcgccatctgcggcgaccgcgccaccggcaagcactacggcgcctcctcctgcgacggctgcaagggcttcttccgccgctccgtccgcaagaaccacatgtactcctgccgcttctcccgccagtgcgtcgtcgacaaggacaagcgcaaccagtgccgctactgccgcctcaagaagtgcttccgcgccggcatgaagaaggaggccgtccagaacgagcgcgaccgcatctccacccgccgctcctcctacgaggactcctccctcccctccatcaacgccctcctccaggccgaggtcctctcccgccagatcacctcccccgtctccggcatcaacggcgacatccgcgccaagaagatcgccgccatcgccgacgtctgcgagtccatgaaggagcagctcctcgtcctcgtcgagtgggccaagtacatccccgccttctgcgagctccccctcgacgaccaggtcgccctcctccgcgcccacgccggcgagcacctcctcctcggcgccaccaagcgctccatggtcttcaaggacgtcctcctcctcggcaacgactacatcgtcccccgccactgccccgagctcgccgagatgtcccgcgtctccatccgcatcctcgacgagctcgtcctccccttccaggagctccagatcgacgacaacgagtacgcctacctcaaggccatcatcttcttcgaccccgacgccaagggcctctccgaccccggcaagatcaagcgcctccgctcccaggtccaggtctccctcgaggactacatcaacgaccgccagtacgactcccgcggccgcttcggcgagctcctcctcctcctccccaccctccagtccatcacctggcagatgatcgagcagatccagttcatcaagctcttcggcatggccaagatcgacaacctcctccaggagatgctcctctga

SEQ ID NO: 817 - RNA, 1128 nt, synthetic construct
  misc_feature 1..1128: note = CDS (opt2) from Homo sapiens__NP_000448.3__HNF4A(1-375)(S183E)
  source 1..1128: mol_type = other RNA
atgcgcctctccaagaccctcgtcgacatggacatggccgactactccgccgccctcgaccccgcctacaccaccctcgagttcgagaacgtccaggtcctcaccatgggcaacgacacctccccctccgagggcaccaacctcaacgcccccaactccctcggcgtctccgccctctgcgccatctgcggcgaccgcgccaccggcaagcactacggcgcctcctcctgcgacggctgcaagggcttcttccgccgctccgtccgcaagaaccacatgtactcctgccgcttctcccgccagtgcgtcgtcgacaaggacaagcgcaaccagtgccgctactgccgcctcaagaagtgcttccgcgccggcatgaagaaggaggccgtccagaacgagcgcgaccgcatctccacccgccgctcctcctacgaggactcctccctcccctccatcaacgccctcctccaggccgaggtcctctcccgccagatcacctcccccgtctccggcatcaacggcgacatccgcgccaagaagatcgccgagatcgccgacgtctgcgagtccatgaaggagcagctcctcgtcctcgtcgagtgggccaagtacatccccgccttctgcgagctccccctcgacgaccaggtcgccctcctccgcgcccacgccggcgagcacctcctcctcggcgccaccaagcgctccatggtcttcaaggacgtcctcctcctcggcaacgactacatcgtcccccgccactgccccgagctcgccgagatgtcccgcgtctccatccgcatcctcgacgagctcgtcctccccttccaggagctccagatcgacgacaacgagtacgcctacctcaaggccatcatcttcttcgaccccgacgccaagggcctctccgaccccggcaagatcaagcgcctccgctcccaggtccaggtctccctcgaggactacatcaacgaccgccagtacgactcccgcggccgcttcggcgagctcctcctcctcctccccaccctccagtccatcacctggcagatgatcgagcagatccagttcatcaagctcttcggcatggccaagatcgacaacctcctccaggagatgctcctctga

SEQ ID NO: 818 - RNA, 1128 nt, synthetic construct; identical to SEQ ID NO: 809
  misc_feature 1..1128: note = CDS (opt2) from Homo sapiens__NP_000448.3__HNF4A(1-375)(S461A)
  source 1..1128: mol_type = other RNA

SEQ ID NO: 819 - RNA, 1128 nt, synthetic construct; identical to SEQ ID NO: 809
  misc_feature 1..1128: note = CDS (opt2) from Homo sapiens__NP_000448.3__HNF4A(1-375)(S461E)
  source 1..1128: mol_type = other RNA

SEQ ID NO: 820 - RNA, 1128 nt, synthetic construct
  misc_feature 1..1128: note = CDS (opt2) from Homo sapiens__NP_000448.3__HNF4A(1-375)(S142A_S143A_S313A)
  source 1..1128: mol_type = other RNA
atgcgcctctccaagaccctcgtcgacatggacatggccgactactccgccgccctcgaccccgcctacaccaccctcgagttcgagaacgtccaggtcctcaccatgggcaacgacacctccccctccgagggcaccaacctcaacgcccccaactccctcggcgtctccgccctctgcgccatctgcggcgaccgcgccaccggcaagcactacggcgcctcctcctgcgacggctgcaagggcttcttccgccgctccgtccgcaagaaccacatgtactcctgccgcttctcccgccagtgcgtcgtcgacaaggacaagcgcaaccagtgccgctactgccgcctcaagaagtgcttccgcgccggcatgaagaaggaggccgtccagaacgagcgcgaccgcatctccacccgccgcgccgcctacgaggactcctccctcccctccatcaacgccctcctccaggccgaggtcctctcccgccagatcacctcccccgtctccggcatcaacggcgacatccgcgccaagaagatcgcctccatcgccgacgtctgcgagtccatgaaggagcagctcctcgtcctcgtcgagtgggccaagtacatccccgccttctgcgagctccccctcgacgaccaggtcgccctcctccgcgcccacgccggcgagcacctcctcctcggcgccaccaagcgctccatggtcttcaaggacgtcctcctcctcggcaacgactacatcgtcccccgccactgccccgagctcgccgagatgtcccgcgtctccatccgcatcctcgacgagctcgtcctccccttccaggagctccagatcgacgacaacgagtacgcctacctcaaggccatcatcttcttcgaccccgacgccaagggcctctccgaccccggcaagatcaagcgcctccgcgcccaggtccaggtctccctcgaggactacatcaacgaccgccagtacgactcccgcggccgcttcggcgagctcctcctcctcctccccaccctccagtccatcacctggcagatgatcgagcagatccagttcatcaagctcttcggcatggccaagatcgacaacctcctccaggagatgctcctctga

SEQ ID NO: 821 - RNA, 1128 nt, synthetic construct; identical to SEQ ID NO: 820
  misc_feature 1..1128: note = CDS (opt2) from Homo sapiens__NP_000448.3__HNF4A(1-375)(S142A_S143A_S313A_K458R)
  source 1..1128: mol_type = other RNA

SEQ ID NO: 822 - RNA, 1128 nt, synthetic construct
  misc_feature 1..1128: note = CDS (opt2) from Homo sapiens__NP_000448.3__HNF4A(1-375)(S142A_S143A_S167A_S313A_ S378A_T429A_T432A_S436A_K458R)
  source 1..1128: mol_type = other RNA
atgcgcctctccaagaccctcgtcgacatggacatggccgactactccgccgccctcgaccccgcctacaccaccctcgagttcgagaacgtccaggtcctcaccatgggcaacgacacctccccctccgagggcaccaacctcaacgcccccaactccctcggcgtctccgccctctgcgccatctgcggcgaccgcgccaccggcaagcactacggcgcctcctcctgcgacggctgcaagggcttcttccgccgctccgtccgcaagaaccacatgtactcctgccgcttctcccgccagtgcgtcgtcgacaaggacaagcgcaaccagtgccgctactgccgcctcaagaagtgcttccgcgccggcatgaagaaggaggccgtccagaacgagcgcgaccgcatctccacccgccgcgccgcctacgaggactcctccctcccctccatcaacgccctcctccaggccgaggtcctctcccgccagatcaccgcccccgtctccggcatcaacggcgacatccgcgccaagaagatcgcctccatcgccgacgtctgcgagtccatgaaggagcagctcctcgtcctcgtcgagtgggccaagtacatccccgccttctgcgagctccccctcgacgaccaggtcgccctcctccgcgcccacgccggcgagcacctcctcctcggcgccaccaagcgctccatggtcttcaaggacgtcctcctcctcggcaacgactacatcgtcccccgccactgccccgagctcgccgagatgtcccgcgtctccatccgcatcctcgacgagctcgtcctccccttccaggagctccagatcgacgacaacgagtacgcctacctcaaggccatcatcttcttcgaccccgacgccaagggcctctccgaccccggcaagatcaagcgcctccgcgcccaggtccaggtctccctcgaggactacatcaacgaccgccagtacgactcccgcggccgcttcggcgagctcctcctcctcctccccaccctccagtccatcacctggcagatgatcgagcagatccagttcatcaagctcttcggcatggccaagatcgacaacctcctccaggagatgctcctctga

SEQ ID NO: 823 - RNA, 1128 nt, synthetic construct
  misc_feature 1..1128: note = CDS (opt2) from Homo sapiens__NP_000448.3__HNF4A(1-375)(S142A_S143A_S148A_S167A_ S313A_S378A_T429A_T432A_S436A_K458R)
  source 1..1128: mol_type = other RNA
atgcgcctctccaagaccctcgtcgacatggacatggccgactactccgccgccctcgaccccgcctacaccaccctcgagttcgagaacgtccaggtcctcaccatgggcaacgacacctccccctccgagggcaccaacctcaacgcccccaactccctcggcgtctccgccctctgcgccatctgcggcgaccgcgccaccggcaagcactacggcgcctcctcctgcgacggctgcaagggcttcttccgccgctccgtccgcaagaaccacatgtactcctgccgcttctcccgccagtgcgtcgtcgacaaggacaagcgcaaccagtgccgctactgccgcctcaagaagtgcttccgcgccggcatgaagaaggaggccgtccagaacgagcgcgaccgcatctccacccgccgcgccgcctacgaggactccgccctcccctccatcaacgccctcctccaggccgaggtcctctcccgccagatcaccgcccccgtctccggcatcaacggcgacatccgcgccaagaagatcgcctccatcgccgacgtctgcgagtccatgaaggagcagctcctcgtcctcgtcgagtgggccaagtacatccccgccttctgcgagctccccctcgacgaccaggtcgccctcctccgcgcccacgccggcgagcacctcctcctcggcgccaccaagcgctccatggtcttcaaggacgtcctcctcctcggcaacgactacatcgtcccccgccactgccccgagctcgccgagatgtcccgcgtctccatccgcatcctcgacgagctcgtcctccccttccaggagctccagatcgacgacaacgagtacgcctacctcaaggccatcatcttcttcgaccccgacgccaagggcctctccgaccccggcaagatcaagcgcctccgcgcccaggtccaggtctccctcgaggactacatcaacgaccgccagtacgactcccgcggccgcttcggcgagctcctcctcctcctccccaccctccagtccatcacctggcagatgatcgagcagatccagttcatcaagctcttcggcatggccaagatcgacaacctcctccaggagatgctcctctga

SEQ ID NO: 824 - RNA, 1128 nt, synthetic construct
  misc_feature 1..1128: note = CDS (opt2) from Homo sapiens__NP_000448.3__HNF4A(1-375)(K106R_K108R_K126R_K127R_ S142A_S143A_S148A_S167A_S313A_S378A_T429A_T432A_S436A_K458R )
  source 1..1128: mol_type = other RNA
atgcgcctctccaagaccctcgtcgacatggacatggccgactactccgccgccctcgaccccgcctacaccaccctcgagttcgagaacgtccaggtcctcaccatgggcaacgacacctccccctccgagggcaccaacctcaacgcccccaactccctcggcgtctccgccctctgcgccatctgcggcgaccgcgccaccggcaagcactacggcgcctcctcctgcgacggctgcaagggcttcttccgccgctccgtccgcaagaaccacatgtactcctgccgcttctcccgccagtgcgtcgtcgaccgcgaccgccgcaaccagtgccgctactgccgcctcaagaagtgcttccgcgccggcatgcgccgcgaggccgtccagaacgagcgcgaccgcatctccacccgccgcgccgcctacgaggactccgccctcccctccatcaacgccctcctccaggccgaggtcctctcccgccagatcaccgcccccgtctccggcatcaacggcgacatccgcgccaagaagatcgcctccatcgccgacgtctgcgagtccatgaaggagcagctcctcgtcctcgtcgagtgggccaagtacatccccgccttctgcgagctccccctcgacgaccaggtcgccctcctccgcgcccacgccggcgagcacctcctcctcggcgccaccaagcgctccatggtcttcaaggacgtcctcctcctcggcaacgactacatcgtcccccgccactgccccgagctcgccgagatgtcccgcgtctccatccgcatcctcgacgagctcgtcctccccttccaggagctccagatcgacgacaacgagtacgcctacctcaaggccatcatcttcttcgaccccgacgccaagggcctctccgaccccggcaagatcaagcgcctccgcgcccaggtccaggtctccctcgaggactacatcaacgaccgccagtacgactcccgcggccgcttcggcgagctcctcctcctcctccccaccctccagtccatcacctggcagatgatcgagcagatccagttcatcaagctcttcggcatggccaagatcgacaacctcctccaggagatgctcctctga

SEQ ID NO: 825 - RNA, 1128 nt, synthetic construct
  misc_feature 1..1128: note = CDS (opt2) from Homo sapiens__NP_000448.3__HNF4A(1-375)(S142A_S143A_S148A_T166A_ S167A_S313A_S378A_T429A_T432A_S436A_K458R)
  source 1..1128: mol_type = other RNA
atgcgcctctccaagaccctcgtcgacatggacatggccgactactccgccgccctcgaccccgcctacaccaccctcgagttcgagaacgtccaggtcctcaccatgggcaacgacacctccccctccgagggcaccaacctcaacgcccccaactccctcggcgtctccgccctctgcgccatctgcggcgaccgcgccaccggcaagcactacggcgcctcctcctgcgacggctgcaagggcttcttccgccgctccgtccgcaagaaccacatgtactcctgccgcttctcccgccagtgcgtcgtcgacaaggacaagcgcaaccagtgccgctactgccgcctcaagaagtgcttccgcgccggcatgaagaaggaggccgtccagaacgagcgcgaccgcatctccacccgccgcgccgcctacgaggactccgccctcccctccatcaacgccctcctccaggccgaggtcctctcccgccagatcgccgcccccgtctccggcatcaacggcgacatccgcgccaagaagatcgcctccatcgccgacgtctgcgagtccatgaaggagcagctcctcgtcctcgtcgagtgggccaagtacatccccgccttctgcgagctccccctcgacgaccaggtcgccctcctccgcgcccacgccggcgagcacctcctcctcggcgccaccaagcgctccatggtcttcaaggacgtcctcctcctcggcaacgactacatcgtcccccgccactgccccgagctcgccgagatgtcccgcgtctccatccgcatcctcgacgagctcgtcctccccttccaggagctccagatcgacgacaacgagtacgcctacctcaaggccatcatcttcttcgaccccgacgccaagggcctctccgaccccggcaagatcaagcgcctccgcgcccaggtccaggtctccctcgaggactacatcaacgaccgccagtacgactcccgcggccgcttcggcgagctcctcctcctcctccccaccctccagtccatcacctggcagatgatcgagcagatccagttcatcaagctcttcggcatggccaagatcgacaacctcctccaggagatgctcctctga

SEQ ID NO: 826 - RNA, 1128 nt, synthetic construct
  misc_feature 1..1128: note = CDS (opt2) from Homo sapiens__NP_000448.3__HNF4A(1-375)(S87A_S142A_S143A_S148A_T 166A_S167A_S313A_S378A_T429A_T432A_S436A_K458R)
  source 1..1128: mol_type = other RNA
atgcgcctctccaagaccctcgtcgacatggacatggccgactactccgccgccctcgaccccgcctacaccaccctcgagttcgagaacgtccaggtcctcaccatgggcaacgacacctccccctccgagggcaccaacctcaacgcccccaactccctcggcgtctccgccctctgcgccatctgcggcgaccgcgccaccggcaagcactacggcgcctcctcctgcgacggctgcaagggcttcttccgccgcgccgtccgcaagaaccacatgtactcctgccgcttctcccgccagtgcgtcgtcgacaaggacaagcgcaaccagtgccgctactgccgcctcaagaagtgcttccgcgccggcatgaagaaggaggccgtccagaacgagcgcgaccgcatctccacccgccgcgccgcctacgaggactccgccctcccctccatcaacgccctcctccaggccgaggtcctctcccgccagatcgccgcccccgtctccggcatcaacggcgacatccgcgccaagaagatcgcctccatcgccgacgtctgcgagtccatgaaggagcagctcctcgtcctcgtcgagtgggccaagtacatccccgccttctgcgagctccccctcgacgaccaggtcgccctcctccgcgcccacgccggcgagcacctcctcctcggcgccaccaagcgctccatggtcttcaaggacgtcctcctcctcggcaacgactacatcgtcccccgccactgccccgagctcgccgagatgtcccgcgtctccatccgcatcctcgacgagctcgtcctccccttccaggagctccagatcgacgacaacgagtacgcctacctcaaggccatcatcttcttcgaccccgacgccaagggcctctccgaccccggcaagatcaagcgcctccgcgcccaggtccaggtctccctcgaggactacatcaacgaccgccagtacgactcccgcggccgcttcggcgagctcctcctcctcctccccaccctccagtccatcacctggcagatgatcgagcagatccagttcatcaagctcttcggcatggccaagatcgacaacctcctccaggagatgctcctctga

SEQ ID NO: 827 - RNA, 1128 nt, synthetic construct
  misc_feature 1..1128: note = CDS (opt2) from Homo sapiens__NP_000448.3__HNF4A(1-375)(S87A_K106R_K108R_K126R_K 127R_S142A_S143A_S148A_T166A_S167A_S313A_S378A_T429A_T432A_ S436A_K458R)
  source 1..1128: mol_type = other RNA
atgcgcctctccaagaccctcgtcgacatggacatggccgactactccgccgccctcgaccccgcctacaccaccctcgagttcgagaacgtccaggtcctcaccatgggcaacgacacctccccctccgagggcaccaacctcaacgcccccaactccctcggcgtctccgccctctgcgccatctgcggcgaccgcgccaccggcaagcactacggcgcctcctcctgcgacggctgcaagggcttcttccgccgcgccgtccgcaagaaccacatgtactcctgccgcttctcccgccagtgcgtcgtcgaccgcgaccgccgcaaccagtgccgctactgccgcctcaagaagtgcttccgcgccggcatgcgccgcgaggccgtccagaacgagcgcgaccgcatctccacccgccgcgccgcctacgaggactccgccctcccctccatcaacgccctcctccaggccgaggtcctctcccgccagatcgccgcccccgtctccggcatcaacggcgacatccgcgccaagaagatcgcctccatcgccgacgtctgcgagtccatgaaggagcagctcctcgtcctcgtcgagtgggccaagtacatccccgccttctgcgagctccccctcgacgaccaggtcgccctcctccgcgcccacgccggcgagcacctcctcctcggcgccaccaagcgctccatggtcttcaaggacgtcctcctcctcggcaacgactacatcgtcccccgccactgccccgagctcgccgagatgtcccgcgtctccatccgcatcctcgacgagctcgtcctccccttccaggagctccagatcgacgacaacgagtacgcctacctcaaggccatcatcttcttcgaccccgacgccaagggcctctccgaccccggcaagatcaagcgcctccgcgcccaggtccaggtctccctcgaggactacatcaacgaccgccagtacgactcccgcggccgcttcggcgagctcctcctcctcctccccaccctccagtccatcacctggcagatgatcgagcagatccagttcatcaagctcttcggcatggccaagatcgacaacctcctccaggagatgctcctctga

SEQ ID NO: 828 - RNA, 1128 nt, synthetic construct
  misc_feature 1..1128: note = CDS (opt2) from Homo sapiens__NP_000448.3__HNF4A(1-375)(S87A_K106R_K108R_K126R_K 127R)
  source 1..1128: mol_type = other RNA
atgcgcctctccaagaccctcgtcgacatggacatggccgactactccgccgccctcgaccccgcctacaccaccctcgagttcgagaacgtccaggtcctcaccatgggcaacgacacctccccctccgagggcaccaacctcaacgcccccaactccctcggcgtctccgccctctgcgccatctgcggcgaccgcgccaccggcaagcactacggcgcctcctcctgcgacggctgcaagggcttcttccgccgcgccgtccgcaagaaccacatgtactcctgccgcttctcccgccagtgcgtcgtcgaccgcgaccgccgcaaccagtgccgctactgccgcctcaagaagtgcttccgcgccggcatgcgccgcgaggccgtccagaacgagcgcgaccgcatctccacccgccgctcctcctacgaggactcctccctcccctccatcaacgccctcctccaggccgaggtcctctcccgccagatcacctcccccgtctccggcatcaacggcgacatccgcgccaagaagatcgcctccatcgccgacgtctgcgagtccatgaaggagcagctcctcgtcctcgtcgagtgggccaagtacatccccgccttctgcgagctccccctcgacgaccaggtcgccctcctccgcgcccacgccggcgagcacctcctcctcggcgccaccaagcgctccatggtcttcaaggacgtcctcctcctcggcaacgactacatcgtcccccgccactgccccgagctcgccgagatgtcccgcgtctccatccgcatcctcgacgagctcgtcctccccttccaggagctccagatcgacgacaacgagtacgcctacctcaaggccatcatcttcttcgaccccgacgccaagggcctctccgaccccggcaagatcaagcgcctccgctcccaggtccaggtctccctcgaggactacatcaacgaccgccagtacgactcccgcggccgcttcggcgagctcctcctcctcctccccaccctccagtccatcacctggcagatgatcgagcagatccagttcatcaagctcttcggcatggccaagatcgacaacctcctccaggagatgctcctctga

SEQ ID NO: 829 - RNA, 1128 nt, synthetic construct; identical to SEQ ID NO: 827
  misc_feature 1..1128: note = CDS (opt2) from Homo sapiens__NP_000448.3__HNF4A(1-375)(S87A_K106R_K108R_K126R_K 127R_S142A_S143A_S148A_T166A_S167A_S313A_S378A_T429A_T432A_ S436A_K458R_S461A)
  source 1..1128: mol_type = other RNA

SEQ ID NO: 830 - RNA, 1128 nt, synthetic construct; identical to SEQ ID NO: 827
  misc_feature 1..1128: note = CDS (opt2) from Homo sapiens__NP_000448.3__HNF4A(1-375)(S87A_K106R_K108R_K126R_K 127R_S142A_S143A_S148A_T166A_S167A_S313A_S378A_T429A_T432A_ S436A_K458R_S461E)
  source 1..1128: mol_type = other RNA

SEQ ID NO: 831 - RNA, 1128 nt, synthetic construct
  misc_feature 1..1128: note = CDS (opt2) from Homo sapiens__NP_000448.3__HNF4A(1-375)(S87A_K106R_K108R_K126R_K 127R_S142A_S143A_S148E_T166A_S167E_S313A_S378E_T429E_T432E_ S436E_K458R_S461E)
  source 1..1128: mol_type = other RNA
atgcgcctctccaagaccctcgtcgacatggacatggccgactactccgccgccctcgaccccgcctacaccaccctcgagttcgagaacgtccaggtcctcaccatgggcaacgacacctccccctccgagggcaccaacctcaacgcccccaactccctcggcgtctccgccctctgcgccatctgcggcgaccgcgccaccggcaagcactacggcgcctcctcctgcgacggctgcaagggcttcttccgccgcgccgtccgcaagaaccacatgtactcctgccgcttctcccgccagtgcgtcgtcgaccgcgaccgccgcaaccagtgccgctactgccgcctcaagaagtgcttccgcgccggcatgcgccgcgaggccgtccagaacgagcgcgaccgcatctccacccgccgcgccgcctacgaggactccgagctcccctccatcaacgccctcctccaggccgaggtcctctcccgccagatcgccgagcccgtctccggcatcaacggcgacatccgcgccaagaagatcgcctccatcgccgacgtctgcgagtccatgaaggagcagctcctcgtcctcgtcgagtgggccaagtacatccccgccttctgcgagctccccctcgacgaccaggtcgccctcctccgcgcccacgccggcgagcacctcctcctcggcgccaccaagcgctccatggtcttcaaggacgtcctcctcctcggcaacgactacatcgtcccccgccactgccccgagctcgccgagatgtcccgcgtctccatccgcatcctcgacgagctcgtcctccccttccaggagctccagatcgacgacaacgagtacgcctacctcaaggccatcatcttcttcgaccccgacgccaagggcctctccgaccccggcaagatcaagcgcctccgcgcccaggtccaggtctccctcgaggactacatcaacgaccgccagtacgactcccgcggccgcttcggcgagctcctcctcctcctccccaccctccagtccatcacctggcagatgatcgagcagatccagttcatcaagctcttcggcatggccaagatcgacaacctcctccaggagatgctcctctga

SEQ ID NO: 832 - RNA, 1128 nt, synthetic construct
  misc_feature 1..1128: note = CDS (opt2) from Homo sapiens__NP_000448.3__HNF4A(1-375)(S87A_K106R_K108R_K126R_K 127R_S142A_S143A_S148A_T166A_S167A_K179R_K180R_S313A_S378A_ T429A_T432A_S436A_K458R_S461E)
  source 1..1128: mol_type = other RNA
atgcgcctctccaagaccctcgtcgacatggacatggccgactactccgccgccctcgaccccgcctacaccaccctcgagttcgagaacgtccaggtcctcaccatgggcaacgacacctccccctccgagggcaccaacctcaacgcccccaactccctcggcgtctccgccctctgcgccatctgcggcgaccgcgccaccggcaagcactacggcgcctcctcctgcgacggctgcaagggcttcttccgccgcgccgtccgcaagaaccacatgtactcctgccgcttctcccgccagtgcgtcgtcgaccgcgaccgccgcaaccagtgccgctactgccgcctcaagaagtgcttccgcgccggcatgcgccgcgaggccgtccagaacgagcgcgaccgcatctccacccgccgcgccgcctacgaggactccgccctcccctccatcaacgccctcctccaggccgaggtcctctcccgccagatcgccgcccccgtctccggcatcaacggcgacatccgcgcccgccgcatcgcctccatcgccgacgtctgcgagtccatgaaggagcagctcctcgtcctcgtcgagtgggccaagtacatccccgccttctgcgagctccccctcgacgaccaggtcgccctcctccgcgcccacgccggcgagcacctcctcctcggcgccaccaagcgctccatggtcttcaaggacgtcctcctcctcggcaacgactacatcgtcccccgccactgccccgagctcgccgagatgtcccgcgtctccatccgcatcctcgacgagctcgtcctccccttccaggagctccagatcgacgacaacgagtacgcctacctcaaggccatcatcttcttcgaccccgacgccaagggcctctccgaccccggcaagatcaagcgcctccgcgcccaggtccaggtctccctcgaggactacatcaacgaccgccagtacgactcccgcggccgcttcggcgagctcctcctcctcctccccaccctccagtccatcacctggcagatgatcgagcagatccagttcatcaagctcttcggcatggccaagatcgacaacctcctccaggagatgctcctctga

SEQ ID NO: 833 - RNA, 1128 nt, synthetic construct
  misc_feature 1..1128: note = CDS (opt2) from Homo sapiens__NP_000448.3__HNF4A(1-375)(S87A_K106R_K108R_K126R_K 127R_S142A_S143A_S148A_T166A_S167A_K300R_K307R_K309R_S313A_ S378A_T429A_T432A_S436A_K458R_S461E)
  source 1..1128: mol_type = other RNA
atgcgcctctccaagaccctcgtcgacatggacatggccgactactccgccgccctcgaccccgcctacaccaccctcgagttcgagaacgtccaggtcctcaccatgggcaacgacacctccccctccgagggcaccaacctcaacgcccccaactccctcggcgtctccgccctctgcgccatctgcggcgaccgcgccaccggcaagcactacggcgcctcctcctgcgacggctgcaagggcttcttccgccgcgccgtccgcaagaaccacatgtactcctgccgcttctcccgccagtgcgtcgtcgaccgcgaccgccgcaaccagtgccgctactgccgcctcaagaagtgcttccgcgccggcatgcgccgcgaggccgtccagaacgagcgcgaccgcatctccacccgccgcgccgcctacgaggactccgccctcccctccatcaacgccctcctccaggccgaggtcctctcccgccagatcgccgcccccgtctccggcatcaacggcgacatccgcgccaagaagatcgcctccatcgccgacgtctgcgagtccatgaaggagcagctcctcgtcctcgtcgagtgggccaagtacatccccgccttctgcgagctccccctcgacgaccaggtcgccctcctccgcgcccacgccggcgagcacctcctcctcggcgccaccaagcgctccatggtcttcaaggacgtcctcctcctcggcaacgactacatcgtcccccgccactgccccgagctcgccgagatgtcccgcgtctccatccgcatcctcgacgagctcgtcctccccttccaggagctccagatcgacgacaacgagtacgcctacctcaaggccatcatcttcttcgaccccgacgcccgcggcctctccgaccccggccgcatccgccgcctccgcgcccaggtccaggtctccctcgaggactacatcaacgaccgccagtacgactcccgcggccgcttcggcgagctcctcctcctcctccccaccctccagtccatcacctggcagatgatcgagcagatccagttcatcaagctcttcggcatggccaagatcgacaacctcctccaggagatgctcctctga

SEQ ID NO: 834 - RNA, 1128 nt, synthetic construct; identical to SEQ ID NO: 827
  misc_feature 1..1128: note = CDS (opt2) from Homo sapiens__NP_000448.3__HNF4A(1-375)(S87A_K106R_K108R_K126R_K 127R_S142A_S143A_S148A_T166A_S167A_S313A_S378A_T429A_T432A_ S436A_K447R_K458R_S461E_K470R)
  source 1..1128: mol_type = other RNA

SEQ ID NO: 835 - RNA, 1128 nt, synthetic construct
  misc_feature 1..1128: note = CDS (opt2) from Homo sapiens__NP_000448.3__HNF4A(1-375)(S87A_K106R_K108R_K126R_K 127R_S142A_S143A_S148A_T166A_S167A_K179R_K180R_K234R_K300R_ K307R_K309R_S313A_S378A_T429A_T432A_S436A_K447R_K458R_S461E _K470R)
  source 1..1128: mol_type = other RNA
atgcgcctctccaagaccctcgtcgacatggacatggccgactactccgccgccctcgaccccgcctacaccaccctcgagttcgagaacgtccaggtcctcaccatgggcaacgacacctccccctccgagggcaccaacctcaacgcccccaactccctcggcgtctccgccctctgcgccatctgcggcgaccgcgccaccggcaagcactacggcgcctcctcctgcgacggctgcaagggcttcttccgccgcgccgtccgcaagaaccacatgtactcctgccgcttctcccgccagtgcgtcgtcgaccgcgaccgccgcaaccagtgccgctactgccgcctcaagaagtgcttccgcgccggcatgcgccgcgaggccgtccagaacgagcgcgaccgcatctccacccgccgcgccgcctacgaggactccgccctcccctccatcaacgccctcctccaggccgaggtcctctcccgccagatcgccgcccccgtctccggcatcaacggcgacatccgcgcccgccgcatcgcctccatcgccgacgtctgcgagtccatgaaggagcagctcctcgtcctcgtcgagtgggccaagtacatccccgccttctgcgagctccccctcgacgaccaggtcgccctcctccgcgcccacgccggcgagcacctcctcctcggcgccacccgccgctccatggtcttcaaggacgtcctcctcctcggcaacgactacatcgtcccccgccactgccccgagctcgccgagatgtcccgcgtctccatccgcatcctcgacgagctcgtcctccccttccaggagctccagatcgacgacaacgagtacgcctacctcaaggccatcatcttcttcgaccccgacgcccgcggcctctccgaccccggccgcatccgccgcctccgcgcccaggtccaggtctccctcgaggactacatcaacgaccgccagtacgactcccgcggccgcttcggcgagctcctcctcctcctccccaccctccagtccatcacctggcagatgatcgagcagatccagttcatcaagctcttcggcatggccaagatcgacaacctcctccaggagatgctcctctga

SEQ ID NO: 836 - RNA, 1128 nt, synthetic construct
  misc_feature 1..1128: note = CDS (opt2) from Homo sapiens__NP_000448.3__HNF4A(1-375)(S87A_S95A_S99A_K106R_K10 8R_K126R_K127R_S142A_S143A_S148A_T166A_S167A_S313A_S378A_T4 29A_T432A_S436A_K458R_S461E)
  source 1..1128: mol_type = other RNA
atgcgcctctccaagaccctcgtcgacatggacatggccgactactccgccgccctcgaccccgcctacaccaccctcgagttcgagaacgtccaggtcctcaccatgggcaacgacacctccccctccgagggcaccaacctcaacgcccccaactccctcggcgtctccgccctctgcgccatctgcggcgaccgcgccaccggcaagcactacggcgcctcctcctgcgacggctgcaagggcttcttccgccgcgccgtccgcaagaaccacatgtacgcctgccgcttcgcccgccagtgcgtcgtcgaccgcgaccgccgcaaccagtgccgctactgccgcctcaagaagtgcttccgcgccggcatgcgccgcgaggccgtccagaacgagcgcgaccgcatctccacccgccgcgccgcctacgaggactccgccctcccctccatcaacgccctcctccaggccgaggtcctctcccgccagatcgccgcccccgtctccggcatcaacggcgacatccgcgccaagaagatcgcctccatcgccgacgtctgcgagtccatgaaggagcagctcctcgtcctcgtcgagtgggccaagtacatccccgccttctgcgagctccccctcgacgaccaggtcgccctcctccgcgcccacgccggcgagcacctcctcctcggcgccaccaagcgctccatggtcttcaaggacgtcctcctcctcggcaacgactacatcgtcccccgccactgccccgagctcgccgagatgtcccgcgtctccatccgcatcctcgacgagctcgtcctccccttccaggagctccagatcgacgacaacgagtacgcctacctcaaggccatcatcttcttcgaccccgacgccaagggcctctccgaccccggcaagatcaagcgcctccgcgcccaggtccaggtctccctcgaggactacatcaacgaccgccagtacgactcccgcggccgcttcggcgagctcctcctcctcctccccaccctccagtccatcacctggcagatgatcgagcagatccagttcatcaagctcttcggcatggccaagatcgacaacctcctccaggagatgctcctctga

SEQ ID NO: 837 - RNA, 1128 nt, synthetic construct
  misc_feature 1..1128: note = CDS (opt2) from Homo sapiens__NP_000448.3__HNF4A(1-375)(S87A_K106R_K108R_K126R_K 127R_S138A_T139A_S142A_S143A_S148A_T166A_S167A_S313A_S378A_ T429A_T432A_S436A_K458R_S461E)
  source 1..1128: mol_type = other RNA
atgcgcctctccaagaccctcgtcgacatggacatggccgactactccgccgccctcgaccccgcctacaccaccctcgagttcgagaacgtccaggtcctcaccatgggcaacgacacctccccctccgagggcaccaacctcaacgcccccaactccctcggcgtctccgccctctgcgccatctgcggcgaccgcgccaccggcaagcactacggcgcctcctcctgcgacggctgcaagggcttcttccgccgcgccgtccgcaagaaccacatgtactcctgccgcttctcccgccagtgcgtcgtcgaccgcgaccgccgcaaccagtgccgctactgccgcctcaagaagtgcttccgcgccggcatgcgccgcgaggccgtccagaacgagcgcgaccgcatcgccgcccgccgcgccgcctacgaggactccgccctcccctccatcaacgccctcctccaggccgaggtcctctcccgccagatcgccgcccccgtctccggcatcaacggcgacatccgcgccaagaagatcgcctccatcgccgacgtctgcgagtccatgaaggagcagctcctcgtcctcgtcgagtgggccaagtacatccccgccttctgcgagctccccctcgacgaccaggtcgccctcctccgcgcccacgccggcgagcacctcctcctcggcgccaccaagcgctccatggtcttcaaggacgtcctcctcctcggcaacgactacatcgtcccccgccactgccccgagctcgccgagatgtcccgcgtctccatccgcatcctcgacgagctcgtcctccccttccaggagctccagatcgacgacaacgagtacgcctacctcaaggccatcatcttcttcgaccccgacgccaagggcctctccgaccccggcaagatcaagcgcctccgcgcccaggtccaggtctccctcgaggactacatcaacgaccgccagtacgactcccgcggccgcttcggcgagctcctcctcctcctccccaccctccagtccatcacctggcagatgatcgagcagatccagttcatcaagctcttcggcatggccaagatcgacaacctcctccaggagatgctcctctga

SEQ ID NO: 838 - RNA, 1128 nt, synthetic construct
  misc_feature 1..1128: note = CDS (opt2) from Homo sapiens__NP_000448.3__HNF4A(1-375)(S87A_S95A_S99A_K106R_K10 8R_K126R_K127R_S138A_T139A_S142A_S143A_S148A_T166A_S167A_S3 13A_S378A_T429A_T432A_S436A_K458R_S461E)
  source 1..1128: mol_type = other RNA
atgcgcctctccaagaccctcgtcgacatggacatggccgactactccgccgccctcgaccccgcctacaccaccctcgagttcgagaacgtccaggtcctcaccatgggcaacgacacctccccctccgagggcaccaacctcaacgcccccaactccctcggcgtctccgccctctgcgccatctgcggcgaccgcgccaccggcaagcactacggcgcctcctcctgcgacggctgcaagggcttcttccgccgcgccgtccgcaagaaccacatgtacgcctgccgcttcgcccgccagtgcgtcgtcgaccgcgaccgccgcaaccagtgccgctactgccgcctcaagaagtgcttccgcgccggcatgcgccgcgaggccgtccagaacgagcgcgaccgcatcgccgcccgccgcgccgcctacgaggactccgccctcccctccatcaacgccctcctccaggccgaggtcctctcccgccagatcgccgcccccgtctccggcatcaacggcgacatccgcgccaagaagatcgcctccatcgccgacgtctgcgagtccatgaaggagcagctcctcgtcctcgtcgagtgggccaagtacatccccgccttctgcgagctccccctcgacgaccaggtcgccctcctccgcgcccacgccggcgagcacctcctcctcggcgccaccaagcgctccatggtcttcaaggacgtcctcctcctcggcaacgactacatcgtcccccgccactgccccgagctcgccgagatgtcccgcgtctccatccgcatcctcgacgagctcgtcctccccttccaggagctccagatcgacgacaacgagtacgcctacctcaaggccatcatcttcttcgaccccgacgccaagggcctctccgaccccggcaagatcaagcgcctccgcgcccaggtccaggtctccctcgaggactacatcaacgaccgccagtacgactcccgcggccgcttcggcgagctcctcctcctcctccccaccctccagtccatcacctggcagatgatcgagcagatccagttcatcaagctcttcggcatggccaagatcgacaacctcctccaggagatgctcctctga

SEQ ID NO: 839 - RNA, 1128 nt, synthetic construct
  misc_feature 1..1128: note = CDS (opt3) from Homo sapiens__NP_000448.3__HNF4A(1-375)
  source 1..1128: mol_type = other RNA
atgagactgagcaagaccctcgtggacatggatatggccgactactccgctgcacttgatcccgcctatacaactctggagttcgaaaacgtccaggttttgacgatgggcaatgacacctctccttcagaggggacaaacttaaatgcgccaaacagtctgggagtgagcgctctatgcgccatctgtggtgatagggcaactggcaaacactacggggcctcctcttgcgacggatgtaagggctttttccggcgctcggtacgtaaaaatcatatgtattcatgccgatttagcagacaatgtgtggtcgataaggacaaaaggaaccagtgccggtactgtcgcctcaagaagtgcttcagagctggtatgaaaaaggaagcagtgcagaatgagagggatcggattagtacccgccgatcctcttatgaagacagctccctgccgtcaataaacgcccttctgcaggctgaggttttgagtagacaaatcacaagccccgtgtctgggattaatggagatatcagggccaaaaagattgcgtccatcgcagacgtctgtgagtcaatgaaagaacagctcctggtgctggtagagtgggccaagtacatacctgctttttgcgaactcccattagatgaccaggttgccctgcttcgggcacacgctggcgagcatttgctgctaggcgccaccaagcgtagcatggtgttcaaagacgtcctcctgcttgggaacgattatatcgtgccccgccactgtcctgagctggcggaaatgagtagagtgtctattaggatcttggacgagctcgtcctgccatttcaggaattacaaattgatgacaatgagtacgcctacctgaaggcaatcatattctttgatcccgacgctaaaggactctccgatcctggtaagattaaacggcttcgaagccaggttcaggtgtcgctggaagactatatcaacgatcgccagtacgactctagaggcaggttcggggagttgctactgctcctgccaactcttcaatccattacatggcagatgatcgagcagatccaatttattaagctgttcggaatggccaaaatagataatttgctccaggaaatgctgttatga

SEQ ID NO: 840 - RNA, 1128 nt, synthetic construct
  misc_feature 1..1128: note = CDS (opt3) from Homo sapiens__NP_000448.3__HNF4A(1-375)(S313A)
  source 1..1128: mol_type = other RNA
atgagactgagcaagaccctcgtggacatggatatggccgactactccgctgcacttgatcccgcctatacaactctggagttcgaaaacgtccaggttttgacgatgggcaatgacacctctccttcagaggggacaaacttaaatgcgccaaacagtctgggagtgagcgctctatgcgccatctgtggtgatagggcaactggcaaacactacggggcctcctcttgcgacggatgtaagggctttttccggcgctcggtacgtaaaaatcatatgtattcatgccgatttagcagacaatgtgtggtcgataaggacaaaaggaaccagtgccggtactgtcgcctcaagaagtgcttcagagctggtatgaaaaaggaagcagtgcagaatgagagggatcggattagtacccgccgatcctcttatgaagacagctccctgccgtcaataaacgcccttctgcaggctgaggttttgagtagacaaatcacaagccccgtgtctgggattaatggagatatcagggccaaaaagattgcgtccatcgcagacgtctgtgagtcaatgaaagaacagctcctggtgctggtagagtgggccaagtacatacctgctttttgcgaactcccattagatgaccaggttgccctgcttcgggcacacgctggcgagcatttgctgctaggcgccaccaagcgtagcatggtgttcaaagacgtcctcctgcttgggaacgattatatcgtgccccgccactgtcctgagctggcggaaatgagtagagtgtctattaggatcttggacgagctcgtcctgccatttcaggaattacaaattgatgacaatgagtacgcctacctgaaggcaatcatattctttgatcccgacgctaaaggactctccgatcctggtaagattaaacggcttcgagcccaggttcaggtgagcctggaagactatatcaacgatcgccagtacgactcgagaggcaggttcggggagttgctactgctcctgccaactcttcaatctattacatggcagatgatcgagcagatccaatttattaagctgttcggaatggctaaaatagataatttgctccaggaaatgctgttatga

SEQ ID NO: 841 - RNA, 1128 nt, synthetic construct
  misc_feature 1..1128: note = CDS (opt3) from Homo sapiens__NP_000448.3__HNF4A(1-375)(S313E)
  source 1..1128: mol_type = other RNA
atgagactgagcaagaccctcgtggacatggatatggccgactactccgctgcacttgatcccgcctatacaactctggagttcgaaaacgtccaggttttgacgatgggcaatgacacctctccttcagaggggacaaacttaaatgcgccaaacagtctgggagtgagcgctctatgcgccatctgtggtgatagggcaactggcaaacactacggggcctcctcttgcgacggatgtaagggctttttccggcgctcggtacgtaaaaatcatatgtattcatgccgatttagcagacaatgtgtggtcgataaggacaaaaggaaccagtgccggtactgtcgcctcaagaagtgcttcagagctggtatgaaaaaggaagcagtgcagaatgagagggatcggattagtacccgccgatcctcttatgaagacagctccctgccgtcaataaacgcccttctgcaggctgaggttttgagtagacaaatcacaagccccgtgtctgggattaatggagatatcagggccaaaaagattgcgtccatcgcagacgtctgtgagtcaatgaaagaacagctcctggtgctggtagagtgggccaagtacatacctgctttttgcgaactcccattagatgaccaggttgccctgcttcgggcacacgctggcgagcatttgctgctaggcgccaccaagcgtagcatggtgttcaaagacgtcctcctgcttgggaacgattatatcgtgccccgccactgtcctgagctggcggaaatgagtagagtgtctattaggatcttggacgagctcgtcctgccatttcaggaattacaaattgatgacaatgagtacgcctacctgaaggcaatcatattctttgatcccgacgctaaaggactctccgatcctggtaagattaaacggcttcgagaacaggttcaggtgagcctggaggactatatcaacgatcgccagtacgactcgagaggcaggttcggggagttgctactgctcctgccaactcttcaatctattacatggcagatgatcgaacagatccaatttattaagctgttcggaatggccaaaatagataatttgctccaggagatgctgttatga

SEQ ID NO: 842 - RNA, 1128 nt, synthetic construct
  misc_feature 1..1128: note = CDS (opt3) from Homo sapiens__NP_000448.3__HNF4A(1-375)(S142A_S143A)
  source 1..1128: mol_type = other RNA
atgagactgagcaagaccctcgtggacatggatatggccgactactccgctgcacttgatcccgcctatacaactctggagttcgaaaacgtccaggttttgacgatgggcaatgacacctctccttcagaggggacaaacttaaatgcgccaaacagtctgggagtgagcgctctatgcgccatctgtggtgatagggcaactggcaaacactacggggcctcctcttgcgacggatgtaagggctttttccggcgctcggtacgtaaaaatcatatgtattcatgccgatttagcagacaatgtgtggtcgataaggacaaaaggaaccagtgccggtactgtcgcctcaagaagtgcttcagagctggtatgaaaaaggaagcagtgcagaatgagagggatcggattagtacccgccgagccgcttatgaagactcctctctgccgagcataaacgcccttctgcaggcggaggttttgtccagacaaatcacatcacccgtgagtgggattaatggagatatcagggccaaaaagattgcaagcatcgctgacgtctgtgagtctatgaaagaacagctcctggtgctggtagagtgggccaagtacatacctgcattttgcgaactcccattagatgaccaggttgctctgcttcgggcccacgcgggcgagcatttgctgctaggcgccaccaagcgttccatggtgttcaaagacgtcctcctgcttgggaacgattatatcgtgccccgccactgtcctgagctggcagaaatgtcaagagtgagcattaggatcttggacgagctcgtcctgccatttcaggaattacaaattgatgacaatgagtacgcttacctgaaggccatcatattctttgatcccgacgctaaaggactcagtgatcctggtaagattaaacggcttcgatctcaggttcaggtgtccctggaagactatatcaacgatcgccagtacgacagcagaggcaggttcggggagttgctactgctcctgccaactcttcaatcgattacatggcagatgatcgagcagatccaatttattaagctgttcggaatggccaaaatagataatttgctccaggaaatgctgttatga

SEQ ID NO: 843 - RNA, 1128 nt, synthetic construct
  misc_feature 1..1128: note = CDS (opt3) from Homo sapiens__NP_000448.3__HNF4A(1-375)(S142E_S143E)
  source 1..1128: mol_type = other RNA
atgagactgagcaagaccctcgtggacatggatatggccgactactccgctgcacttgatcccgcctatacaactctggagttcgaaaacgtccaggttttgacgatgggcaatgacacctctccttcagaggggacaaacttaaatgcgccaaacagtctgggagtgagcgctctatgcgccatctgtggtgatagggcaactggcaaacactacggggcctcctcttgcgacggatgtaagggctttttccggcgctcggtacgtaaaaatcatatgtattcatgccgatttagcagacaatgtgtggtcgataaggacaaaaggaaccagtgccggtactgtcgcctcaagaagtgcttcagagctggtatgaaaaaggaagcagtgcagaatgagagggatcggattagtacccgccgagaagagtatgaggactcctctctgccgagcataaacgcccttctgcaggctgaagttttgtccagacaaatcacatcacccgtgagtgggattaatggagatatcagggccaaaaagattgcgagcatcgcagacgtctgtgagtctatgaaagaacagctcctggtgctggtagagtgggccaagtacatacctgctttttgcgagctcccattagatgaccaggttgccctgcttcgggcacacgctggcgaacatttgctgctaggcgccaccaagcgttccatggtgttcaaagacgtcctcctgcttgggaacgattatatcgtgccccgccactgtcctgagctggcggaaatgtcaagagtgagcattaggatcttggacgagctcgtcctgccatttcaggaattacaaattgatgacaatgagtacgcctacctgaaggcaatcatattctttgatcccgacgctaaaggactcagtgatcctggtaagattaaacggcttcgatctcaggttcaggtgtccctggaggactatatcaacgatcgccagtacgacagcagaggcaggttcggggaattgctactgctcctgccaactcttcaatcgattacatggcagatgatcgagcagatccaatttattaagctgttcggaatggccaaaatagataatttgctccaggaaatgctgttatga

SEQ ID NO: 844 - RNA, 1128 nt, synthetic construct
  misc_feature 1..1128: note = CDS (opt3) from Homo sapiens__NP_000448.3__HNF4A(1-375)(S143A)
  source 1..1128: mol_type = other RNA
atgagactgagcaagaccctcgtggacatggatatggccgactactccgctgcacttgatcccgcctatacaactctggagttcgaaaacgtccaggttttgacgatgggcaatgacacctctccttcagaggggacaaacttaaatgcgccaaacagtctgggagtgagcgctctatgcgccatctgtggtgatagggcaactggcaaacactacggggcctcctcttgcgacggatgtaagggctttttccggcgctcggtacgtaaaaatcatatgtattcatgccgatttagcagacaatgtgtggtcgataaggacaaaaggaaccagtgccggtactgtcgcctcaagaagtgcttcagagctggtatgaaaaaggaagcagtgcagaatgagagggatcggattagtacccgccgatccgcctatgaagactctagcctgccgtccataaacgcccttctgcaggccgaggttttgtcaagacaaatcacaagtcccgtgagcgggattaatggagatatcagggcgaaaaagattgcatctatcgccgacgtctgtgagtccatgaaagaacagctcctggtgctggtagagtgggctaagtacatacctgccttttgcgaactcccattagatgaccaggttgcactgcttcgggctcacgccggcgagcatttgctgctaggcgcgaccaagcgttcaatggtgttcaaagacgtcctcctgcttgggaacgattatatcgtgccccgccactgtcctgagctggccgaaatgagcagagtgagtattaggatcttggacgagctcgtcctgccatttcaggaattacaaattgatgacaatgagtacgcatacctgaaggctatcatattctttgatcccgacgccaaaggactctctgatcctggtaagattaaacggcttcgatcccaggttcaggtgagcctggaagactatatcaacgatcgccagtacgactcgagaggcaggttcggggagttgctactgctcctgccaactcttcaatctattacatggcagatgatcgagcagatccaatttattaagctgttcggaatggctaaaatagataatttgctccaggaaatgctgttatga

SEQ ID NO: 845 - RNA, 1128 nt, synthetic construct
  misc_feature 1..1128: note = CDS (opt3) from Homo sapiens__NP_000448.3__HNF4A(1-375)(T166A)
  source 1..1128: mol_type = other RNA
atgagactgagcaagaccctcgtggacatggatatggccgactactccgctgcacttgatcccgcctatacaactctggagttcgaaaacgtccaggttttgacgatgggcaatgacacctctccttcagaggggacaaacttaaatgcgccaaacagtctgggagtgagcgctctatgcgccatctgtggtgatagggcaactggcaaacactacggggcctcctcttgcgacggatgtaagggctttttccggcgctcggtacgtaaaaatcatatgtattcatgccgatttagcagacaatgtgtggtcgataaggacaaaaggaaccagtgccggtactgtcgcctcaagaagtgcttcagagctggtatgaaaaaggaagcagtgcagaatgagagggatcggattagtacccgccgatcctcttatgaagacagctccctgccgtcaataaacgcccttctgcaggctgaggttttgagtagacaaatcgccagccccgtgtctgggattaatggagatatcagggcgaaaaagattgcatccatcgccgacgtctgtgagtcaatgaaagaacagctcctggtgctggtagagtgggctaagtacatacctgccttttgcgaactcccattagatgaccaggttgcactgcttcgggctcacgccggcgagcatttgctgctaggcgcgacaaagcgtagcatggtgttcaaagacgtcctcctgcttgggaacgattatatcgtgccccgccactgtcctgagctggccgaaatgagtagagtgtctattaggatcttggacgagctcgtcctgccatttcaggaattacaaattgatgacaatgagtacgcatacctgaaggctatcatattctttgatcccgacgccaaaggactctccgatcctggtaagattaaacggcttcgaagccaggttcaggtgtcgctggaagactatatcaacgatcgccagtacgactctagaggcaggttcggggagttgctactgctcctgccaacccttcaatccattacttggcagatgatcgagcagatccaatttattaagctgttcggaatggctaaaatagataatttgctccaggaaatgctgttatga

SEQ ID NO: 846 - RNA, 1128 nt, synthetic construct
  misc_feature 1..1128: note = CDS (opt3) from Homo sapiens__NP_000448.3__HNF4A(1-375)(S167E)
  source 1..1128: mol_type = other RNA
atgagactgagcaagaccctcgtggacatggatatggccgactactccgctgcacttgatcccgcctatacaactctggagttcgaaaacgtccaggttttgacgatgggcaatgacacctctccttcagaggggacaaacttaaatgcgccaaacagtctgggagtgagcgctctatgcgccatctgtggtgatagggcaactggcaaacactacggggcctcctcttgcgacggatgtaagggctttttccggcgctcggtacgtaaaaatcatatgtattcatgccgatttagcagacaatgtgtggtcgataaggacaaaaggaaccagtgccggtactgtcgcctcaagaagtgcttcagagctggtatgaaaaaggaagcagtgcagaatgagagggatcggattagtacccgccgatcctcttatgaagacagctccctgccgtcaataaacgcccttctgcaggctgaggttttgagtagacaaatcacagagcccgtgagcgggattaatggagatatcagggccaaaaagattgcgtctatcgcagacgtctgtgaatccatgaaagagcagctcctggtgctggtagaatgggccaagtacatacctgctttttgcgagctcccattagatgaccaggttgccctgcttcgggcacacgctggcgagcatttgctgctaggcgccaccaagcgttcaatggtgttcaaagacgtcctcctgcttgggaacgattatatcgtgccccgccactgtcctgaactggcggagatgagcagagtgagtattaggatcttggacgaactcgtcctgccatttcaggagttacaaattgatgacaatgaatacgcctacctgaaggcaatcatattctttgatcccgacgctaaaggactctctgatcctggtaagattaaacggcttcgatcccaggttcaggtgagcctggaggactatatcaacgatcgccagtacgactcgagaggcaggttcggggagttgctactgctcctgccaactcttcaatctattacatggcagatgatcgaacagatccaatttattaagctgttcggaatggccaaaatagataatttgctccaggagatgctgttatga

SEQ ID NO: 847 - RNA, 1128 nt, synthetic construct
  misc_feature 1..1128: note = CDS (opt3) from Homo sapiens__NP_000448.3__HNF4A(1-375)(S167A)
  source 1..1128: mol_type = other RNA
atgagactgagcaagaccctcgtggacatggatatggccgactactccgctgcacttgatcccgcctatacaactctggagttcgaaaacgtccaggttttgacgatgggcaatgacacctctccttcagaggggacaaacttaaatgcgccaaacagtctgggagtgagcgctctatgcgccatctgtggtgatagggcaactggcaaacactacggggcctcctcttgcgacggatgtaagggctttttccggcgctcggtacgtaaaaatcatatgtattcatgccgatttagcagacaatgtgtggtcgataaggacaaaaggaaccagtgccggtactgtcgcctcaagaagtgcttcagagctggtatgaaaaaggaagcagtgcagaatgagagggatcggattagtacccgccgatcctcttatgaagacagctccctgccgtcaataaacgcccttctgcaggctgaggttttgagtagacaaatcacagcccccgtgagcgggattaatggagatatcagggcgaaaaagattgcatctatcgccgacgtctgtgagtccatgaaagaacagctcctggtgctggtagagtgggctaagtacatacctgccttttgcgaactcccattagatgaccaggttgcactgcttcgggctcacgccggcgagcatttgctgctaggcgcgaccaagcgttcaatggtgttcaaagacgtcctcctgcttgggaacgattatatcgtgccccgccactgtcctgagctggccgaaatgagcagagtgagtattaggatcttggacgagctcgtcctgccatttcaggaattacaaattgatgacaatgagtacgcatacctgaaggctatcatattctttgatcccgacgccaaaggactctctgatcctggtaagattaaacggcttcgatcccaggttcaggtgagcctggaagactatatcaacgatcgccagtacgactcgagaggcaggttcggggagttgctactgctcctgccaactcttcaatctattacatggcagatgatcgagcagatccaatttattaagctgttcggaatggctaaaatagataatttgctccaggaaatgctgttatga

SEQ ID NO: 848 - RNA, 1128 nt, synthetic construct; identical to SEQ ID NO: 847
  misc_feature 1..1128: note = CDS (opt3) from Homo sapiens__NP_000448.3__HNF4A(1-375)(S167A_S378A_T429A_T432A_ S436A)
  source 1..1128: mol_type = other RNA

SEQ ID NO: 849 - RNA, 1128 nt, synthetic construct; identical to SEQ ID NO: 846
  misc_feature 1..1128: note = CDS (opt3) from Homo sapiens__NP_000448.3__HNF4A(1-375)(S167E_S378E_T429E_T432E_ S436E)
  source 1..1128: mol_type = other RNA

SEQ ID NO: 850 - RNA, 1128 nt, synthetic construct
  misc_feature 1..1128: note = CDS (opt3) from Homo sapiens__NP_000448.3__HNF4A(1-375)(S87A)
  source 1..1128: mol_type = other RNA
atgagactgagcaagaccctcgtggacatggatatggccgactactccgctgcacttgatcccgcctatacaactctggagttcgaaaacgtccaggttttgacgatgggcaatgacacctctccttcagaggggacaaacttaaatgcgccaaacagtctgggagtgagcgctctatgcgccatctgtggtgatagggcaactggcaaacactacggggcctcctcttgcgacggatgtaagggctttttccggcgcgctgtacgtaaaaatcatatgtattcgtgccgattttcaagacaatgtgtggtcgataaggacaaaaggaaccagtgccggtactgtcgcctcaagaagtgcttcagagcaggtatgaaaaaggaagccgtgcagaatgagagggatcggattagcacccgccgaagttcctatgaagactctagcctgccgtccataaacgcccttctgcaggccgaggttttgtcaagacaaatcacaagtcccgtgagcgggattaatggagatatcagggcgaaaaagattgcatctatcgccgacgtctgtgagtccatgaaagaacagctcctggtgctggtagagtgggctaagtacatacctgccttttgcgaactcccattagatgaccaggttgcactgcttcgggctcacgccggcgagcatttgctgctaggcgcgaccaagcgttcaatggtgttcaaagacgtcctcctgcttgggaacgattatatcgtgccccgccactgtcctgagctggccgaaatgagcagagtgagtattaggatcttggacgagctcgtcctgccatttcaggaattacaaattgatgacaatgagtacgcatacctgaaggctatcatattctttgatcccgacgccaaaggactctctgatcctggtaagattaaacggcttcgatcccaggttcaggtgagcctggaagactatatcaacgatcgccagtacgactcgagaggcaggttcggggagttgctactgctcctgccaactcttcaatctattacatggcagatgatcgagcagatccaatttattaagctgttcggaatggctaaaatagataatttgctccaggaaatgctgttatga

SEQ ID NO: 851 - RNA, 1128 nt, synthetic construct
  misc_feature 1..1128: note = CDS (opt3) from Homo sapiens__NP_000448.3__HNF4A(1-375)(S87E)
  source 1..1128: mol_type = other RNA
atgagactgagcaagaccctcgtggacatggatatggccgactactccgctgcacttgatcccgcctatacaactctggagttcgaaaacgtccaggttttgacgatgggcaatgacacctctccttcagaggggacaaacttaaatgcgccaaacagtctgggagtgagcgctctatgcgccatctgtggtgatagggcaactggcaaacactacggggcctcctcttgcgacggatgtaagggctttttccggcgcgaagtacgtaaaaatcatatgtattcgtgccgattttcaagacaatgtgtggtcgataaggacaaaaggaaccagtgccggtactgtcgcctcaagaagtgcttcagagctggtatgaaaaaggaggcagtgcagaatgaaagggatcggattagcacccgccgaagttcctatgaggactctagcctgccgtccataaacgcccttctgcaggctgaggttttgtcaagacaaatcacaagtcccgtgagcgggattaatggagatatcagggccaaaaagattgcgtctatcgcagacgtctgtgaatccatgaaagagcagctcctggtgctggtagaatgggccaagtacatacctgctttttgcgagctcccattagatgaccaggttgccctgcttcgggcacacgctggcgagcatttgctgctaggcgccaccaagcgttcaatggtgttcaaagacgtcctcctgcttgggaacgattatatcgtgccccgccactgtcctgaactggcggagatgagcagagtgagtattaggatcttggacgaactcgtcctgccatttcaggagttacaaattgatgacaatgaatacgcctacctgaaggcaatcatattctttgatcccgacgctaaaggactctctgatcctggtaagattaaacggcttcgatcccaggttcaggtgagcctggaggactatatcaacgatcgccagtacgactcgagaggcaggttcggggagttgctactgctcctgccaactcttcaatctattacatggcagatgatcgaacagatccaatttattaagctgttcggaatggccaaaatagataatttgctccaggagatgctgttatga

SEQ ID NO: 852 - RNA, 1128 nt, synthetic construct
  misc_feature 1..1128: note = CDS (opt3) from Homo sapiens__NP_000448.3__HNF4A(1-375)(R2V)
  source 1..1128: mol_type = other RNA
atggtgctgagcaagaccctcgtcgacatggatatggccgactactccgctgcacttgatcccgcctatacaactctggagttcgaaaacgttcaggtgttgacgatgggcaatgacacctctccttcagaggggacaaacttaaatgcgccaaacagtctgggagtaagcgctctatgcgccatctgtggtgatagagcaactggcaaacactacggggcctcctcttgcgacggatgtaagggctttttcaggcggtcggtgcgcaaaaatcatatgtattcatgccgatttagccgtcaatgtgtcgtggataaggacaaaagaaaccagtgcaggtactgtcggctcaagaagtgcttccgcgctggtatgaaaaaggaagcagttcagaatgagagagataggattagtacccggcgctcctcttatgaagacagctccctgccgtcaataaacgcccttctgcaggctgaggtgttgagtcgacaaatcacaagccccgtctctgggattaatggagatatcagagccaaaaagattgcgtccatcgcagacgtgtgtgagtcaatgaaagaacagctcctggtactggttgagtgggccaagtacatacctgctttttgcgaactcccattagatgaccaggtggccctgcttagggcacacgctggcgagcatttgctgctaggcgccaccaagcggagcatggtcttcaaagacgtgctcctgcttgggaacgattatatcgtgccccgtcactgtcctgagctggcggaaatgagtcgcgtctctattagaatcttggacgagctcgttctgccatttcaggaattacaaattgatgacaatgagtacgcctacctgaaggcaatcatattctttgatcccgacgctaaaggactctccgatcctggtaagattaaaaggcttcggagccaggtgcaggtatcgctggaagactatatcaacgatcgacagtacgactctcgcggcagattcggggagttgctactgctcctgccaactcttcaatccattacatggcagatgatcgagcagatccaatttattaagctgttcggaatggccaaaatagataatttgctccaggaaatgctgttatga

SEQ ID NO: 853 - RNA, 1128 nt, synthetic construct
  misc_feature 1..1128: note = CDS (opt3) from Homo sapiens__NP_000448.3__HNF4A(1-375)(R2V_K5V)
  source 1..1128: mol_type = other RNA
atggtgctgagcgtcaccctcgttgacatggatatggccgactactccgctgcacttgatcccgcctatacaactctggagttcgaaaacgtgcaggtattgacgatgggcaatgacacctctccttcagaggggacaaacttaaatgcgccaaacagtctgggagtgagcgctctatgcgccatctgtggtgatagagcaactggcaagcactacggggcctcctcttgcgacggatgtaaaggctttttcaggcggtcggtccgcaagaatcatatgtattcatgccgatttagccgtcaatgtgtggttgataaagacaagagaaaccagtgcaggtactgtcggctcaaaaagtgcttccgcgctggtatgaagaaagaagcagtgcagaatgagagagataggattagtacccggcgctcctcttatgaagacagctccctgccgtcaataaacgcccttctgcaggctgaggtcttgagtcgacaaatcacaagccccgtgtctgggattaatggagatatcagagccaagaaaattgcgtccatcgcagacgtatgtgagtcaatgaaggaacagctcctggttctggtggagtgggccaaatacatacctgctttttgcgaactcccattagatgaccaggtcgccctgcttagggcacacgctggcgagcatttgctgctaggcgccaccaagcggagcatggtgttcaaggacgtgctcctgcttgggaacgattatatcgtcccccgtcactgtcctgagctggcggaaatgagtcgcgtttctattagaatcttggacgagctcgtgctgccatttcaggaattacaaattgatgacaatgagtacgcctacctgaaagcaatcatattctttgatcccgacgctaagggactctccgatcctggtaaaattaagaggcttcggagccaggtacaggtgtcgctggaagactatatcaacgatcgacagtacgactctcgcggcagattcggggagttgctactgctcctgccaactcttcaatccattacatggcagatgatcgagcagatccaatttattaaactgttcggaatggccaagatagataatttgctccaggaaatgctgttatga

SEQ ID NO: 854 - RNA, 1128 nt, synthetic construct
  misc_feature 1..1128: note = CDS (opt3) from Homo sapiens__NP_000448.3__HNF4A(1-375)(K179R_K180R)
  source 1..1128: mol_type = other RNA
atgagactgagcaagaccctcgtggacatggatatggccgactactccgctgcacttgatcccgcctatacaactctggagttcgaaaacgtccaggttttgacgatgggcaatgacacctctccttcagaggggacaaacttaaatgcgccaaacagtctgggagtgagcgctctatgcgccatctgtggtgatagggcaactggcaaacactacggggcctcctcttgcgacggatgtaagggctttttccggcgctcggtacgtaaaaatcatatgtattcatgccgatttagcagacaatgtgtggtcgataaggacaaaaggaaccagtgccggtactgtcgcctcaagaagtgcttcagagctggtatgaaaaaggaagcagtgcagaatgagagggatcggattagtacccgccgatcctcttatgaagacagctccctgccgtcaataaacgcccttctgcaggctgaggttttgagtagacaaatcacaagccccgtgtctgggattaatggagatatcagggcccggcgtattgcgtccatcgcagacgtctgtgagtcaatgaaagaacagctcctggtgctggtagagtgggccaagtacatacctgctttttgcgaactcccattagatgaccaggttgccctgcttcgcgcacacgctggcgagcatttgctgctaggcgccaccaaaagaagcatggtgttcaaggacgtcctcctgcttgggaacgattatatcgtgcccaggcactgtcctgagctggcggaaatgagtcgggtgtctattcgaatcttggacgagctcgtcctgccatttcaggaattacaaattgatgacaatgagtacgcctacctgaaggcaatcatattctttgatcccgacgctaaaggactctccgatcctggtaagattaaacgccttagaagccaggttcaggtgtcgctggaagactatatcaacgataggcagtacgactctcggggccgcttcggggagttgctactgctcctgccaactcttcaatccattacatggcagatgatcgagcagatccaatttattaagctgttcggaatggccaaaatagataatttgctccaggaaatgctgttatga

SEQ ID NO: 855 - RNA, 1128 nt, synthetic construct
  misc_feature 1..1128: note = CDS (opt3) from Homo sapiens__NP_000448.3__HNF4A(1-375)(K234R)
  source 1..1128: mol_type = other RNA
atgagactgagcaagaccctcgtggacatggatatggccgactactccgctgcacttgatcccgcctatacaactctggagttcgaaaacgtccaggttttgacgatgggcaatgacacctctccttcagaggggacaaacttaaatgcgccaaacagtctgggagtgagcgctctatgcgccatctgtggtgatagggcaactggcaaacactacggggcctcctcttgcgacggatgtaagggctttttccggcgctcggtacgtaaaaatcatatgtattcatgccgatttagcagacaatgtgtggtcgataaggacaaaaggaaccagtgccggtactgtcgcctcaagaagtgcttcagagctggtatgaaaaaggaagcagtgcagaatgagagggatcggattagtacccgccgatcctcttatgaagacagctccctgccgtcaataaacgcccttctgcaggctgaggttttgagtagacaaatcacaagccccgtgtctgggattaatggagatatcagggccaaaaagattgcgtccatcgcagacgtctgtgagtcaatgaaagaacagctcctggtgctggtagagtgggccaagtacatacctgctttttgcgaactcccattagatgaccaggttgccctgcttcgggcacacgctggcgagcatttgctgctaggcgccacccgtcgcagcatggtgttcaaggacgtcctcctgcttgggaacgattatatcgtgcccagacactgtcctgagctggcggaaatgagtagggtgtctattcggatcttggacgagctcgtcctgccatttcaggaattacaaattgatgacaatgagtacgcctacctgaaagcaatcatattctttgatcccgacgctaagggactctccgatcctggtaaaattaagcgacttcgcagccaggttcaggtgtcgctggaagactatatcaacgatagacagtacgactctaggggccggttcggggagttgctactgctcctgccaactcttcaatccattacatggcagatgatcgagcagatccaatttattaaactgttcggaatggccaagatagataatttgctccaggaaatgctgttatga

SEQ ID NO: 856 - RNA, 1128 nt, synthetic construct
  misc_feature 1..1128: note = CDS (opt3) from Homo sapiens__NP_000448.3__HNF4A(1-375)(K300R)
  source 1..1128: mol_type = other RNA
atgagactgagcaagaccctcgtggacatggatatggccgactactccgctgcacttgatcccgcctatacaactctggagttcgaaaacgtccaggttttgacgatgggcaatgacacctctccttcagaggggacaaacttaaatgcgccaaacagtctgggagtgagcgctctatgcgccatctgtggtgatagggcaactggcaaacactacggggcctcctcttgcgacggatgtaagggctttttccggcgctcggtacgtaaaaatcatatgtattcatgccgatttagcagacaatgtgtggtcgataaggacaaaaggaaccagtgccggtactgtcgcctcaagaagtgcttcagagctggtatgaaaaaggaagcagtgcagaatgagagggatcggattagtacccgccgatcctcttatgaagacagctccctgccgtcaataaacgcccttctgcaggctgaggttttgagtagacaaatcacaagccccgtgtctgggattaatggagatatcagggccaaaaagattgcgtccatcgcagacgtctgtgagtcaatgaaagaacagctcctggtgctggtagagtgggccaagtacatacctgctttttgcgaactcccattagatgaccaggttgccctgcttcgggcacacgctggcgagcatttgctgctaggcgccaccaagcgtagcatggtgttcaaagacgtcctcctgcttgggaacgattatatcgtgccccgccactgtcctgagctggcggaaatgagtagagtgtctattaggatcttggacgagctcgtcctgccatttcaggaattacaaattgatgacaatgagtacgcctacctgaaggcaatcatattctttgatcccgacgctcggggactctccgatcctggtaaaattaagcgacttcgcagccaggttcaggtgtcgctggaagactatatcaacgatagacagtacgactctaggggccggttcggggagttgctactgctcctgccaactcttcaatccattacatggcagatgatcgagcagatccaatttattaaactgttcggaatggccaagatagataatttgctccaggaaatgctgttatga

SEQ ID NO: 857 - RNA, 1128 nt, synthetic construct
  misc_feature 1..1128: note = CDS (opt3) from Homo sapiens__NP_000448.3__HNF4A(1-375)(K300R_K307R_K309R)
  source 1..1128: mol_type = other RNA
atgagactgagcaagaccctcgtggacatggatatggccgactactccgctgcacttgatcccgcctatacaactctggagttcgaaaacgtccaggttttgacgatgggcaatgacacctctccttcagaggggacaaacttaaatgcgccaaacagtctgggagtgagcgctctatgcgccatctgtggtgatagggcaactggcaaacactacggggcctcctcttgcgacggatgtaagggctttttccggcgctcggtacgtaaaaatcatatgtattcatgccgatttagcagacaatgtgtggtcgataaggacaaaaggaaccagtgccggtactgtcgcctcaagaagtgcttcagagctggtatgaaaaaggaagcagtgcagaatgagagggatcggattagtacccgccgatcctcttatgaagacagctccctgccgtcaataaacgcccttctgcaggctgaggttttgagtagacaaatcacaagccccgtgtctgggattaatggagatatcagggccaaaaagattgcgtccatcgcagacgtctgtgagtcaatgaaagaacagctcctggtgctggtagagtgggccaagtacatacctgctttttgcgaactcccattagatgaccaggttgccctgcttcgggcacacgctggcgagcatttgctgctaggcgccaccaagcgtagcatggtgttcaaagacgtcctcctgcttgggaacgattatatcgtgccccgccactgtcctgagctggcggaaatgagtagagtgtctattaggatcttggacgagctcgtcctgccatttcaggaattacaaattgatgacaatgagtacgcctacctgaaggcaatcatattctttgatcccgacgctcggggactctccgatcctggtcgcattcgaagacttaggagccaggttcaggtgtcgctggaagactatatcaacgatcggcagtacgactctcgcggcagattcggggagttgctactgctcctgccaactcttcaatccattacatggcagatgatcgagcagatccaatttattaaactgttcggaatggccaagatagataatttgctccaggaaatgctgttatga

SEQ ID NO: 858 - RNA, 1128 nt, synthetic construct; identical to SEQ ID NO: 839
  misc_feature 1..1128: note = CDS (opt3) from Homo sapiens__NP_000448.3__HNF4A(1-375)(K447R_K470R)
  source 1..1128: mol_type = other RNA

SEQ ID NO: 859 - RNA, 1128 nt, synthetic construct; identical to SEQ ID NO: 839
  misc_feature 1..1128: note = CDS (opt3) from Homo sapiens__NP_000448.3__HNF4A(1-375)(K458R)
  source 1..1128: mol_type = other RNA

SEQ ID NO: 860 - RNA, 1128 nt, synthetic construct
  misc_feature 1..1128: note = CDS (opt3) from Homo sapiens__NP_000448.3__HNF4A(1-375)(K106R_K108R_K126R_K127R)
  source 1..1128: mol_type = other RNA
atgagactgagcaagaccctcgtggacatggatatggccgactactccgctgcacttgatcccgcctatacaactctggagttcgaaaacgtccaggttttgacgatgggcaatgacacctctccttcagaggggacaaacttaaatgcgccaaacagtctgggagtgagcgctctatgcgccatctgtggtgatagggcaactggcaaacactacggggcctcctcttgcgacggatgtaagggctttttccggcgctcggtacgtaaaaatcatatgtattcatgccgatttagcagacaatgtgtggtcgatagggaccggcgcaaccagtgcagatactgtaggctcaagaaatgcttccgggctggtatgcgccgagaagcagtgcagaatgagagagataggattagtacccggcgttcctcttatgaagacagctccctgccgtcaataaacgcccttctgcaggctgaggttttgagtcgccaaatcacaagccccgtgtctgggattaatggagatatcagagccaagaagattgcgtccatcgcagacgtctgtgagtcaatgaaagaacagctcctggtgctggtagagtgggccaagtacatacctgctttttgcgaactcccattagatgaccaggttgccctgcttagggcacacgctggcgagcatttgctgctaggcgccaccaaacggagcatggtgttcaaggacgtcctcctgcttgggaacgattatatcgtgccccgacactgtcctgagctggcggaaatgagtcgcgtgtctattagaatcttggacgagctcgtcctgccatttcaggaattacaaattgatgacaatgagtacgcctacctgaaagcaatcatattctttgatcccgacgctaagggactctccgatcctggtaagattaaaaggcttcggagccaggttcaggtgtcgctggaagactatatcaacgatcgccagtacgactctagaggcaggttcggggagttgctactgctcctgccaactcttcaatccattacatggcagatgatcgagcagatccaatttattaagctgttcggaatggccaaaatagataatttgctccaggaaatgctgttatga

SEQ ID NO: 861 - RNA, 1128 nt, synthetic construct
  misc_feature 1..1128: note = CDS (opt3) from Homo sapiens__NP_000448.3__HNF4A(1-375)(E285Q)
  source 1..1128: mol_type = other RNA
atgagactgagcaagaccctcgtggacatggatatggccgactactccgctgcacttgatcccgcctatacaactctggagttcgaaaacgtccaggttttgacgatgggcaatgacacctctccttcagaggggacaaacttaaatgcgccaaacagtctgggagtgagcgctctatgcgccatctgtggtgatagggcaactggcaaacactacggggcctcctcttgcgacggatgtaagggctttttccggcgctcggtacgtaaaaatcatatgtattcatgccgatttagcagacaatgtgtggtcgataaggacaaaaggaaccagtgccggtactgtcgcctcaagaagtgcttcagagctggtatgaaaaaggaagcagtgcagaatgagagggatcggattagtacccgccgatcctcttatgaagacagctccctgccgtcaataaacgcccttctgcaggctgaggttttgagtagacaaatcacaagccccgtgtctgggattaatggagatatcagggccaaaaagattgcgtccatcgcagacgtctgtgagtcaatgaaagaacagctcctggtgctggtagagtgggccaagtacatacctgctttttgcgaactcccattagatgaccaggttgccctgcttcgggcacacgctggcgagcatttgctgctaggcgccaccaagcgtagcatggtgttcaaagacgtcctcctgcttgggaacgattatatcgtgccccgccactgtcctgagctggcggaaatgagtagagtgtctattaggatcttggacgagctcgtcctgccatttcaggaattacaaattgatgacaatcagtacgcctacctgaaggcaatcatattctttgatcccgacgctaaaggactctccgatcctggtaagattaaacggcttcgaagccaggttcaggtgtcgctggaggactatatcaacgatcgccaatacgactctagaggcaggttcggggaattgctactgctcctgccaactcttcagtccattacatggcagatgatcgagcaaatccagtttattaagctgttcggaatggccaaaatagataatttgctccaggagatgctgttatga

SEQ ID NO: 862 - RNA, 1128 nt, synthetic construct
  misc_feature 1..1128: note = CDS (opt3) from Homo sapiens__NP_000448.3__HNF4A(1-375)(T166E)
  source 1..1128: mol_type = other RNA
atgagactgagcaagaccctcgtggacatggatatggccgactactccgctgcacttgatcccgcctatacaactctggagttcgaaaacgtccaggttttgacgatgggcaatgacacctctccttcagaggggacaaacttaaatgcgccaaacagtctgggagtgagcgctctatgcgccatctgtggtgatagggcaactggcaaacactacggggcctcctcttgcgacggatgtaagggctttttccggcgctcggtacgtaaaaatcatatgtattcatgccgatttagcagacaatgtgtggtcgataaggacaaaaggaaccagtgccggtactgtcgcctcaagaagtgcttcagagctggtatgaaaaaggaagcagtgcagaatgagagggatcggattagtacccgccgatcctcttatgaagacagctccctgccgtcaataaacgcccttctgcaggctgaggttttgagtagacaaatcgagagccccgtgtctgggattaatggagatatcagggccaaaaagattgcgtccatcgcagacgtctgtgaatcaatgaaagagcagctcctggtgctggtagaatgggccaagtacatacctgctttttgcgagctcccattagatgaccaggttgccctgcttcgggcacacgctggcgagcatttgctgctaggcgccacaaagcgtagcatggtgttcaaagacgtcctcctgcttgggaacgattatatcgtgccccgccactgtcctgaactggcggagatgagtagagtgtctattaggatcttggacgaactcgtcctgccatttcaggagttacaaattgatgacaatgaatacgcctacctgaaggcaatcatattctttgatcccgacgctaaaggactctccgatcctggtaagattaaacggcttcgaagccaggttcaggtgtcgctggaggactatatcaacgatcgccagtacgactctagaggcaggttcggggagttgctactgctcctgccaacccttcaatccattacttggcagatgatcgaacagatccaatttattaagctgttcggaatggccaaaatagataatttgctccaggagatgctgttatga

SEQ ID NO: 863 - RNA, 1128 nt, synthetic construct
  misc_feature 1..1128: note = CDS (opt3) from Homo sapiens__NP_000448.3__HNF4A(1-375)(S148A)
  source 1..1128: mol_type = other RNA
atgagactgagcaagaccctcgtggacatggatatggccgactactccgctgcacttgatcccgcctatacaactctggagttcgaaaacgtccaggttttgacgatgggcaatgacacctctccttcagaggggacaaacttaaatgcgccaaacagtctgggagtgagcgctctatgcgccatctgtggtgatagggcaactggcaaacactacggggcctcctcttgcgacggatgtaagggctttttccggcgctcggtacgtaaaaatcatatgtattcatgccgatttagcagacaatgtgtggtcgataaggacaaaaggaaccagtgccggtactgtcgcctcaagaagtgcttcagagctggtatgaaaaaggaagcagtgcagaatgagagggatcggattagtacccgccgatcctcttatgaagacagcgccctgccgtccataaacgcccttctgcaggccgaggttttgtcaagacaaatcacaagtcccgtgagcgggattaatggagatatcagggcgaaaaagattgcatctatcgccgacgtctgtgagtccatgaaagaacagctcctggtgctggtagagtgggctaagtacatacctgccttttgcgaactcccattagatgaccaggttgcactgcttcgggctcacgccggcgagcatttgctgctaggcgcgaccaagcgttcaatggtgttcaaagacgtcctcctgcttgggaacgattatatcgtgccccgccactgtcctgagctggccgaaatgagcagagtgagtattaggatcttggacgagctcgtcctgccatttcaggaattacaaattgatgacaatgagtacgcatacctgaaggctatcatattctttgatcccgacgccaaaggactctctgatcctggtaagattaaacggcttcgatcccaggttcaggtgagcctggaagactatatcaacgatcgccagtacgactcgagaggcaggttcggggagttgctactgctcctgccaactcttcaatctattacatggcagatgatcgagcagatccaatttattaagctgttcggaatggctaaaatagataatttgctccaggaaatgctgttatga

SEQ ID NO: 864 - RNA, 1128 nt, synthetic construct
  misc_feature 1..1128: note = CDS (opt3) from Homo sapiens__NP_000448.3__HNF4A(1-375)(S148E)
  source 1..1128: mol_type = other RNA
atgagactgagcaagaccctcgtggacatggatatggccgactactccgctgcacttgatcccgcctatacaactctggagttcgaaaacgtccaggttttgacgatgggcaatgacacctctccttcagaggggacaaacttaaatgcgccaaacagtctgggagtgagcgctctatgcgccatctgtggtgatagggcaactggcaaacactacggggcctcctcttgcgacggatgtaagggctttttccggcgctcggtacgtaaaaatcatatgtattcatgccgatttagcagacaatgtgtggtcgataaggacaaaaggaaccagtgccggtactgtcgcctcaagaagtgcttcagagctggtatgaaaaaggaagcagtgcagaatgagagggatcggattagtacccgccgatcctcttatgaagacagcgagctgccgtccataaacgcccttctgcaggctgaggttttgtcaagacaaatcacaagtcccgtgagcgggattaatggagatatcagggccaaaaagattgcgtctatcgcagacgtctgtgaatccatgaaagagcagctcctggtgctggtagaatgggccaagtacatacctgctttttgcgagctcccattagatgaccaggttgccctgcttcgggcacacgctggcgagcatttgctgctaggcgccaccaagcgttcaatggtgttcaaagacgtcctcctgcttgggaacgattatatcgtgccccgccactgtcctgaactggcggagatgagcagagtgagtattaggatcttggacgaactcgtcctgccatttcaggagttacaaattgatgacaatgaatacgcctacctgaaggcaatcatattctttgatcccgacgctaaaggactctctgatcctggtaagattaaacggcttcgatcccaggttcaggtgagcctggaggactatatcaacgatcgccagtacgactcgagaggcaggttcggggagttgctactgctcctgccaactcttcaatctattacatggcagatgatcgaacagatccaatttattaagctgttcggaatggccaaaatagataatttgctccaggagatgctgttatga

SEQ ID NO: 865 - RNA, 1128 nt, synthetic construct
  misc_feature 1..1128: note = CDS (opt3) from Homo sapiens__NP_000448.3__HNF4A(1-375)(S183A)
  source 1..1128: mol_type = other RNA
atgagactgagcaagaccctcgtggacatggatatggccgactactccgctgcacttgatcccgcctatacaactctggagttcgaaaacgtccaggttttgacgatgggcaatgacacctctccttcagaggggacaaacttaaatgcgccaaacagtctgggagtgagcgctctatgcgccatctgtggtgatagggcaactggcaaacactacggggcctcctcttgcgacggatgtaagggctttttccggcgctcggtacgtaaaaatcatatgtattcatgccgatttagcagacaatgtgtggtcgataaggacaaaaggaaccagtgccggtactgtcgcctcaagaagtgcttcagagctggtatgaaaaaggaagcagtgcagaatgagagggatcggattagtacccgccgatcctcttatgaagacagctccctgccgtcaataaacgcccttctgcaggctgaggttttgagtagacaaatcacaagccccgtgtctgggattaatggagatatcagggccaaaaagattgcggcaatcgccgacgtctgtgagtccatgaaagaacagctcctggtgctggtagagtgggctaagtacatacctgccttttgcgaactcccattagatgaccaggttgcactgcttcgggctcacgccggcgagcatttgctgctaggcgcgaccaagcgttcaatggtgttcaaagacgtcctcctgcttgggaacgattatatcgtgccccgccactgtcctgagctggccgaaatgagcagagtgagtattaggatcttggacgagctcgtcctgccatttcaggaattacaaattgatgacaatgagtacgcatacctgaaggctatcatattctttgatcccgacgccaaaggactctctgatcctggtaagattaaacggcttcgatcccaggttcaggtgagcctggaagactatatcaacgatcgccagtacgactcgagaggcaggttcggggagttgctactgctcctgccaactcttcaatctattacatggcagatgatcgagcagatccaatttattaagctgttcggaatggctaaaatagataatttgctccaggaaatgctgttatga

SEQ ID NO: 866 - RNA, 1128 nt, synthetic construct
  misc_feature 1..1128: note = CDS (opt3) from Homo sapiens__NP_000448.3__HNF4A(1-375)(S183E)
  source 1..1128: mol_type = other RNA
atgagactgagcaagaccctcgtggacatggatatggccgactactccgctgcacttgatcccgcctatacaactctggagttcgaaaacgtccaggttttgacgatgggcaatgacacctctccttcagaggggacaaacttaaatgcgccaaacagtctgggagtgagcgctctatgcgccatctgtggtgatagggcaactggcaaacactacggggcctcctcttgcgacggatgtaagggctttttccggcgctcggtacgtaaaaatcatatgtattcatgccgatttagcagacaatgtgtggtcgataaggacaaaaggaaccagtgccggtactgtcgcctcaagaagtgcttcagagctggtatgaaaaaggaagcagtgcagaatgagagggatcggattagtacccgccgatcctcttatgaagacagctccctgccgtcaataaacgcccttctgcaggctgaggttttgagtagacaaatcacaagccccgtgtctgggattaatggagatatcagggccaaaaagattgcggagatcgcagacgtctgtgaatccatgaaagagcagctcctggtgctggtagaatgggccaagtacatacctgctttttgcgagctcccattagatgaccaggttgccctgcttcgggcacacgctggcgagcatttgctgctaggcgccaccaagcgttcaatggtgttcaaagacgtcctcctgcttgggaacgattatatcgtgccccgccactgtcctgaactggcggagatgagcagagtgagtattaggatcttggacgaactcgtcctgccatttcaggagttacaaattgatgacaatgaatacgcctacctgaaggcaatcatattctttgatcccgacgctaaaggactctctgatcctggtaagattaaacggcttcgatcccaggttcaggtgagcctggaggactatatcaacgatcgccagtacgactcgagaggcaggttcggggagttgctactgctcctgccaactcttcaatctattacatggcagatgatcgaacagatccaatttattaagctgttcggaatggccaaaatagataatttgctccaggagatgctgttatga

SEQ ID NO: 867 - RNA, 1128 nt, synthetic construct; identical to SEQ ID NO: 839
  misc_feature 1..1128: note = CDS (opt3) from Homo sapiens__NP_000448.3__HNF4A(1-375)(S461A)
  source 1..1128: mol_type = other RNA

SEQ ID NO: 868 - RNA, 1128 nt, synthetic construct; identical to SEQ ID NO: 839
  misc_feature 1..1128: note = CDS (opt3) from Homo sapiens__NP_000448.3__HNF4A(1-375)(S461E)
  source 1..1128: mol_type = other RNA

SEQ ID NO: 869 - RNA, 1128 nt, synthetic construct
  misc_feature 1..1128: note = CDS (opt3) from Homo sapiens__NP_000448.3__HNF4A(1-375)(S142A_S143A_S313A)
  source 1..1128: mol_type = other RNA
atgagactgagcaagaccctcgtggacatggatatggccgactactccgctgcacttgatcccgcctatacaactctggagttcgaaaacgtccaggttttgacgatgggcaatgacacctctccttcagaggggacaaacttaaatgcgccaaacagtctgggagtgagcgctctatgcgccatctgtggtgatagggcaactggcaaacactacggggcctcctcttgcgacggatgtaagggctttttccggcgctcggtacgtaaaaatcatatgtattcatgccgatttagcagacaatgtgtggtcgataaggacaaaaggaaccagtgccggtactgtcgcctcaagaagtgcttcagagctggtatgaaaaaggaagcagtgcagaatgagagggatcggattagtacccgccgagccgcttatgaagactcctctctgccgagcataaacgcccttctgcaggcggaggttttgtccagacaaatcacatcacccgtgagtgggattaatggagatatcagggccaaaaagattgccagcatcgctgacgtctgtgagtctatgaaagaacagctcctggtgctggtagagtgggccaagtacatacctgcattttgcgaactcccattagatgaccaggttgctctgcttcgggcccacgcgggcgagcatttgctgctaggcgccaccaagcgttccatggtgttcaaagacgtcctcctgcttgggaacgattatatcgtgccccgccactgtcctgagctggcagaaatgtcaagagtgagcattaggatcttggacgagctcgtcctgccatttcaggaattacaaattgatgacaatgagtacgcttacctgaaggccatcatattctttgatcccgacgctaaaggactcagtgatcctggtaagattaaacggcttcgagcccaggttcaggtgtctctggaagactatatcaacgatcgccagtacgactccagaggcaggttcggggagttgctactgctcctgccaactcttcaaagcattacatggcagatgatcgagcagatccaatttattaagctgttcggaatggcaaaaatagataatttgctccaggaaatgctgttatga

SEQ ID NO: 870 - RNA, 1128 nt, synthetic construct; identical to SEQ ID NO: 869
  misc_feature 1..1128: note = CDS (opt3) from Homo sapiens__NP_000448.3__HNF4A(1-375)(S142A_S143A_S313A_K458R)
  source 1..1128: mol_type = other RNA

SEQ ID NO: 871 - RNA, 1128 nt, synthetic construct
  misc_feature 1..1128: note = CDS (opt3) from Homo sapiens__NP_000448.3__HNF4A(1-375)(S142A_S143A_S167A_S313A_ S378A_T429A_T432A_S436A_K458R)
  source 1..1128: mol_type = other RNA
atgagactgagcaagaccctcgtggacatggatatggccgactactccgctgcacttgatcccgcctatacaactctggagttcgaaaacgtccaggttttgacgatgggcaatgacacctctccttcagaggggacaaacttaaatgcgccaaacagtctgggagtgagcgctctatgcgccatctgtggtgatagggcaactggcaaacactacggggcctcctcttgcgacggatgtaagggctttttccggcgctcggtacgtaaaaatcatatgtattcatgccgatttagcagacaatgtgtggtcgataaggacaaaaggaaccagtgccggtactgtcgcctcaagaagtgcttcagagctggtatgaaaaaggaagcagtgcagaatgagagggatcggattagtacccgccgagccgcttatgaagactcctctctgccgagcataaacgcccttctgcaggcggaggttttgtccagacaaatcacagcacccgtgtcagggattaatggagatatcagggccaaaaagattgctagtatcgccgacgtctgtgagagcatgaaagaacagctcctggtgctggtagagtgggcaaagtacatacctgctttttgcgaactcccattagatgaccaggttgccctgcttcgggcgcacgccggcgagcatttgctgctaggcgcaaccaagcgttctatggtgttcaaagacgtcctcctgcttgggaacgattatatcgtgccccgccactgtcctgagctggctgaaatgtccagagtgtcaattaggatcttggacgagctcgtcctgccatttcaggaattacaaattgatgacaatgagtacgcctacctgaaggctatcatattctttgatcccgacgccaaaggactcagcgatcctggtaagattaaacggcttcgagcacaggttcaggtgagtctggaagactatatcaacgatcgccagtacgactctagaggcaggttcggggagttgctactgctcctgccaactcttcaatccattacatggcagatgatcgagcagatccaatttattaagctgttcggaatggccaaaatagataatttgctccaggaaatgctgttatga

SEQ ID NO: 872 - RNA, 1128 nt, synthetic construct
  misc_feature 1..1128: note = CDS (opt3) from Homo sapiens__NP_000448.3__HNF4A(1-375)(S142A_S143A_S148A_S167A_ S313A_S378A_T429A_T432A_S436A_K458R)
  source 1..1128: mol_type = other RNA
atgagactgagcaagaccctcgtggacatggatatggccgactactccgctgcacttgatcccgcctatacaactctggagttcgaaaacgtccaggttttgacgatgggcaatgacacctctccttcagaggggacaaacttaaatgcgccaaacagtctgggagtgagcgctctatgcgccatctgtggtgatagggcaactggcaaacactacggggcctcctcttgcgacggatgtaagggctttttccggcgctcggtacgtaaaaatcatatgtattcatgccgatttagcagacaatgtgtggtcgataaggacaaaaggaaccagtgccggtactgtcgcctcaagaagtgcttcagagctggtatgaaaaaggaagcagtgcagaatgagagggatcggattagtacccgccgagccgcttatgaagactccgccctgccgtctataaacgcgcttctgcaggcagaggttttgagcagacaaatcacagcccccgtgtccgggattaatggagatatcagggctaaaaagattgcctcaatcgcagacgtctgtgagagtatgaaagaacagctcctggtgctggtagagtgggctaagtacatacctgccttttgcgaactcccattagatgaccaggttgcgctgcttcgggcccacgcaggcgagcatttgctgctaggcgctaccaagcgtagcatggtgttcaaagacgtcctcctgcttgggaacgattatatcgtgccccgccactgtcctgagctggccgaaatgtctagagtgtccattaggatcttggacgagctcgtcctgccatttcaggaattacaaattgatgacaatgagtacgcttacctgaaggccatcatattctttgatcccgacgcaaaaggactctcagatcctggtaagattaaacggcttcgagcccaggttcaggtgagcctggaagactatatcaacgatcgccagtacgacagtagaggcaggttcggggagttgctactgctcctgccaactcttcaatctattacatggcagatgatcgagcagatccaatttattaagctgttcggaatggctaaaatagataatttgctccaggaaatgctgttatga

SEQ ID NO: 873 - RNA, 1128 nt, synthetic construct
  misc_feature 1..1128: note = CDS (opt3) from Homo sapiens__NP_000448.3__HNF4A(1-375)(K106R_K108R_K126R_K127R_ S142A_S143A_S148A_S167A_S313A_S378A_T429A_T432A_S436A_K458R )
  source 1..1128: mol_type = other RNA
atgagactgagcaagaccctcgtggacatggatatggccgactactccgctgcacttgatcccgcctatacaactctggagttcgaaaacgtccaggttttgacgatgggcaatgacacctctccttcagaggggacaaacttaaatgcgccaaacagtctgggagtgagcgctctatgcgccatctgtggtgatagggcaactggcaaacactacggggcctcctcttgcgacggatgtaagggctttttccggcgctcggtacgtaaaaatcatatgtattcatgccgatttagcagacaatgtgtggtcgatagggaccggcgcaaccagtgcagatactgtaggctcaagaaatgcttccgggctggtatgcgccgagaagcagtgcagaatgagagagataggattagtacccggcgtgccgcttatgaagactccgccctgccgtctataaacgcgcttctgcaggcagaggttttgagccgccaaatcacagcccccgtgtccgggattaatggagatatcagagctaagaagattgcctcaatcgcagacgtctgtgagagtatgaaagaacagctcctggtgctggtagagtgggctaagtacatacctgccttttgcgaactcccattagatgaccaggttgcgctgcttagggcccacgcaggcgagcatttgctgctaggcgctaccaaacggagcatggtgttcaaggacgtcctcctgcttgggaacgattatatcgtgccccgacactgtcctgagctggccgaaatgtctcgcgtgtccattagaatcttggacgagctcgtcctgccatttcaggaattacaaattgatgacaatgagtacgcttacctgaaagccatcatattctttgatcccgacgcaaagggactctcagatcctggtaagattaaaaggcttcgggcccaggttcaggtgagcctggaagactatatcaacgatcgccagtacgacagtagaggcaggttcggggagttgctactgctcctgccaactcttcaatctattacatggcagatgatcgagcagatccaatttattaagctgttcggaatggctaaaatagataatttgctccaggaaatgctgttatga

SEQ ID NO: 874 - RNA, 1128 nt, synthetic construct
  misc_feature 1..1128: note = CDS (opt3) from Homo sapiens__NP_000448.3__HNF4A(1-375)(S142A_S143A_S148A_T166A_ S167A_S313A_S378A_T429A_T432A_S436A_K458R)
  source 1..1128: mol_type = other RNA
atgagactgagcaagaccctcgtggacatggatatggccgactactccgctgcacttgatcccgcctatacaactctggagttcgaaaacgtccaggttttgacgatgggcaatgacacctctccttcagaggggacaaacttaaatgcgccaaacagtctgggagtgagcgctctatgcgccatctgtggtgatagggcaactggcaaacactacggggcctcctcttgcgacggatgtaagggctttttccggcgctcggtacgtaaaaatcatatgtattcatgccgatttagcagacaatgtgtggtcgataaggacaaaaggaaccagtgccggtactgtcgcctcaagaagtgcttcagagctggtatgaaaaaggaagcagtgcagaatgagagggatcggattagtacccgccgagccgcttatgaagactccgccctgccgtctataaacgcgcttctgcaggcagaggttttgagcagacaaatcgccgctcccgtgtccgggattaatggagatatcagggccaaaaagattgcatcaatcgctgacgtctgtgagagtatgaaagaacagctcctggtgctggtagagtgggccaagtacatacctgcgttttgcgaactcccattagatgaccaggttgccctgcttcgggcacacgctggcgagcatttgctgctaggcgccacaaagcgtagcatggtgttcaaagacgtcctcctgcttgggaacgattatatcgtgccccgccactgtcctgagctggctgaaatgtctagagtgtccattaggatcttggacgagctcgtcctgccatttcaggaattacaaattgatgacaatgagtacgcctacctgaaggcaatcatattctttgatcccgacgccaaaggactctcagatcctggtaagattaaacggcttcgagctcaggttcaggtgagcctggaagactatatcaacgatcgccagtacgacagtagaggcaggttcggggagttgctactgctcctgccaacccttcaatctattacttggcagatgatcgagcagatccaatttattaagctgttcggaatggcgaaaatagataatttgctccaggaaatgctgttatga

SEQ ID NO: 875 - RNA, 1128 nt, synthetic construct
  misc_feature 1..1128: note = CDS (opt3) from Homo sapiens__NP_000448.3__HNF4A(1-375)(S87A_S142A_S143A_S148A_T 166A_S167A_S313A_S378A_T429A_T432A_S436A_K458R)
  source 1..1128: mol_type = other RNA
atgagactgagcaagaccctcgtggacatggatatggccgactactccgctgcacttgatcccgcctatacaactctggagttcgaaaacgtccaggttttgacgatgggcaatgacacctctccttcagaggggacaaacttaaatgcgccaaacagtctgggagtgagcgctctatgcgccatctgtggtgatagggcaactggcaaacactacggggcctcctcttgcgacggatgtaagggctttttccggcgcgctgtacgtaaaaatcatatgtattcgtgccgattttcaagacaatgtgtggtcgataaggacaaaaggaaccagtgccggtactgtcgcctcaagaagtgcttcagagcaggtatgaaaaaggaagccgtgcagaatgagagggatcggattagcacccgccgagctgcctatgaagacagtgcgctgccgtccataaacgcacttctgcaggccgaggttttgtctagacaaatcgctgcccccgtgagcgggattaatggagatatcagggctaaaaagattgcatccatcgccgacgtctgtgagtcaatgaaagaacagctcctggtgctggtagagtgggcgaagtacatacctgccttttgcgaactcccattagatgaccaggttgcactgcttcgggctcacgccggcgagcatttgctgctaggcgctacaaagcgtagtatggtgttcaaagacgtcctcctgcttgggaacgattatatcgtgccccgccactgtcctgagctggccgaaatgagcagagtgtctattaggatcttggacgagctcgtcctgccatttcaggaattacaaattgatgacaatgagtacgcatacctgaaggccatcatattctttgatcccgacgctaaaggactctccgatcctggtaagattaaacggcttcgagcgcaggttcaggtgtcactggaagactatatcaacgatcgccagtacgacagcagaggcaggttcggggagttgctactgctcctgccaacccttcaaagtattacttggcagatgatcgagcagatccaatttattaagctgttcggaatggcaaaaatagataatttgctccaggaaatgctgttatga

SEQ ID NO: 876 - RNA, 1128 nt, synthetic construct
  misc_feature 1..1128: note = CDS (opt3) from Homo sapiens__NP_000448.3__HNF4A(1-375)(S87A_K106R_K108R_K126R_K 127R_S142A_S143A_S148A_T166A_S167A_S313A_S378A_T429A_T432A_ S436A_K458R)
  source 1..1128: mol_type = other RNA
atgagactgagcaagaccctcgtggacatggatatggccgactactccgctgcacttgatcccgcctatacaactctggagttcgaaaacgtccaggttttgacgatgggcaatgacacctctccttcagaggggacaaacttaaatgcgccaaacagtctgggagtgagcgctctatgcgccatctgtggtgatagggcaactggcaaacactacggggcctcctcttgcgacggatgtaagggctttttccggcgcgctgtacgtaaaaatcatatgtattcgtgccgattttcaagacaatgtgtggtcgatagggaccggcgcaaccagtgcagatactgtaggctcaagaaatgcttccgggcaggtatgcgccgagaagccgtgcagaatgagagagataggattagcacccggcgtgctgcctatgaagacagtgcgctgccgtccataaacgcacttctgcaggccgaggttttgtctcgccaaatcgctgcccccgtgagcgggattaatggagatatcagagcaaagaagattgcttccatcgccgacgtctgtgagtcaatgaaagaacagctcctggtgctggtagagtgggcgaagtacatacctgccttttgcgaactcccattagatgaccaggttgcactgcttagggctcacgccggcgagcatttgctgctaggcgctacaaaacggagtatggtgttcaaggacgtcctcctgcttgggaacgattatatcgtgccccgacactgtcctgagctggccgaaatgagccgcgtgtctattagaatcttggacgagctcgtcctgccatttcaggaattacaaattgatgacaatgagtacgcatacctgaaagccatcatattctttgatcccgacgctaagggactctccgatcctggtaagattaaaaggcttcgggcgcaggttcaggtgtcactggaagactatatcaacgatcgccagtacgacagcagaggcaggttcggggagttgctactgctcctgccaacccttcaaagtattacttggcagatgatcgagcagatccaatttattaagctgttcggaatggcaaaaatagataatttgctccaggaaatgctgttatga

SEQ ID NO: 877 - RNA, 1128 nt, synthetic construct
  misc_feature 1..1128: note = CDS (opt3) from Homo sapiens__NP_000448.3__HNF4A(1-375)(S87A_K106R_K108R_K126R_K 127R)
  source 1..1128: mol_type = other RNA
atgagactgagcaagaccctcgtggacatggatatggccgactactccgctgcacttgatcccgcctatacaactctggagttcgaaaacgtccaggttttgacgatgggcaatgacacctctccttcagaggggacaaacttaaatgcgccaaacagtctgggagtgagcgctctatgcgccatctgtggtgatagggcaactggcaaacactacggggcctcctcttgcgacggatgtaagggctttttccggcgcgctgtacgtaaaaatcatatgtattcgtgccgattttcaagacaatgtgtggtcgatagggaccggcgcaaccagtgcagatactgtaggctcaagaaatgcttccgggcaggtatgcgccgagaagccgtgcagaatgagagagataggattagcacccggcgtagttcctatgaagactctagcctgccgtccataaacgcccttctgcaggccgaggttttgtcacgccaaatcacaagtcccgtgagcgggattaatggagatatcagagcgaagaagattgcatctatcgccgacgtctgtgagtccatgaaagaacagctcctggtgctggtagagtgggctaagtacatacctgccttttgcgaactcccattagatgaccaggttgcactgcttagggctcacgccggcgagcatttgctgctaggcgcgaccaaacggtcaatggtgttcaaggacgtcctcctgcttgggaacgattatatcgtgccccgacactgtcctgagctggccgaaatgagccgcgtgagtattagaatcttggacgagctcgtcctgccatttcaggaattacaaattgatgacaatgagtacgcatacctgaaagctatcatattctttgatcccgacgccaagggactctctgatcctggtaagattaaaaggcttcggtcccaggttcaggtgagcctggaagactatatcaacgatcgccagtacgactcgagaggcaggttcggggagttgctactgctcctgccaactcttcaatctattacatggcagatgatcgagcagatccaatttattaagctgttcggaatggctaaaatagataatttgctccaggaaatgctgttatga

SEQ ID NO: 878 - RNA, 1128 nt, synthetic construct; identical to SEQ ID NO: 876
  misc_feature 1..1128: note = CDS (opt3) from Homo sapiens__NP_000448.3__HNF4A(1-375)(S87A_K106R_K108R_K126R_K 127R_S142A_S143A_S148A_T166A_S167A_S313A_S378A_T429A_T432A_ S436A_K458R_S461A)
  source 1..1128: mol_type = other RNA

SEQ ID NO: 879 - RNA, 1128 nt, synthetic construct; identical to SEQ ID NO: 876
  misc_feature 1..1128: note = CDS (opt3) from Homo sapiens__NP_000448.3__HNF4A(1-375)(S87A_K106R_K108R_K126R_K 127R_S142A_S143A_S148A_T166A_S167A_S313A_S378A_T429A_T432A_ S436A_K458R_S461E)
  source 1..1128: mol_type = other RNA

SEQ ID NO: 880 - RNA, 1128 nt, synthetic construct
  misc_feature 1..1128: note = CDS (opt3) from Homo sapiens__NP_000448.3__HNF4A(1-375)(S87A_K106R_K108R_K126R_K 127R_S142A_S143A_S148E_T166A_S167E_S313A_S378E_T429E_T432E_ S436E_K458R_S461E)
  source 1..1128: mol_type = other RNA
atgagactgagcaagaccctcgtggacatggatatggccgactactccgctgcacttgatcccgcctatacaactctggagttcgaaaacgtccaggttttgacgatgggcaatgacacctctccttcagaggggacaaacttaaatgcgccaaacagtctgggagtgagcgctctatgcgccatctgtggtgatagggcaactggcaaacactacggggcctcctcttgcgacggatgtaagggctttttccggcgcgctgtacgtaaaaatcatatgtattcgtgccgattttcaagacaatgtgtggtcgatagggaccggcgcaaccagtgcagatactgtaggctcaagaaatgcttccgggcaggtatgcgccgagaagccgtgcagaatgagagagataggattagcacccggcgtgctgcctatgaagacagtgagctgccgtccataaacgcgcttctgcaggcagaggttttgtctcgccaaatcgccgaacccgtgagcgggattaatggagatatcagagctaagaagattgcctccatcgcagacgtctgtgagtcaatgaaagaacagctcctggtgctggtagagtgggctaagtacatacctgccttttgcgagctcccattagatgaccaggttgcgctgcttagggcccacgcaggcgaacatttgctgctaggcgctacaaaacggagtatggtgttcaaggacgtcctcctgcttgggaacgattatatcgtgccccgacactgtcctgagctggccgaaatgagccgcgtgtctattagaatcttggacgagctcgtcctgccatttcaggaattacaaattgatgacaatgagtacgcttacctgaaagccatcatattctttgatcccgacgcaaagggactctccgatcctggtaagattaaaaggcttcgggcccaggttcaggtgtcactggaggactatatcaacgatcgccagtacgacagcagaggcaggttcggggaattgctactgctcctgccaacccttcaaagtattacttggcagatgatcgagcagatccaatttattaagctgttcggaatggctaaaatagataatttgctccaggaaatgctgttatga

SEQ ID NO: 881 - RNA, 1128 nt, synthetic construct
  misc_feature 1..1128: note = CDS (opt3) from Homo sapiens__NP_000448.3__HNF4A(1-375)(S87A_K106R_K108R_K126R_K 127R_S142A_S143A_S148A_T166A_S167A_K179R_K180R_S313A_S378A_ T429A_T432A_S436A_K458R_S461E)
  source 1..1128: mol_type = other RNA
atgagactgagcaagaccctcgtggacatggatatggccgactactccgctgcacttgatcccgcctatacaactctggagttcgaaaacgtccaggttttgacgatgggcaatgacacctctccttcagaggggacaaacttaaatgcgccaaacagtctgggagtgagcgctctatgcgccatctgtggtgatagggcaactggcaaacactacggggcctcctcttgcgacggatgtaagggctttttccggcgcgctgtacgtaaaaatcatatgtattcgtgccgattttcaagacaatgtgtggtcgatagggaccggcgcaaccagtgcagatactgtaggctcaagaaatgcttccgggcaggtatgcgccgagaagccgtgcagaatgagagagataggattagcacccggcgtgctgcctatgaagacagtgcgctgccgtccataaacgcacttctgcaggccgaggttttgtctcgccaaatcgctgcccccgtgagcgggattaatggagatatcagagcaaggcggattgcttccatcgccgacgtctgtgagtcaatgaaggaacagctcctggtgctggtagagtgggcgaagtacatacctgccttttgcgaactcccattagatgaccaggttgcactgcttcgagctcacgccggcgagcatttgctgctaggcgctacaaaacgcagtatggtgttcaaggacgtcctcctgcttgggaacgattatatcgtgcccagacactgtcctgagctggccgaaatgagcagggtgtctattcggatcttggacgagctcgtcctgccatttcaggaattacaaattgatgacaatgagtacgcatacctgaaagccatcatattctttgatcccgacgctaagggactctccgatcctggtaaaattaagcgccttagagcgcaggttcaggtgtcactggaagactatatcaacgataggcagtacgacagccgtggccggttcggggagttgctactgctcctgccaacccttcaaagtattacttggcagatgatcgagcagatccaatttattaagctgttcggaatggcaaaaatagataatttgctccaggaaatgctgttatga

SEQ ID NO: 882 - RNA, 1128 nt, synthetic construct
  misc_feature 1..1128: note = CDS (opt3) from Homo sapiens__NP_000448.3__HNF4A(1-375)(S87A_K106R_K108R_K126R_K 127R_S142A_S143A_S148A_T166A_S167A_K300R_K307R_K309R_S313A_ S378A_T429A_T432A_S436A_K458R_S461E)
  source 1..1128: mol_type = other RNA
atgagactgagcaagaccctcgtggacatggatatggccgactactccgctgcacttgatcccgcctatacaactctggagttcgaaaacgtccaggttttgacgatgggcaatgacacctctccttcagaggggacaaacttaaatgcgccaaacagtctgggagtgagcgctctatgcgccatctgtggtgatagggcaactggcaaacactacggggcctcctcttgcgacggatgtaagggctttttccggcgcgctgtacgtaaaaatcatatgtattcgtgccgattttcaagacaatgtgtggtcgatagggaccggcgcaaccagtgcagatactgtaggctcaagaaatgcttccgggcaggtatgcgccgagaagccgtgcagaatgagagagataggattagcacccggcgtgctgcctatgaagacagtgcgctgccgtccataaacgcacttctgcaggccgaggttttgtctcgccaaatcgctgcccccgtgagcgggattaatggagatatcagagcaaagaagattgcttccatcgccgacgtctgtgagtcaatgaaagaacagctcctggtgctggtagagtgggcgaagtacatacctgccttttgcgaactcccattagatgaccaggttgcactgcttagggctcacgccggcgagcatttgctgctaggcgctacaaaacggagtatggtgttcaaggacgtcctcctgcttgggaacgattatatcgtgccccgacactgtcctgagctggccgaaatgagccgcgtgtctattagaatcttggacgagctcgtcctgccatttcaggaattacaaattgatgacaatgagtacgcatacctgaaagccatcatattctttgatcccgacgctaggggactctccgatcctggtcggattcgcagacttagggcgcaggttcaggtgtcactggaagactatatcaacgatcgtcagtacgacagccggggccgattcggggagttgctactgctcctgccaacccttcaaagtattacttggcagatgatcgagcagatccaatttattaagctgttcggaatggcaaagatagataatttgctccaggaaatgctgttatga

SEQ ID NO: 883 - RNA, 1128 nt, synthetic construct; identical to SEQ ID NO: 876
  misc_feature 1..1128: note = CDS (opt3) from Homo sapiens__NP_000448.3__HNF4A(1-375)(S87A_K106R_K108R_K126R_K 127R_S142A_S143A_S148A_T166A_S167A_S313A_S378A_T429A_T432A_ S436A_K447R_K458R_S461E_K470R)
  source 1..1128: mol_type = other RNA

SEQ ID NO: 884 - RNA, 1128 nt, synthetic construct
  misc_feature 1..1128: note = CDS (opt3) from Homo sapiens__NP_000448.3__HNF4A(1-375)(S87A_K106R_K108R_K126R_K 127R_S142A_S143A_S148A_T166A_S167A_K179R_K180R_K234R_K300R_ K307R_K309R_S313A_S378A_T429A_T432A_S436A_K447R_K458R_S461E _K470R)
  source 1..1128: mol_type = other RNA
atgagactgagcaagaccctcgtggacatggatatggccgactactccgctgcacttgatcccgcctatacaactctggagttcgaaaacgtccaggttttgacgatgggcaatgacacctctccttcagaggggacaaacttaaatgcgccaaacagtctgggagtgagcgctctatgcgccatctgtggtgatagggcaactggcaaacactacggggcctcctcttgcgacggatgtaagggctttttccggcgcgctgtacgtaaaaatcatatgtattcgtgccgattttcaagacaatgtgtggtcgatagggaccggcgcaaccagtgcagatactgtaggctcaagaaatgcttccgggcaggtatgcgccgagaagccgtgcagaatgagagagataggattagcacccggcgtgctgcctatgaagacagtgcgctgccgtccataaacgcacttctgcaggccgaggttttgtctcgccaaatcgctgcccccgtgagcgggattaatggagatatcagagcaaggcggattgcttccatcgccgacgtctgtgagtcaatgaaggaacagctcctggtgctggtagagtgggcgaagtacatacctgccttttgcgaactcccattagatgaccaggttgcactgcttcgagctcacgccggcgagcatttgctgctaggcgctacacgcagaagtatggtgttcaaagacgtcctcctgcttgggaacgattatatcgtgcccaggcactgtcctgagctggccgaaatgagccgggtgtctattcgcatcttggacgagctcgtcctgccatttcaggaattacaaattgatgacaatgagtacgcatacctgaaggccatcatattctttgatcccgacgctagaggactctccgatcctggtaggattcgtcggcttcgagcgcaggttcaggtgtcactggaagactatatcaacgatagacagtacgacagcaggggccgcttcggggagttgctactgctcctgccaacccttcaaagtattacttggcagatgatcgagcagatccaatttattaaactgttcggaatggcaaagatagataatttgctccaggaaatgctgttatga

SEQ ID NO: 885 - RNA, 1128 nt, synthetic construct
  misc_feature 1..1128: note = CDS (opt3) from Homo sapiens__NP_000448.3__HNF4A(1-375)(S87A_S95A_S99A_K106R_K10 8R_K126R_K127R_S142A_S143A_S148A_T166A_S167A_S313A_S378A_T4 29A_T432A_S436A_K458R_S461E)
  source 1..1128: mol_type = other RNA
atgagactgagcaagaccctcgtggacatggatatggccgactactccgctgcacttgatcccgcctatacaactctggagttcgaaaacgtccaggttttgacgatgggcaatgacacctctccttcagaggggacaaacttaaatgcgccaaacagtctgggagtgagcgctctatgcgccatctgtggtgatagggcaactggcaaacactacggggcctcctcttgcgacggatgtaagggctttttccggcgcgctgtacgtaaaaatcatatgtatgcatgccgatttgccagacaatgtgtggtcgatagggaccggcgcaaccagtgcagatactgtaggctcaagaaatgcttccgggctggtatgcgccgagaagccgtgcagaatgagagagataggatttcgacccggcgtgcggcatatgaagactcagccctgccgagcataaacgcccttctgcaggccgaggttttgagtcgccaaatcgcagctcccgtgtccgggattaatggagatatcagagccaagaagattgcgtctatcgccgacgtctgtgagagcatgaaagaacagctcctggtgctggtagagtgggcaaagtacatacctgctttttgcgaactcccattagatgaccaggttgccctgcttagggctcacgccggcgagcatttgctgctaggcgcaacaaaacggtccatggtgttcaaggacgtcctcctgcttgggaacgattatatcgtgccccgacactgtcctgagctggccgaaatgtcacgcgtgagtattagaatcttggacgagctcgtcctgccatttcaggaattacaaattgatgacaatgagtacgcttacctgaaagcgatcatattctttgatcccgacgcaaagggactcagcgatcctggtaagattaaaaggcttcgggcccaggttcaggtgtctctggaagactatatcaacgatcgccagtacgactccagaggcaggttcggggagttgctactgctcctgccaacccttcaatcaattacttggcagatgatcgagcagatccaatttattaagctgttcggaatggctaaaatagataatttgctccaggaaatgctgttatga

SEQ ID NO: 886 - RNA, 1128 nt, synthetic construct
  misc_feature 1..1128: note = CDS (opt3) from Homo sapiens__NP_000448.3__HNF4A(1-375)(S87A_K106R_K108R_K126R_K 127R_S138A_T139A_S142A_S143A_S148A_T166A_S167A_S313A_S378A_ T429A_T432A_S436A_K458R_S461E)
  source 1..1128: mol_type = other RNA
atgagactgagcaagaccctcgtggacatggatatggccgactactccgctgcacttgatcccgcctatacaactctggagttcgaaaacgtccaggttttgacgatgggcaatgacacctctccttcagaggggacaaacttaaatgcgccaaacagtctgggagtgagcgctctatgcgccatctgtggtgatagggcaactggcaaacactacggggcctcctcttgcgacggatgtaagggctttttccggcgcgctgtacgtaaaaatcatatgtattcgtgccgattttcaagacaatgtgtggtcgatagggaccggcgcaaccagtgcagatactgtaggctcaagaaatgcttccgggcaggtatgcgccgagaagccgtgcagaatgagagagataggattgctgcccggcgtgcggcatatgaagacagcgccctgccgagtataaacgcccttctgcaggccgaggttttgtcccgccaaatcgcagctcccgtgtctgggattaatggagatatcagagccaagaagattgcgagcatcgccgacgtctgtgagtccatgaaagaacagctcctggtgctggtagagtgggcaaagtacatacctgctttttgcgaactcccattagatgaccaggttgccctgcttagggctcacgccggcgagcatttgctgctaggcgcaaccaaacggtcaatggtgttcaaggacgtcctcctgcttgggaacgattatatcgtgccccgacactgtcctgagctggccgaaatgagtcgcgtgagcattagaatcttggacgagctcgtcctgccatttcaggaattacaaattgatgacaatgagtacgcttacctgaaagcgatcatattctttgatcccgacgcaaagggactctctgatcctggtaagattaaaaggcttcgggcccaggttcaggtgtccctggaagactatatcaacgatcgccagtacgactcaagaggcaggttcggggagttgctactgctcctgccaacacttcaaagcattacctggcagatgatcgagcagatccaatttattaagctgttcggaatggctaaaatagataatttgctccaggaaatgctgttatga

SEQ ID NO: 887 - RNA, 1128 nt, synthetic construct
  misc_feature 1..1128: note = CDS (opt3) from Homo sapiens__NP_000448.3__HNF4A(1-375)(S87A_S95A_S99A_K106R_K10 8R_K126R_K127R_S138A_T139A_S142A_S143A_S148A_T166A_S167A_S3 13A_S378A_T429A_T432A_S436A_K458R_S461E)
  source 1..1128: mol_type = other RNA
atgagactgagcaagaccctcgtggacatggatatggccgactactccgctgcacttgatcccgcctatacaactctggagttcgaaaacgtccaggttttgacgatgggcaatgacacctctccttcagaggggacaaacttaaatgcgccaaacagtctgggagtgagcgctctatgcgccatctgtggtgatagggcaactggcaaacactacggggcctcctcttgcgacggatgtaagggctttttccggcgcgctgtacgtaaaaatcatatgtatgcatgccgatttgccagacaatgtgtggtcgatagggaccggcgcaaccagtgcagatactgtaggctcaagaaatgcttccgggctggtatgcgccgagaagccgtgcagaatgagagagataggattgcggcacggcgtgccgcttatgaagactcggccctgccgtcaataaacgcacttctgcaggctgaggttttgagccgccaaatcgccgcgcccgtgagtgggattaatggagatatcagagccaagaagattgcatccatcgctgacgtctgtgagtctatgaaagaacagctcctggtgctggtagagtgggccaagtacatacctgctttttgcgaactcccattagatgaccaggttgccctgcttagggcacacgccggcgagcatttgctgctaggcgctaccaaacggagcatggtgttcaaggacgtcctcctgcttgggaacgattatatcgtgccccgacactgtcctgagctggcggaaatgtcccgcgtgtcaattagaatcttggacgagctcgtcctgccatttcaggaattacaaattgatgacaatgagtacgcatacctgaaagccatcatattctttgatcccgacgctaagggactcagtgatcctggtaagattaaaaggcttcgggcccaggttcaggtgagcctggaagactatatcaacgatcgccagtacgactctagaggcaggttcggggagttgctactgctcctgccaacacttcaatccattacctggcagatgatcgagcagatccaatttattaagctgttcggaatggcaaaaatagataatttgctccaggaaatgctgttatga

SEQ ID NO: 888 - RNA, 1128 nt, synthetic construct
  misc_feature 1..1128: note = CDS (opt4) from Homo sapiens__NP_000448.3__HNF4A(1-375)
  source 1..1128: mol_type = other RNA
atgagactgagcaagaccctggtggacatggacatggccgactacagcgccgccctggaccccgcctacaccaccctggagttcgagaacgtgcaggtgctgaccatgggcaacgacaccagccccagcgagggcaccaacctgaacgcccccaacagcctgggcgtgagcgccctgtgcgccatctgcggcgacagagccaccggcaagcactacggcgccagcagctgcgacggctgcaagggcttcttcagaagaagcgtgagaaagaaccacatgtacagctgcagattcagcagacagtgcgtggtggacaaggacaagagaaaccagtgcagatactgcagactgaagaagtgcttcagagccggcatgaagaaggaggccgtgcagaacgagagagacagaatcagcaccagaagaagcagctacgaggacagcagcctgcccagcatcaacgccctgctgcaggccgaggtgctgagcagacagatcaccagccccgtgagcggcatcaacggcgacatcagagccaagaagatcgccagcatcgccgacgtgtgcgagagcatgaaggagcagctgctggtgctggtggagtgggccaagtacatccccgccttctgcgagctgcccctggacgaccaggtggccctgctgagagcccacgccggcgagcacctgctgctgggcgccaccaagagaagcatggtgttcaaggacgtgctgctgctgggcaacgactacatcgtgcccagacactgccccgagctggccgagatgagcagagtgagcatcagaatcctggacgagctggtgctgcccttccaggagctgcagatcgacgacaacgagtacgcctacctgaaggccatcatcttcttcgaccccgacgccaagggcctgagcgaccccggcaagatcaagagactgagaagccaggtgcaggtgagcctggaggactacatcaacgacagacagtacgacagcagaggcagattcggcgagctgctgctgctgctgcccaccctgcagagcatcacctggcagatgatcgagcagatccagttcatcaagctgttcggcatggccaagatcgacaacctgctgcaggagatgctgctgtga

SEQ ID NO: 889 - RNA, 1128 nt, synthetic construct
  misc_feature 1..1128: note = CDS (opt4) from Homo sapiens__NP_000448.3__HNF4A(1-375)(S313A)
  source 1..1128: mol_type = other RNA
atgagactgagcaagaccctggtggacatggacatggccgactacagcgccgccctggaccccgcctacaccaccctggagttcgagaacgtgcaggtgctgaccatgggcaacgacaccagccccagcgagggcaccaacctgaacgcccccaacagcctgggcgtgagcgccctgtgcgccatctgcggcgacagagccaccggcaagcactacggcgccagcagctgcgacggctgcaagggcttcttcagaagaagcgtgagaaagaaccacatgtacagctgcagattcagcagacagtgcgtggtggacaaggacaagagaaaccagtgcagatactgcagactgaagaagtgcttcagagccggcatgaagaaggaggccgtgcagaacgagagagacagaatcagcaccagaagaagcagctacgaggacagcagcctgcccagcatcaacgccctgctgcaggccgaggtgctgagcagacagatcaccagccccgtgagcggcatcaacggcgacatcagagccaagaagatcgccagcatcgccgacgtgtgcgagagcatgaaggagcagctgctggtgctggtggagtgggccaagtacatccccgccttctgcgagctgcccctggacgaccaggtggccctgctgagagcccacgccggcgagcacctgctgctgggcgccaccaagagaagcatggtgttcaaggacgtgctgctgctgggcaacgactacatcgtgcccagacactgccccgagctggccgagatgagcagagtgagcatcagaatcctggacgagctggtgctgcccttccaggagctgcagatcgacgacaacgagtacgcctacctgaaggccatcatcttcttcgaccccgacgccaagggcctgagcgaccccggcaagatcaagagactgagagcccaggtgcaggtgagcctggaggactacatcaacgacagacagtacgacagcagaggcagattcggcgagctgctgctgctgctgcccaccctgcagagcatcacctggcagatgatcgagcagatccagttcatcaagctgttcggcatggccaagatcgacaacctgctgcaggagatgctgctgtga

SEQ ID NO: 890 - RNA, 1128 nt, synthetic construct
  misc_feature 1..1128: note = CDS (opt4) from Homo sapiens__NP_000448.3__HNF4A(1-375)(S313E)
  source 1..1128: mol_type = other RNA
atgagactgagcaagaccctggtggacatggacatggccgactacagcgccgccctggaccccgcctacaccaccctggagttcgagaacgtgcaggtgctgaccatgggcaacgacaccagccccagcgagggcaccaacctgaacgcccccaacagcctgggcgtgagcgccctgtgcgccatctgcggcgacagagccaccggcaagcactacggcgccagcagctgcgacggctgcaagggcttcttcagaagaagcgtgagaaagaaccacatgtacagctgcagattcagcagacagtgcgtggtggacaaggacaagagaaaccagtgcagatactgcagactgaagaagtgcttcagagccggcatgaagaaggaggccgtgcagaacgagagagacagaatcagcaccagaagaagcagctacgaggacagcagcctgcccagcatcaacgccctgctgcaggccgaggtgctgagcagacagatcaccagccccgtgagcggcatcaacggcgacatcagagccaagaagatcgccagcatcgccgacgtgtgcgagagcatgaaggagcagctgctggtgctggtggagtgggccaagtacatccccgccttctgcgagctgcccctggacgaccaggtggccctgctgagagcccacgccggcgagcacctgctgctgggcgccaccaagagaagcatggtgttcaaggacgtgctgctgctgggcaacgactacatcgtgcccagacactgccccgagctggccgagatgagcagagtgagcatcagaatcctggacgagctggtgctgcccttccaggagctgcagatcgacgacaacgagtacgcctacctgaaggccatcatcttcttcgaccccgacgccaagggcctgagcgaccccggcaagatcaagagactgagagagcaggtgcaggtgagcctggaggactacatcaacgacagacagtacgacagcagaggcagattcggcgagctgctgctgctgctgcccaccctgcagagcatcacctggcagatgatcgagcagatccagttcatcaagctgttcggcatggccaagatcgacaacctgctgcaggagatgctgctgtga

SEQ ID NO: 891 - RNA, 1128 nt, synthetic construct
  misc_feature 1..1128: note = CDS (opt4) from Homo sapiens__NP_000448.3__HNF4A(1-375)(S142A_S143A)
  source 1..1128: mol_type = other RNA
atgagactgagcaagaccctggtggacatggacatggccgactacagcgccgccctggaccccgcctacaccaccctggagttcgagaacgtgcaggtgctgaccatgggcaacgacaccagccccagcgagggcaccaacctgaacgcccccaacagcctgggcgtgagcgccctgtgcgccatctgcggcgacagagccaccggcaagcactacggcgccagcagctgcgacggctgcaagggcttcttcagaagaagcgtgagaaagaaccacatgtacagctgcagattcagcagacagtgcgtggtggacaaggacaagagaaaccagtgcagatactgcagactgaagaagtgcttcagagccggcatgaagaaggaggccgtgcagaacgagagagacagaatcagcaccagaagagccgcctacgaggacagcagcctgcccagcatcaacgccctgctgcaggccgaggtgctgagcagacagatcaccagccccgtgagcggcatcaacggcgacatcagagccaagaagatcgccagcatcgccgacgtgtgcgagagcatgaaggagcagctgctggtgctggtggagtgggccaagtacatccccgccttctgcgagctgcccctggacgaccaggtggccctgctgagagcccacgccggcgagcacctgctgctgggcgccaccaagagaagcatggtgttcaaggacgtgctgctgctgggcaacgactacatcgtgcccagacactgccccgagctggccgagatgagcagagtgagcatcagaatcctggacgagctggtgctgcccttccaggagctgcagatcgacgacaacgagtacgcctacctgaaggccatcatcttcttcgaccccgacgccaagggcctgagcgaccccggcaagatcaagagactgagaagccaggtgcaggtgagcctggaggactacatcaacgacagacagtacgacagcagaggcagattcggcgagctgctgctgctgctgcccaccctgcagagcatcacctggcagatgatcgagcagatccagttcatcaagctgttcggcatggccaagatcgacaacctgctgcaggagatgctgctgtga

SEQ ID NO: 892 - RNA, 1128 nt, synthetic construct
  misc_feature 1..1128: note = CDS (opt4) from Homo sapiens__NP_000448.3__HNF4A(1-375)(S142E_S143E)
  source 1..1128: mol_type = other RNA
atgagactgagcaagaccctggtggacatggacatggccgactacagcgccgccctggaccccgcctacaccaccctggagttcgagaacgtgcaggtgctgaccatgggcaacgacaccagccccagcgagggcaccaacctgaacgcccccaacagcctgggcgtgagcgccctgtgcgccatctgcggcgacagagccaccggcaagcactacggcgccagcagctgcgacggctgcaagggcttcttcagaagaagcgtgagaaagaaccacatgtacagctgcagattcagcagacagtgcgtggtggacaaggacaagagaaaccagtgcagatactgcagactgaagaagtgcttcagagccggcatgaagaaggaggccgtgcagaacgagagagacagaatcagcaccagaagagaggagtacgaggacagcagcctgcccagcatcaacgccctgctgcaggccgaggtgctgagcagacagatcaccagccccgtgagcggcatcaacggcgacatcagagccaagaagatcgccagcatcgccgacgtgtgcgagagcatgaaggagcagctgctggtgctggtggagtgggccaagtacatccccgccttctgcgagctgcccctggacgaccaggtggccctgctgagagcccacgccggcgagcacctgctgctgggcgccaccaagagaagcatggtgttcaaggacgtgctgctgctgggcaacgactacatcgtgcccagacactgccccgagctggccgagatgagcagagtgagcatcagaatcctggacgagctggtgctgcccttccaggagctgcagatcgacgacaacgagtacgcctacctgaaggccatcatcttcttcgaccccgacgccaagggcctgagcgaccccggcaagatcaagagactgagaagccaggtgcaggtgagcctggaggactacatcaacgacagacagtacgacagcagaggcagattcggcgagctgctgctgctgctgcccaccctgcagagcatcacctggcagatgatcgagcagatccagttcatcaagctgttcggcatggccaagatcgacaacctgctgcaggagatgctgctgtga

SEQ ID NO: 893 - RNA, 1128 nt, synthetic construct
  misc_feature 1..1128: note = CDS (opt4) from Homo sapiens__NP_000448.3__HNF4A(1-375)(S143A)
  source 1..1128: mol_type = other RNA
atgagactgagcaagaccctggtggacatggacatggccgactacagcgccgccctggaccccgcctacaccaccctggagttcgagaacgtgcaggtgctgaccatgggcaacgacaccagccccagcgagggcaccaacctgaacgcccccaacagcctgggcgtgagcgccctgtgcgccatctgcggcgacagagccaccggcaagcactacggcgccagcagctgcgacggctgcaagggcttcttcagaagaagcgtgagaaagaaccacatgtacagctgcagattcagcagacagtgcgtggtggacaaggacaagagaaaccagtgcagatactgcagactgaagaagtgcttcagagccggcatgaagaaggaggccgtgcagaacgagagagacagaatcagcaccagaagaagcgcctacgaggacagcagcctgcccagcatcaacgccctgctgcaggccgaggtgctgagcagacagatcaccagccccgtgagcggcatcaacggcgacatcagagccaagaagatcgccagcatcgccgacgtgtgcgagagcatgaaggagcagctgctggtgctggtggagtgggccaagtacatccccgccttctgcgagctgcccctggacgaccaggtggccctgctgagagcccacgccggcgagcacctgctgctgggcgccaccaagagaagcatggtgttcaaggacgtgctgctgctgggcaacgactacatcgtgcccagacactgccccgagctggccgagatgagcagagtgagcatcagaatcctggacgagctggtgctgcccttccaggagctgcagatcgacgacaacgagtacgcctacctgaaggccatcatcttcttcgaccccgacgccaagggcctgagcgaccccggcaagatcaagagactgagaagccaggtgcaggtgagcctggaggactacatcaacgacagacagtacgacagcagaggcagattcggcgagctgctgctgctgctgcccaccctgcagagcatcacctggcagatgatcgagcagatccagttcatcaagctgttcggcatggccaagatcgacaacctgctgcaggagatgctgctgtga

SEQ ID NO: 894 - RNA, 1128 nt, synthetic construct
  misc_feature 1..1128: note = CDS (opt4) from Homo sapiens__NP_000448.3__HNF4A(1-375)(T166A)
  source 1..1128: mol_type = other RNA
atgagactgagcaagaccctggtggacatggacatggccgactacagcgccgccctggaccccgcctacaccaccctggagttcgagaacgtgcaggtgctgaccatgggcaacgacaccagccccagcgagggcaccaacctgaacgcccccaacagcctgggcgtgagcgccctgtgcgccatctgcggcgacagagccaccggcaagcactacggcgccagcagctgcgacggctgcaagggcttcttcagaagaagcgtgagaaagaaccacatgtacagctgcagattcagcagacagtgcgtggtggacaaggacaagagaaaccagtgcagatactgcagactgaagaagtgcttcagagccggcatgaagaaggaggccgtgcagaacgagagagacagaatcagcaccagaagaagcagctacgaggacagcagcctgcccagcatcaacgccctgctgcaggccgaggtgctgagcagacagatcgccagccccgtgagcggcatcaacggcgacatcagagccaagaagatcgccagcatcgccgacgtgtgcgagagcatgaaggagcagctgctggtgctggtggagtgggccaagtacatccccgccttctgcgagctgcccctggacgaccaggtggccctgctgagagcccacgccggcgagcacctgctgctgggcgccaccaagagaagcatggtgttcaaggacgtgctgctgctgggcaacgactacatcgtgcccagacactgccccgagctggccgagatgagcagagtgagcatcagaatcctggacgagctggtgctgcccttccaggagctgcagatcgacgacaacgagtacgcctacctgaaggccatcatcttcttcgaccccgacgccaagggcctgagcgaccccggcaagatcaagagactgagaagccaggtgcaggtgagcctggaggactacatcaacgacagacagtacgacagcagaggcagattcggcgagctgctgctgctgctgcccaccctgcagagcatcacctggcagatgatcgagcagatccagttcatcaagctgttcggcatggccaagatcgacaacctgctgcaggagatgctgctgtga

SEQ ID NO: 895 - RNA, 1128 nt, synthetic construct
  misc_feature 1..1128: note = CDS (opt4) from Homo sapiens__NP_000448.3__HNF4A(1-375)(S167E)
  source 1..1128: mol_type = other RNA
atgagactgagcaagaccctggtggacatggacatggccgactacagcgccgccctggaccccgcctacaccaccctggagttcgagaacgtgcaggtgctgaccatgggcaacgacaccagccccagcgagggcaccaacctgaacgcccccaacagcctgggcgtgagcgccctgtgcgccatctgcggcgacagagccaccggcaagcactacggcgccagcagctgcgacggctgcaagggcttcttcagaagaagcgtgagaaagaaccacatgtacagctgcagattcagcagacagtgcgtggtggacaaggacaagagaaaccagtgcagatactgcagactgaagaagtgcttcagagccggcatgaagaaggaggccgtgcagaacgagagagacagaatcagcaccagaagaagcagctacgaggacagcagcctgcccagcatcaacgccctgctgcaggccgaggtgctgagcagacagatcaccgagcccgtgagcggcatcaacggcgacatcagagccaagaagatcgccagcatcgccgacgtgtgcgagagcatgaaggagcagctgctggtgctggtggagtgggccaagtacatccccgccttctgcgagctgcccctggacgaccaggtggccctgctgagagcccacgccggcgagcacctgctgctgggcgccaccaagagaagcatggtgttcaaggacgtgctgctgctgggcaacgactacatcgtgcccagacactgccccgagctggccgagatgagcagagtgagcatcagaatcctggacgagctggtgctgcccttccaggagctgcagatcgacgacaacgagtacgcctacctgaaggccatcatcttcttcgaccccgacgccaagggcctgagcgaccccggcaagatcaagagactgagaagccaggtgcaggtgagcctggaggactacatcaacgacagacagtacgacagcagaggcagattcggcgagctgctgctgctgctgcccaccctgcagagcatcacctggcagatgatcgagcagatccagttcatcaagctgttcggcatggccaagatcgacaacctgctgcaggagatgctgctgtga

SEQ ID NO: 896 - RNA, 1128 nt, synthetic construct
  misc_feature 1..1128: note = CDS (opt4) from Homo sapiens__NP_000448.3__HNF4A(1-375)(S167A)
  source 1..1128: mol_type = other RNA
atgagactgagcaagaccctggtggacatggacatggccgactacagcgccgccctggaccccgcctacaccaccctggagttcgagaacgtgcaggtgctgaccatgggcaacgacaccagccccagcgagggcaccaacctgaacgcccccaacagcctgggcgtgagcgccctgtgcgccatctgcggcgacagagccaccggcaagcactacggcgccagcagctgcgacggctgcaagggcttcttcagaagaagcgtgagaaagaaccacatgtacagctgcagattcagcagacagtgcgtggtggacaaggacaagagaaaccagtgcagatactgcagactgaagaagtgcttcagagccggcatgaagaaggaggccgtgcagaacgagagagacagaatcagcaccagaagaagcagctacgaggacagcagcctgcccagcatcaacgccctgctgcaggccgaggtgctgagcagacagatcaccgcccccgtgagcggcatcaacggcgacatcagagccaagaagatcgccagcatcgccgacgtgtgcgagagcatgaaggagcagctgctggtgctggtggagtgggccaagtacatccccgccttctgcgagctgcccctggacgaccaggtggccctgctgagagcccacgccggcgagcacctgctgctgggcgccaccaagagaagcatggtgttcaaggacgtgctgctgctgggcaacgactacatcgtgcccagacactgccccgagctggccgagatgagcagagtgagcatcagaatcctggacgagctggtgctgcccttccaggagctgcagatcgacgacaacgagtacgcctacctgaaggccatcatcttcttcgaccccgacgccaagggcctgagcgaccccggcaagatcaagagactgagaagccaggtgcaggtgagcctggaggactacatcaacgacagacagtacgacagcagaggcagattcggcgagctgctgctgctgctgcccaccctgcagagcatcacctggcagatgatcgagcagatccagttcatcaagctgttcggcatggccaagatcgacaacctgctgcaggagatgctgctgtga

SEQ ID NO: 897 - RNA, 1128 nt, synthetic construct; identical to SEQ ID NO: 896
  misc_feature 1..1128: note = CDS (opt4) from Homo sapiens__NP_000448.3__HNF4A(1-375)(S167A_S378A_T429A_T432A_ S436A)
  source 1..1128: mol_type = other RNA

SEQ ID NO: 898 - RNA, 1128 nt, synthetic construct; identical to SEQ ID NO: 895
  misc_feature 1..1128: note = CDS (opt4) from Homo sapiens__NP_000448.3__HNF4A(1-375)(S167E_S378E_T429E_T432E_ S436E)
  source 1..1128: mol_type = other RNA

SEQ ID NO: 899 - RNA, 1128 nt, synthetic construct
  misc_feature 1..1128: note = CDS (opt4) from Homo sapiens__NP_000448.3__HNF4A(1-375)(S87A)
  source 1..1128: mol_type = other RNA
atgagactgagcaagaccctggtggacatggacatggccgactacagcgccgccctggaccccgcctacaccaccctggagttcgagaacgtgcaggtgctgaccatgggcaacgacaccagccccagcgagggcaccaacctgaacgcccccaacagcctgggcgtgagcgccctgtgcgccatctgcggcgacagagccaccggcaagcactacggcgccagcagctgcgacggctgcaagggcttcttcagaagagccgtgagaaagaaccacatgtacagctgcagattcagcagacagtgcgtggtggacaaggacaagagaaaccagtgcagatactgcagactgaagaagtgcttcagagccggcatgaagaaggaggccgtgcagaacgagagagacagaatcagcaccagaagaagcagctacgaggacagcagcctgcccagcatcaacgccctgctgcaggccgaggtgctgagcagacagatcaccagccccgtgagcggcatcaacggcgacatcagagccaagaagatcgccagcatcgccgacgtgtgcgagagcatgaaggagcagctgctggtgctggtggagtgggccaagtacatccccgccttctgcgagctgcccctggacgaccaggtggccctgctgagagcccacgccggcgagcacctgctgctgggcgccaccaagagaagcatggtgttcaaggacgtgctgctgctgggcaacgactacatcgtgcccagacactgccccgagctggccgagatgagcagagtgagcatcagaatcctggacgagctggtgctgcccttccaggagctgcagatcgacgacaacgagtacgcctacctgaaggccatcatcttcttcgaccccgacgccaagggcctgagcgaccccggcaagatcaagagactgagaagccaggtgcaggtgagcctggaggactacatcaacgacagacagtacgacagcagaggcagattcggcgagctgctgctgctgctgcccaccctgcagagcatcacctggcagatgatcgagcagatccagttcatcaagctgttcggcatggccaagatcgacaacctgctgcaggagatgctgctgtga

SEQ ID NO: 900 - RNA, 1128 nt, synthetic construct
  misc_feature 1..1128: note = CDS (opt4) from Homo sapiens__NP_000448.3__HNF4A(1-375)(S87E)
  source 1..1128: mol_type = other RNA
atgagactgagcaagaccctggtggacatggacatggccgactacagcgccgccctggaccccgcctacaccaccctggagttcgagaacgtgcaggtgctgaccatgggcaacgacaccagccccagcgagggcaccaacctgaacgcccccaacagcctgggcgtgagcgccctgtgcgccatctgcggcgacagagccaccggcaagcactacggcgccagcagctgcgacggctgcaagggcttcttcagaagagaggtgagaaagaaccacatgtacagctgcagattcagcagacagtgcgtggtggacaaggacaagagaaaccagtgcagatactgcagactgaagaagtgcttcagagccggcatgaagaaggaggccgtgcagaacgagagagacagaatcagcaccagaagaagcagctacgaggacagcagcctgcccagcatcaacgccctgctgcaggccgaggtgctgagcagacagatcaccagccccgtgagcggcatcaacggcgacatcagagccaagaagatcgccagcatcgccgacgtgtgcgagagcatgaaggagcagctgctggtgctggtggagtgggccaagtacatccccgccttctgcgagctgcccctggacgaccaggtggccctgctgagagcccacgccggcgagcacctgctgctgggcgccaccaagagaagcatggtgttcaaggacgtgctgctgctgggcaacgactacatcgtgcccagacactgccccgagctggccgagatgagcagagtgagcatcagaatcctggacgagctggtgctgcccttccaggagctgcagatcgacgacaacgagtacgcctacctgaaggccatcatcttcttcgaccccgacgccaagggcctgagcgaccccggcaagatcaagagactgagaagccaggtgcaggtgagcctggaggactacatcaacgacagacagtacgacagcagaggcagattcggcgagctgctgctgctgctgcccaccctgcagagcatcacctggcagatgatcgagcagatccagttcatcaagctgttcggcatggccaagatcgacaacctgctgcaggagatgctgctgtga

SEQ ID NO: 901 - RNA, 1128 nt, synthetic construct
  misc_feature 1..1128: note = CDS (opt4) from Homo sapiens__NP_000448.3__HNF4A(1-375)(R2V)
  source 1..1128: mol_type = other RNA
atggtgctgagcaagaccctggtggacatggacatggccgactacagcgccgccctggaccccgcctacaccaccctggagttcgagaacgtgcaggtgctgaccatgggcaacgacaccagccccagcgagggcaccaacctgaacgcccccaacagcctgggcgtgagcgccctgtgcgccatctgcggcgacagagccaccggcaagcactacggcgccagcagctgcgacggctgcaagggcttcttcagaagaagcgtgagaaagaaccacatgtacagctgcagattcagcagacagtgcgtggtggacaaggacaagagaaaccagtgcagatactgcagactgaagaagtgcttcagagccggcatgaagaaggaggccgtgcagaacgagagagacagaatcagcaccagaagaagcagctacgaggacagcagcctgcccagcatcaacgccctgctgcaggccgaggtgctgagcagacagatcaccagccccgtgagcggcatcaacggcgacatcagagccaagaagatcgccagcatcgccgacgtgtgcgagagcatgaaggagcagctgctggtgctggtggagtgggccaagtacatccccgccttctgcgagctgcccctggacgaccaggtggccctgctgagagcccacgccggcgagcacctgctgctgggcgccaccaagagaagcatggtgttcaaggacgtgctgctgctgggcaacgactacatcgtgcccagacactgccccgagctggccgagatgagcagagtgagcatcagaatcctggacgagctggtgctgcccttccaggagctgcagatcgacgacaacgagtacgcctacctgaaggccatcatcttcttcgaccccgacgccaagggcctgagcgaccccggcaagatcaagagactgagaagccaggtgcaggtgagcctggaggactacatcaacgacagacagtacgacagcagaggcagattcggcgagctgctgctgctgctgcccaccctgcagagcatcacctggcagatgatcgagcagatccagttcatcaagctgttcggcatggccaagatcgacaacctgctgcaggagatgctgctgtga

SEQ ID NO: 902 - RNA, 1128 nt, synthetic construct
  misc_feature 1..1128: note = CDS (opt4) from Homo sapiens__NP_000448.3__HNF4A(1-375)(R2V_K5V)
  source 1..1128: mol_type = other RNA
atggtgctgagcgtgaccctggtggacatggacatggccgactacagcgccgccctggaccccgcctacaccaccctggagttcgagaacgtgcaggtgctgaccatgggcaacgacaccagccccagcgagggcaccaacctgaacgcccccaacagcctgggcgtgagcgccctgtgcgccatctgcggcgacagagccaccggcaagcactacggcgccagcagctgcgacggctgcaagggcttcttcagaagaagcgtgagaaagaaccacatgtacagctgcagattcagcagacagtgcgtggtggacaaggacaagagaaaccagtgcagatactgcagactgaagaagtgcttcagagccggcatgaagaaggaggccgtgcagaacgagagagacagaatcagcaccagaagaagcagctacgaggacagcagcctgcccagcatcaacgccctgctgcaggccgaggtgctgagcagacagatcaccagccccgtgagcggcatcaacggcgacatcagagccaagaagatcgccagcatcgccgacgtgtgcgagagcatgaaggagcagctgctggtgctggtggagtgggccaagtacatccccgccttctgcgagctgcccctggacgaccaggtggccctgctgagagcccacgccggcgagcacctgctgctgggcgccaccaagagaagcatggtgttcaaggacgtgctgctgctgggcaacgactacatcgtgcccagacactgccccgagctggccgagatgagcagagtgagcatcagaatcctggacgagctggtgctgcccttccaggagctgcagatcgacgacaacgagtacgcctacctgaaggccatcatcttcttcgaccccgacgccaagggcctgagcgaccccggcaagatcaagagactgagaagccaggtgcaggtgagcctggaggactacatcaacgacagacagtacgacagcagaggcagattcggcgagctgctgctgctgctgcccaccctgcagagcatcacctggcagatgatcgagcagatccagttcatcaagctgttcggcatggccaagatcgacaacctgctgcaggagatgctgctgtga

SEQ ID NO: 903 - RNA, 1128 nt, synthetic construct
  misc_feature 1..1128: note = CDS (opt4) from Homo sapiens__NP_000448.3__HNF4A(1-375)(K179R_K180R)
  source 1..1128: mol_type = other RNA
atgagactgagcaagaccctggtggacatggacatggccgactacagcgccgccctggaccccgcctacaccaccctggagttcgagaacgtgcaggtgctgaccatgggcaacgacaccagccccagcgagggcaccaacctgaacgcccccaacagcctgggcgtgagcgccctgtgcgccatctgcggcgacagagccaccggcaagcactacggcgccagcagctgcgacggctgcaagggcttcttcagaagaagcgtgagaaagaaccacatgtacagctgcagattcagcagacagtgcgtggtggacaaggacaagagaaaccagtgcagatactgcagactgaagaagtgcttcagagccggcatgaagaaggaggccgtgcagaacgagagagacagaatcagcaccagaagaagcagctacgaggacagcagcctgcccagcatcaacgccctgctgcaggccgaggtgctgagcagacagatcaccagccccgtgagcggcatcaacggcgacatcagagccagaagaatcgccagcatcgccgacgtgtgcgagagcatgaaggagcagctgctggtgctggtggagtgggccaagtacatccccgccttctgcgagctgcccctggacgaccaggtggccctgctgagagcccacgccggcgagcacctgctgctgggcgccaccaagagaagcatggtgttcaaggacgtgctgctgctgggcaacgactacatcgtgcccagacactgccccgagctggccgagatgagcagagtgagcatcagaatcctggacgagctggtgctgcccttccaggagctgcagatcgacgacaacgagtacgcctacctgaaggccatcatcttcttcgaccccgacgccaagggcctgagcgaccccggcaagatcaagagactgagaagccaggtgcaggtgagcctggaggactacatcaacgacagacagtacgacagcagaggcagattcggcgagctgctgctgctgctgcccaccctgcagagcatcacctggcagatgatcgagcagatccagttcatcaagctgttcggcatggccaagatcgacaacctgctgcaggagatgctgctgtga

SEQ ID NO: 904 - RNA, 1128 nt, synthetic construct
  misc_feature 1..1128: note = CDS (opt4) from Homo sapiens__NP_000448.3__HNF4A(1-375)(K234R)
  source 1..1128: mol_type = other RNA
atgagactgagcaagaccctggtggacatggacatggccgactacagcgccgccctggaccccgcctacaccaccctggagttcgagaacgtgcaggtgctgaccatgggcaacgacaccagccccagcgagggcaccaacctgaacgcccccaacagcctgggcgtgagcgccctgtgcgccatctgcggcgacagagccaccggcaagcactacggcgccagcagctgcgacggctgcaagggcttcttcagaagaagcgtgagaaagaaccacatgtacagctgcagattcagcagacagtgcgtggtggacaaggacaagagaaaccagtgcagatactgcagactgaagaagtgcttcagagccggcatgaagaaggaggccgtgcagaacgagagagacagaatcagcaccagaagaagcagctacgaggacagcagcctgcccagcatcaacgccctgctgcaggccgaggtgctgagcagacagatcaccagccccgtgagcggcatcaacggcgacatcagagccaagaagatcgccagcatcgccgacgtgtgcgagagcatgaaggagcagctgctggtgctggtggagtgggccaagtacatccccgccttctgcgagctgcccctggacgaccaggtggccctgctgagagcccacgccggcgagcacctgctgctgggcgccaccagaagaagcatggtgttcaaggacgtgctgctgctgggcaacgactacatcgtgcccagacactgccccgagctggccgagatgagcagagtgagcatcagaatcctggacgagctggtgctgcccttccaggagctgcagatcgacgacaacgagtacgcctacctgaaggccatcatcttcttcgaccccgacgccaagggcctgagcgaccccggcaagatcaagagactgagaagccaggtgcaggtgagcctggaggactacatcaacgacagacagtacgacagcagaggcagattcggcgagctgctgctgctgctgcccaccctgcagagcatcacctggcagatgatcgagcagatccagttcatcaagctgttcggcatggccaagatcgacaacctgctgcaggagatgctgctgtga

SEQ ID NO: 905 - RNA, 1128 nt, synthetic construct
  misc_feature 1..1128: note = CDS (opt4) from Homo sapiens__NP_000448.3__HNF4A(1-375)(K300R)
  source 1..1128: mol_type = other RNA
atgagactgagcaagaccctggtggacatggacatggccgactacagcgccgccctggaccccgcctacaccaccctggagttcgagaacgtgcaggtgctgaccatgggcaacgacaccagccccagcgagggcaccaacctgaacgcccccaacagcctgggcgtgagcgccctgtgcgccatctgcggcgacagagccaccggcaagcactacggcgccagcagctgcgacggctgcaagggcttcttcagaagaagcgtgagaaagaaccacatgtacagctgcagattcagcagacagtgcgtggtggacaaggacaagagaaaccagtgcagatactgcagactgaagaagtgcttcagagccggcatgaagaaggaggccgtgcagaacgagagagacagaatcagcaccagaagaagcagctacgaggacagcagcctgcccagcatcaacgccctgctgcaggccgaggtgctgagcagacagatcaccagccccgtgagcggcatcaacggcgacatcagagccaagaagatcgccagcatcgccgacgtgtgcgagagcatgaaggagcagctgctggtgctggtggagtgggccaagtacatccccgccttctgcgagctgcccctggacgaccaggtggccctgctgagagcccacgccggcgagcacctgctgctgggcgccaccaagagaagcatggtgttcaaggacgtgctgctgctgggcaacgactacatcgtgcccagacactgccccgagctggccgagatgagcagagtgagcatcagaatcctggacgagctggtgctgcccttccaggagctgcagatcgacgacaacgagtacgcctacctgaaggccatcatcttcttcgaccccgacgccagaggcctgagcgaccccggcaagatcaagagactgagaagccaggtgcaggtgagcctggaggactacatcaacgacagacagtacgacagcagaggcagattcggcgagctgctgctgctgctgcccaccctgcagagcatcacctggcagatgatcgagcagatccagttcatcaagctgttcggcatggccaagatcgacaacctgctgcaggagatgctgctgtga

SEQ ID NO: 906 - RNA, 1128 nt, synthetic construct
  misc_feature 1..1128: note = CDS (opt4) from Homo sapiens__NP_000448.3__HNF4A(1-375)(K300R_K307R_K309R)
  source 1..1128: mol_type = other RNA
atgagactgagcaagaccctggtggacatggacatggccgactacagcgccgccctggaccccgcctacaccaccctggagttcgagaacgtgcaggtgctgaccatgggcaacgacaccagccccagcgagggcaccaacctgaacgcccccaacagcctgggcgtgagcgccctgtgcgccatctgcggcgacagagccaccggcaagcactacggcgccagcagctgcgacggctgcaagggcttcttcagaagaagcgtgagaaagaaccacatgtacagctgcagattcagcagacagtgcgtggtggacaaggacaagagaaaccagtgcagatactgcagactgaagaagtgcttcagagccggcatgaagaaggaggccgtgcagaacgagagagacagaatcagcaccagaagaagcagctacgaggacagcagcctgcccagcatcaacgccctgctgcaggccgaggtgctgagcagacagatcaccagccccgtgagcggcatcaacggcgacatcagagccaagaagatcgccagcatcgccgacgtgtgcgagagcatgaaggagcagctgctggtgctggtggagtgggccaagtacatccccgccttctgcgagctgcccctggacgaccaggtggccctgctgagagcccacgccggcgagcacctgctgctgggcgccaccaagagaagcatggtgttcaaggacgtgctgctgctgggcaacgactacatcgtgcccagacactgccccgagctggccgagatgagcagagtgagcatcagaatcctggacgagctggtgctgcccttccaggagctgcagatcgacgacaacgagtacgcctacctgaaggccatcatcttcttcgaccccgacgccagaggcctgagcgaccccggcagaatcagaagactgagaagccaggtgcaggtgagcctggaggactacatcaacgacagacagtacgacagcagaggcagattcggcgagctgctgctgctgctgcccaccctgcagagcatcacctggcagatgatcgagcagatccagttcatcaagctgttcggcatggccaagatcgacaacctgctgcaggagatgctgctgtga

SEQ ID NO: 907 - RNA, 1128 nt, synthetic construct; identical to SEQ ID NO: 888
  misc_feature 1..1128: note = CDS (opt4) from Homo sapiens__NP_000448.3__HNF4A(1-375)(K447R_K470R)
  source 1..1128: mol_type = other RNA

SEQ ID NO: 908 - RNA, 1128 nt, synthetic construct; identical to SEQ ID NO: 888
  misc_feature 1..1128: note = CDS (opt4) from Homo sapiens__NP_000448.3__HNF4A(1-375)(K458R)
  source 1..1128: mol_type = other RNA

SEQ ID NO: 909 - RNA, 1128 nt, synthetic construct
  misc_feature 1..1128: note = CDS (opt4) from Homo sapiens__NP_000448.3__HNF4A(1-375)(K106R_K108R_K126R_K127R)
  source 1..1128: mol_type = other RNA
atgagactgagcaagaccctggtggacatggacatggccgactacagcgccgccctggaccccgcctacaccaccctggagttcgagaacgtgcaggtgctgaccatgggcaacgacaccagccccagcgagggcaccaacctgaacgcccccaacagcctgggcgtgagcgccctgtgcgccatctgcggcgacagagccaccggcaagcactacggcgccagcagctgcgacggctgcaagggcttcttcagaagaagcgtgagaaagaaccacatgtacagctgcagattcagcagacagtgcgtggtggacagagacagaagaaaccagtgcagatactgcagactgaagaagtgcttcagagccggcatgagaagagaggccgtgcagaacgagagagacagaatcagcaccagaagaagcagctacgaggacagcagcctgcccagcatcaacgccctgctgcaggccgaggtgctgagcagacagatcaccagccccgtgagcggcatcaacggcgacatcagagccaagaagatcgccagcatcgccgacgtgtgcgagagcatgaaggagcagctgctggtgctggtggagtgggccaagtacatccccgccttctgcgagctgcccctggacgaccaggtggccctgctgagagcccacgccggcgagcacctgctgctgggcgccaccaagagaagcatggtgttcaaggacgtgctgctgctgggcaacgactacatcgtgcccagacactgccccgagctggccgagatgagcagagtgagcatcagaatcctggacgagctggtgctgcccttccaggagctgcagatcgacgacaacgagtacgcctacctgaaggccatcatcttcttcgaccccgacgccaagggcctgagcgaccccggcaagatcaagagactgagaagccaggtgcaggtgagcctggaggactacatcaacgacagacagtacgacagcagaggcagattcggcgagctgctgctgctgctgcccaccctgcagagcatcacctggcagatgatcgagcagatccagttcatcaagctgttcggcatggccaagatcgacaacctgctgcaggagatgctgctgtga

SEQ ID NO: 910 - RNA, 1128 nt, synthetic construct
  misc_feature 1..1128: note = CDS (opt4) from Homo sapiens__NP_000448.3__HNF4A(1-375)(E285Q)
  source 1..1128: mol_type = other RNA
atgagactgagcaagaccctggtggacatggacatggccgactacagcgccgccctggaccccgcctacaccaccctggagttcgagaacgtgcaggtgctgaccatgggcaacgacaccagccccagcgagggcaccaacctgaacgcccccaacagcctgggcgtgagcgccctgtgcgccatctgcggcgacagagccaccggcaagcactacggcgccagcagctgcgacggctgcaagggcttcttcagaagaagcgtgagaaagaaccacatgtacagctgcagattcagcagacagtgcgtggtggacaaggacaagagaaaccagtgcagatactgcagactgaagaagtgcttcagagccggcatgaagaaggaggccgtgcagaacgagagagacagaatcagcaccagaagaagcagctacgaggacagcagcctgcccagcatcaacgccctgctgcaggccgaggtgctgagcagacagatcaccagccccgtgagcggcatcaacggcgacatcagagccaagaagatcgccagcatcgccgacgtgtgcgagagcatgaaggagcagctgctggtgctggtggagtgggccaagtacatccccgccttctgcgagctgcccctggacgaccaggtggccctgctgagagcccacgccggcgagcacctgctgctgggcgccaccaagagaagcatggtgttcaaggacgtgctgctgctgggcaacgactacatcgtgcccagacactgccccgagctggccgagatgagcagagtgagcatcagaatcctggacgagctggtgctgcccttccaggagctgcagatcgacgacaaccagtacgcctacctgaaggccatcatcttcttcgaccccgacgccaagggcctgagcgaccccggcaagatcaagagactgagaagccaggtgcaggtgagcctggaggactacatcaacgacagacagtacgacagcagaggcagattcggcgagctgctgctgctgctgcccaccctgcagagcatcacctggcagatgatcgagcagatccagttcatcaagctgttcggcatggccaagatcgacaacctgctgcaggagatgctgctgtga

SEQ ID NO: 911 - RNA, 1128 nt, synthetic construct
  misc_feature 1..1128: note = CDS (opt4) from Homo sapiens__NP_000448.3__HNF4A(1-375)(T166E)
  source 1..1128: mol_type = other RNA
atgagactgagcaagaccctggtggacatggacatggccgactacagcgccgccctggaccccgcctacaccaccctggagttcgagaacgtgcaggtgctgaccatgggcaacgacaccagccccagcgagggcaccaacctgaacgcccccaacagcctgggcgtgagcgccctgtgcgccatctgcggcgacagagccaccggcaagcactacggcgccagcagctgcgacggctgcaagggcttcttcagaagaagcgtgagaaagaaccacatgtacagctgcagattcagcagacagtgcgtggtggacaaggacaagagaaaccagtgcagatactgcagactgaagaagtgcttcagagccggcatgaagaaggaggccgtgcagaacgagagagacagaatcagcaccagaagaagcagctacgaggacagcagcctgcccagcatcaacgccctgctgcaggccgaggtgctgagcagacagatcgagagccccgtgagcggcatcaacggcgacatcagagccaagaagatcgccagcatcgccgacgtgtgcgagagcatgaaggagcagctgctggtgctggtggagtgggccaagtacatccccgccttctgcgagctgcccctggacgaccaggtggccctgctgagagcccacgccggcgagcacctgctgctgggcgccaccaagagaagcatggtgttcaaggacgtgctgctgctgggcaacgactacatcgtgcccagacactgccccgagctggccgagatgagcagagtgagcatcagaatcctggacgagctggtgctgcccttccaggagctgcagatcgacgacaacgagtacgcctacctgaaggccatcatcttcttcgaccccgacgccaagggcctgagcgaccccggcaagatcaagagactgagaagccaggtgcaggtgagcctggaggactacatcaacgacagacagtacgacagcagaggcagattcggcgagctgctgctgctgctgcccaccctgcagagcatcacctggcagatgatcgagcagatccagttcatcaagctgttcggcatggccaagatcgacaacctgctgcaggagatgctgctgtga

SEQ ID NO: 912 - RNA, 1128 nt, synthetic construct
  misc_feature 1..1128: note = CDS (opt4) from Homo sapiens__NP_000448.3__HNF4A(1-375)(S148A)
  source 1..1128: mol_type = other RNA
atgagactgagcaagaccctggtggacatggacatggccgactacagcgccgccctggaccccgcctacaccaccctggagttcgagaacgtgcaggtgctgaccatgggcaacgacaccagccccagcgagggcaccaacctgaacgcccccaacagcctgggcgtgagcgccctgtgcgccatctgcggcgacagagccaccggcaagcactacggcgccagcagctgcgacggctgcaagggcttcttcagaagaagcgtgagaaagaaccacatgtacagctgcagattcagcagacagtgcgtggtggacaaggacaagagaaaccagtgcagatactgcagactgaagaagtgcttcagagccggcatgaagaaggaggccgtgcagaacgagagagacagaatcagcaccagaagaagcagctacgaggacagcgccctgcccagcatcaacgccctgctgcaggccgaggtgctgagcagacagatcaccagccccgtgagcggcatcaacggcgacatcagagccaagaagatcgccagcatcgccgacgtgtgcgagagcatgaaggagcagctgctggtgctggtggagtgggccaagtacatccccgccttctgcgagctgcccctggacgaccaggtggccctgctgagagcccacgccggcgagcacctgctgctgggcgccaccaagagaagcatggtgttcaaggacgtgctgctgctgggcaacgactacatcgtgcccagacactgccccgagctggccgagatgagcagagtgagcatcagaatcctggacgagctggtgctgcccttccaggagctgcagatcgacgacaacgagtacgcctacctgaaggccatcatcttcttcgaccccgacgccaagggcctgagcgaccccggcaagatcaagagactgagaagccaggtgcaggtgagcctggaggactacatcaacgacagacagtacgacagcagaggcagattcggcgagctgctgctgctgctgcccaccctgcagagcatcacctggcagatgatcgagcagatccagttcatcaagctgttcggcatggccaagatcgacaacctgctgcaggagatgctgctgtga

SEQ ID NO: 913 - RNA, 1128 nt, synthetic construct
  misc_feature 1..1128: note = CDS (opt4) from Homo sapiens__NP_000448.3__HNF4A(1-375)(S148E)
  source 1..1128: mol_type = other RNA
atgagactgagcaagaccctggtggacatggacatggccgactacagcgccgccctggaccccgcctacaccaccctggagttcgagaacgtgcaggtgctgaccatgggcaacgacaccagccccagcgagggcaccaacctgaacgcccccaacagcctgggcgtgagcgccctgtgcgccatctgcggcgacagagccaccggcaagcactacggcgccagcagctgcgacggctgcaagggcttcttcagaagaagcgtgagaaagaaccacatgtacagctgcagattcagcagacagtgcgtggtggacaaggacaagagaaaccagtgcagatactgcagactgaagaagtgcttcagagccggcatgaagaaggaggccgtgcagaacgagagagacagaatcagcaccagaagaagcagctacgaggacagcgagctgcccagcatcaacgccctgctgcaggccgaggtgctgagcagacagatcaccagccccgtgagcggcatcaacggcgacatcagagccaagaagatcgccagcatcgccgacgtgtgcgagagcatgaaggagcagctgctggtgctggtggagtgggccaagtacatccccgccttctgcgagctgcccctggacgaccaggtggccctgctgagagcccacgccggcgagcacctgctgctgggcgccaccaagagaagcatggtgttcaaggacgtgctgctgctgggcaacgactacatcgtgcccagacactgccccgagctggccgagatgagcagagtgagcatcagaatcctggacgagctggtgctgcccttccaggagctgcagatcgacgacaacgagtacgcctacctgaaggccatcatcttcttcgaccccgacgccaagggcctgagcgaccccggcaagatcaagagactgagaagccaggtgcaggtgagcctggaggactacatcaacgacagacagtacgacagcagaggcagattcggcgagctgctgctgctgctgcccaccctgcagagcatcacctggcagatgatcgagcagatccagttcatcaagctgttcggcatggccaagatcgacaacctgctgcaggagatgctgctgtga

SEQ ID NO: 914 - RNA, 1128 nt, synthetic construct
  misc_feature 1..1128: note = CDS (opt4) from Homo sapiens__NP_000448.3__HNF4A(1-375)(S183A)
  source 1..1128: mol_type = other RNA
atgagactgagcaagaccctggtggacatggacatggccgactacagcgccgccctggaccccgcctacaccaccctggagttcgagaacgtgcaggtgctgaccatgggcaacgacaccagccccagcgagggcaccaacctgaacgcccccaacagcctgggcgtgagcgccctgtgcgccatctgcggcgacagagccaccggcaagcactacggcgccagcagctgcgacggctgcaagggcttcttcagaagaagcgtgagaaagaaccacatgtacagctgcagattcagcagacagtgcgtggtggacaaggacaagagaaaccagtgcagatactgcagactgaagaagtgcttcagagccggcatgaagaaggaggccgtgcagaacgagagagacagaatcagcaccagaagaagcagctacgaggacagcagcctgcccagcatcaacgccctgctgcaggccgaggtgctgagcagacagatcaccagccccgtgagcggcatcaacggcgacatcagagccaagaagatcgccgccatcgccgacgtgtgcgagagcatgaaggagcagctgctggtgctggtggagtgggccaagtacatccccgccttctgcgagctgcccctggacgaccaggtggccctgctgagagcccacgccggcgagcacctgctgctgggcgccaccaagagaagcatggtgttcaaggacgtgctgctgctgggcaacgactacatcgtgcccagacactgccccgagctggccgagatgagcagagtgagcatcagaatcctggacgagctggtgctgcccttccaggagctgcagatcgacgacaacgagtacgcctacctgaaggccatcatcttcttcgaccccgacgccaagggcctgagcgaccccggcaagatcaagagactgagaagccaggtgcaggtgagcctggaggactacatcaacgacagacagtacgacagcagaggcagattcggcgagctgctgctgctgctgcccaccctgcagagcatcacctggcagatgatcgagcagatccagttcatcaagctgttcggcatggccaagatcgacaacctgctgcaggagatgctgctgtga

SEQ ID NO: 915 - RNA, 1128 nt, synthetic construct
  misc_feature 1..1128: note = CDS (opt4) from Homo sapiens__NP_000448.3__HNF4A(1-375)(S183E)
  source 1..1128: mol_type = other RNA
atgagactgagcaagaccctggtggacatggacatggccgactacagcgccgccctggaccccgcctacaccaccctggagttcgagaacgtgcaggtgctgaccatgggcaacgacaccagccccagcgagggcaccaacctgaacgcccccaacagcctgggcgtgagcgccctgtgcgccatctgcggcgacagagccaccggcaagcactacggcgccagcagctgcgacggctgcaagggcttcttcagaagaagcgtgagaaagaaccacatgtacagctgcagattcagcagacagtgcgtggtggacaaggacaagagaaaccagtgcagatactgcagactgaagaagtgcttcagagccggcatgaagaaggaggccgtgcagaacgagagagacagaatcagcaccagaagaagcagctacgaggacagcagcctgcccagcatcaacgccctgctgcaggccgaggtgctgagcagacagatcaccagccccgtgagcggcatcaacggcgacatcagagccaagaagatcgccgagatcgccgacgtgtgcgagagcatgaaggagcagctgctggtgctggtggagtgggccaagtacatccccgccttctgcgagctgcccctggacgaccaggtggccctgctgagagcccacgccggcgagcacctgctgctgggcgccaccaagagaagcatggtgttcaaggacgtgctgctgctgggcaacgactacatcgtgcccagacactgccccgagctggccgagatgagcagagtgagcatcagaatcctggacgagctggtgctgcccttccaggagctgcagatcgacgacaacgagtacgcctacctgaaggccatcatcttcttcgaccccgacgccaagggcctgagcgaccccggcaagatcaagagactgagaagccaggtgcaggtgagcctggaggactacatcaacgacagacagtacgacagcagaggcagattcggcgagctgctgctgctgctgcccaccctgcagagcatcacctggcagatgatcgagcagatccagttcatcaagctgttcggcatggccaagatcgacaacctgctgcaggagatgctgctgtga

SEQ ID NO: 916 - RNA, 1128 nt, synthetic construct; identical to SEQ ID NO: 888
  misc_feature 1..1128: note = CDS (opt4) from Homo sapiens__NP_000448.3__HNF4A(1-375)(S461A)
  source 1..1128: mol_type = other RNA

SEQ ID NO: 917 - RNA, 1128 nt, synthetic construct; identical to SEQ ID NO: 888
  misc_feature 1..1128: note = CDS (opt4) from Homo sapiens__NP_000448.3__HNF4A(1-375)(S461E)
  source 1..1128: mol_type = other RNA

SEQ ID NO: 918 - RNA, 1128 nt, synthetic construct
  misc_feature 1..1128: note = CDS (opt4) from Homo sapiens__NP_000448.3__HNF4A(1-375)(S142A_S143A_S313A)
  source 1..1128: mol_type = other RNA
atgagactgagcaagaccctggtggacatggacatggccgactacagcgccgccctggaccccgcctacaccaccctggagttcgagaacgtgcaggtgctgaccatgggcaacgacaccagccccagcgagggcaccaacctgaacgcccccaacagcctgggcgtgagcgccctgtgcgccatctgcggcgacagagccaccggcaagcactacggcgccagcagctgcgacggctgcaagggcttcttcagaagaagcgtgagaaagaaccacatgtacagctgcagattcagcagacagtgcgtggtggacaaggacaagagaaaccagtgcagatactgcagactgaagaagtgcttcagagccggcatgaagaaggaggccgtgcagaacgagagagacagaatcagcaccagaagagccgcctacgaggacagcagcctgcccagcatcaacgccctgctgcaggccgaggtgctgagcagacagatcaccagccccgtgagcggcatcaacggcgacatcagagccaagaagatcgccagcatcgccgacgtgtgcgagagcatgaaggagcagctgctggtgctggtggagtgggccaagtacatccccgccttctgcgagctgcccctggacgaccaggtggccctgctgagagcccacgccggcgagcacctgctgctgggcgccaccaagagaagcatggtgttcaaggacgtgctgctgctgggcaacgactacatcgtgcccagacactgccccgagctggccgagatgagcagagtgagcatcagaatcctggacgagctggtgctgcccttccaggagctgcagatcgacgacaacgagtacgcctacctgaaggccatcatcttcttcgaccccgacgccaagggcctgagcgaccccggcaagatcaagagactgagagcccaggtgcaggtgagcctggaggactacatcaacgacagacagtacgacagcagaggcagattcggcgagctgctgctgctgctgcccaccctgcagagcatcacctggcagatgatcgagcagatccagttcatcaagctgttcggcatggccaagatcgacaacctgctgcaggagatgctgctgtga

SEQ ID NO: 919 - RNA, 1128 nt, synthetic construct; identical to SEQ ID NO: 918
  misc_feature 1..1128: note = CDS (opt4) from Homo sapiens__NP_000448.3__HNF4A(1-375)(S142A_S143A_S313A_K458R)
  source 1..1128: mol_type = other RNA

SEQ ID NO: 920 - RNA, 1128 nt, synthetic construct
  misc_feature 1..1128: note = CDS (opt4) from Homo sapiens__NP_000448.3__HNF4A(1-375)(S142A_S143A_S167A_S313A_ S378A_T429A_T432A_S436A_K458R)
  source 1..1128: mol_type = other RNA
atgagactgagcaagaccctggtggacatggacatggccgactacagcgccgccctggaccccgcctacaccaccctggagttcgagaacgtgcaggtgctgaccatgggcaacgacaccagccccagcgagggcaccaacctgaacgcccccaacagcctgggcgtgagcgccctgtgcgccatctgcggcgacagagccaccggcaagcactacggcgccagcagctgcgacggctgcaagggcttcttcagaagaagcgtgagaaagaaccacatgtacagctgcagattcagcagacagtgcgtggtggacaaggacaagagaaaccagtgcagatactgcagactgaagaagtgcttcagagccggcatgaagaaggaggccgtgcagaacgagagagacagaatcagcaccagaagagccgcctacgaggacagcagcctgcccagcatcaacgccctgctgcaggccgaggtgctgagcagacagatcaccgcccccgtgagcggcatcaacggcgacatcagagccaagaagatcgccagcatcgccgacgtgtgcgagagcatgaaggagcagctgctggtgctggtggagtgggccaagtacatccccgccttctgcgagctgcccctggacgaccaggtggccctgctgagagcccacgccggcgagcacctgctgctgggcgccaccaagagaagcatggtgttcaaggacgtgctgctgctgggcaacgactacatcgtgcccagacactgccccgagctggccgagatgagcagagtgagcatcagaatcctggacgagctggtgctgcccttccaggagctgcagatcgacgacaacgagtacgcctacctgaaggccatcatcttcttcgaccccgacgccaagggcctgagcgaccccggcaagatcaagagactgagagcccaggtgcaggtgagcctggaggactacatcaacgacagacagtacgacagcagaggcagattcggcgagctgctgctgctgctgcccaccctgcagagcatcacctggcagatgatcgagcagatccagttcatcaagctgttcggcatggccaagatcgacaacctgctgcaggagatgctgctgtga

SEQ ID NO: 921 - RNA, 1128 nt, synthetic construct
  misc_feature 1..1128: note = CDS (opt4) from Homo sapiens__NP_000448.3__HNF4A(1-375)(S142A_S143A_S148A_S167A_ S313A_S378A_T429A_T432A_S436A_K458R)
  source 1..1128: mol_type = other RNA
atgagactgagcaagaccctggtggacatggacatggccgactacagcgccgccctggaccccgcctacaccaccctggagttcgagaacgtgcaggtgctgaccatgggcaacgacaccagccccagcgagggcaccaacctgaacgcccccaacagcctgggcgtgagcgccctgtgcgccatctgcggcgacagagccaccggcaagcactacggcgccagcagctgcgacggctgcaagggcttcttcagaagaagcgtgagaaagaaccacatgtacagctgcagattcagcagacagtgcgtggtggacaaggacaagagaaaccagtgcagatactgcagactgaagaagtgcttcagagccggcatgaagaaggaggccgtgcagaacgagagagacagaatcagcaccagaagagccgcctacgaggacagcgccctgcccagcatcaacgccctgctgcaggccgaggtgctgagcagacagatcaccgcccccgtgagcggcatcaacggcgacatcagagccaagaagatcgccagcatcgccgacgtgtgcgagagcatgaaggagcagctgctggtgctggtggagtgggccaagtacatccccgccttctgcgagctgcccctggacgaccaggtggccctgctgagagcccacgccggcgagcacctgctgctgggcgccaccaagagaagcatggtgttcaaggacgtgctgctgctgggcaacgactacatcgtgcccagacactgccccgagctggccgagatgagcagagtgagcatcagaatcctggacgagctggtgctgcccttccaggagctgcagatcgacgacaacgagtacgcctacctgaaggccatcatcttcttcgaccccgacgccaagggcctgagcgaccccggcaagatcaagagactgagagcccaggtgcaggtgagcctggaggactacatcaacgacagacagtacgacagcagaggcagattcggcgagctgctgctgctgctgcccaccctgcagagcatcacctggcagatgatcgagcagatccagttcatcaagctgttcggcatggccaagatcgacaacctgctgcaggagatgctgctgtga

SEQ ID NO: 922 - RNA, 1128 nt, synthetic construct
  misc_feature 1..1128: note = CDS (opt4) from Homo sapiens__NP_000448.3__HNF4A(1-375)(K106R_K108R_K126R_K127R_ S142A_S143A_S148A_S167A_S313A_S378A_T429A_T432A_S436A_K458R )
  source 1..1128: mol_type = other RNA
atgagactgagcaagaccctggtggacatggacatggccgactacagcgccgccctggaccccgcctacaccaccctggagttcgagaacgtgcaggtgctgaccatgggcaacgacaccagccccagcgagggcaccaacctgaacgcccccaacagcctgggcgtgagcgccctgtgcgccatctgcggcgacagagccaccggcaagcactacggcgccagcagctgcgacggctgcaagggcttcttcagaagaagcgtgagaaagaaccacatgtacagctgcagattcagcagacagtgcgtggtggacagagacagaagaaaccagtgcagatactgcagactgaagaagtgcttcagagccggcatgagaagagaggccgtgcagaacgagagagacagaatcagcaccagaagagccgcctacgaggacagcgccctgcccagcatcaacgccctgctgcaggccgaggtgctgagcagacagatcaccgcccccgtgagcggcatcaacggcgacatcagagccaagaagatcgccagcatcgccgacgtgtgcgagagcatgaaggagcagctgctggtgctggtggagtgggccaagtacatccccgccttctgcgagctgcccctggacgaccaggtggccctgctgagagcccacgccggcgagcacctgctgctgggcgccaccaagagaagcatggtgttcaaggacgtgctgctgctgggcaacgactacatcgtgcccagacactgccccgagctggccgagatgagcagagtgagcatcagaatcctggacgagctggtgctgcccttccaggagctgcagatcgacgacaacgagtacgcctacctgaaggccatcatcttcttcgaccccgacgccaagggcctgagcgaccccggcaagatcaagagactgagagcccaggtgcaggtgagcctggaggactacatcaacgacagacagtacgacagcagaggcagattcggcgagctgctgctgctgctgcccaccctgcagagcatcacctggcagatgatcgagcagatccagttcatcaagctgttcggcatggccaagatcgacaacctgctgcaggagatgctgctgtga

SEQ ID NO: 923 - RNA, 1128 nt, synthetic construct
  misc_feature 1..1128: note = CDS (opt4) from Homo sapiens__NP_000448.3__HNF4A(1-375)(S142A_S143A_S148A_T166A_ S167A_S313A_S378A_T429A_T432A_S436A_K458R)
  source 1..1128: mol_type = other RNA
atgagactgagcaagaccctggtggacatggacatggccgactacagcgccgccctggaccccgcctacaccaccctggagttcgagaacgtgcaggtgctgaccatgggcaacgacaccagccccagcgagggcaccaacctgaacgcccccaacagcctgggcgtgagcgccctgtgcgccatctgcggcgacagagccaccggcaagcactacggcgccagcagctgcgacggctgcaagggcttcttcagaagaagcgtgagaaagaaccacatgtacagctgcagattcagcagacagtgcgtggtggacaaggacaagagaaaccagtgcagatactgcagactgaagaagtgcttcagagccggcatgaagaaggaggccgtgcagaacgagagagacagaatcagcaccagaagagccgcctacgaggacagcgccctgcccagcatcaacgccctgctgcaggccgaggtgctgagcagacagatcgccgcccccgtgagcggcatcaacggcgacatcagagccaagaagatcgccagcatcgccgacgtgtgcgagagcatgaaggagcagctgctggtgctggtggagtgggccaagtacatccccgccttctgcgagctgcccctggacgaccaggtggccctgctgagagcccacgccggcgagcacctgctgctgggcgccaccaagagaagcatggtgttcaaggacgtgctgctgctgggcaacgactacatcgtgcccagacactgccccgagctggccgagatgagcagagtgagcatcagaatcctggacgagctggtgctgcccttccaggagctgcagatcgacgacaacgagtacgcctacctgaaggccatcatcttcttcgaccccgacgccaagggcctgagcgaccccggcaagatcaagagactgagagcccaggtgcaggtgagcctggaggactacatcaacgacagacagtacgacagcagaggcagattcggcgagctgctgctgctgctgcccaccctgcagagcatcacctggcagatgatcgagcagatccagttcatcaagctgttcggcatggccaagatcgacaacctgctgcaggagatgctgctgtga

SEQ ID NO: 924 - RNA, 1128 nt, synthetic construct
  misc_feature 1..1128: note = CDS (opt4) from Homo sapiens__NP_000448.3__HNF4A(1-375)(S87A_S142A_S143A_S148A_T 166A_S167A_S313A_S378A_T429A_T432A_S436A_K458R)
  source 1..1128: mol_type = other RNA
atgagactgagcaagaccctggtggacatggacatggccgactacagcgccgccctggaccccgcctacaccaccctggagttcgagaacgtgcaggtgctgaccatgggcaacgacaccagccccagcgagggcaccaacctgaacgcccccaacagcctgggcgtgagcgccctgtgcgccatctgcggcgacagagccaccggcaagcactacggcgccagcagctgcgacggctgcaagggcttcttcagaagagccgtgagaaagaaccacatgtacagctgcagattcagcagacagtgcgtggtggacaaggacaagagaaaccagtgcagatactgcagactgaagaagtgcttcagagccggcatgaagaaggaggccgtgcagaacgagagagacagaatcagcaccagaagagccgcctacgaggacagcgccctgcccagcatcaacgccctgctgcaggccgaggtgctgagcagacagatcgccgcccccgtgagcggcatcaacggcgacatcagagccaagaagatcgccagcatcgccgacgtgtgcgagagcatgaaggagcagctgctggtgctggtggagtgggccaagtacatccccgccttctgcgagctgcccctggacgaccaggtggccctgctgagagcccacgccggcgagcacctgctgctgggcgccaccaagagaagcatggtgttcaaggacgtgctgctgctgggcaacgactacatcgtgcccagacactgccccgagctggccgagatgagcagagtgagcatcagaatcctggacgagctggtgctgcccttccaggagctgcagatcgacgacaacgagtacgcctacctgaaggccatcatcttcttcgaccccgacgccaagggcctgagcgaccccggcaagatcaagagactgagagcccaggtgcaggtgagcctggaggactacatcaacgacagacagtacgacagcagaggcagattcggcgagctgctgctgctgctgcccaccctgcagagcatcacctggcagatgatcgagcagatccagttcatcaagctgttcggcatggccaagatcgacaacctgctgcaggagatgctgctgtga

SEQ ID NO: 925 - RNA, 1128 nt, synthetic construct
  misc_feature 1..1128: note = CDS (opt4) from Homo sapiens__NP_000448.3__HNF4A(1-375)(S87A_K106R_K108R_K126R_K 127R_S142A_S143A_S148A_T166A_S167A_S313A_S378A_T429A_T432A_ S436A_K458R)
  source 1..1128: mol_type = other RNA
atgagactgagcaagaccctggtggacatggacatggccgactacagcgccgccctggaccccgcctacaccaccctggagttcgagaacgtgcaggtgctgaccatgggcaacgacaccagccccagcgagggcaccaacctgaacgcccccaacagcctgggcgtgagcgccctgtgcgccatctgcggcgacagagccaccggcaagcactacggcgccagcagctgcgacggctgcaagggcttcttcagaagagccgtgagaaagaaccacatgtacagctgcagattcagcagacagtgcgtggtggacagagacagaagaaaccagtgcagatactgcagactgaagaagtgcttcagagccggcatgagaagagaggccgtgcagaacgagagagacagaatcagcaccagaagagccgcctacgaggacagcgccctgcccagcatcaacgccctgctgcaggccgaggtgctgagcagacagatcgccgcccccgtgagcggcatcaacggcgacatcagagccaagaagatcgccagcatcgccgacgtgtgcgagagcatgaaggagcagctgctggtgctggtggagtgggccaagtacatccccgccttctgcgagctgcccctggacgaccaggtggccctgctgagagcccacgccggcgagcacctgctgctgggcgccaccaagagaagcatggtgttcaaggacgtgctgctgctgggcaacgactacatcgtgcccagacactgccccgagctggccgagatgagcagagtgagcatcagaatcctggacgagctggtgctgcccttccaggagctgcagatcgacgacaacgagtacgcctacctgaaggccatcatcttcttcgaccccgacgccaagggcctgagcgaccccggcaagatcaagagactgagagcccaggtgcaggtgagcctggaggactacatcaacgacagacagtacgacagcagaggcagattcggcgagctgctgctgctgctgcccaccctgcagagcatcacctggcagatgatcgagcagatccagttcatcaagctgttcggcatggccaagatcgacaacctgctgcaggagatgctgctgtga

SEQ ID NO: 926 - RNA, 1128 nt, synthetic construct
  misc_feature 1..1128: note = CDS (opt4) from Homo sapiens__NP_000448.3__HNF4A(1-375)(S87A_K106R_K108R_K126R_K 127R)
  source 1..1128: mol_type = other RNA
atgagactgagcaagaccctggtggacatggacatggccgactacagcgccgccctggaccccgcctacaccaccctggagttcgagaacgtgcaggtgctgaccatgggcaacgacaccagccccagcgagggcaccaacctgaacgcccccaacagcctgggcgtgagcgccctgtgcgccatctgcggcgacagagccaccggcaagcactacggcgccagcagctgcgacggctgcaagggcttcttcagaagagccgtgagaaagaaccacatgtacagctgcagattcagcagacagtgcgtggtggacagagacagaagaaaccagtgcagatactgcagactgaagaagtgcttcagagccggcatgagaagagaggccgtgcagaacgagagagacagaatcagcaccagaagaagcagctacgaggacagcagcctgcccagcatcaacgccctgctgcaggccgaggtgctgagcagacagatcaccagccccgtgagcggcatcaacggcgacatcagagccaagaagatcgccagcatcgccgacgtgtgcgagagcatgaaggagcagctgctggtgctggtggagtgggccaagtacatccccgccttctgcgagctgcccctggacgaccaggtggccctgctgagagcccacgccggcgagcacctgctgctgggcgccaccaagagaagcatggtgttcaaggacgtgctgctgctgggcaacgactacatcgtgcccagacactgccccgagctggccgagatgagcagagtgagcatcagaatcctggacgagctggtgctgcccttccaggagctgcagatcgacgacaacgagtacgcctacctgaaggccatcatcttcttcgaccccgacgccaagggcctgagcgaccccggcaagatcaagagactgagaagccaggtgcaggtgagcctggaggactacatcaacgacagacagtacgacagcagaggcagattcggcgagctgctgctgctgctgcccaccctgcagagcatcacctggcagatgatcgagcagatccagttcatcaagctgttcggcatggccaagatcgacaacctgctgcaggagatgctgctgtga

SEQ ID NO: 927 - RNA, 1128 nt, synthetic construct; identical to SEQ ID NO: 925
  misc_feature 1..1128: note = CDS (opt4) from Homo sapiens__NP_000448.3__HNF4A(1-375)(S87A_K106R_K108R_K126R_K 127R_S142A_S143A_S148A_T166A_S167A_S313A_S378A_T429A_T432A_ S436A_K458R_S461A)
  source 1..1128: mol_type = other RNA

SEQ ID NO: 928 - RNA, 1128 nt, synthetic construct; identical to SEQ ID NO: 925
  misc_feature 1..1128: note = CDS (opt4) from Homo sapiens__NP_000448.3__HNF4A(1-375)(S87A_K106R_K108R_K126R_K 127R_S142A_S143A_S148A_T166A_S167A_S313A_S378A_T429A_T432A_ S436A_K458R_S461E)
  source 1..1128: mol_type = other RNA

SEQ ID NO: 929 - RNA, 1128 nt, synthetic construct
  misc_feature 1..1128: note = CDS (opt4) from Homo sapiens__NP_000448.3__HNF4A(1-375)(S87A_K106R_K108R_K126R_K 127R_S142A_S143A_S148E_T166A_S167E_S313A_S378E_T429E_T432E_ S436E_K458R_S461E)
  source 1..1128: mol_type = other RNA
atgagactgagcaagaccctggtggacatggacatggccgactacagcgccgccctggaccccgcctacaccaccctggagttcgagaacgtgcaggtgctgaccatgggcaacgacaccagccccagcgagggcaccaacctgaacgcccccaacagcctgggcgtgagcgccctgtgcgccatctgcggcgacagagccaccggcaagcactacggcgccagcagctgcgacggctgcaagggcttcttcagaagagccgtgagaaagaaccacatgtacagctgcagattcagcagacagtgcgtggtggacagagacagaagaaaccagtgcagatactgcagactgaagaagtgcttcagagccggcatgagaagagaggccgtgcagaacgagagagacagaatcagcaccagaagagccgcctacgaggacagcgagctgcccagcatcaacgccctgctgcaggccgaggtgctgagcagacagatcgccgagcccgtgagcggcatcaacggcgacatcagagccaagaagatcgccagcatcgccgacgtgtgcgagagcatgaaggagcagctgctggtgctggtggagtgggccaagtacatccccgccttctgcgagctgcccctggacgaccaggtggccctgctgagagcccacgccggcgagcacctgctgctgggcgccaccaagagaagcatggtgttcaaggacgtgctgctgctgggcaacgactacatcgtgcccagacactgccccgagctggccgagatgagcagagtgagcatcagaatcctggacgagctggtgctgcccttccaggagctgcagatcgacgacaacgagtacgcctacctgaaggccatcatcttcttcgaccccgacgccaagggcctgagcgaccccggcaagatcaagagactgagagcccaggtgcaggtgagcctggaggactacatcaacgacagacagtacgacagcagaggcagattcggcgagctgctgctgctgctgcccaccctgcagagcatcacctggcagatgatcgagcagatccagttcatcaagctgttcggcatggccaagatcgacaacctgctgcaggagatgctgctgtga

SEQ ID NO: 930 - RNA, 1128 nt, synthetic construct
  misc_feature 1..1128: note = CDS (opt4) from Homo sapiens__NP_000448.3__HNF4A(1-375)(S87A_K106R_K108R_K126R_K 127R_S142A_S143A_S148A_T166A_S167A_K179R_K180R_S313A_S378A_ T429A_T432A_S436A_K458R_S461E)
  source 1..1128: mol_type = other RNA
atgagactgagcaagaccctggtggacatggacatggccgactacagcgccgccctggaccccgcctacaccaccctggagttcgagaacgtgcaggtgctgaccatgggcaacgacaccagccccagcgagggcaccaacctgaacgcccccaacagcctgggcgtgagcgccctgtgcgccatctgcggcgacagagccaccggcaagcactacggcgccagcagctgcgacggctgcaagggcttcttcagaagagccgtgagaaagaaccacatgtacagctgcagattcagcagacagtgcgtggtggacagagacagaagaaaccagtgcagatactgcagactgaagaagtgcttcagagccggcatgagaagagaggccgtgcagaacgagagagacagaatcagcaccagaagagccgcctacgaggacagcgccctgcccagcatcaacgccctgctgcaggccgaggtgctgagcagacagatcgccgcccccgtgagcggcatcaacggcgacatcagagccagaagaatcgccagcatcgccgacgtgtgcgagagcatgaaggagcagctgctggtgctggtggagtgggccaagtacatccccgccttctgcgagctgcccctggacgaccaggtggccctgctgagagcccacgccggcgagcacctgctgctgggcgccaccaagagaagcatggtgttcaaggacgtgctgctgctgggcaacgactacatcgtgcccagacactgccccgagctggccgagatgagcagagtgagcatcagaatcctggacgagctggtgctgcccttccaggagctgcagatcgacgacaacgagtacgcctacctgaaggccatcatcttcttcgaccccgacgccaagggcctgagcgaccccggcaagatcaagagactgagagcccaggtgcaggtgagcctggaggactacatcaacgacagacagtacgacagcagaggcagattcggcgagctgctgctgctgctgcccaccctgcagagcatcacctggcagatgatcgagcagatccagttcatcaagctgttcggcatggccaagatcgacaacctgctgcaggagatgctgctgtga

SEQ ID NO: 931 - RNA, 1128 nt, synthetic construct
  misc_feature 1..1128: note = CDS (opt4) from Homo sapiens__NP_000448.3__HNF4A(1-375)(S87A_K106R_K108R_K126R_K 127R_S142A_S143A_S148A_T166A_S167A_K300R_K307R_K309R_S313A_ S378A_T429A_T432A_S436A_K458R_S461E)
  source 1..1128: mol_type = other RNA
atgagactgagcaagaccctggtggacatggacatggccgactacagcgccgccctggaccccgcctacaccaccctggagttcgagaacgtgcaggtgctgaccatgggcaacgacaccagccccagcgagggcaccaacctgaacgcccccaacagcctgggcgtgagcgccctgtgcgccatctgcggcgacagagccaccggcaagcactacggcgccagcagctgcgacggctgcaagggcttcttcagaagagccgtgagaaagaaccacatgtacagctgcagattcagcagacagtgcgtggtggacagagacagaagaaaccagtgcagatactgcagactgaagaagtgcttcagagccggcatgagaagagaggccgtgcagaacgagagagacagaatcagcaccagaagagccgcctacgaggacagcgccctgcccagcatcaacgccctgctgcaggccgaggtgctgagcagacagatcgccgcccccgtgagcggcatcaacggcgacatcagagccaagaagatcgccagcatcgccgacgtgtgcgagagcatgaaggagcagctgctggtgctggtggagtgggccaagtacatccccgccttctgcgagctgcccctggacgaccaggtggccctgctgagagcccacgccggcgagcacctgctgctgggcgccaccaagagaagcatggtgttcaaggacgtgctgctgctgggcaacgactacatcgtgcccagacactgccccgagctggccgagatgagcagagtgagcatcagaatcctggacgagctggtgctgcccttccaggagctgcagatcgacgacaacgagtacgcctacctgaaggccatcatcttcttcgaccccgacgccagaggcctgagcgaccccggcagaatcagaagactgagagcccaggtgcaggtgagcctggaggactacatcaacgacagacagtacgacagcagaggcagattcggcgagctgctgctgctgctgcccaccctgcagagcatcacctggcagatgatcgagcagatccagttcatcaagctgttcggcatggccaagatcgacaacctgctgcaggagatgctgctgtga

SEQ ID NO: 932 - RNA, 1128 nt, synthetic construct; identical to SEQ ID NO: 925
  misc_feature 1..1128: note = CDS (opt4) from Homo sapiens__NP_000448.3__HNF4A(1-375)(S87A_K106R_K108R_K126R_K 127R_S142A_S143A_S148A_T166A_S167A_S313A_S378A_T429A_T432A_ S436A_K447R_K458R_S461E_K470R)
  source 1..1128: mol_type = other RNA

SEQ ID NO: 933 - RNA, 1128 nt, synthetic construct
  misc_feature 1..1128: note = CDS (opt4) from Homo sapiens__NP_000448.3__HNF4A(1-375)(S87A_K106R_K108R_K126R_K 127R_S142A_S143A_S148A_T166A_S167A_K179R_K180R_K234R_K300R_ K307R_K309R_S313A_S378A_T429A_T432A_S436A_K447R_K458R_S461E _K470R)
  source 1..1128: mol_type = other RNA
atgagactgagcaagaccctggtggacatggacatggccgactacagcgccgccctggaccccgcctacaccaccctggagttcgagaacgtgcaggtgctgaccatgggcaacgacaccagccccagcgagggcaccaacctgaacgcccccaacagcctgggcgtgagcgccctgtgcgccatctgcggcgacagagccaccggcaagcactacggcgccagcagctgcgacggctgcaagggcttcttcagaagagccgtgagaaagaaccacatgtacagctgcagattcagcagacagtgcgtggtggacagagacagaagaaaccagtgcagatactgcagactgaagaagtgcttcagagccggcatgagaagagaggccgtgcagaacgagagagacagaatcagcaccagaagagccgcctacgaggacagcgccctgcccagcatcaacgccctgctgcaggccgaggtgctgagcagacagatcgccgcccccgtgagcggcatcaacggcgacatcagagccagaagaatcgccagcatcgccgacgtgtgcgagagcatgaaggagcagctgctggtgctggtggagtgggccaagtacatccccgccttctgcgagctgcccctggacgaccaggtggccctgctgagagcccacgccggcgagcacctgctgctgggcgccaccagaagaagcatggtgttcaaggacgtgctgctgctgggcaacgactacatcgtgcccagacactgccccgagctggccgagatgagcagagtgagcatcagaatcctggacgagctggtgctgcccttccaggagctgcagatcgacgacaacgagtacgcctacctgaaggccatcatcttcttcgaccccgacgccagaggcctgagcgaccccggcagaatcagaagactgagagcccaggtgcaggtgagcctggaggactacatcaacgacagacagtacgacagcagaggcagattcggcgagctgctgctgctgctgcccaccctgcagagcatcacctggcagatgatcgagcagatccagttcatcaagctgttcggcatggccaagatcgacaacctgctgcaggagatgctgctgtga

SEQ ID NO: 934 - RNA, 1128 nt, synthetic construct
  misc_feature 1..1128: note = CDS (opt4) from Homo sapiens__NP_000448.3__HNF4A(1-375)(S87A_S95A_S99A_K106R_K10 8R_K126R_K127R_S142A_S143A_S148A_T166A_S167A_S313A_S378A_T4 29A_T432A_S436A_K458R_S461E)
  source 1..1128: mol_type = other RNA
atgagactgagcaagaccctggtggacatggacatggccgactacagcgccgccctggaccccgcctacaccaccctggagttcgagaacgtgcaggtgctgaccatgggcaacgacaccagccccagcgagggcaccaacctgaacgcccccaacagcctgggcgtgagcgccctgtgcgccatctgcggcgacagagccaccggcaagcactacggcgccagcagctgcgacggctgcaagggcttcttcagaagagccgtgagaaagaaccacatgtacgcctgcagattcgccagacagtgcgtggtggacagagacagaagaaaccagtgcagatactgcagactgaagaagtgcttcagagccggcatgagaagagaggccgtgcagaacgagagagacagaatcagcaccagaagagccgcctacgaggacagcgccctgcccagcatcaacgccctgctgcaggccgaggtgctgagcagacagatcgccgcccccgtgagcggcatcaacggcgacatcagagccaagaagatcgccagcatcgccgacgtgtgcgagagcatgaaggagcagctgctggtgctggtggagtgggccaagtacatccccgccttctgcgagctgcccctggacgaccaggtggccctgctgagagcccacgccggcgagcacctgctgctgggcgccaccaagagaagcatggtgttcaaggacgtgctgctgctgggcaacgactacatcgtgcccagacactgccccgagctggccgagatgagcagagtgagcatcagaatcctggacgagctggtgctgcccttccaggagctgcagatcgacgacaacgagtacgcctacctgaaggccatcatcttcttcgaccccgacgccaagggcctgagcgaccccggcaagatcaagagactgagagcccaggtgcaggtgagcctggaggactacatcaacgacagacagtacgacagcagaggcagattcggcgagctgctgctgctgctgcccaccctgcagagcatcacctggcagatgatcgagcagatccagttcatcaagctgttcggcatggccaagatcgacaacctgctgcaggagatgctgctgtga

SEQ ID NO: 935 - RNA, 1128 nt, synthetic construct
  misc_feature 1..1128: note = CDS (opt4) from Homo sapiens__NP_000448.3__HNF4A(1-375)(S87A_K106R_K108R_K126R_K 127R_S138A_T139A_S142A_S143A_S148A_T166A_S167A_S313A_S378A_ T429A_T432A_S436A_K458R_S461E)
  source 1..1128: mol_type = other RNA
atgagactgagcaagaccctggtggacatggacatggccgactacagcgccgccctggaccccgcctacaccaccctggagttcgagaacgtgcaggtgctgaccatgggcaacgacaccagccccagcgagggcaccaacctgaacgcccccaacagcctgggcgtgagcgccctgtgcgccatctgcggcgacagagccaccggcaagcactacggcgccagcagctgcgacggctgcaagggcttcttcagaagagccgtgagaaagaaccacatgtacagctgcagattcagcagacagtgcgtggtggacagagacagaagaaaccagtgcagatactgcagactgaagaagtgcttcagagccggcatgagaagagaggccgtgcagaacgagagagacagaatcgccgccagaagagccgcctacgaggacagcgccctgcccagcatcaacgccctgctgcaggccgaggtgctgagcagacagatcgccgcccccgtgagcggcatcaacggcgacatcagagccaagaagatcgccagcatcgccgacgtgtgcgagagcatgaaggagcagctgctggtgctggtggagtgggccaagtacatccccgccttctgcgagctgcccctggacgaccaggtggccctgctgagagcccacgccggcgagcacctgctgctgggcgccaccaagagaagcatggtgttcaaggacgtgctgctgctgggcaacgactacatcgtgcccagacactgccccgagctggccgagatgagcagagtgagcatcagaatcctggacgagctggtgctgcccttccaggagctgcagatcgacgacaacgagtacgcctacctgaaggccatcatcttcttcgaccccgacgccaagggcctgagcgaccccggcaagatcaagagactgagagcccaggtgcaggtgagcctggaggactacatcaacgacagacagtacgacagcagaggcagattcggcgagctgctgctgctgctgcccaccctgcagagcatcacctggcagatgatcgagcagatccagttcatcaagctgttcggcatggccaagatcgacaacctgctgcaggagatgctgctgtga

SEQ ID NO: 936 - RNA, 1128 nt, synthetic construct
  misc_feature 1..1128: note = CDS (opt4) from Homo sapiens__NP_000448.3__HNF4A(1-375)(S87A_S95A_S99A_K106R_K10 8R_K126R_K127R_S138A_T139A_S142A_S143A_S148A_T166A_S167A_S3 13A_S378A_T429A_T432A_S436A_K458R_S461E)
  source 1..1128: mol_type = other RNA
atgagactgagcaagaccctggtggacatggacatggccgactacagcgccgccctggaccccgcctacaccaccctggagttcgagaacgtgcaggtgctgaccatgggcaacgacaccagccccagcgagggcaccaacctgaacgcccccaacagcctgggcgtgagcgccctgtgcgccatctgcggcgacagagccaccggcaagcactacggcgccagcagctgcgacggctgcaagggcttcttcagaagagccgtgagaaagaaccacatgtacgcctgcagattcgccagacagtgcgtggtggacagagacagaagaaaccagtgcagatactgcagactgaagaagtgcttcagagccggcatgagaagagaggccgtgcagaacgagagagacagaatcgccgccagaagagccgcctacgaggacagcgccctgcccagcatcaacgccctgctgcaggccgaggtgctgagcagacagatcgccgcccccgtgagcggcatcaacggcgacatcagagccaagaagatcgccagcatcgccgacgtgtgcgagagcatgaaggagcagctgctggtgctggtggagtgggccaagtacatccccgccttctgcgagctgcccctggacgaccaggtggccctgctgagagcccacgccggcgagcacctgctgctgggcgccaccaagagaagcatggtgttcaaggacgtgctgctgctgggcaacgactacatcgtgcccagacactgccccgagctggccgagatgagcagagtgagcatcagaatcctggacgagctggtgctgcccttccaggagctgcagatcgacgacaacgagtacgcctacctgaaggccatcatcttcttcgaccccgacgccaagggcctgagcgaccccggcaagatcaagagactgagagcccaggtgcaggtgagcctggaggactacatcaacgacagacagtacgacagcagaggcagattcggcgagctgctgctgctgctgcccaccctgcagagcatcacctggcagatgatcgagcagatccagttcatcaagctgttcggcatggccaagatcgacaacctgctgcaggagatgctgctgtga

SEQ ID NO: 937 - RNA, 1128 nt, synthetic construct
  misc_feature 1..1128: note = CDS (opt5) from Homo sapiens__NP_000448.3__HNF4A(1-375)
  source 1..1128: mol_type = other RNA
atgagactgagcaagaccctcgtggacatggatatggccgactactccgctgccctggatcccgcgtatacaacgcttgagttcgaaaacgtccaggttctgaccatgggcaatgacacatctcctagcgaggggaccaacctcaatgctccgaactccctgggagtgtctgccctttgcgccatctgtggcgatcgggctacagggaaacactacggagccagctcctgcgacggctgtaaggggtttttccgcagatctgtgcggaaaaatcatatgtatagctgccgcttttccagacaatgtgtcgtggataaggacaaacggaaccagtgccgctactgtagactgaagaagtgcttccgggctggaatgaaaaaggaagccgttcagaatgagcgcgatagaattagcacccggcgcagctcctatgaagacagctctctcccctccatcaacgcgctgctgcaggccgaggtgctcagcagacaaattacatctcctgtctccggcatcaatggcgatattcgggctaaaaagatcgccagcatcgctgacgtgtgtgagtccatgaaagaacagctgcttgttctggtggagtgggccaagtacattcccgcgttttgcgaactccctctggatgaccaggtcgcccttctgcgcgctcacgccggggagcatctcctgctgggagctaccaagagatctatggtgttcaaagacgtgctcctgcttggcaacgattatatcgtcccccggcactgtcctgagctggccgaaatgagcagagtttccattcgcatcctcgacgagctggtgcttccgtttcaggaactgcaaattgatgacaatgagtacgcctacctcaaggctatcattttctttgatcccgacgcgaaagggctgagcgatcctggaaagatcaaacggctgagatctcaggtgcaggtctccctcgaagactatatcaacgatcgccagtacgacagccggggcagattcggggagctgcttctgctcctgcccacgcttcaatctattacctggcagatgatcgagcagattcaatttatcaagctgttcggaatggccaaaattgataatctcctgcaggaaatgctgctctga

SEQ ID NO: 938 - RNA, 1128 nt, synthetic construct
  misc_feature 1..1128: note = CDS (opt5) from Homo sapiens__NP_000448.3__HNF4A(1-375)(S313A)
  source 1..1128: mol_type = other RNA
atgagactgagcaagaccctcgtggacatggatatggccgactactccgctgccctggatcccgcgtatacaacgcttgagttcgaaaacgtccaggttctgaccatgggcaatgacacatctcctagcgaggggaccaacctcaatgctccgaactccctgggagtgtctgccctttgcgccatctgtggcgatcgggctacagggaaacactacggagccagctcctgcgacggctgtaaggggtttttccgcagatctgtgcggaaaaatcatatgtatagctgccgcttttccagacaatgtgtcgtggataaggacaaacggaaccagtgccgctactgtagactgaagaagtgcttccgggctggaatgaaaaaggaagccgttcagaatgagcgcgatagaattagcacccggagatcttcctatgaagacagctctctcccctccatcaacgcgctgctgcaggccgaggtgctcagccgccaaattacatctcctgtctccggcatcaatggcgatattcgggctaaaaagatcgccagcatcgctgacgtgtgtgagtccatgaaagaacagctgcttgttctggtggagtgggccaagtacattcccgcgttttgcgaactccctctggatgaccaggtcgcccttctgcgcgctcacgccggggagcatctcctgctgggagctaccaagagatctatggtgttcaaagacgtgctcctgcttggcaacgattatatcgtcccccggcactgtcctgagctggccgaaatgagcagagtttccattcgcatcctcgacgagctggtgcttccgtttcaggaactgcaaattgatgacaatgagtacgcctacctcaaggctatcattttctttgatcccgacgcgaaagggctgagcgatcctggaaagatcaaacggctgagagcccaggtgcaggtctctctcgaagactatatcaacgatcgccagtacgactcccggggcagattcggggagctgcttctgctcctgcccacgcttcaaagcattacctggcagatgatcgagcagattcaatttatcaagctgttcggaatggctaaaattgataatctcctgcaggaaatgctgctctga

SEQ ID NO: 939 - RNA, 1128 nt, synthetic construct
  misc_feature 1..1128: note = CDS (opt5) from Homo sapiens__NP_000448.3__HNF4A(1-375)(S313E)
  source 1..1128: mol_type = other RNA
atgagactgagcaagaccctcgtggacatggatatggccgactactccgctgccctggatcccgcgtatacaacgcttgagttcgaaaacgtccaggttctgaccatgggcaatgacacatctcctagcgaggggaccaacctcaatgctccgaactccctgggagtgtctgccctttgcgccatctgtggcgatcgggctacagggaaacactacggagccagctcctgcgacggctgtaaggggtttttccgcagatctgtgcggaaaaatcatatgtatagctgccgcttttccagacaatgtgtcgtggataaggacaaacggaaccagtgccgctactgtagactgaagaagtgcttccgggctggaatgaaaaaggaagccgttcagaatgagcgcgatagaattagcacccggagatcttcctatgaagacagctctctcccctccatcaacgcgctgctgcaggccgaggtgctcagccgccaaattacatctcctgtctccggcatcaatggcgatattcgggctaaaaagatcgccagcatcgctgacgtgtgtgagtccatgaaagaacagctgcttgttctggtggagtgggccaagtacattcccgcgttttgcgaactccctctggatgaccaggtcgcccttctgcgcgctcacgccggggagcatctcctgctgggagctaccaagagatctatggtgttcaaagacgtgctcctgcttggcaacgattatatcgtcccccggcactgtcctgagctggccgaaatgagcagagtttccattcgcatcctcgacgagctggtgcttccgtttcaggaactgcaaattgatgacaatgagtacgcctacctcaaggctatcattttctttgatcccgacgcgaaagggctgagcgatcctggaaagatcaaacggctgagagaacaggtgcaggtctctctcgaggactatatcaacgatcgccagtacgactcccggggcagattcggggagctgcttctgctcctgcccacgcttcaaagcattacctggcagatgatcgaacagattcaatttatcaagctgttcggaatggccaaaattgataatctcctgcaggagatgctgctctga

SEQ ID NO: 940 - RNA, 1128 nt, synthetic construct
  misc_feature 1..1128: note = CDS (opt5) from Homo sapiens__NP_000448.3__HNF4A(1-375)(S142A_S143A)
  source 1..1128: mol_type = other RNA
atgagactgagcaagaccctcgtggacatggatatggccgactactccgctgccctggatcccgcgtatacaacgcttgagttcgaaaacgtccaggttctgaccatgggcaatgacacatctcctagcgaggggaccaacctcaatgctccgaactccctgggagtgtctgccctttgcgccatctgtggcgatcgggctacagggaaacactacggagccagctcctgcgacggctgtaaggggtttttccgcagatctgtgcggaaaaatcatatgtatagctgccgcttttccagacaatgtgtcgtggataaggacaaacggaaccagtgccgctactgtagactgaagaagtgcttccgggctggaatgaaaaaggaagccgttcagaatgagcgcgatagaattagcacccggcgcgcggcctatgaagactcttccctccccagcatcaacgctctgctgcaggccgaggtgctctctagacaaattacatcccctgtcagcggcatcaatggcgatattcgggctaaaaagatcgcctctatcgcggacgtgtgtgagtccatgaaagaacagctgcttgttctggtggagtgggccaagtacattcccgctttttgcgaactccctctggatgaccaggtcgcccttctgcgcgctcacgccggggagcatctcctgctgggagccaccaagagaagcatggtgttcaaagacgtgctcctgcttggcaacgattatatcgtcccccggcactgtcctgagctggctgaaatgtccagagtttctattcgcatcctcgacgagctggtgcttccgtttcaggaactgcaaattgatgacaatgagtacgcgtacctcaaggccatcattttctttgatcccgacgctaaagggctgagcgatcctggaaagatcaaacggctgagatcccaggtgcaggtcagcctcgaagactatatcaacgatcgccagtacgactctcggggcagattcggggagctgcttctgctcctgcccacgcttcaatccattacctggcagatgatcgagcagattcaatttatcaagctgttcggaatggccaaaattgataatctcctgcaggaaatgctgctctga

SEQ ID NO: 941 - RNA, 1128 nt, synthetic construct
  misc_feature 1..1128: note = CDS (opt5) from Homo sapiens__NP_000448.3__HNF4A(1-375)(S142E_S143E)
  source 1..1128: mol_type = other RNA
atgagactgagcaagaccctcgtggacatggatatggccgactactccgctgccctggatcccgcgtatacaacgcttgagttcgaaaacgtccaggttctgaccatgggcaatgacacatctcctagcgaggggaccaacctcaatgctccgaactccctgggagtgtctgccctttgcgccatctgtggcgatcgggctacagggaaacactacggagccagctcctgcgacggctgtaaggggtttttccgcagatctgtgcggaaaaatcatatgtatagctgccgcttttccagacaatgtgtcgtggataaggacaaacggaaccagtgccgctactgtagactgaagaagtgcttccgggctggaatgaaaaaggaagccgttcagaatgagcgcgatagaattagcacccggcgcgaagagtatgaggactcttccctccccagcatcaacgcgctgctgcaggccgaagtgctctctagacaaattacatcccctgtcagcggcatcaatggcgatattcgggctaaaaagatcgcctctatcgctgacgtgtgtgagtccatgaaagaacagctgcttgttctggtggagtgggccaagtacattcccgcgttttgcgagctccctctggatgaccaggtcgcccttctgcgcgctcacgccggggaacatctcctgctgggagctaccaagagaagcatggtgttcaaagacgtgctcctgcttggcaacgattatatcgtcccccggcactgtcctgagctggccgaaatgtccagagtttctattcgcatcctcgacgagctggtgcttccgtttcaggaactgcaaattgatgacaatgagtacgcctacctcaaggctatcattttctttgatcccgacgcgaaagggctgagcgatcctggaaagatcaaacggctgagatcccaggtgcaggtcagcctcgaggactatatcaacgatcgccagtacgactctcggggcagattcggggaactgcttctgctcctgcccacgcttcaatccattacctggcagatgatcgagcagattcaatttatcaagctgttcggaatggccaaaattgataatctcctgcaggaaatgctgctctga

SEQ ID NO: 942 - RNA, 1128 nt, synthetic construct
  misc_feature 1..1128: note = CDS (opt5) from Homo sapiens__NP_000448.3__HNF4A(1-375)(S143A)
  source 1..1128: mol_type = other RNA
atgagactgagcaagaccctcgtggacatggatatggccgactactccgctgccctggatcccgcgtatacaacgcttgagttcgaaaacgtccaggttctgaccatgggcaatgacacatctcctagcgaggggaccaacctcaatgctccgaactccctgggagtgtctgccctttgcgccatctgtggcgatcgggctacagggaaacactacggagccagctcctgcgacggctgtaaggggtttttccgcagatctgtgcggaaaaatcatatgtatagctgccgcttttccagacaatgtgtcgtggataaggacaaacggaaccagtgccgctactgtagactgaagaagtgcttccgggctggaatgaaaaaggaagccgttcagaatgagcgcgatagaattagcacccggcgctctgcgtatgaagactccagcctcccctctatcaacgccctgctgcaggctgaggtgctctccagacaaattacaagccctgtctctggcatcaatggcgatattcgggccaaaaagatcgcttccatcgccgacgtgtgtgagagcatgaaagaacagctgcttgttctggtggagtgggcgaagtacattcccgccttttgcgaactccctctggatgaccaggtcgcccttctgcgcgcccacgctggggagcatctcctgctgggagccaccaagagatccatggtgttcaaagacgtgctcctgcttggcaacgattatatcgtcccccggcactgtcctgagctggccgaaatgtctagagttagcattcgcatcctcgacgagctggtgcttccgtttcaggaactgcaaattgatgacaatgagtacgcttacctcaaggcgatcattttctttgatcccgacgccaaagggctgtccgatcctggaaagatcaaacggctgagaagccaggtgcaggtctctctcgaagactatatcaacgatcgccagtacgactcccggggcagattcggggagctgcttctgctcctgcccacgcttcaaagcattacctggcagatgatcgagcagattcaatttatcaagctgttcggaatggctaaaattgataatctcctgcaggaaatgctgctctga

SEQ ID NO: 943 - RNA, 1128 nt, synthetic construct
  misc_feature 1..1128: note = CDS (opt5) from Homo sapiens__NP_000448.3__HNF4A(1-375)(T166A)
  source 1..1128: mol_type = other RNA
atgagactgagcaagaccctcgtggacatggatatggccgactactccgctgccctggatcccgcgtatacaacgcttgagttcgaaaacgtccaggttctgaccatgggcaatgacacatctcctagcgaggggaccaacctcaatgctccgaactccctgggagtgtctgccctttgcgccatctgtggcgatcgggctacagggaaacactacggagccagctcctgcgacggctgtaaggggtttttccgcagatctgtgcggaaaaatcatatgtatagctgccgcttttccagacaatgtgtcgtggataaggacaaacggaaccagtgccgctactgtagactgaagaagtgcttccgggctggaatgaaaaaggaagccgttcagaatgagcgcgatagaattagcacccggcgcagctcctatgaagacagctctctcccctccatcaacgcgctgctgcaggccgaggtgctcagcagacaaattgcttctcctgtctccggcatcaatggcgatattcgggccaaaaagatcgctagcatcgccgacgtgtgtgagtccatgaaagaacagctgcttgttctggtggagtgggcgaagtacattcccgccttttgcgaactccctctggatgaccaggtcgcccttctgcgcgcccacgctggggagcatctcctgctgggagccacaaagagatctatggtgttcaaagacgtgctcctgcttggcaacgattatatcgtcccccggcactgtcctgagctggccgaaatgagcagagtttccattcgcatcctcgacgagctggtgcttccgtttcaggaactgcaaattgatgacaatgagtacgcttacctcaaggcgatcattttctttgatcccgacgccaaagggctgagcgatcctggaaagatcaaacggctgagatctcaggtgcaggtctccctcgaagactatatcaacgatcgccagtacgacagccggggcagattcggggagctgcttctgctcctgcccacccttcaatctattacgtggcagatgatcgagcagattcaatttatcaagctgttcggaatggctaaaattgataatctcctgcaggaaatgctgctctga

SEQ ID NO: 944 - RNA, 1128 nt, synthetic construct
  misc_feature 1..1128: note = CDS (opt5) from Homo sapiens__NP_000448.3__HNF4A(1-375)(S167E)
  source 1..1128: mol_type = other RNA
atgagactgagcaagaccctcgtggacatggatatggccgactactccgctgccctggatcccgcgtatacaacgcttgagttcgaaaacgtccaggttctgaccatgggcaatgacacatctcctagcgaggggaccaacctcaatgctccgaactccctgggagtgtctgccctttgcgccatctgtggcgatcgggctacagggaaacactacggagccagctcctgcgacggctgtaaggggtttttccgcagatctgtgcggaaaaatcatatgtatagctgccgcttttccagacaatgtgtcgtggataaggacaaacggaaccagtgccgctactgtagactgaagaagtgcttccgggctggaatgaaaaaggaagccgttcagaatgagcgcgatagaattagcacccggagatcttcctatgaagacagctctctcccctccatcaacgcgctgctgcaggccgaggtgctcagccgccaaattacagagcctgtctctggcatcaatggcgatattcgggctaaaaagatcgcctccatcgctgacgtgtgtgaaagcatgaaagagcagctgcttgttctggtggaatgggccaagtacattcccgcgttttgcgagctccctctggatgaccaggtcgcccttctgcgcgctcacgccggggagcatctcctgctgggagctaccaagagatccatggtgttcaaagacgtgctcctgcttggcaacgattatatcgtcccccggcactgtcctgaactggccgagatgtctagagttagcattcgcatcctcgacgaactggtgcttccgtttcaggagctgcaaattgatgacaatgaatacgcctacctcaaggctatcattttctttgatcccgacgcgaaagggctgtccgatcctggaaagatcaaacggctgagaagccaggtgcaggtctctctcgaggactatatcaacgatcgccagtacgactcccggggcagattcggggagctgcttctgctcctgcccacgcttcaaagcattacctggcagatgatcgaacagattcaatttatcaagctgttcggaatggccaaaattgataatctcctgcaggagatgctgctctga

SEQ ID NO: 945 - RNA, 1128 nt, synthetic construct
  misc_feature 1..1128: note = CDS (opt5) from Homo sapiens__NP_000448.3__HNF4A(1-375)(S167A)
  source 1..1128: mol_type = other RNA
atgagactgagcaagaccctcgtggacatggatatggccgactactccgctgccctggatcccgcgtatacaacgcttgagttcgaaaacgtccaggttctgaccatgggcaatgacacatctcctagcgaggggaccaacctcaatgctccgaactccctgggagtgtctgccctttgcgccatctgtggcgatcgggctacagggaaacactacggagccagctcctgcgacggctgtaaggggtttttccgcagatctgtgcggaaaaatcatatgtatagctgccgcttttccagacaatgtgtcgtggataaggacaaacggaaccagtgccgctactgtagactgaagaagtgcttccgggctggaatgaaaaaggaagccgttcagaatgagcgcgatagaattagcacccggagatcttcctatgaagacagctctctcccctccatcaacgcgctgctgcaggccgaggtgctcagccgccaaattacagctcctgtctctggcatcaatggcgatattcgggccaaaaagatcgcttccatcgccgacgtgtgtgagagcatgaaagaacagctgcttgttctggtggagtgggcgaagtacattcccgccttttgcgaactccctctggatgaccaggtcgcccttctgcgcgcccacgctggggagcatctcctgctgggagccaccaagagatccatggtgttcaaagacgtgctcctgcttggcaacgattatatcgtcccccggcactgtcctgagctggccgaaatgtctagagttagcattcgcatcctcgacgagctggtgcttccgtttcaggaactgcaaattgatgacaatgagtacgcttacctcaaggcgatcattttctttgatcccgacgccaaagggctgtccgatcctggaaagatcaaacggctgagaagccaggtgcaggtctctctcgaagactatatcaacgatcgccagtacgactcccggggcagattcggggagctgcttctgctcctgcccacgcttcaaagcattacctggcagatgatcgagcagattcaatttatcaagctgttcggaatggctaaaattgataatctcctgcaggaaatgctgctctga

SEQ ID NO: 946 - RNA, 1128 nt, synthetic construct; identical to SEQ ID NO: 945
  misc_feature 1..1128: note = CDS (opt5) from Homo sapiens__NP_000448.3__HNF4A(1-375)(S167A_S378A_T429A_T432A_ S436A)
  source 1..1128: mol_type = other RNA

SEQ ID NO: 947 - RNA, 1128 nt, synthetic construct; identical to SEQ ID NO: 944
  misc_feature 1..1128: note = CDS (opt5) from Homo sapiens__NP_000448.3__HNF4A(1-375)(S167E_S378E_T429E_T432E_ S436E)
  source 1..1128: mol_type = other RNA

SEQ ID NO: 948 - RNA, 1128 nt, synthetic construct
  misc_feature 1..1128: note = CDS (opt5) from Homo sapiens__NP_000448.3__HNF4A(1-375)(S87A)
  source 1..1128: mol_type = other RNA
atgagactgagcaagaccctcgtggacatggatatggccgactactccgctgccctggatcccgcgtatacaacgcttgagttcgaaaacgtccaggttctgaccatgggcaatgacacatctcctagcgaggggaccaacctcaatgctccgaactccctgggagtgtctgccctttgcgccatctgtggcgatcgggctacagggaaacactacggagccagctcctgcgacggctgtaaggggtttttccgcagagctgtgcggaaaaatcatatgtattcttgccgctttagcagacaatgtgtcgtggataaggacaaacggaaccagtgccgctactgtagactgaagaagtgcttccgggccggaatgaaaaaggaagcggttcagaatgagcgcgatagaatttccacccggcgcagctcttatgaagactccagcctcccctctatcaacgccctgctgcaggctgaggtgctctccagacaaattacaagccctgtctctggcatcaatggcgatattcgggccaaaaagatcgcttccatcgccgacgtgtgtgagagcatgaaagaacagctgcttgttctggtggagtgggcgaagtacattcccgccttttgcgaactccctctggatgaccaggtcgcccttctgcgcgcccacgctggggagcatctcctgctgggagccaccaagagatccatggtgttcaaagacgtgctcctgcttggcaacgattatatcgtcccccggcactgtcctgagctggccgaaatgtctagagttagcattcgcatcctcgacgagctggtgcttccgtttcaggaactgcaaattgatgacaatgagtacgcttacctcaaggcgatcattttctttgatcccgacgccaaagggctgtccgatcctggaaagatcaaacggctgagaagccaggtgcaggtctctctcgaagactatatcaacgatcgccagtacgactcccggggcagattcggggagctgcttctgctcctgcccacgcttcaaagcattacctggcagatgatcgagcagattcaatttatcaagctgttcggaatggctaaaattgataatctcctgcaggaaatgctgctctga

SEQ ID NO: 949 - RNA, 1128 nt, synthetic construct
  misc_feature 1..1128: note = CDS (opt5) from Homo sapiens__NP_000448.3__HNF4A(1-375)(S87E)
  source 1..1128: mol_type = other RNA
atgagactgagcaagaccctcgtggacatggatatggccgactactccgctgccctggatcccgcgtatacaacgcttgagttcgaaaacgtccaggttctgaccatgggcaatgacacatctcctagcgaggggaccaacctcaatgctccgaactccctgggagtgtctgccctttgcgccatctgtggcgatcgggctacagggaaacactacggagccagctcctgcgacggctgtaaggggtttttccgcagagaagtgcggaaaaatcatatgtattcttgccgctttagcagacaatgtgtcgtggataaggacaaacggaaccagtgccgctactgtagactgaagaagtgcttccgggctggaatgaaaaaggaggccgttcagaatgaacgcgatagaatttccacccggcgcagctcttatgaggactccagcctcccctctatcaacgcgctgctgcaggccgaggtgctctccagacaaattacaagccctgtctctggcatcaatggcgatattcgggctaaaaagatcgcctccatcgctgacgtgtgtgaaagcatgaaagagcagctgcttgttctggtggaatgggccaagtacattcccgcgttttgcgagctccctctggatgaccaggtcgcccttctgcgcgctcacgccggggagcatctcctgctgggagctaccaagagatccatggtgttcaaagacgtgctcctgcttggcaacgattatatcgtcccccggcactgtcctgaactggccgagatgtctagagttagcattcgcatcctcgacgaactggtgcttccgtttcaggagctgcaaattgatgacaatgaatacgcctacctcaaggctatcattttctttgatcccgacgcgaaagggctgtccgatcctggaaagatcaaacggctgagaagccaggtgcaggtctctctcgaggactatatcaacgatcgccagtacgactcccggggcagattcggggagctgcttctgctcctgcccacgcttcaaagcattacctggcagatgatcgaacagattcaatttatcaagctgttcggaatggccaaaattgataatctcctgcaggagatgctgctctga

SEQ ID NO: 950 - RNA, 1128 nt, synthetic construct
  misc_feature 1..1128: note = CDS (opt5) from Homo sapiens__NP_000448.3__HNF4A(1-375)(R2V)
  source 1..1128: mol_type = other RNA
atggtgctgagcaagaccctcgtcgacatggatatggccgactactccgctgccctggatcccgcgtatacaacgcttgagttcgaaaacgttcaggtgctgaccatgggcaatgacacatctcctagcgaggggaccaacctcaatgctccgaactccctgggagtgtctgccctttgcgccatctgtggcgatagagctacagggaaacactacggagccagctcctgcgacggctgtaaggggtttttccggcgctctgtccggaaaaatcatatgtatagctgcagattttcccgccaatgtgtggttgataaggacaaaagaaaccagtgccggtactgtcgcctgaagaagtgcttcagagctggaatgaaaaaggaagccgtgcagaatgagcgggatcgcattagcaccagacggtcttcctatgaagacagctctctcccctccatcaacgcgctgctgcaggccgaggtcctcagccgccaaattacatctcctgtgtccggcatcaatggcgatattagagctaaaaagatcgccagcatcgctgacgtttgtgagtccatgaaagaacagctgcttgtgctggtcgagtgggccaagtacattcccgcgttttgcgaactccctctggatgaccaggtggcccttctgcgggctcacgccggggagcatctcctgctgggagctaccaagcgctctatggtgttcaaagacgtcctcctgcttggcaacgattatatcgttcccagacactgtcctgagctggccgaaatgagccgggtgtccattagaatcctcgacgagctggtgcttccgtttcaggaactgcaaattgatgacaatgagtacgcctacctcaaggctatcattttctttgatcccgacgcgaaagggctgagcgatcctggaaagatcaaacgcctgcggtctcaggtccaggtgtccctcgaagactatatcaacgatagacagtacgacagccgcggccggttcggggagctgcttctgctcctgcccacgcttcaatctattacctggcagatgatcgagcagattcaatttatcaagctgttcggaatggccaaaattgataatctcctgcaggaaatgctgctctga

SEQ ID NO: 951 - RNA, 1128 nt, synthetic construct
  misc_feature 1..1128: note = CDS (opt5) from Homo sapiens__NP_000448.3__HNF4A(1-375)(R2V_K5V)
  source 1..1128: mol_type = other RNA
atggtgctgagcgtcaccctcgttgacatggatatggccgactactccgctgccctggatcccgcgtatacaacgcttgagttcgaaaacgtccaggtgctgaccatgggcaatgacacatctcctagcgaggggaccaacctcaatgctccgaactccctgggagtgtctgccctttgcgccatctgtggcgatagagctacagggaagcactacggagccagctcctgcgacggctgtaaagggtttttccggcgctctgtgagaaagaatcatatgtatagctgccggttttcccgccaatgtgttgtggataaagacaagagaaaccagtgccggtactgtcgcctgaaaaagtgcttcagagctggaatgaagaaagaagccgtccagaatgagcgggatcgcattagcaccagacggtcttcctatgaagacagctctctcccctccatcaacgcgctgctgcaggccgaggtgctcagccgccaaattacatctcctgtttccggcatcaatggcgatattagagctaagaaaatcgccagcatcgctgacgtgtgtgagtccatgaaggaacagctgcttgtcctggtggagtgggccaaatacattcccgcgttttgcgaactccctctggatgaccaggtggcccttctgcgggctcacgccggggagcatctcctgctgggagctaccaagcgctctatggtcttcaaggacgttctcctgcttggcaacgattatatcgtgcccagacactgtcctgagctggccgaaatgagccgggtgtccattagaatcctcgacgagctggtccttccgtttcaggaactgcaaattgatgacaatgagtacgcctacctcaaagctatcattttctttgatcccgacgcgaaggggctgagcgatcctggaaaaatcaagcgcctgcggtctcaggtgcaggtttccctcgaagactatatcaacgatagacagtacgacagccgcggccggttcggggagctgcttctgctcctgcccacgcttcaatctattacctggcagatgatcgagcagattcaatttatcaaactgttcggaatggccaagattgataatctcctgcaggaaatgctgctctga

SEQ ID NO: 952 - RNA, 1128 nt, synthetic construct
  misc_feature 1..1128: note = CDS (opt5) from Homo sapiens__NP_000448.3__HNF4A(1-375)(K179R_K180R)
  source 1..1128: mol_type = other RNA
atgagactgagcaagaccctcgtggacatggatatggccgactactccgctgccctggatcccgcgtatacaacgcttgagttcgaaaacgtccaggttctgaccatgggcaatgacacatctcctagcgaggggaccaacctcaatgctccgaactccctgggagtgtctgccctttgcgccatctgtggcgatcgggctacagggaaacactacggagccagctcctgcgacggctgtaaggggtttttccgcagatctgtgcggaaaaatcatatgtatagctgccgcttttccagacaatgtgtcgtggataaggacaaacggaaccagtgccgctactgtagactgaagaagtgcttccgggctggaatgaaaaaggaagccgttcagaatgagcgcgatagaattagcacccggcgcagctcctatgaagacagctctctcccctccatcaacgcgctgctgcaggccgaggtgctcagcagacaaattacatctcctgtctccggcatcaatggcgatattcgggctcgcagaatcgccagcatcgctgacgtgtgtgagtccatgaaagaacagctgcttgttctggtggagtgggccaagtacattcccgcgttttgcgaactccctctggatgaccaggtcgcccttctgcgggctcacgccggggagcatctcctgctgggagctaccaaaagatctatggtgttcaaggacgtgctcctgcttggcaacgattatatcgtcccccgccactgtcctgagctggccgaaatgagccgggtttccattagaatcctcgacgagctggtgcttccgtttcaggaactgcaaattgatgacaatgagtacgcctacctcaaggctatcattttctttgatcccgacgcgaaagggctgagcgatcctggaaagatcaaacgcctgcggtctcaggtgcaggtctccctcgaagactatatcaacgatagacagtacgacagccgcggccggttcggggagctgcttctgctcctgcccacgcttcaatctattacctggcagatgatcgagcagattcaatttatcaagctgttcggaatggccaaaattgataatctcctgcaggaaatgctgctctga

SEQ ID NO: 953 - RNA, 1128 nt, synthetic construct
  misc_feature 1..1128: note = CDS (opt5) from Homo sapiens__NP_000448.3__HNF4A(1-375)(K234R)
  source 1..1128: mol_type = other RNA
atgagactgagcaagaccctcgtggacatggatatggccgactactccgctgccctggatcccgcgtatacaacgcttgagttcgaaaacgtccaggttctgaccatgggcaatgacacatctcctagcgaggggaccaacctcaatgctccgaactccctgggagtgtctgccctttgcgccatctgtggcgatcgggctacagggaaacactacggagccagctcctgcgacggctgtaaggggtttttccgcagatctgtgcggaaaaatcatatgtatagctgccgcttttccagacaatgtgtcgtggataaggacaaacggaaccagtgccgctactgtagactgaagaagtgcttccgggctggaatgaaaaaggaagccgttcagaatgagcgcgatagaattagcacccggcgcagctcctatgaagacagctctctcccctccatcaacgcgctgctgcaggccgaggtgctcagcagacaaattacatctcctgtctccggcatcaatggcgatattcgggctaaaaagatcgccagcatcgctgacgtgtgtgagtccatgaaagaacagctgcttgttctggtggagtgggccaagtacattcccgcgttttgcgaactccctctggatgaccaggtcgcccttctgcgcgctcacgccggggagcatctcctgctgggagctaccagacggtctatggtgttcaaggacgtgctcctgcttggcaacgattatatcgtccccagacactgtcctgagctggccgaaatgagccgcgtttccattcggatcctcgacgagctggtgcttccgtttcaggaactgcaaattgatgacaatgagtacgcctacctcaaagctatcattttctttgatcccgacgcgaaggggctgagcgatcctggaaaaatcaagagactgcgctctcaggtgcaggtctccctcgaagactatatcaacgatcggcagtacgacagcagaggccgcttcggggagctgcttctgctcctgcccacgcttcaatctattacctggcagatgatcgagcagattcaatttatcaaactgttcggaatggccaagattgataatctcctgcaggaaatgctgctctga

SEQ ID NO: 954 - RNA, 1128 nt, synthetic construct
  misc_feature 1..1128: note = CDS (opt5) from Homo sapiens__NP_000448.3__HNF4A(1-375)(K300R)
  source 1..1128: mol_type = other RNA
atgagactgagcaagaccctcgtggacatggatatggccgactactccgctgccctggatcccgcgtatacaacgcttgagttcgaaaacgtccaggttctgaccatgggcaatgacacatctcctagcgaggggaccaacctcaatgctccgaactccctgggagtgtctgccctttgcgccatctgtggcgatcgggctacagggaaacactacggagccagctcctgcgacggctgtaaggggtttttccgcagatctgtgcggaaaaatcatatgtatagctgccgcttttccagacaatgtgtcgtggataaggacaaacggaaccagtgccgctactgtagactgaagaagtgcttccgggctggaatgaaaaaggaagccgttcagaatgagcgcgatagaattagcacccggcgcagctcctatgaagacagctctctcccctccatcaacgcgctgctgcaggccgaggtgctcagcagacaaattacatctcctgtctccggcatcaatggcgatattcgggctaaaaagatcgccagcatcgctgacgtgtgtgagtccatgaaagaacagctgcttgttctggtggagtgggccaagtacattcccgcgttttgcgaactccctctggatgaccaggtcgcccttctgcgcgctcacgccggggagcatctcctgctgggagctaccaagagatctatggtgttcaaagacgtgctcctgcttggcaacgattatatcgtcccccggcactgtcctgagctggccgaaatgagcagagtttccattcgcatcctcgacgagctggtgcttccgtttcaggaactgcaaattgatgacaatgagtacgcctacctcaaggctatcattttctttgatcccgacgcgcgggggctgagcgatcctggaaaaatcaagagactgcgctctcaggtgcaggtctccctcgaagactatatcaacgatcggcagtacgacagcagaggccgcttcggggagctgcttctgctcctgcccacgcttcaatctattacctggcagatgatcgagcagattcaatttatcaaactgttcggaatggccaagattgataatctcctgcaggaaatgctgctctga

SEQ ID NO: 955 - RNA, 1128 nt, synthetic construct
  misc_feature 1..1128: note = CDS (opt5) from Homo sapiens__NP_000448.3__HNF4A(1-375)(K300R_K307R_K309R)
  source 1..1128: mol_type = other RNA
atgagactgagcaagaccctcgtggacatggatatggccgactactccgctgccctggatcccgcgtatacaacgcttgagttcgaaaacgtccaggttctgaccatgggcaatgacacatctcctagcgaggggaccaacctcaatgctccgaactccctgggagtgtctgccctttgcgccatctgtggcgatcgggctacagggaaacactacggagccagctcctgcgacggctgtaaggggtttttccgcagatctgtgcggaaaaatcatatgtatagctgccgcttttccagacaatgtgtcgtggataaggacaaacggaaccagtgccgctactgtagactgaagaagtgcttccgggctggaatgaaaaaggaagccgttcagaatgagcgcgatagaattagcacccggcgcagctcctatgaagacagctctctcccctccatcaacgcgctgctgcaggccgaggtgctcagcagacaaattacatctcctgtctccggcatcaatggcgatattcgggctaaaaagatcgccagcatcgctgacgtgtgtgagtccatgaaagaacagctgcttgttctggtggagtgggccaagtacattcccgcgttttgcgaactccctctggatgaccaggtcgcccttctgcgcgctcacgccggggagcatctcctgctgggagctaccaagagatctatggtgttcaaagacgtgctcctgcttggcaacgattatatcgtcccccggcactgtcctgagctggccgaaatgagcagagtttccattcgcatcctcgacgagctggtgcttccgtttcaggaactgcaaattgatgacaatgagtacgcctacctcaaggctatcattttctttgatcccgacgcgcgggggctgagcgatcctggaagaatccgccggctgagatctcaggtgcaggtctccctcgaagactatatcaacgatcgccagtacgacagccggggcagattcggggagctgcttctgctcctgcccacgcttcaatctattacctggcagatgatcgagcagattcaatttatcaaactgttcggaatggccaagattgataatctcctgcaggaaatgctgctctga

SEQ ID NO: 956 - RNA, 1128 nt, synthetic construct; identical to SEQ ID NO: 937
  misc_feature 1..1128: note = CDS (opt5) from Homo sapiens__NP_000448.3__HNF4A(1-375)(K447R_K470R)
  source 1..1128: mol_type = other RNA

SEQ ID NO: 957 - RNA, 1128 nt, synthetic construct; identical to SEQ ID NO: 937
  misc_feature 1..1128: note = CDS (opt5) from Homo sapiens__NP_000448.3__HNF4A(1-375)(K458R)
  source 1..1128: mol_type = other RNA

SEQ ID NO: 958 - RNA, 1128 nt, synthetic construct
  misc_feature 1..1128: note = CDS (opt5) from Homo sapiens__NP_000448.3__HNF4A(1-375)(K106R_K108R_K126R_K127R)
  source 1..1128: mol_type = other RNA
atgagactgagcaagaccctcgtggacatggatatggccgactactccgctgccctggatcccgcgtatacaacgcttgagttcgaaaacgtccaggttctgaccatgggcaatgacacatctcctagcgaggggaccaacctcaatgctccgaactccctgggagtgtctgccctttgcgccatctgtggcgatcgggctacagggaaacactacggagccagctcctgcgacggctgtaaggggtttttccgcagatctgtgcggaaaaatcatatgtatagctgccgcttttccagacaatgtgtcgtggatcgggaccgcagaaaccagtgccggtactgtcgcctgaagaaatgcttcagagctggaatgcggcgcgaagccgttcagaatgagagagatcggattagcacccgcagatcttcctatgaagacagctctctcccctccatcaacgcgctgctgcaggccgaggtgctcagccggcaaattacatctcctgtctccggcatcaatggcgatattagagctaagaagatcgccagcatcgctgacgtgtgtgagtccatgaaagaacagctgcttgttctggtggagtgggccaagtacattcccgcgttttgcgaactccctctggatgaccaggtcgcccttctgcgcgctcacgccggggagcatctcctgctgggagctaccaaacggtctatggtgttcaaggacgtgctcctgcttggcaacgattatatcgtccccagacactgtcctgagctggccgaaatgagccgcgtttccattcggatcctcgacgagctggtgcttccgtttcaggaactgcaaattgatgacaatgagtacgcctacctcaaagctatcattttctttgatcccgacgcgaaggggctgagcgatcctggaaagatcaaaagactgcgctctcaggtgcaggtctccctcgaagactatatcaacgatcggcagtacgacagcagaggccgcttcggggagctgcttctgctcctgcccacgcttcaatctattacctggcagatgatcgagcagattcaatttatcaagctgttcggaatggccaaaattgataatctcctgcaggaaatgctgctctga

SEQ ID NO: 959 - RNA, 1128 nt, synthetic construct
  misc_feature 1..1128: note = CDS (opt5) from Homo sapiens__NP_000448.3__HNF4A(1-375)(E285Q)
  source 1..1128: mol_type = other RNA
atgagactgagcaagaccctcgtggacatggatatggccgactactccgctgccctggatcccgcgtatacaacgcttgagttcgaaaacgtccaggttctgaccatgggcaatgacacatctcctagcgaggggaccaacctcaatgctccgaactccctgggagtgtctgccctttgcgccatctgtggcgatcgggctacagggaaacactacggagccagctcctgcgacggctgtaaggggtttttccgcagatctgtgcggaaaaatcatatgtatagctgccgcttttccagacaatgtgtcgtggataaggacaaacggaaccagtgccgctactgtagactgaagaagtgcttccgggctggaatgaaaaaggaagccgttcagaatgagcgcgatagaattagcacccggcgcagctcctatgaagacagctctctcccctccatcaacgcgctgctgcaggccgaggtgctcagcagacaaattacatctcctgtctccggcatcaatggcgatattcgggctaaaaagatcgccagcatcgctgacgtgtgtgagtccatgaaagaacagctgcttgttctggtggagtgggccaagtacattcccgcgttttgcgaactccctctggatgaccaggtcgcccttctgcgcgctcacgccggggagcatctcctgctgggagctaccaagagatctatggtgttcaaagacgtgctcctgcttggcaacgattatatcgtcccccggcactgtcctgagctggccgaaatgagcagagtttccattcgcatcctcgacgagctggtgcttccgtttcaggaactgcaaattgatgacaatcagtacgcctacctcaaggctatcattttctttgatcccgacgcgaaagggctgagcgatcctggaaagatcaaacggctgagatctcaggtgcaggtctccctcgaggactatatcaacgatcgccaatacgacagccggggcagattcggggaactgcttctgctcctgcccacgcttcagtctattacctggcagatgatcgagcaaattcagtttatcaagctgttcggaatggccaaaattgataatctcctgcaggagatgctgctctga

SEQ ID NO: 960 - RNA, 1128 nt, synthetic construct
  misc_feature 1..1128: note = CDS (opt5) from Homo sapiens__NP_000448.3__HNF4A(1-375)(T166E)
  source 1..1128: mol_type = other RNA
atgagactgagcaagaccctcgtggacatggatatggccgactactccgctgccctggatcccgcgtatacaacgcttgagttcgaaaacgtccaggttctgaccatgggcaatgacacatctcctagcgaggggaccaacctcaatgctccgaactccctgggagtgtctgccctttgcgccatctgtggcgatcgggctacagggaaacactacggagccagctcctgcgacggctgtaaggggtttttccgcagatctgtgcggaaaaatcatatgtatagctgccgcttttccagacaatgtgtcgtggataaggacaaacggaaccagtgccgctactgtagactgaagaagtgcttccgggctggaatgaaaaaggaagccgttcagaatgagcgcgatagaattagcacccggcgcagctcctatgaagacagctctctcccctccatcaacgcgctgctgcaggccgaggtgctcagcagacaaattgagtctcctgtctccggcatcaatggcgatattcgggctaaaaagatcgccagcatcgctgacgtgtgtgaatccatgaaagagcagctgcttgttctggtggaatgggccaagtacattcccgcgttttgcgagctccctctggatgaccaggtcgcccttctgcgcgctcacgccggggagcatctcctgctgggagctacaaagagatctatggtgttcaaagacgtgctcctgcttggcaacgattatatcgtcccccggcactgtcctgaactggccgagatgagcagagtttccattcgcatcctcgacgaactggtgcttccgtttcaggagctgcaaattgatgacaatgaatacgcctacctcaaggctatcattttctttgatcccgacgcgaaagggctgagcgatcctggaaagatcaaacggctgagatctcaggtgcaggtctccctcgaggactatatcaacgatcgccagtacgacagccggggcagattcggggagctgcttctgctcctgcccacccttcaatctattacgtggcagatgatcgaacagattcaatttatcaagctgttcggaatggccaaaattgataatctcctgcaggagatgctgctctga

SEQ ID NO: 961 - RNA, 1128 nt, synthetic construct
  misc_feature 1..1128: note = CDS (opt5) from Homo sapiens__NP_000448.3__HNF4A(1-375)(S148A)
  source 1..1128: mol_type = other RNA
atgagactgagcaagaccctcgtggacatggatatggccgactactccgctgccctggatcccgcgtatacaacgcttgagttcgaaaacgtccaggttctgaccatgggcaatgacacatctcctagcgaggggaccaacctcaatgctccgaactccctgggagtgtctgccctttgcgccatctgtggcgatcgggctacagggaaacactacggagccagctcctgcgacggctgtaaggggtttttccgcagatctgtgcggaaaaatcatatgtatagctgccgcttttccagacaatgtgtcgtggataaggacaaacggaaccagtgccgctactgtagactgaagaagtgcttccgggctggaatgaaaaaggaagccgttcagaatgagcgcgatagaattagcacccggagatcttcctatgaagacagcgcgctcccctctatcaacgccctgctgcaggctgaggtgctctcccgccaaattacaagccctgtctctggcatcaatggcgatattcgggccaaaaagatcgcttccatcgccgacgtgtgtgagagcatgaaagaacagctgcttgttctggtggagtgggcgaagtacattcccgccttttgcgaactccctctggatgaccaggtcgcccttctgcgcgcccacgctggggagcatctcctgctgggagccaccaagagatccatggtgttcaaagacgtgctcctgcttggcaacgattatatcgtcccccggcactgtcctgagctggccgaaatgtctagagttagcattcgcatcctcgacgagctggtgcttccgtttcaggaactgcaaattgatgacaatgagtacgcttacctcaaggcgatcattttctttgatcccgacgccaaagggctgtccgatcctggaaagatcaaacggctgagaagccaggtgcaggtctctctcgaagactatatcaacgatcgccagtacgactcccggggcagattcggggagctgcttctgctcctgcccacgcttcaaagcattacctggcagatgatcgagcagattcaatttatcaagctgttcggaatggctaaaattgataatctcctgcaggaaatgctgctctga

SEQ ID NO: 962 - RNA, 1128 nt, synthetic construct
  misc_feature 1..1128: note = CDS (opt5) from Homo sapiens__NP_000448.3__HNF4A(1-375)(S148E)
  source 1..1128: mol_type = other RNA
atgagactgagcaagaccctcgtggacatggatatggccgactactccgctgccctggatcccgcgtatacaacgcttgagttcgaaaacgtccaggttctgaccatgggcaatgacacatctcctagcgaggggaccaacctcaatgctccgaactccctgggagtgtctgccctttgcgccatctgtggcgatcgggctacagggaaacactacggagccagctcctgcgacggctgtaaggggtttttccgcagatctgtgcggaaaaatcatatgtatagctgccgcttttccagacaatgtgtcgtggataaggacaaacggaaccagtgccgctactgtagactgaagaagtgcttccgggctggaatgaaaaaggaagccgttcagaatgagcgcgatagaattagcacccggagatcttcctatgaagacagcgagctcccctctatcaacgcgctgctgcaggccgaggtgctctcccgccaaattacaagccctgtctctggcatcaatggcgatattcgggctaaaaagatcgcctccatcgctgacgtgtgtgaaagcatgaaagagcagctgcttgttctggtggaatgggccaagtacattcccgcgttttgcgagctccctctggatgaccaggtcgcccttctgcgcgctcacgccggggagcatctcctgctgggagctaccaagagatccatggtgttcaaagacgtgctcctgcttggcaacgattatatcgtcccccggcactgtcctgaactggccgagatgtctagagttagcattcgcatcctcgacgaactggtgcttccgtttcaggagctgcaaattgatgacaatgaatacgcctacctcaaggctatcattttctttgatcccgacgcgaaagggctgtccgatcctggaaagatcaaacggctgagaagccaggtgcaggtctctctcgaggactatatcaacgatcgccagtacgactcccggggcagattcggggagctgcttctgctcctgcccacgcttcaaagcattacctggcagatgatcgaacagattcaatttatcaagctgttcggaatggccaaaattgataatctcctgcaggagatgctgctctga

SEQ ID NO: 963 - RNA, 1128 nt, synthetic construct
  misc_feature 1..1128: note = CDS (opt5) from Homo sapiens__NP_000448.3__HNF4A(1-375)(S183A)
  source 1..1128: mol_type = other RNA
atgagactgagcaagaccctcgtggacatggatatggccgactactccgctgccctggatcccgcgtatacaacgcttgagttcgaaaacgtccaggttctgaccatgggcaatgacacatctcctagcgaggggaccaacctcaatgctccgaactccctgggagtgtctgccctttgcgccatctgtggcgatcgggctacagggaaacactacggagccagctcctgcgacggctgtaaggggtttttccgcagatctgtgcggaaaaatcatatgtatagctgccgcttttccagacaatgtgtcgtggataaggacaaacggaaccagtgccgctactgtagactgaagaagtgcttccgggctggaatgaaaaaggaagccgttcagaatgagcgcgatagaattagcacccggagatcttcctatgaagacagctctctcccctccatcaacgcgctgctgcaggccgaggtgctcagccgccaaattacatctcctgtctccggcatcaatggcgatattcgggctaaaaagatcgccgctatcgccgacgtgtgtgagagcatgaaagaacagctgcttgttctggtggagtgggcgaagtacattcccgccttttgcgaactccctctggatgaccaggtcgcccttctgcgcgcccacgctggggagcatctcctgctgggagccaccaagagatccatggtgttcaaagacgtgctcctgcttggcaacgattatatcgtcccccggcactgtcctgagctggccgaaatgtctagagttagcattcgcatcctcgacgagctggtgcttccgtttcaggaactgcaaattgatgacaatgagtacgcttacctcaaggcgatcattttctttgatcccgacgccaaagggctgtccgatcctggaaagatcaaacggctgagaagccaggtgcaggtctctctcgaagactatatcaacgatcgccagtacgactcccggggcagattcggggagctgcttctgctcctgcccacgcttcaaagcattacctggcagatgatcgagcagattcaatttatcaagctgttcggaatggctaaaattgataatctcctgcaggaaatgctgctctga

SEQ ID NO: 964 - RNA, 1128 nt, synthetic construct
  misc_feature 1..1128: note = CDS (opt5) from Homo sapiens__NP_000448.3__HNF4A(1-375)(S183E)
  source 1..1128: mol_type = other RNA
atgagactgagcaagaccctcgtggacatggatatggccgactactccgctgccctggatcccgcgtatacaacgcttgagttcgaaaacgtccaggttctgaccatgggcaatgacacatctcctagcgaggggaccaacctcaatgctccgaactccctgggagtgtctgccctttgcgccatctgtggcgatcgggctacagggaaacactacggagccagctcctgcgacggctgtaaggggtttttccgcagatctgtgcggaaaaatcatatgtatagctgccgcttttccagacaatgtgtcgtggataaggacaaacggaaccagtgccgctactgtagactgaagaagtgcttccgggctggaatgaaaaaggaagccgttcagaatgagcgcgatagaattagcacccggagatcttcctatgaagacagctctctcccctccatcaacgcgctgctgcaggccgaggtgctcagccgccaaattacatctcctgtctccggcatcaatggcgatattcgggctaaaaagatcgccgagatcgctgacgtgtgtgaaagcatgaaagagcagctgcttgttctggtggaatgggccaagtacattcccgcgttttgcgagctccctctggatgaccaggtcgcccttctgcgcgctcacgccggggagcatctcctgctgggagctaccaagagatccatggtgttcaaagacgtgctcctgcttggcaacgattatatcgtcccccggcactgtcctgaactggccgagatgtctagagttagcattcgcatcctcgacgaactggtgcttccgtttcaggagctgcaaattgatgacaatgaatacgcctacctcaaggctatcattttctttgatcccgacgcgaaagggctgtccgatcctggaaagatcaaacggctgagaagccaggtgcaggtctctctcgaggactatatcaacgatcgccagtacgactcccggggcagattcggggagctgcttctgctcctgcccacgcttcaaagcattacctggcagatgatcgaacagattcaatttatcaagctgttcggaatggccaaaattgataatctcctgcaggagatgctgctctga

SEQ ID NO: 965 - RNA, 1128 nt, synthetic construct; identical to SEQ ID NO: 937
  misc_feature 1..1128: note = CDS (opt5) from Homo sapiens__NP_000448.3__HNF4A(1-375)(S461A)
  source 1..1128: mol_type = other RNA

SEQ ID NO: 966 - RNA, 1128 nt, synthetic construct; identical to SEQ ID NO: 937
  misc_feature 1..1128: note = CDS (opt5) from Homo sapiens__NP_000448.3__HNF4A(1-375)(S461E)
  source 1..1128: mol_type = other RNA

SEQ ID NO: 967 - RNA, 1128 nt, synthetic construct
  misc_feature 1..1128: note = CDS (opt5) from Homo sapiens__NP_000448.3__HNF4A(1-375)(S142A_S143A_S313A)
  source 1..1128: mol_type = other RNA
atgagactgagcaagaccctcgtggacatggatatggccgactactccgctgccctggatcccgcgtatacaacgcttgagttcgaaaacgtccaggttctgaccatgggcaatgacacatctcctagcgaggggaccaacctcaatgctccgaactccctgggagtgtctgccctttgcgccatctgtggcgatcgggctacagggaaacactacggagccagctcctgcgacggctgtaaggggtttttccgcagatctgtgcggaaaaatcatatgtatagctgccgcttttccagacaatgtgtcgtggataaggacaaacggaaccagtgccgctactgtagactgaagaagtgcttccgggctggaatgaaaaaggaagccgttcagaatgagcgcgatagaattagcacccggcgcgcggcctatgaagactcttccctccccagcatcaacgctctgctgcaggccgaggtgctctctagacaaattacatcccctgtcagcggcatcaatggcgatattcgggctaaaaagatcgcctctatcgcggacgtgtgtgagtccatgaaagaacagctgcttgttctggtggagtgggccaagtacattcccgctttttgcgaactccctctggatgaccaggtcgcccttctgcgcgctcacgccggggagcatctcctgctgggagccaccaagagaagcatggtgttcaaagacgtgctcctgcttggcaacgattatatcgtcccccggcactgtcctgagctggctgaaatgtccagagtttctattcgcatcctcgacgagctggtgcttccgtttcaggaactgcaaattgatgacaatgagtacgcgtacctcaaggccatcattttctttgatcccgacgctaaagggctgagcgatcctggaaagatcaaacggctgagagcccaggtgcaggtctccctcgaagactatatcaacgatcgccagtacgacagccggggcagattcggggagctgcttctgctcctgcccacgcttcaatctattacctggcagatgatcgagcagattcaatttatcaagctgttcggaatggccaaaattgataatctcctgcaggaaatgctgctctga

SEQ ID NO: 968 - RNA, 1128 nt, synthetic construct; identical to SEQ ID NO: 967
  misc_feature 1..1128: note = CDS (opt5) from Homo sapiens__NP_000448.3__HNF4A(1-375)(S142A_S143A_S313A_K458R)
  source 1..1128: mol_type = other RNA

SEQ ID NO: 969 - RNA, 1128 nt, synthetic construct
  misc_feature 1..1128: note = CDS (opt5) from Homo sapiens__NP_000448.3__HNF4A(1-375)(S142A_S143A_S167A_S313A_ S378A_T429A_T432A_S436A_K458R)
  source 1..1128: mol_type = other RNA
atgagactgagcaagaccctcgtggacatggatatggccgactactccgctgccctggatcccgcgtatacaacgcttgagttcgaaaacgtccaggttctgaccatgggcaatgacacatctcctagcgaggggaccaacctcaatgctccgaactccctgggagtgtctgccctttgcgccatctgtggcgatcgggctacagggaaacactacggagccagctcctgcgacggctgtaaggggtttttccgcagatctgtgcggaaaaatcatatgtatagctgccgcttttccagacaatgtgtcgtggataaggacaaacggaaccagtgccgctactgtagactgaagaagtgcttccgggctggaatgaaaaaggaagccgttcagaatgagcgcgatagaattagcacccggcgcgcggcctatgaagactcttccctccccagcatcaacgctctgctgcaggccgaggtgctctctagacaaattacagctcctgtctccggcatcaatggcgatattcgggccaaaaagatcgcgagcatcgccgacgtgtgtgagtctatgaaagaacagctgcttgttctggtggagtgggctaagtacattcccgccttttgcgaactccctctggatgaccaggtcgcccttctgcgcgcccacgccggggagcatctcctgctgggagctaccaagagatccatggtgttcaaagacgtgctcctgcttggcaacgattatatcgtcccccggcactgtcctgagctggcggaaatgagcagagtttccattcgcatcctcgacgagctggtgcttccgtttcaggaactgcaaattgatgacaatgagtacgcctacctcaaggctatcattttctttgatcccgacgccaaagggctgtctgatcctggaaagatcaaacggctgagagcccaggtgcaggtcagcctcgaagactatatcaacgatcgccagtacgactcccggggcagattcggggagctgcttctgctcctgcccacgcttcaaagcattacctggcagatgatcgagcagattcaatttatcaagctgttcggaatggctaaaattgataatctcctgcaggaaatgctgctctga

SEQ ID NO: 970 - RNA, 1128 nt, synthetic construct
  misc_feature 1..1128: note = CDS (opt5) from Homo sapiens__NP_000448.3__HNF4A(1-375)(S142A_S143A_S148A_S167A_ S313A_S378A_T429A_T432A_S436A_K458R)
  source 1..1128: mol_type = other RNA
atgagactgagcaagaccctcgtggacatggatatggccgactactccgctgccctggatcccgcgtatacaacgcttgagttcgaaaacgtccaggttctgaccatgggcaatgacacatctcctagcgaggggaccaacctcaatgctccgaactccctgggagtgtctgccctttgcgccatctgtggcgatcgggctacagggaaacactacggagccagctcctgcgacggctgtaaggggtttttccgcagatctgtgcggaaaaatcatatgtatagctgccgcttttccagacaatgtgtcgtggataaggacaaacggaaccagtgccgctactgtagactgaagaagtgcttccgggctggaatgaaaaaggaagccgttcagaatgagcgcgatagaattagcacccggcgcgcggcctatgaagactctgctctcccctccatcaacgccctgctgcaggctgaggtgctcagcagacaaattacagcccctgtctctggcatcaatggcgatattcgggcgaaaaagatcgcctccatcgctgacgtgtgtgagagcatgaaagaacagctgcttgttctggtggagtgggccaagtacattcccgctttttgcgaactccctctggatgaccaggtcgcccttctgcgcgcccacgctggggagcatctcctgctgggagcgaccaagagatctatggtgttcaaagacgtgctcctgcttggcaacgattatatcgtcccccggcactgtcctgagctggccgaaatgtccagagttagcattcgcatcctcgacgagctggtgcttccgtttcaggaactgcaaattgatgacaatgagtacgcttacctcaaggccatcattttctttgatcccgacgccaaagggctgtccgatcctggaaagatcaaacggctgagagctcaggtgcaggtctctctcgaagactatatcaacgatcgccagtacgacagccggggcagattcggggagctgcttctgctcctgcccacgcttcaatccattacctggcagatgatcgagcagattcaatttatcaagctgttcggaatggccaaaattgataatctcctgcaggaaatgctgctctga

SEQ ID NO: 971 - RNA, 1128 nt, synthetic construct
  misc_feature 1..1128: note = CDS (opt5) from Homo sapiens__NP_000448.3__HNF4A(1-375)(K106R_K108R_K126R_K127R_ S142A_S143A_S148A_S167A_S313A_S378A_T429A_T432A_S436A_K458R )
  source 1..1128: mol_type = other RNA
atgagactgagcaagaccctcgtggacatggatatggccgactactccgctgccctggatcccgcgtatacaacgcttgagttcgaaaacgtccaggttctgaccatgggcaatgacacatctcctagcgaggggaccaacctcaatgctccgaactccctgggagtgtctgccctttgcgccatctgtggcgatcgggctacagggaaacactacggagccagctcctgcgacggctgtaaggggtttttccgcagatctgtgcggaaaaatcatatgtatagctgccgcttttccagacaatgtgtcgtggatcgggaccgcagaaaccagtgccggtactgtcgcctgaagaaatgcttcagagctggaatgcggcgcgaagccgttcagaatgagagagatcggattagcacccgcagagcggcctatgaagactctgctctcccctccatcaacgccctgctgcaggctgaggtgctcagccggcaaattacagcccctgtctctggcatcaatggcgatattagagcgaagaagatcgcctccatcgctgacgtgtgtgagagcatgaaagaacagctgcttgttctggtggagtgggccaagtacattcccgctttttgcgaactccctctggatgaccaggtcgcccttctgcgcgcccacgctggggagcatctcctgctgggagcgaccaaacggtctatggtgttcaaggacgtgctcctgcttggcaacgattatatcgtccccagacactgtcctgagctggccgaaatgtcccgcgttagcattcggatcctcgacgagctggtgcttccgtttcaggaactgcaaattgatgacaatgagtacgcttacctcaaagccatcattttctttgatcccgacgccaaggggctgtccgatcctggaaagatcaaaagactgcgcgctcaggtgcaggtctctctcgaagactatatcaacgatcggcagtacgacagcagaggccgcttcggggagctgcttctgctcctgcccacgcttcaatccattacctggcagatgatcgagcagattcaatttatcaagctgttcggaatggccaaaattgataatctcctgcaggaaatgctgctctga

SEQ ID NO: 972 - RNA, 1128 nt, synthetic construct
  misc_feature 1..1128: note = CDS (opt5) from Homo sapiens__NP_000448.3__HNF4A(1-375)(S142A_S143A_S148A_T166A_ S167A_S313A_S378A_T429A_T432A_S436A_K458R)
  source 1..1128: mol_type = other RNA
atgagactgagcaagaccctcgtggacatggatatggccgactactccgctgccctggatcccgcgtatacaacgcttgagttcgaaaacgtccaggttctgaccatgggcaatgacacatctcctagcgaggggaccaacctcaatgctccgaactccctgggagtgtctgccctttgcgccatctgtggcgatcgggctacagggaaacactacggagccagctcctgcgacggctgtaaggggtttttccgcagatctgtgcggaaaaatcatatgtatagctgccgcttttccagacaatgtgtcgtggataaggacaaacggaaccagtgccgctactgtagactgaagaagtgcttccgggctggaatgaaaaaggaagccgttcagaatgagcgcgatagaattagcacccggcgcgcggcctatgaagactctgctctcccctccatcaacgccctgctgcaggctgaggtgctcagcagacaaattgccgcgcctgtctctggcatcaatggcgatattcgggccaaaaagatcgcttccatcgccgacgtgtgtgagagcatgaaagaacagctgcttgttctggtggagtgggctaagtacattcccgccttttgcgaactccctctggatgaccaggtcgcccttctgcgcgctcacgcgggggagcatctcctgctgggagccacaaagagatctatggtgttcaaagacgtgctcctgcttggcaacgattatatcgtcccccggcactgtcctgagctggctgaaatgtccagagttagcattcgcatcctcgacgagctggtgcttccgtttcaggaactgcaaattgatgacaatgagtacgcctacctcaaggccatcattttctttgatcccgacgctaaagggctgtccgatcctggaaagatcaaacggctgagagcccaggtgcaggtctctctcgaagactatatcaacgatcgccagtacgacagccggggcagattcggggagctgcttctgctcctgcccacccttcaatccattacgtggcagatgatcgagcagattcaatttatcaagctgttcggaatggcgaaaattgataatctcctgcaggaaatgctgctctga

SEQ ID NO: 973 - RNA, 1128 nt, synthetic construct
  misc_feature 1..1128: note = CDS (opt5) from Homo sapiens__NP_000448.3__HNF4A(1-375)(S87A_S142A_S143A_S148A_T 166A_S167A_S313A_S378A_T429A_T432A_S436A_K458R)
  source 1..1128: mol_type = other RNA
atgagactgagcaagaccctcgtggacatggatatggccgactactccgctgccctggatcccgcgtatacaacgcttgagttcgaaaacgtccaggttctgaccatgggcaatgacacatctcctagcgaggggaccaacctcaatgctccgaactccctgggagtgtctgccctttgcgccatctgtggcgatcgggctacagggaaacactacggagccagctcctgcgacggctgtaaggggtttttccgcagagctgtgcggaaaaatcatatgtattcttgccgctttagcagacaatgtgtcgtggataaggacaaacggaaccagtgccgctactgtagactgaagaagtgcttccgggccggaatgaaaaaggaagcggttcagaatgagcgcgatagaatttccacccggcgcgccgcttatgaagacagcgccctcccctctatcaacgctctgctgcaggccgaggtgctctccagacaaattgcggcccctgtcagcggcatcaatggcgatattcgggctaaaaagatcgcctctatcgctgacgtgtgtgagtccatgaaagaacagctgcttgttctggtggagtgggccaagtacattcccgccttttgcgaactccctctggatgaccaggtcgcccttctgcgcgcgcacgccggggagcatctcctgctgggagctacaaagagaagcatggtgttcaaagacgtgctcctgcttggcaacgattatatcgtcccccggcactgtcctgagctggccgaaatgtctagagtttccattcgcatcctcgacgagctggtgcttccgtttcaggaactgcaaattgatgacaatgagtacgcctacctcaaggctatcattttctttgatcccgacgccaaagggctgagcgatcctggaaagatcaaacggctgagagctcaggtgcaggtctccctcgaagactatatcaacgatcgccagtacgactctcggggcagattcggggagctgcttctgctcctgcccacccttcaaagcattacgtggcagatgatcgagcagattcaatttatcaagctgttcggaatggcgaaaattgataatctcctgcaggaaatgctgctctga

SEQ ID NO: 974 - RNA, 1128 nt, synthetic construct
  misc_feature 1..1128: note = CDS (opt5) from Homo sapiens__NP_000448.3__HNF4A(1-375)(S87A_K106R_K108R_K126R_K 127R_S142A_S143A_S148A_T166A_S167A_S313A_S378A_T429A_T432A_ S436A_K458R)
  source 1..1128: mol_type = other RNA
atgagactgagcaagaccctcgtggacatggatatggccgactactccgctgccctggatcccgcgtatacaacgcttgagttcgaaaacgtccaggttctgaccatgggcaatgacacatctcctagcgaggggaccaacctcaatgctccgaactccctgggagtgtctgccctttgcgccatctgtggcgatcgggctacagggaaacactacggagccagctcctgcgacggctgtaaggggtttttccgcagagctgtgcggaaaaatcatatgtattcttgccgctttagcagacaatgtgtcgtggatcgggaccgcagaaaccagtgccggtactgtcgcctgaagaaatgcttcagagccggaatgcggcgcgaagcggttcagaatgagagagatcggatttccacccgcagagccgcttatgaagacagcgccctcccctctatcaacgctctgctgcaggccgaggtgctctcccggcaaattgcggcccctgtcagcggcatcaatggcgatattagagctaagaagatcgcctctatcgctgacgtgtgtgagtccatgaaagaacagctgcttgttctggtggagtgggccaagtacattcccgccttttgcgaactccctctggatgaccaggtcgcccttctgcgcgcgcacgccggggagcatctcctgctgggagctacaaaacggagcatggtgttcaaggacgtgctcctgcttggcaacgattatatcgtccccagacactgtcctgagctggccgaaatgtctcgcgtttccattcggatcctcgacgagctggtgcttccgtttcaggaactgcaaattgatgacaatgagtacgcctacctcaaagctatcattttctttgatcccgacgccaaggggctgagcgatcctggaaagatcaaaagactgcgcgctcaggtgcaggtctccctcgaagactatatcaacgatcggcagtacgactctagaggccgcttcggggagctgcttctgctcctgcccacccttcaaagcattacgtggcagatgatcgagcagattcaatttatcaagctgttcggaatggcgaaaattgataatctcctgcaggaaatgctgctctga

SEQ ID NO: 975 - RNA, 1128 nt, synthetic construct
  misc_feature 1..1128: note = CDS (opt5) from Homo sapiens__NP_000448.3__HNF4A(1-375)(S87A_K106R_K108R_K126R_K 127R)
  source 1..1128: mol_type = other RNA
atgagactgagcaagaccctcgtggacatggatatggccgactactccgctgccctggatcccgcgtatacaacgcttgagttcgaaaacgtccaggttctgaccatgggcaatgacacatctcctagcgaggggaccaacctcaatgctccgaactccctgggagtgtctgccctttgcgccatctgtggcgatcgggctacagggaaacactacggagccagctcctgcgacggctgtaaggggtttttccgcagagctgtgcggaaaaatcatatgtattcttgccgctttagcagacaatgtgtcgtggatcgggaccgcagaaaccagtgccggtactgtcgcctgaagaaatgcttcagagccggaatgcggcgcgaagcggttcagaatgagagagatcggatttccacccgcagaagctcttatgaagactccagcctcccctctatcaacgccctgctgcaggctgaggtgctctcccggcaaattacaagccctgtctctggcatcaatggcgatattagagccaagaagatcgcttccatcgccgacgtgtgtgagagcatgaaagaacagctgcttgttctggtggagtgggcgaagtacattcccgccttttgcgaactccctctggatgaccaggtcgcccttctgcgcgcccacgctggggagcatctcctgctgggagccaccaaacggtccatggtgttcaaggacgtgctcctgcttggcaacgattatatcgtccccagacactgtcctgagctggccgaaatgtctcgcgttagcattcggatcctcgacgagctggtgcttccgtttcaggaactgcaaattgatgacaatgagtacgcttacctcaaagcgatcattttctttgatcccgacgccaaggggctgtccgatcctggaaagatcaaaagactgcgcagccaggtgcaggtctctctcgaagactatatcaacgatcggcagtacgactccagaggccgcttcggggagctgcttctgctcctgcccacgcttcaaagcattacctggcagatgatcgagcagattcaatttatcaagctgttcggaatggctaaaattgataatctcctgcaggaaatgctgctctga

SEQ ID NO: 976 - RNA, 1128 nt, synthetic construct; identical to SEQ ID NO: 974
  misc_feature 1..1128: note = CDS (opt5) from Homo sapiens__NP_000448.3__HNF4A(1-375)(S87A_K106R_K108R_K126R_K 127R_S142A_S143A_S148A_T166A_S167A_S313A_S378A_T429A_T432A_ S436A_K458R_S461A)
  source 1..1128: mol_type = other RNA

SEQ ID NO: 977 - RNA, 1128 nt, synthetic construct; identical to SEQ ID NO: 974
  misc_feature 1..1128: note = CDS (opt5) from Homo sapiens__NP_000448.3__HNF4A(1-375)(S87A_K106R_K108R_K126R_K 127R_S142A_S143A_S148A_T166A_S167A_S313A_S378A_T429A_T432A_ S436A_K458R_S461E)
  source 1..1128: mol_type = other RNA

SEQ ID NO: 978 - RNA, 1128 nt, synthetic construct
  misc_feature 1..1128: note = CDS (opt5) from Homo sapiens__NP_000448.3__HNF4A(1-375)(S87A_K106R_K108R_K126R_K 127R_S142A_S143A_S148E_T166A_S167E_S313A_S378E_T429E_T432E_ S436E_K458R_S461E)
  source 1..1128: mol_type = other RNA
atgagactgagcaagaccctcgtggacatggatatggccgactactccgctgccctggatcccgcgtatacaacgcttgagttcgaaaacgtccaggttctgaccatgggcaatgacacatctcctagcgaggggaccaacctcaatgctccgaactccctgggagtgtctgccctttgcgccatctgtggcgatcgggctacagggaaacactacggagccagctcctgcgacggctgtaaggggtttttccgcagagctgtgcggaaaaatcatatgtattcttgccgctttagcagacaatgtgtcgtggatcgggaccgcagaaaccagtgccggtactgtcgcctgaagaaatgcttcagagccggaatgcggcgcgaagcggttcagaatgagagagatcggatttccacccgcagagccgcttatgaagacagcgagctcccctctatcaacgccctgctgcaggctgaggtgctctcccggcaaattgccgaacctgtcagcggcatcaatggcgatattagagcgaagaagatcgcctctatcgctgacgtgtgtgagtccatgaaagaacagctgcttgttctggtggagtgggccaagtacattcccgctttttgcgagctccctctggatgaccaggtcgcccttctgcgcgcccacgctggggaacatctcctgctgggagcgacaaaacggagcatggtgttcaaggacgtgctcctgcttggcaacgattatatcgtccccagacactgtcctgagctggccgaaatgtctcgcgtttccattcggatcctcgacgagctggtgcttccgtttcaggaactgcaaattgatgacaatgagtacgcttacctcaaagccatcattttctttgatcccgacgccaaggggctgagcgatcctggaaagatcaaaagactgcgcgctcaggtgcaggtctccctcgaggactatatcaacgatcggcagtacgactctagaggccgcttcggggaactgcttctgctcctgcccacccttcaaagcattacgtggcagatgatcgagcagattcaatttatcaagctgttcggaatggccaaaattgataatctcctgcaggaaatgctgctctga

SEQ ID NO: 979 - RNA, 1128 nt, synthetic construct
  misc_feature 1..1128: note = CDS (opt5) from Homo sapiens__NP_000448.3__HNF4A(1-375)(S87A_K106R_K108R_K126R_K 127R_S142A_S143A_S148A_T166A_S167A_K179R_K180R_S313A_S378A_ T429A_T432A_S436A_K458R_S461E)
  source 1..1128: mol_type = other RNA
atgagactgagcaagaccctcgtggacatggatatggccgactactccgctgccctggatcccgcgtatacaacgcttgagttcgaaaacgtccaggttctgaccatgggcaatgacacatctcctagcgaggggaccaacctcaatgctccgaactccctgggagtgtctgccctttgcgccatctgtggcgatcgggctacagggaaacactacggagccagctcctgcgacggctgtaaggggtttttccgcagagctgtgcggaaaaatcatatgtattcttgccgctttagcagacaatgtgtcgtggatcgggaccgcagaaaccagtgccggtactgtcgcctgaagaaatgcttcagagccggaatgcggcgcgaagcggttcagaatgagagagatcggatttccacccgcagagccgcttatgaagacagcgccctcccctctatcaacgctctgctgcaggccgaggtgctctcccggcaaattgcggcccctgtcagcggcatcaatggcgatattagagctcgccggatcgcctctatcgctgacgtgtgtgagtccatgaaggaacagctgcttgttctggtggagtgggccaagtacattcccgccttttgcgaactccctctggatgaccaggtcgcccttctgagagcgcacgccggggagcatctcctgctgggagctacaaaacgcagcatggtgttcaaggacgtgctcctgcttggcaacgattatatcgtcccccggcactgtcctgagctggccgaaatgtctagagtttccattcgcatcctcgacgagctggtgcttccgtttcaggaactgcaaattgatgacaatgagtacgcctacctcaaagctatcattttctttgatcccgacgccaaggggctgagcgatcctggaaaaatcaagcggctgagagctcaggtgcaggtctccctcgaagactatatcaacgatcgccagtacgactctcggggcagattcggggagctgcttctgctcctgcccacccttcaaagcattacgtggcagatgatcgagcagattcaatttatcaagctgttcggaatggcgaaaattgataatctcctgcaggaaatgctgctctga

SEQ ID NO: 980 - RNA, 1128 nt, synthetic construct
  misc_feature 1..1128: note = CDS (opt5) from Homo sapiens__NP_000448.3__HNF4A(1-375)(S87A_K106R_K108R_K126R_K 127R_S142A_S143A_S148A_T166A_S167A_K300R_K307R_K309R_S313A_ S378A_T429A_T432A_S436A_K458R_S461E)
  source 1..1128: mol_type = other RNA
atgagactgagcaagaccctcgtggacatggatatggccgactactccgctgccctggatcccgcgtatacaacgcttgagttcgaaaacgtccaggttctgaccatgggcaatgacacatctcctagcgaggggaccaacctcaatgctccgaactccctgggagtgtctgccctttgcgccatctgtggcgatcgggctacagggaaacactacggagccagctcctgcgacggctgtaaggggtttttccgcagagctgtgcggaaaaatcatatgtattcttgccgctttagcagacaatgtgtcgtggatcgggaccgcagaaaccagtgccggtactgtcgcctgaagaaatgcttcagagccggaatgcggcgcgaagcggttcagaatgagagagatcggatttccacccgcagagccgcttatgaagacagcgccctcccctctatcaacgctctgctgcaggccgaggtgctctcccggcaaattgcggcccctgtcagcggcatcaatggcgatattagagctaagaagatcgcctctatcgctgacgtgtgtgagtccatgaaagaacagctgcttgttctggtggagtgggccaagtacattcccgccttttgcgaactccctctggatgaccaggtcgcccttctgcgcgcgcacgccggggagcatctcctgctgggagctacaaaacggagcatggtgttcaaggacgtgctcctgcttggcaacgattatatcgtccccagacactgtcctgagctggccgaaatgtctcgcgtttccattcggatcctcgacgagctggtgcttccgtttcaggaactgcaaattgatgacaatgagtacgcctacctcaaagctatcattttctttgatcccgacgccagagggctgagcgatcctggacgcatccggagactgcgcgctcaggtgcaggtctccctcgaagactatatcaacgatcggcagtacgactctagaggccgcttcggggagctgcttctgctcctgcccacccttcaaagcattacgtggcagatgatcgagcagattcaatttatcaagctgttcggaatggcgaagattgataatctcctgcaggaaatgctgctctga

SEQ ID NO: 981 - RNA, 1128 nt, synthetic construct; identical to SEQ ID NO: 974
  misc_feature 1..1128: note = CDS (opt5) from Homo sapiens__NP_000448.3__HNF4A(1-375)(S87A_K106R_K108R_K126R_K 127R_S142A_S143A_S148A_T166A_S167A_S313A_S378A_T429A_T432A_ S436A_K447R_K458R_S461E_K470R)
  source 1..1128: mol_type = other RNA

SEQ ID NO: 982 - RNA, 1128 nt, synthetic construct
  misc_feature 1..1128: note = CDS (opt5) from Homo sapiens__NP_000448.3__HNF4A(1-375)(S87A_K106R_K108R_K126R_K 127R_S142A_S143A_S148A_T166A_S167A_K179R_K180R_K234R_K300R_ K307R_K309R_S313A_S378A_T429A_T432A_S436A_K447R_K458R_S461E _K470R)
  source 1..1128: mol_type = other RNA
atgagactgagcaagaccctcgtggacatggatatggccgactactccgctgccctggatcccgcgtatacaacgcttgagttcgaaaacgtccaggttctgaccatgggcaatgacacatctcctagcgaggggaccaacctcaatgctccgaactccctgggagtgtctgccctttgcgccatctgtggcgatcgggctacagggaaacactacggagccagctcctgcgacggctgtaaggggtttttccgcagagctgtgcggaaaaatcatatgtattcttgccgctttagcagacaatgtgtcgtggatcgggaccgcagaaaccagtgccggtactgtcgcctgaagaaatgcttcagagccggaatgcggcgcgaagcggttcagaatgagagagatcggatttccacccgcagagccgcttatgaagacagcgccctcccctctatcaacgctctgctgcaggccgaggtgctctcccggcaaattgcggcccctgtcagcggcatcaatggcgatattagagctcgccggatcgcctctatcgctgacgtgtgtgagtccatgaaggaacagctgcttgttctggtggagtgggccaagtacattcccgccttttgcgaactccctctggatgaccaggtcgcccttctgagagcgcacgccggggagcatctcctgctgggagctacacgccggagcatggtgttcaaagacgtgctcctgcttggcaacgattatatcgtccccagacactgtcctgagctggccgaaatgtctcgcgtttccattcggatcctcgacgagctggtgcttccgtttcaggaactgcaaattgatgacaatgagtacgcctacctcaaggctatcattttctttgatcccgacgccagagggctgagcgatcctggacgcatccggagactgcgcgctcaggtgcaggtctccctcgaagactatatcaacgatcggcagtacgactctagaggccggttcggggagctgcttctgctcctgcccacccttcaaagcattacgtggcagatgatcgagcagattcaatttatcaaactgttcggaatggcgaagattgataatctcctgcaggaaatgctgctctga

SEQ ID NO: 983 - RNA, 1128 nt, synthetic construct
  misc_feature 1..1128: note = CDS (opt5) from Homo sapiens__NP_000448.3__HNF4A(1-375)(S87A_S95A_S99A_K106R_K10 8R_K126R_K127R_S142A_S143A_S148A_T166A_S167A_S313A_S378A_T4 29A_T432A_S436A_K458R_S461E)
  source 1..1128: mol_type = other RNA
atgagactgagcaagaccctcgtggacatggatatggccgactactccgctgccctggatcccgcgtatacaacgcttgagttcgaaaacgtccaggttctgaccatgggcaatgacacatctcctagcgaggggaccaacctcaatgctccgaactccctgggagtgtctgccctttgcgccatctgtggcgatcgggctacagggaaacactacggagccagctcctgcgacggctgtaaggggtttttccgcagagctgtgcggaaaaatcatatgtatgcctgccgctttgcgagacaatgtgtcgtggatcgggaccgcagaaaccagtgccggtactgtcgcctgaagaaatgcttcagagccggaatgcggcgcgaagctgttcagaatgagagagatcggatttctacccgcagagccgcttatgaagacagcgccctcccctccatcaacgcgctgctgcaggccgaggtgctcagccggcaaattgctgcccctgtctctggcatcaatggcgatattagagctaagaagatcgcctccatcgccgacgtgtgtgagagcatgaaagaacagctgcttgttctggtggagtgggctaagtacattcccgcgttttgcgaactccctctggatgaccaggtcgcccttctgcgcgctcacgccggggagcatctcctgctgggagccacaaaacggtctatggtgttcaaggacgtgctcctgcttggcaacgattatatcgtccccagacactgtcctgagctggctgaaatgtcccgcgttagcattcggatcctcgacgagctggtgcttccgtttcaggaactgcaaattgatgacaatgagtacgcctacctcaaagcgatcattttctttgatcccgacgctaaggggctgtctgatcctggaaagatcaaaagactgcgcgcccaggtgcaggtctccctcgaagactatatcaacgatcggcagtacgacagcagaggccgcttcggggagctgcttctgctcctgcccacccttcaatccattacgtggcagatgatcgagcagattcaatttatcaagctgttcggaatggccaaaattgataatctcctgcaggaaatgctgctctga

SEQ ID NO: 984 - RNA, 1128 nt, synthetic construct
  misc_feature 1..1128: note = CDS (opt5) from Homo sapiens__NP_000448.3__HNF4A(1-375)(S87A_K106R_K108R_K126R_K 127R_S138A_T139A_S142A_S143A_S148A_T166A_S167A_S313A_S378A_ T429A_T432A_S436A_K458R_S461E)
  source 1..1128: mol_type = other RNA
atgagactgagcaagaccctcgtggacatggatatggccgactactccgctgccctggatcccgcgtatacaacgcttgagttcgaaaacgtccaggttctgaccatgggcaatgacacatctcctagcgaggggaccaacctcaatgctccgaactccctgggagtgtctgccctttgcgccatctgtggcgatcgggctacagggaaacactacggagccagctcctgcgacggctgtaaggggtttttccgcagagctgtgcggaaaaatcatatgtattcttgccgctttagcagacaatgtgtcgtggatcgggaccgcagaaaccagtgccggtactgtcgcctgaagaaatgcttcagagccggaatgcggcgcgaagcggttcagaatgagagagatcggattgccgctcgcagagccgcttatgaagactccgccctccccagcatcaacgcgctgctgcaggccgaggtgctctctcggcaaattgctgcccctgtctccggcatcaatggcgatattagagctaagaagatcgccagcatcgccgacgtgtgtgagtctatgaaagaacagctgcttgttctggtggagtgggctaagtacattcccgcgttttgcgaactccctctggatgaccaggtcgcccttctgcgcgctcacgccggggagcatctcctgctgggagccaccaaacggtccatggtgttcaaggacgtgctcctgcttggcaacgattatatcgtccccagacactgtcctgagctggctgaaatgagccgcgtttctattcggatcctcgacgagctggtgcttccgtttcaggaactgcaaattgatgacaatgagtacgcctacctcaaagcgatcattttctttgatcccgacgctaaggggctgtccgatcctggaaagatcaaaagactgcgcgcccaggtgcaggtcagcctcgaagactatatcaacgatcggcagtacgactccagaggccgcttcggggagctgcttctgctcctgcccacacttcaatctattacctggcagatgatcgagcagattcaatttatcaagctgttcggaatggccaaaattgataatctcctgcaggaaatgctgctctga

SEQ ID NO: 985 - RNA, 1128 nt, synthetic construct
  misc_feature 1..1128: note = CDS (opt5) from Homo sapiens__NP_000448.3__HNF4A(1-375)(S87A_S95A_S99A_K106R_K10 8R_K126R_K127R_S138A_T139A_S142A_S143A_S148A_T166A_S167A_S3 13A_S378A_T429A_T432A_S436A_K458R_S461E)
  source 1..1128: mol_type = other RNA
atgagactgagcaagaccctcgtggacatggatatggccgactactccgctgccctggatcccgcgtatacaacgcttgagttcgaaaacgtccaggttctgaccatgggcaatgacacatctcctagcgaggggaccaacctcaatgctccgaactccctgggagtgtctgccctttgcgccatctgtggcgatcgggctacagggaaacactacggagccagctcctgcgacggctgtaaggggtttttccgcagagctgtgcggaaaaatcatatgtatgcctgccgctttgcgagacaatgtgtcgtggatcgggaccgcagaaaccagtgccggtactgtcgcctgaagaaatgcttcagagccggaatgcggcgcgaagctgttcagaatgagagagatcggattgccgctcgcagagccgcgtatgaagactctgccctccccagcatcaacgctctgctgcaggccgaggtgctctcccggcaaattgctgcccctgtcagcggcatcaatggcgatattagagccaagaagatcgcttctatcgcggacgtgtgtgagtccatgaaagaacagctgcttgttctggtggagtgggccaagtacattcccgctttttgcgaactccctctggatgaccaggtcgcccttctgcgcgcccacgctggggagcatctcctgctgggagccaccaaacggagcatggtgttcaaggacgtgctcctgcttggcaacgattatatcgtccccagacactgtcctgagctggcggaaatgtctcgcgtttccattcggatcctcgacgagctggtgcttccgtttcaggaactgcaaattgatgacaatgagtacgcttacctcaaagccatcattttctttgatcccgacgccaaggggctgagcgatcctggaaagatcaaaagactgcgcgctcaggtgcaggtctctctcgaagactatatcaacgatcggcagtacgactccagaggccgcttcggggagctgcttctgctcctgcccacacttcaaagcattacctggcagatgatcgagcagattcaatttatcaagctgttcggaatggccaaaattgataatctcctgcaggaaatgctgctctga

SEQ ID NO: 986 - RNA, 1128 nt, synthetic construct
  misc_feature 1..1128: note = CDS (opt11) from Homo sapiens__NP_000448.3__HNF4A(1-375)
  source 1..1128: mol_type = other RNA
atgcgtctttccaaaacactcgtagacatggacatggcagactacagcgccgccctcgacccagcctacaccaccctcgaatttgaaaacgtccaagtcctaactatgggaaacgacacatcaccctcagaaggtacaaacctcaacgcccccaactcgctaggcgtctccgcactatgcgcaatctgcggcgaccgtgccaccggcaaacactacggagcctcatcctgcgacggttgtaaaggcttcttccgacgcagcgtcagaaaaaaccacatgtactcctgccgcttctcccgtcaatgcgtcgtcgacaaagacaaacgcaaccaatgccggtactgccgcctaaaaaaatgcttccgcgcaggcatgaaaaaagaagcagtccaaaacgaacgcgaccgcatatcaacccgtcgatcatcatacgaagactcctccctccccagcatcaacgccctcctccaagcagaagtactaagccggcaaataacatccccagtcagcggcatcaacggagacatacgagccaaaaaaatagcttcaatcgccgacgtctgcgaatccatgaaagagcaactactggtcctcgtcgaatgggctaaatacatcccggccttctgcgaactccccctcgacgatcaagtcgcccttctaagagcccacgccggcgaacacctcctcttaggcgcaaccaaacgcagcatggtattcaaagacgtactgctcctcggcaacgattacatcgtcccacgacattgccccgagctcgcagaaatgtcccgagtctccatccgcatactcgacgaactcgtactccccttccaagaactccaaatagacgacaatgaatacgcatacctcaaagcaatcatcttcttcgaccccgacgccaaaggactcagcgacccaggcaaaatcaaacgcctacgatcacaagtacaagtttcacttgaagactacatcaacgacagacaatacgactcaagaggtcgtttcggagaactactcctactactaccaaccctccaaagcataacctggcaaatgatagaacaaatacaatttataaaactcttcggcatggccaaaatcgacaatctcctacaagaaatgctcctctga

SEQ ID NO: 987 - RNA, 1128 nt, synthetic construct
  misc_feature 1..1128: note = CDS (opt11) from Homo sapiens__NP_000448.3__HNF4A(1-375)(S313A)
  source 1..1128: mol_type = other RNA
atgcgtctctcaaaaaccctagtcgacatggacatggccgactattctgcagccctagacccagcctacaccaccctcgaattcgaaaacgtacaagtactcaccatgggcaacgatacctccccatctgaaggcaccaacctcaacgcacccaactctctcggagtctccgccctatgcgcaatctgcggcgaccgagccactggaaaacactacggcgcctcctcttgcgacggatgcaaaggcttcttccgaagatcagtccgaaaaaaccacatgtactcatgccgcttctcgcgccaatgcgtcgtcgacaaagacaaacgtaaccaatgcagatactgccgactcaaaaaatgcttccgcgccggcatgaaaaaagaagccgtccagaacgaacgcgaccgcatctcaaccagacgctcgagctacgaagactcctccctaccctccatcaacgccctactccaagcagaagtactatcccgccaaataacctcccccgtcagcggcatcaacggcgacatcagagccaaaaaaatcgcctcaatcgccgacgtatgcgagagcatgaaagaacagctccttgtcctagtagaatgggccaaatacatcccagccttctgcgaactccccctcgacgaccaagtcgccctactcagagcccacgccggcgaacacctcctcctcggcgctaccaagcgatctatggtattcaaggatgtacttctactcggaaacgactacatcgtaccacgccactgcccagaactagccgaaatgtcccgcgtatccatccgaatcctcgatgaactcgtactccccttccaagaactacaaattgacgacaatgaatacgcctacttaaaagccatcatattcttcgaccccgacgccaaaggtctgtccgacccaggcaaaatcaaacgactacgggcccaagtccaagtatcactcgaagactacatcaacgaccgccaatacgactcacgcggccgcttcggcgagctcctcctccttctcccaaccctacaatccataacctggcaaatgatcgaacaaatccaattcataaaactcttcggcatggcaaaaattgacaaccttctccaagaaatgctcctgtga

SEQ ID NO: 988 - RNA, 1128 nt, synthetic construct
  misc_feature 1..1128: note = CDS (opt11) from Homo sapiens__NP_000448.3__HNF4A(1-375)(S313E)
  source 1..1128: mol_type = other RNA
atgcgcctgtccaaaaccctcgtcgacatggacatggctgactactccgccgccctcgaccccgcatacaccacactcgaattcgaaaacgtccaggtcctcaccatgggaaacgacacctccccctcagaaggaaccaacctaaacgctcccaactcccttggcgtctccgccctctgcgcaatatgcggagaccgcgccaccggaaaacactacggcgcctcatcctgcgacggttgcaaaggcttcttccgccgatccgtccgcaaaaaccacatgtattcctgccgcttctcgcgacagtgcgtagtcgacaaagataaacgaaaccaatgccgatactgccgccttaaaaaatgcttccgcgccggaatgaaaaaagaagcagtccaaaacgaacgagaccgcatcagcacccgtaggagctcatacgaggactcgagcctcccctcgatcaacgccttactccaagccgaagtactgtcccgccagatcacctcacccgtctccggcatcaacggagacatcagagccaaaaaaatagcatcgatcgccgacgtatgcgagtccatgaaagaacaactcctagtactagtcgaatgggccaaatacatcccagcattctgcgaactacccctagatgatcaagtagccctactacgagcccacgccggcgaacacctcctcctcggggccaccaaacgatcaatggtcttcaaagacgtcctcctcctcggcaacgactacatcgtaccccgccactgcccagaactcgcagaaatgtcacgcgtctcaatccgcatcctggacgaacttgtactcccattccaagaactacaaatagacgacaacgaatacgcatacctgaaagcaatcatctttttcgaccccgacgccaaaggcctatctgaccccggtaaaataaaacgcctccgcgaacaagtacaagtctctctcgaagactacatcaacgaccgccagtacgacagccggggacgcttcggcgaacttctcctcctcctccccactctacaaagcatcacctggcaaatgatcgaacaaatacaattcatcaaactcttcggaatggcaaaaatcgacaacctcctccaagaaatgctcctctga

SEQ ID NO: 989 - RNA, 1128 nt, synthetic construct
  misc_feature 1..1128: note = CDS (opt11) from Homo sapiens__NP_000448.3__HNF4A(1-375)(S142A_S143A)
  source 1..1128: mol_type = other RNA
atgcgcctatcaaaaacactggtcgacatggacatggcagactattctgccgccctggaccccgcctacactacactcgagttcgaaaacgtccaagtactcaccatgggaaacgacacctccccctccgaaggcaccaacttaaacgcccccaactcccttggggtctccgctctctgcgcaatctgcggagacagagccaccggtaaacactacggagcctcctcctgcgacggatgcaaaggcttcttccgccgctcagtacgcaaaaaccacatgtatagttgccgcttctctcgccagtgcgtggtcgacaaagacaaacgcaaccaatgccgatactgccgcctcaaaaagtgcttccgcgccggaatgaagaaagaagctgtccaaaacgaacgcgaccgcatctcaacccgcagagcggcatacgaagacagctcgctaccctccataaacgccctccttcaagccgaagtcctatcccgacagatcacctcccccgtctctggaataaacggcgacatccgcgcaaagaaaatcgcctccatcgccgacgtatgcgaatccatgaaagaacaactcctagtgctagtagaatgggccaaatacatacccgccttctgcgagctccccctagacgaccaagtagccctactccgcgcacacgcaggcgaacacctcctcctcggcgccaccaaacgatcaatggtcttcaaagacgtactactcctcggcaatgactacatcgtcccacgacactgccccgaattagcagaaatgtcgcgagtctccatacgcatcctagacgaactcgtactccctttccaagaactacaaatcgatgacaacgaatacgcatacctcaaagccatcatcttcttcgacccagacgccaaaggcctttccgatcccggcaaaatcaaaagactacgctcacaagtacaagtctccctcgaagattacatcaacgaccgccaatacgactcacgcggccgcttcggagaactcctactactcctcccaaccctacaatccatcacctggcaaatgatcgaacaaatccagttcattaaactcttcggaatggccaaaatcgataacctcctacaagaaatgctcctatga

SEQ ID NO: 990 - RNA, 1128 nt, synthetic construct
  misc_feature 1..1128: note = CDS (opt11) from Homo sapiens__NP_000448.3__HNF4A(1-375)(S142E_S143E)
  source 1..1128: mol_type = other RNA
atgcgcctatccaaaaccctagtcgacatggacatggcagactactccgccgccctcgacccagcatacaccacactcgaattcgaaaacgtccaagtgctaaccatgggcaacgacaccagcccgtccgaaggcacaaacctcaacgcccccaactcccttggtgtctcagccctctgcgcaatctgcggcgaccgtgccaccggtaaacactatggcgcctcatcctgcgacggctgcaaaggcttcttcagacgatcggtacgcaaaaaccacatgtactcatgtcgcttctcccgacaatgtgtagtggacaaagacaaaagaaaccaatgccgctactgccgcctcaaaaaatgcttccgcgcaggcatgaaaaaagaagccgtccagaatgaacgagaccgcataagcacccgccgagaagaatatgaagactcctcacttccctcaatcaacgccctactccaagccgaagtactatcacggcaaatcacaagccccgtctcaggaataaacggagacatccgcgccaaaaaaattgcctccatcgcggacgtatgcgaaagcatgaaagaacaactactcgtactcgtcgaatgggcaaaatacatccccgcattctgcgaactccccctcgacgaccaagtagccctgctcagagcacacgccggagaacaccttctcctcggcgccaccaaacgctccatggtcttcaaagacgtcctcctcctagggaacgactacatagtaccacgacactgcccagaactagccgaaatgtccagagtatcaatccgaatcctcgacgaactcgtcctccccttccaagaactacaaatcgacgacaacgaatacgcctacctaaaagccatcatattcttcgatcccgacgcaaaaggcctctccgaccccggcaaaatcaagcgactacgatcacaagtacaagtctccctggaagactacatcaacgaccgccaatacgacagccgcggaagattcggcgaactcctgctactactccccaccctacaatccatcacctggcaaatgatagaacaaatacaattcatcaaactcttcggcatggctaaaatcgacaacctcctacaagaaatgctactatga

SEQ ID NO: 991 - RNA, 1128 nt, synthetic construct
  misc_feature 1..1128: note = CDS (opt11) from Homo sapiens__NP_000448.3__HNF4A(1-375)(S143A)
  source 1..1128: mol_type = other RNA
atgcgactctccaagaccctcgtagacatggatatggcagactacagcgccgccctagatccagcttacaccaccctcgaattcgaaaacgttcaagtcctaacgatgggcaacgacacctcaccatcagaaggcaccaacctcaacgcccccaactccctcggagtctcagccctctgcgcaatctgcggcgaccgcgccaccggcaaacactacggagcctcgtcctgcgacggatgcaaaggattcttcaggcgctccgtacggaaaaaccacatgtactcttgtcgtttctcccgccaatgcgtagtcgacaaagacaaacgcaaccaatgccgctactgtcgcctcaaaaaatgcttccgcgccggcatgaagaaagaagccgtccaaaacgaacgcgaccgcatctccacccgcaggtccgcctacgaagactccagcctaccctccatcaacgcactactccaagccgaagtcctctcccgccaaatcacgtctcccgtctcaggaatcaacggcgacatccgcgctaagaaaatagcatctatcgccgacgtctgtgaatccatgaaagaacaactactcgtactggtagaatgggccaaatacatccccgccttctgcgaacttcccctcgacgaccaagttgcactcctccgagcccacgccggggaacacctactcctcggagccaccaaacgctcaatggtcttcaaagacgtactcctcctcggcaacgactacatcgtgccacgccactgccccgaactagccgaaatgtcccgggtctccattcgaatcctcgacgaactcgtcctccccttccaagaactccaaatagacgacaacgaatacgcttacctcaaagcaataatcttcttcgacccagatgccaaaggcctcagcgacccgggcaagattaaacgcctccgctctcaagtccaagtctcccttgaagactacatcaacgaccgccaatacgactcccgcggtcgattcggggaactactcctactcctcccaacactacaatccatcacctggcaaatgatcgaacaaatccaattcatcaaactcttcggcatggccaaaatcgacaacctcctacaggaaatgctcctatga

SEQ ID NO: 992 - RNA, 1128 nt, synthetic construct
  misc_feature 1..1128: note = CDS (opt11) from Homo sapiens__NP_000448.3__HNF4A(1-375)(T166A)
  source 1..1128: mol_type = other RNA
atgaggctcagcaaaactctagtcgacatggacatggccgactactcagccgcactcgaccccgcatataccacactagagttcgaaaacgtccaagttctcaccatgggaaacgacacttccccctcagaaggcacaaacctcaacgcacccaactccctaggagtctccgccctatgcgcgatctgtggcgaccgagcaaccggcaagcattacggcgcatcctcctgcgacggatgcaaaggcttcttccgccgatccgtccgaaagaaccacatgtactcctgccgattctcccgccaatgcgtagttgacaaagacaaacgcaatcaatgccgatactgccgcctcaagaaatgcttccgagcaggaatgaagaaagaagccgtccaaaacgaacgcgatcgcatatccacccgccgctcctcctacgaagactcctccctcccctccatcaacgcactcctccaagcggaagtactctcacgccaaatcgcgtccccagtctccggcataaacggagacatccgcgccaagaaaatagcctcaatcgctgacgtctgcgaatctatgaaagaacagctcctcgtcctagtcgaatgggccaaatacatccccgccttctgcgaactcccactagacgaccaagtggcactcctccgcgcccacgccggcgaacacctactactcggagccaccaaacgctccatggtgttcaaagacgtactactcctcggaaatgactacatcgtcccccgacactgccccgaactcgccgaaatgtccagggtctccatccgcatcctcgacgaactggtcctcccattccaagaactccaaatcgacgacaacgaatacgcctacctaaaagccatcatcttcttcgaccccgacgccaaaggcctatccgacccgggcaaaatcaaacgactccgctcccaagtccaagtctcactcgaagactacatcaacgatagacagtacgactcacgcggtagattcggagaactcctactcctactccccacactccaatccataacctggcaaatgatagaacaaatacaattcatcaaactcttcggcatggccaaaatcgacaacctactccaggaaatgctcttatga

SEQ ID NO: 993 - RNA, 1128 nt, synthetic construct
  misc_feature 1..1128: note = CDS (opt11) from Homo sapiens__NP_000448.3__HNF4A(1-375)(S167E)
  source 1..1128: mol_type = other RNA
atgcgcctctccaaaaccctcgtcgacatggacatggcagactactctgcagctctcgaccccgcctataccacgctcgaattcgaaaacgtacaagtcctcaccatgggaaacgacacctccccctctgaaggcaccaacctcaacgcacccaacagccttggcgtcagcgccttatgcgccatttgcggagaccgcgccaccggcaaacactacggagcatcctcatgcgacggctgcaaaggcttcttccgccgatcagtccgaaaaaaccacatgtactcctgccgcttctctcgccagtgcgtagtcgataaagataaaagaaatcaatgccgctactgccgcctcaaaaaatgcttccgcgccggcatgaaaaaagaagcagttcaaaacgaacgcgaccgaatctccacccgccgctcatcctacgaagactcttccctcccctctataaacgccctcctccaagccgaagtactctcacgccaaatcaccgaacctgtctccggcattaacggagacatacgcgccaagaaaatagccagcatcgccgacgtctgcgaatcaatgaaagaacaactcctcgtcctagtcgaatgggccaaatacatccccgcattctgcgaacttcccctcgacgaccaagtcgccctcctccgtgcccatgcaggcgaacacctcctcctcggcgccaccaaacgctccatggtctttaaagacgtcctcctcctgggcaacgactacatcgtcccccgacactgcccagaactcgccgagatgagccgcgtgtccatacgcatactcgacgaactcgtcctccccttccaagaactccagatagacgataacgaatacgcatacctaaaagccataatattcttcgaccccgacgctaaaggtctctcagacccaggaaaaatcaaacgtctcagaagccaagtccaagtctcactcgaagactacatcaacgaccgccaatacgactctcgcggccgcttcggcgaactcctcttattactcccaacactccaatcaatcacctggcaaatgatcgaacaaatacaatttatcaaactcttcggcatggctaaaatcgacaatctcctccaagaaatgctcctctga

SEQ ID NO: 994 - RNA, 1128 nt, synthetic construct
  misc_feature 1..1128: note = CDS (opt11) from Homo sapiens__NP_000448.3__HNF4A(1-375)(S167A)
  source 1..1128: mol_type = other RNA
atgcggctctcaaaaaccctagtcgacatggacatggccgactactcagctgccctagaccccgcatacaccacactagaattcgaaaatgtccaagtactaaccatgggcaacgacacctcaccctccgaaggtaccaacctcaacgcgcccaactccctcggcgtctcagccctctgcgccatctgcggcgaccgcgcgaccggcaaacactacggtgcctcctcatgcgacggatgcaaaggcttcttccgacgctcagtccgcaaaaaccacatgtactcctgccgcttctcacgacaatgcgtcgttgacaaagacaaacgcaaccaatgccgctactgccgcctcaaaaaatgcttccgcgcaggaatgaaaaaagaagcagttcaaaacgaacgcgaccgcatctcaacccgcagatcatcatacgaagactcatccctaccatcaataaacgccctcctacaagccgaagtcctctccagacaaatcaccgcccccgtctcaggcataaacggcgacatccgtgcaaaaaaaatcgcctccatcgctgacgtctgcgaatccatgaaagaacaactccttgtcctcgtcgaatgggccaaatacattcctgccttctgcgaactccccctcgacgaccaagtcgcactactcagagcccacgcaggcgaacacctcctcctcggagcaacaaaacgctccatggtcttcaaagacgtcctcctactcggaaatgactacatcgtccccagacactgccccgaactcgctgaaatgtcaagagtctccatacgaatactagacgaactagtcctacccttccaagaactgcaaatagacgacaacgaatacgcctacctcaaagccatcatattcttcgaccccgacgccaagggactctcagaccccggcaaaatcaaacgcctacgctcccaagtgcaagtcagcctcgaagactacataaacgatcgccagtacgactcacgaggacgattcggagaactcctcctcctcctcccaacactccagtccatcacctggcaaatgatcgaacaaatccaatttatcaaactcttcggcatggccaaaatcgacaacctactacaagaaatgctcctctga

SEQ ID NO: 995 - RNA, 1128 nt, synthetic construct
  misc_feature 1..1128: note = CDS (opt11) from Homo sapiens__NP_000448.3__HNF4A(1-375)(S167A_S378A_T429A_T432A_ S436A)
  source 1..1128: mol_type = other RNA
atgcgcctctccaaaaccctcgttgacatggatatggcggactactccgccgcactcgacccagcctacaccaccctagaatttgaaaacgtccaagtactaaccatgggcaacgacacaagcccctccgaaggcacaaatctcaacgcccccaactcactaggcgtctcagccctatgtgctatctgcggcgaccgcgccaccggcaaacactacggcgcatcatcatgtgacggatgcaaaggattcttccgacgctccgtccgaaagaaccacatgtactcctgccgattcagcagacaatgtgttgtcgacaaagacaaacgcaaccaatgtcgctactgccgcctcaaaaaatgctttagagccggaatgaaaaaagaagccgtccaaaacgaacgcgaccgcatctccacacgccgaagctcatacgaagactcatctctcccctccatcaacgcactcctccaagccgaagtcctatctcgccaaatcaccgcacccgtctccggcatcaacggcgacatacgcgccaaaaaaatagcctccatagcagacgtatgcgaatccatgaaagagcaactcctcgtgctagtcgaatgggccaaatacatccccgccttctgcgagctcccactagacgaccaagtcgccctcctccgcgcccacgccggcgaacacctgctcctaggcgccaccaaaagaagcatggtattcaaagacgtcctactcctcggcaacgactatatagtccctcgccactgtccagaactcgcagaaatgtccagagtcagcatccgaatcctcgacgaactcgtcctacccttccaagaactacaaatcgacgacaacgaatacgcctaccttaaagccatcatcttcttcgaccccgacgccaaaggcctatccgaccccggcaaaatcaaacgcttacgatcccaagtccaggtcagcctcgaagactacataaacgaccgccaatacgactcacgcggccgcttcggcgaactactcctcctcctcccaaccctccaaagcatcacctggcaaatgatagaacaaatacaattcatcaaacttttcggcatggccaaaatcgacaaccttttacaagaaatgctactctga

SEQ ID NO: 996 - RNA, 1128 nt, synthetic construct
  misc_feature 1..1128: note = CDS (opt11) from Homo sapiens__NP_000448.3__HNF4A(1-375)(S167E_S378E_T429E_T432E_ S436E)
  source 1..1128: mol_type = other RNA
atgcgactatctaaaactctcgtagacatggacatggccgactactcggccgccctcgaccccgcatacaccacgctcgagttcgaaaacgttcaagtcctcacaatgggcaacgacacctccccctcagaaggcaccaacctcaacgctccaaactccctaggggtctccgcactctgcgcaatctgcggcgaccgtgccaccggcaaacattacggcgcctcatcctgcgacggctgcaaaggattcttccggcgatccgtccgaaagaaccacatgtacagctgcagattcagccgacaatgcgtcgtggacaaagataaacgcaaccaatgccgctactgccgactcaagaaatgcttccgcgcaggcatgaagaaagaagcagtacaaaacgaacgcgaccgcatctcaacaagacgtagctcctacgaagactcaagcctcccatccatcaacgccctcctccaagccgaagtactctcacgtcaaatcaccgaacccgtgtcaggaatcaacggcgacatccgcgccaagaaaatcgcctccatcgcagacgtctgcgaatccatgaaagaacaactcctcgtcctggtcgaatgggctaaatacatccccgcattctgcgaactccccctagatgaccaagtcgccctactgcgcgcccacgcaggcgaacatctattactcggcgccaccaaacgcagcatggtattcaaagacgtcctcctcctcggcaacgactacatagtcccacgccactgcccagaactggccgaaatgagccgagtctctatccgcatactcgacgagctagtcctccccttccaagaactccaaattgacgacaacgaatacgcctacctcaaagccatcatattcttcgaccccgacgcgaaaggcctatccgaccccggtaaaatcaaaagactacgctcacaagtccaagtctcccttgaagactacatcaacgaccgccagtacgacagccgcggccgcttcggcgaactacttctcctcctccccaccctccaatccatcacctggcaaatgatcgaacaaatccaattcataaaactattcggaatggccaaaatcgacaacctcctgcaagaaatgctcctctga

SEQ ID NO: 997 - RNA, 1128 nt, synthetic construct
  misc_feature 1..1128: note = CDS (opt11) from Homo sapiens__NP_000448.3__HNF4A(1-375)(S87A)
  source 1..1128: mol_type = other RNA
atgcgcctaagcaaaacattagtcgacatggacatggccgactactccgccgcactcgacccagcatacaccacattagagttcgaaaacgtccaagtcctcacaatgggcaacgacacctcaccctcagagggcaccaatctcaacgccccaaactcactcggagtaagtgcactatgcgcgatctgcggcgaccgcgccaccggcaaacactacggcgcatcctcctgcgacggctgcaaaggattcttccgacgcgccgtccgcaaaaaccacatgtactcatgccgcttctcacgccagtgcgtcgtagacaaagacaaacgcaatcaatgccgctactgccgactcaagaaatgcttccgcgccggaatgaagaaagaagcagtacaaaacgaacgcgaccgaatctccacccgccgctcctcctacgaagattcctccctcccctccatcaacgccctactccaagccgaagtactctcccgccaaatcacctctccagtttccggcataaacggcgacatacgagcaaagaaaattgcatctatcgccgacgtctgcgaatcgatgaaagagcaactcctagtactcgtagaatgggccaaatacatccccgcattctgcgaactcccacttgacgaccaagtcgcccttctccgagcacacgccggcgaacatctcctgctcggcgctacaaaaagaagcatggtcttcaaagacgtcctcctactcggcaacgactacatcgtcccccgccactgccccgaactagccgaaatgagccgagtctccatcagaatcctcgacgaactcgtactccccttccaagaactccaaatagacgacaacgaatatgcatacctcaaagcaatcatattcttcgaccccgacgccaaaggactttccgaccccggcaaaataaaacgcctccgatcccaagtacaggtctccctcgaagactacatcaacgacagacaatacgacagccgtggacgattcggagagttactcctactacttcccacccttcagtcaatcacctggcaaatgatagaacaaatccaattcatcaaactgttcggaatggctaaaatcgacaacctgctacaagaaatgctcctctga

SEQ ID NO: 998 - RNA, 1128 nt, synthetic construct
  misc_feature 1..1128: note = CDS (opt11) from Homo sapiens__NP_000448.3__HNF4A(1-375)(S87E)
  source 1..1128: mol_type = other RNA
atgcgcctatccaaaaccctagtcgacatggacatggcagactattcagccgcactagatcccgcctatacaacactcgaattcgaaaacgtgcaggtcctcaccatgggcaacgacacctccccctccgaaggaaccaacctaaacgcaccaaattccctcggcgtctccgccctttgcgccatatgtggggaccgcgcaacaggaaaacactacggcgcctcctcctgcgacggatgcaaaggattcttccgacgcgaagtcagaaaaaaccacatgtactcatgtcgattctcccgccagtgcgtcgtcgacaaagacaaaagaaaccaatgcagatactgtcgcctaaaaaaatgcttccgcgccggaatgaaaaaggaagcagtacagaacgaacgcgaccgcatctccaccagacgctcctcctacgaagactcatccctgccctcgatcaacgcacttctccaagccgaggtcctatcaagacaaatcacttctccagtatccggcatcaatggcgacatccgcgccaaaaaaatcgcctcaatcgccgacgtctgcgagtccatgaaagaacaactactagtccttgtagaatgggctaaatatattcccgccttctgcgaacttcccctagacgaccaagtagcactcctccgcgctcacgccggcgagcacctactactcggcgcaaccaaaagatcaatggtcttcaaagacgtcctcctcctgggcaacgactacatcgtcccccgacactgccccgaactcgcggaaatgtcccgcgtcagcatccgcatcctcgacgaactcgtactccccttccaagaactacaaatcgacgacaacgaatacgcctacctcaaagcgataatcttcttcgacccagacgccaaaggtctatccgacccaggaaaaatcaaacgtctccgctctcaagtacaagtctctctcgaagactacataaacgaccgccaatacgactccagaggccggttcggcgaactcctcctcctactccccacactccaaagcatcacctggcaaatgatcgaacaaatccaattcataaaactattcggcatggccaaaatagacaacctgctacaagaaatgctcctctga

SEQ ID NO: 999 - RNA, 1128 nt, synthetic construct
  misc_feature 1..1128: note = CDS (opt11) from Homo sapiens__NP_000448.3__HNF4A(1-375)(R2V)
  source 1..1128: mol_type = other RNA
atggtactctccaagaccctagtcgacatggacatggccgactactccgccgccctagacccagcctacaccactctagagttcgaaaacgtccaagtcctcacaatgggaaacgacacctccccctccgaaggcacaaacctcaacgcccccaactccctcggcgtctccgccctatgcgccatatgcggagaccgagccaccggcaagcactacggcgcttcctcctgcgacggatgcaaaggcttcttccggagaagcgtccggaaaaaccacatgtattcctgccgattctcacgccaatgcgtagtcgacaaagacaaacgcaaccaatgccgctactgccgccttaagaaatgtttcagagccggaatgaagaaagaagccgtccaaaacgaacgcgaccgcataagcacccgccgctcctcatacgaagacagcagcctcccctccatcaacgccctcctccaagcagaagtgctctcccgacaaatcaccagccccgtaagcggaatcaacggcgacatacgcgccaagaaaatcgcctccatcgccgacgtctgcgaatcaatgaaagaacaactactcgtccttgtagaatgggccaaatacatccccgccttctgcgagctcccactcgacgaccaagtcgccctcctccgcgcacacgccggtgaacatctcctactaggagcaaccaaacgatcaatggtattcaaagacgtcctcctcctcggtaacgactacatagtcccaagacactgccccgaactagccgaaatgtcacgcgtctccatccgcatcctagacgaactcgtccttccctttcaagaactacaaatcgacgacaacgaatacgcctacctcaaagccatcatcttcttcgacccagacgcaaaaggactctcagaccccggcaaaatcaaacgcctccgctcccaagtccaagtcagcctcgaagactacatcaacgacagacaatacgactcacgaggccgcttcggagaactactactcttgctccccacactacaatcgataacctggcaaatgatcgaacaaatccaatttatcaaactattcggaatggcaaaaatagacaaccttctgcaagaaatgctcctttga

SEQ ID NO: 1000 - RNA, 1128 nt, synthetic construct
  misc_feature 1..1128: note = CDS (opt11) from Homo sapiens__NP_000448.3__HNF4A(1-375)(R2V_K5V)
  source 1..1128: mol_type = other RNA
atggtcctcagcgtcaccctcgtcgacatggacatggccgactactccgcagccctcgaccccgcctacaccacactagaatttgaaaacgtccaagtcctgaccatgggcaacgacacctccccctcagaaggtaccaacctcaacgcacccaactcgctcggcgtatcagccctttgtgccatctgcggtgatcgcgcaaccggaaaacactacggcgcatcctcatgcgacggctgcaaaggcttcttccgccgatccgtccgtaaaaaccatatgtactcctgtcgattctcccgccaatgtgtcgtagataaagacaaacgcaaccaatgcagatactgccgcctaaaaaaatgcttccgggcaggtatgaagaaagaagcagtccaaaacgaacgcgaccgcatcagcacccgccgctcctcctacgaagactcgtccctcccatccatcaacgccctactccaagccgaagtcttatcccgacaaatcacttcccccgtctccggcataaacggcgacatccgcgcaaaaaaaatcgcctccatagccgacgtctgcgaatcaatgaaagaacaactcctagtccttgtcgaatgggccaaatacatccccgcattctgcgaactcccactcgatgaccaggtagccctcctccgcgcccacgcgggtgaacacctcctcctcggggccaccaaacgctccatggtattcaaagacgtcctcctcctcggaaacgactacatcgtcccacgccattgccccgagctagccgaaatgtctagagtctccatacgcatcctcgacgaactcgtactccccttccaagaactccaaattgatgacaacgaatacgcctacctcaaagcaatcatcttcttcgaccccgacgccaaagggctctccgacccaggaaaaatcaaacgcctcagatcccaagtccaggtatcactcgaagactacatcaacgaccgacaatacgactcccgaggccgtttcggcgaactcctactcctcttaccaaccctacaatccatcacatggcaaatgatcgaacaaattcaattcatcaaactcttcggaatggccaaaatcgacaatctcctacaagaaatgctcctctga

SEQ ID NO: 1001 - RNA, 1128 nt, synthetic construct
  misc_feature 1..1128: note = CDS (opt11) from Homo sapiens__NP_000448.3__HNF4A(1-375)(K179R_K180R)
  source 1..1128: mol_type = other RNA
atgcgcctctccaaaacacttgtcgacatggacatggccgactactccgccgcactcgaccccgcctacaccacccttgaattcgaaaacgtccaagtcctcaccatgggaaacgacacctccccctccgaaggaaccaacctaaacgcccccaactccctaggcgtctccgccctctgcgcaatatgcggagaccgcgcaaccggcaaacattacggcgcttcctcctgtgacggttgcaaaggatttttccgccgatccgtccgtaaaaaccacatgtactcctgccgcttcagccgacaatgcgtggtagataaagacaaacgcaaccaatgccgttactgccgactcaaaaaatgcttccgagccggaatgaaaaaagaagcagtccaaaacgaacgcgaccgcatctctacacgcagatcttcatatgaagatagcagcctccccagcatcaacgccctcctccaagccgaagtcctctcccgacaaatcacctccccagtaagcggcataaatggcgacatccgtgcccggcgcatcgcatcaatcgccgacgtatgcgaatcaatgaaagaacaactactagtcctcgtcgaatgggcaaaatacatacccgcattctgcgaactccccctcgacgaccaagtagccctcctacgcgcccacgccggagaacacctactcctcggggccacgaaacgatccatggtcttcaaagacgtcctactcctcggaaatgactacatagtccccaggcactgccccgaactcgccgaaatgtcccgcgtctcaattcgaatcctagacgaactcgtcctacccttccaagaactccaaatagacgacaacgaatacgcttacctcaaagccattatcttcttcgacccagacgccaaaggactctccgacccgggaaaaataaaacgactacgcagccaagtccaagtctccttagaagactacatcaacgaccgccagtacgactcccgcggccgattcggagagcttctcctactcctccccaccctccaatccatcacatggcaaatgatcgaacaaatccaattcataaaactcttcggcatggccaaaatcgataatctactccaagaaatgctcctctga

SEQ ID NO: 1002 - RNA, 1128 nt, synthetic construct
  misc_feature 1..1128: note = CDS (opt11) from Homo sapiens__NP_000448.3__HNF4A(1-375)(K234R)
  source 1..1128: mol_type = other RNA
atgcgcctatctaaaacacttgtagacatggacatggccgactactcagccgcactcgaccccgcctacaccaccttagagttcgagaacgtccaagtcctcacgatgggcaatgacacctccccatccgaaggcaccaaccttaacgcacccaactccctcggagtatccgccctctgcgccatctgcggcgaccgcgccacaggcaaacactacggagcctcatcctgcgacggctgcaaaggcttcttccgacgctccgtcagaaaaaaccacatgtactcctgccgattctcccgtcaatgcgtagtcgacaaagacaaacgcaaccaatgccgatactgccgcctcaaaaagtgcttccgagccggcatgaaaaaagaagccgtccagaacgagcgcgaccgaatctccacaagaagatcatcatacgaagactcctccctcccctccatcaacgccctactccaagccgaagtcctctccagacaaatcacaagccccgtatccggtatcaacggcgacataagagccaaaaaaatcgcctccatagccgacgtctgcgaatccatgaaagaacaactcctcgtgctcgtagaatgggccaaatacattcccgccttctgcgaactccctctcgacgaccaggtcgctctactcagggctcacgccggcgaacacctcctcctcggcgcaacccgccgctccatggtattcaaagacgtcctactactcggaaacgactacatcgttccccgccactgcccagagctcgctgaaatgtctcgcgtctccatccgcatcctcgacgaactcgtcctcccattccaagaactccaaatcgacgacaacgaatacgcctacctaaaagccataatcttcttcgaccccgacgcaaaaggactctccgacccagggaaaattaaacgactccgctcccaagtacaggtaagcctcgaagactacatcaacgaccgccaatacgattcccgaggccgcttcggcgaacttctcctactactacccaccctacagtccatcacctggcaaatgatcgaacaaatccaattcatcaaacttttcggaatggccaaaatcgacaacctcctccaagaaatgctcctctga

SEQ ID NO: 1003 - RNA, 1128 nt, synthetic construct
  misc_feature 1..1128: note = CDS (opt11) from Homo sapiens__NP_000448.3__HNF4A(1-375)(K300R)
  source 1..1128: mol_type = other RNA
atgcgcctctcaaaaaccctagtagacatggacatggcagactactccgccgccctcgaccccgcatacaccaccctcgagttcgaaaacgtacaagtcctcactatgggaaacgacacctccccctcggaaggcaccaacctcaacgcccccaactcccttggggtcagtgcactatgcgccatctgcggcgatagagccaccggaaagcactacggcgcctcctcatgcgacggctgcaaaggcttcttccgccgatccgtccgcaaaaaccacatgtactcatgcagattcagcagacaatgcgtcgtcgacaaagacaagagaaaccagtgccgatactgccgcctcaagaaatgtttccgcgccggcatgaagaaagaagcagtccaaaacgaacgcgaccgcatctccacccgccgctcatcctacgaagactccagcctaccctccataaatgccctactccaagcagaagtcctctcccgccaaataacctccccagtatccggaatcaacggcgacatccgcgccaagaaaatcgcctcaatagcagacgtctgcgaatccatgaaagaacaactacttgtcttagtagaatgggccaaatacatccccgccttttgcgaactaccccttgacgaccaagtcgccctcctccgcgcacacgccggcgaacacctattactaggcgccactaaacgctccatggtcttcaaagacgtactcctcctcggcaacgactatatcgtcccccgacactgccccgaactcgccgaaatgtcccgcgtctcaatacgaatcctcgacgaactcgtcctccccttccaagaactacagatcgacgacaacgaatacgcctacctcaaagcaatcatcttcttcgaccccgacgcccgcggcctatccgaccctggcaaaatcaaacgcctgcgctcccaagtacaagtgtccctcgaagactacatcaacgaccgacagtacgattcccgaggccgattcggcgaactcctcctcctactcccaacactccaatccatcacctggcaaatgatcgaacaaatccaattcattaaactcttcggcatggcaaaaatcgacaacctcctacaagaaatgctcctctga

SEQ ID NO: 1004 - RNA, 1128 nt, synthetic construct
  misc_feature 1..1128: note = CDS (opt11) from Homo sapiens__NP_000448.3__HNF4A(1-375)(K300R_K307R_K309R)
  source 1..1128: mol_type = other RNA
atgcgcctcagcaaaacactcgttgacatggatatggccgactactccgccgcactagatcccgcctataccacactcgaattcgaaaacgttcaagtactcaccatgggcaacgacacctccccatccgaaggcaccaacctcaacgccccaaactccctcggtgtatccgcactctgcgcaatctgcggcgaccgcgctacaggcaaacactacggcgcatcctcctgcgacggatgcaagggcttcttccgccgctcagtccggaaaaaccacatgtactcttgccgcttctcacgtcagtgcgtggtcgacaaagacaaacgcaaccaatgccgctactgccgactcaaaaaatgcttccgcgccggaatgaaaaaagaagcagtacaaaacgaacgagaccgcatcagcacccgtcgctccagctacgaagactcttcacttccctccatcaacgccctcctccaagccgaagtcctctcacgccaaatcacgtcccccgtctccggcataaacggcgacatccgagcaaaaaaaatcgcctccatcgcagacgtatgcgaatccatgaaagaacagctcctagtcctcgtcgaatgggccaaatacatcccagcattctgcgaacttcccctagacgaccaagtcgcccttctcagagcacacgctggggaacacctcctactaggcgcaacaaaacgctccatggtcttcaaagacgtactactcctcggcaacgactacatagtccctcgccactgccccgaactcgcagaaatgtcccgagtctcaatacgaatactagacgaactagtcctccctttccaagaactacaaatcgacgacaacgaatacgcttacctaaaagccatcattttcttcgacccagacgcccgcgggctctccgaccccggccgcatacgacgccttcgctcccaagtccaagtatcattagaagactacatcaacgaccgccaatacgactcccgcggccgcttcggagaactcctactcctcctacccacactccagtccatcacctggcaaatgatcgaacaaatccaattcattaaactattcggcatggccaaaatcgacaacctactccaagaaatgctcctctga

SEQ ID NO: 1005 - RNA, 1128 nt, synthetic construct
  misc_feature 1..1128: note = CDS (opt11) from Homo sapiens__NP_000448.3__HNF4A(1-375)(K447R_K470R)
  source 1..1128: mol_type = other RNA
atgcgcctctccaaaaccctcgtcgatatggacatggccgactactccgccgcccttgaccccgcctacaccaccctagaattcgaaaacgtacaagtactcacaatgggcaacgacacctccccatccgaaggaacaaacctcaacgctcccaacagcttaggtgtctccgccctctgcgccatctgcggagatcgcgccaccggcaaacactacggcgcctcatcatgcgacggctgcaaaggcttcttccgacgctcagtccgcaaaaaccacatgtactcctgcagattctcaagacaatgtgtcgttgacaaagacaaacgaaaccaatgccgatactgccgccttaaaaaatgcttccgcgcaggaatgaaaaaagaagcagtccagaacgaacgcgaccgcatatccacccgccgttccagctacgaagacagctcactcccttcaatcaacgccctactacaagccgaagtcctctcccgacaaataacctcacccgtatccggcatcaacggagacatacgcgccaaaaaaatagcctcaatcgccgacgtctgcgaatccatgaaagaacaactcctagtcctagtcgaatgggccaaatacatacccgcattctgcgaactccccctagacgaccaggtagccctcctccgagcccacgccggcgagcacctcttacttggcgcaaccaaacgctccatggtattcaaggacgtcctactcctaggcaatgactacatcgtcccccgccactgccccgaactcgctgaaatgtcccgagtctcaatcagaattctagatgaactagtcctacccttccaagaactccaaatagacgacaacgaatacgcatacctcaaagccatcatattcttcgaccccgatgccaaaggtctaagcgaccccggaaaaataaagcgactacggtcgcaagtacaagtctccctggaagactacataaacgaccgccaatacgacagccgcggacgattcggagaactactcctactcctccccactctccaatccataacatggcaaatgatcgaacaaatccaattcatcaaactattcggcatggccaaaatcgacaatcttttacaggaaatgctactttga

SEQ ID NO: 1006 - RNA, 1128 nt, synthetic construct
  misc_feature 1..1128: note = CDS (opt11) from Homo sapiens__NP_000448.3__HNF4A(1-375)(K458R)
  source 1..1128: mol_type = other RNA
atgcgactttccaaaaccctagtcgacatggacatggccgactactctgccgccctcgacccagcttacacaacattagagttcgaaaacgtccaagtcctgaccatgggaaacgacacaagcccatctgaaggaactaacctcaacgcccccaactccctaggagtatccgctctctgcgccatctgcggagaccgcgccaccgggaaacactacggcgcctcctcatgcgacggatgcaaaggcttcttccgccgctcagtccgcaaaaaccacatgtactcctgtcgattctcccgacaatgcgtcgtcgacaaagacaaacgcaaccaatgccgatactgccgcctcaagaaatgcttcagagccggcatgaagaaagaagccgtacaaaacgaacgagaccgcatctccacacgccgtagctcctacgaagactcaagcctcccctcaatcaacgccctacttcaggccgaagtcctctcccgacaaattaccagcccagtctccggcatcaacggcgacatccgagccaagaaaatcgcatcaatagccgatgtctgcgaaagcatgaaagaacaactccttgtcctcgtagaatgggccaaatacatccccgccttctgcgaactacccctcgatgaccaagtagccctactcagagcccacgccggcgaacacctcctcctcggcgccaccaaacgcagcatggtcttcaaagatgtactcctcctcggcaacgactacatcgtcccccgacactgccccgaacttgcagaaatgagcagagtctcaatccgcatcctcgacgaactcgtactaccattccaagaactccagatcgacgacaacgaatacgcctacctgaaagcaattatcttcttcgaccccgacgccaaaggcctctcagaccccggcaaaattaaacgcctcagaagtcaagtccaagtatccctcgaagactatatcaatgaccgccaatacgactcccgcgggcgcttcggcgaactcctcctccttctcccaaccctccaatcaatcacctggcaaatgatcgaacaaatccaattcataaaattattcggaatggccaaaatcgacaacctactccaggaaatgctcctctga

SEQ ID NO: 1007 - RNA, 1128 nt, synthetic construct
  misc_feature 1..1128: note = CDS (opt11) from Homo sapiens__NP_000448.3__HNF4A(1-375)(K106R_K108R_K126R_K127R)
  source 1..1128: mol_type = other RNA
atgcgactgtccaaaaccttagtcgacatggacatggcagactactcagccgccctcgacccagcatatacaacactagagttcgaaaacgtccaggtccttaccatgggcaacgacacctcaccctccgaaggcaccaacctcaacgctcccaactccctaggcgtctcagccctctgcgcgatatgcggagaccgagccaccggtaaacactacggcgcttcgagctgcgacggctgcaaaggcttcttccgtcgctcagtccgcaaaaaccacatgtactcatgccgattctcacgccaatgcgtagtagaccgcgaccgccgcaaccagtgccgatactgccgtcttaagaaatgcttccgcgccggcatgcgcagagaagcagtccaaaacgaacgcgaccgcatctcaacccggcgcagctcttacgaagactcaagccttccctcaatcaacgccctactacaagccgaagtcctaagccgccaaatcacttcacccgtatccggaataaacggcgacatccgagccaagaaaatagcctccatcgccgacgtctgcgaaagcatgaaagaacaactcctcgtcttagtcgaatgggccaaatacatccccgcattctgcgaactcccactggacgaccaagtagccctgctccgagcccacgccggcgaacacctcctcctcggcgccacgaaacgaagcatggtcttcaaagacgtccttctccttggcaacgactacatcgtcccacgccactgcccagagctagccgaaatgtcacgagtctcaatccgcatactcgacgagctagtactcccattccaagaactacaaatagacgacaacgaatacgcctatctcaaagcgatcatattcttcgaccccgacgccaaaggcctctccgacccaggcaaaatcaaacgcctccgctcccaagtccaggtgtcccttgaagactacataaacgatcgccaatacgactcacgaggaagattcggcgaactccttcttcttctccccacactccagtcaatcacatggcaaatgatcgaacagatacaattcatcaaacttttcggcatggccaaaatagacaacctcctacaggaaatgctactatga

SEQ ID NO: 1008 - RNA, 1128 nt, synthetic construct
  misc_feature 1..1128: note = CDS (opt11) from Homo sapiens__NP_000448.3__HNF4A(1-375)(E285Q)
  source 1..1128: mol_type = other RNA
atgcgactctccaaaacacttgtcgacatggacatggccgactactccgccgccctcgatcccgcatacaccaccctcgagttcgaaaacgtccaagtcctcaccatgggaaatgacacctcgccatccgaaggcacgaacctaaatgcccccaactcccttggcgtctccgcactctgcgccatctgcggcgaccgcgcaaccgggaaacactacggcgcctcatcctgcgacggctgcaaaggattcttccgtcgatctgtacgcaaaaaccacatgtactcttgccgattcagccgacaatgcgtcgttgacaaagacaaacgcaaccaatgccgctactgccgactcaaaaagtgcttccgcgcaggtatgaaaaaggaagcagtacaaaacgaacgagaccgcatttccacccgacgatcatcctatgaagactcctccctcccctcaatcaacgccctacttcaagccgaagtcctctcccgacaaataacctcccccgtcagcggcatcaacggcgacatcagagccaagaaaatcgcaagcatcgcagacgtatgcgagtcaatgaaagaacaactcctcgtcctagtcgaatgggcaaaatacatccccgccttctgcgaactcccactagacgaccaagtagccctcctccgcgcccacgccggagaacacctcctcctaggcgccactaaacgctccatggtcttcaaagacgtcctcctcctaggcaatgattacatcgttccccgacattgccccgaactagccgaaatgtcccgagtatccatccgcatcctcgacgaactcgtcctaccattccaagaactacaaatcgacgacaaccaatatgcatacctaaaagcaatcatcttcttcgaccccgacgccaaaggccttagcgacccaggcaaaatcaagcgactacgcagccaagtacaagtatccctagaagattacatcaacgatcgccaatacgactcccgcggccggttcggcgaactcctcctcctcctccccactctacaatccataacctggcaaatgatagaacaaatccaattcatcaagttattcggcatggccaaaatagacaacctcctccaagaaatgctactctga

SEQ ID NO: 1009 - RNA, 1128 nt, synthetic construct
  misc_feature 1..1128: note = CDS (opt11) from Homo sapiens__NP_000448.3__HNF4A(1-375)(T166E)
  source 1..1128: mol_type = other RNA
atgcgcctatccaaaaccctcgtcgacatggacatggccgactactcagccgcactcgaccccgcatataccactctcgagttcgaaaacgtacaagtcctcaccatggggaacgacactagcccctccgaaggcaccaacctcaacgcaccaaactccttaggggtttcagccctatgcgccatatgcggcgatagagcaacaggaaaacactacggcgcctcatcatgcgatggctgcaaaggcttcttccgccgatccgtccgaaagaaccacatgtactcatgccgcttctcacgacaatgcgtcgtcgacaaagacaagcgaaaccaatgccgctactgccgcctaaagaaatgcttccgcgccggcatgaagaaagaagcagtacaaaacgaacgcgatcgcatctccacccgcagatcgtcctacgaagacagcagcctccccagcatcaacgccctcctccaagctgaagtcctctcccgccaaatcgaatcacccgtctcaggcatcaacggtgatatccgcgcaaagaaaatagcctccatcgccgacgtctgcgaatccatgaaagaacaactcctagtcctagtagaatgggccaaatacatcccagcattctgcgagctccccctggacgatcaagtcgctctcctccgcgcccacgccggcgaacacctcctactcggagcaaccaaacgcagtatggtattcaaagacgtcctactactcggtaacgactacatagtaccccgccactgcccagaactcgccgaaatgtcccgtgtctccatacgcatcctagacgaactcgtcctccccttccaagaactacaaatcgacgacaacgaatacgcctacctaaaagccatcatcttcttcgaccccgacgctaaaggcctctccgatccaggcaaaatcaaacgcctacgaagccaagtccaagtttccctcgaagactacatcaacgacagacaatacgactcccgcggccgcttcggcgaactactcctcctacttccaacactccaaagcataacgtggcaaatgatagaacaaatccaattcatcaaactcttcggcatggctaaaatagacaacctcctccaggaaatgctcctttga

SEQ ID NO: 1010 - RNA, 1128 nt, synthetic construct
  misc_feature 1..1128: note = CDS (opt11) from Homo sapiens__NP_000448.3__HNF4A(1-375)(S148A)
  source 1..1128: mol_type = other RNA
atgcgactatctaaaacactcgtcgacatggacatggccgactactccgcggccctggaccccgcctacaccacgctagaattcgaaaacgtccaagtattaacaatgggaaacgacacctctccctccgaaggcaccaacctcaacgcacccaactccctcggagtctccgccctctgcgccatctgtggcgaccgagcaaccgggaaacattacggcgcatcctcctgcgacggctgcaaaggcttcttccgccgatccgtcagaaaaaaccacatgtactcgtgccgattctcacgccaatgcgtagttgacaaagacaaacgcaaccaatgccgctactgccgccttaaaaaatgcttccgcgccggaatgaaaaaagaggccgtacaaaatgaacgcgaccgaatcagcacacgccgctcttcatacgaagactccgcactcccatccatcaacgccctactacaagccgaagtcctcagccggcaaatcacatccccagtgtccggtattaacggagacatacgcgccaagaaaatagcctccatagcagacgtctgcgagtcaatgaaagaacaactcctcgtactcgtagaatgggcaaaatacatccccgccttctgcgaacttcccctcgacgaccaagtcgcactcctccgcgcccacgccggcgaacatctcctactaggagccaccaaacgttcaatggtcttcaaagacgtcctgctactcggcaacgactatatcgtccccagacactgccccgaactagcagaaatgtccagagtctcaatacgaatcctagacgaactcgtcctcccattccaagaactacaaatcgacgacaacgaatacgcctacctcaaagccatcatcttctttgaccccgacgccaaagggctctccgaccccggaaaaatcaaacgcctgcgctcacaagtccaagtatccctcgaagactacatcaacgaccgccagtacgacagccgaggacgtttcggcgaactcctactcctcctcccaacactccagtccatcacctggcaaatgatcgaacaaatccaattcataaaactcttcggcatggccaaaatcgacaacctactccaagaaatgctcctctga

SEQ ID NO: 1011 - RNA, 1128 nt, synthetic construct
  misc_feature 1..1128: note = CDS (opt11) from Homo sapiens__NP_000448.3__HNF4A(1-375)(S148E)
  source 1..1128: mol_type = other RNA
atgcgcctctccaaaaccctcgtcgacatggacatggccgactactcagcagccctagacccagcctacacaacactcgagttcgaaaacgtacaagtactaaccatgggcaacgacacctcaccctctgaaggaaccaacctcaacgcacccaactccctcggcgtatccgccctgtgcgccatctgcggtgatcgcgccaccggcaaacactacggggcctcaagctgcgacggctgcaaaggcttcttccgccgctctgtcaggaaaaaccacatgtacagctgccgattctcccgccaatgcgtagtcgataaagacaaacggaaccaatgccgatactgtcgcctcaagaaatgcttccgagcaggcatgaaaaaggaagcagtccaaaacgaacgggaccgaatctccactcgccgctcatcctacgaagacagcgaactaccctccattaatgccctcctccaagcagaagtactttcacgacaaataacctcccccgtctcaggcatcaacggcgacatcagagccaagaaaatcgcctccatcgccgacgtatgcgaatccatgaaagaacaactcctggtgctagtcgaatgggcaaaatatatccccgctttctgcgaactccccctagacgaccaagtcgcactcctccgagcccacgccggagagcacctcttactaggcgccaccaaacgaagcatggtcttcaaagacgtcctcctcctcggaaatgactacatcgtccccagacactgccccgaactcgccgaaatgtcacgagtctccatcagaatcctcgacgaactggtcctaccatttcaagaactacaaatcgatgacaacgaatacgcatacctcaaagcgatcatcttcttcgaccccgacgccaaagggctctccgacccaggcaaaatcaaacgcctcagaagccaggtccaagtctccctagaagactacataaacgaccgccagtatgactcccgcggcagattcggcgaactcctccttctacttccgaccctccaatccatcacctggcaaatgatcgaacaaatccaattcatcaaactcttcggcatggccaaaattgacaacctcctacaagaaatgctcctatga

SEQ ID NO: 1012 - RNA, 1128 nt, synthetic construct
  misc_feature 1..1128: note = CDS (opt11) from Homo sapiens__NP_000448.3__HNF4A(1-375)(S183A)
  source 1..1128: mol_type = other RNA
atgcgactcagcaaaacactagttgacatggacatggccgactacagcgcagccctggatccagcctacaccaccctcgaattcgaaaacgtacaagtcctcaccatgggtaacgacacctccccctcggagggaacaaacctcaacgcccccaactcactcggcgtcagcgcactctgcgccatatgcggcgaccgcgccaccggaaaacactacggagcctcaagctgcgacggctgcaaaggattcttcagacgcagcgtccggaaaaaccacatgtactcctgccgcttctcccgacaatgcgtcgtcgacaaagacaaacgaaaccaatgccgatactgccgcctaaaaaaatgcttccgcgctggaatgaaaaaagaagcagtacaaaacgaacgcgaccgcatatccaccagaagatcctcctacgaagactccagcctaccctcaatcaacgctctcctccaagcagaagtcctcagccgccaaatcacctcacccgtcagcggcatcaacggggacatccgcgccaaaaaaatcgccgcgattgccgacgtgtgcgaatccatgaaagagcaactcctcgtcctcgtagaatgggccaaatacatccccgccttctgcgaactacccctagacgaccaagtagcccttctacgcgcccacgccggggaacacctcctactcggcgcaaccaaaaggtcaatggtcttcaaagacgtcctcctactcggaaacgactacatcgtgcccaggcactgtccggaactcgccgaaatgtccagagtctcaatccggatactagacgaactcgtactccccttccaagaactacaaatcgacgacaacgaatacgcatacctaaaagccatcatcttcttcgacccagacgctaaaggactaagcgacccaggcaagatcaaacgactacgttcccaagtacaagtatccctggaagactacatcaacgaccgccaatacgactcacgaggtcgcttcggcgaactgctcctactcctacccaccctccaatccatcacatggcaaatgatcgaacaaatccaattcatcaaactcttcggtatggctaaaatcgacaacctactccaagaaatgcttctctga

SEQ ID NO: 1013 - RNA, 1128 nt, synthetic construct
  misc_feature 1..1128: note = CDS (opt11) from Homo sapiens__NP_000448.3__HNF4A(1-375)(S183E)
  source 1..1128: mol_type = other RNA
atgcgcctctccaaaaccctcgtcgacatggacatggccgactactccgccgccctcgacccagcctacacaacactagagttcgaaaacgtccaagtcctaaccatgggaaacgatacctccccctcggaagggaccaacctcaacgccccaaattcacttggagtctccgccctatgcgccatatgtggagaccgcgctaccggaaaacactatggcgcgtcatcctgcgacggatgcaaaggcttcttcagacgctcggtccgcaaaaaccacatgtactcctgccgattctcccgccaatgcgtcgtcgacaaagacaaaagaaaccaatgcaggtactgccgtctgaagaaatgcttccgcgccggaatgaagaaagaagccgtccaaaacgaacgcgaccgaatcagcaccagacgcagctcctacgaagactcctcactcccatcaatcaacgccctactccaagccgaagtcctctcccgccaaatcacctccccagtaagcggaatcaacggcgacatccgcgccaagaaaatagccgaaatagccgacgtctgcgaatcaatgaaagaacagctactcgtcctcgtcgaatgggccaaatacatacccgccttctgcgaactccctctcgacgaccaagtcgcactactcagagcccacgccggagaacacctactcctcggagccacgaaacgatccatggtattcaaagacgtactcctccttggtaacgattacatcgtcccaagacactgcccagaactcgccgaaatgtccagagtatcaatccgaatcctcgacgagctagtactcccctttcaggaactacaaatagatgacaacgaatacgcatacctaaaagccatcatcttctttgaccccgacgccaaaggcctctccgacccaggcaaaatcaaacgcctacgctcccaagttcaagtatccctcgaagactacatcaatgaccgccaatacgacagccgaggacgcttcggcgaactactcctgctactccccaccctacaatccatcacttggcaaatgatcgaacaaatccaattcatcaaactcttcggcatggccaaaatcgacaaccttctccaggaaatgctcctctga

SEQ ID NO: 1014 - RNA, 1128 nt, synthetic construct
  misc_feature 1..1128: note = CDS (opt11) from Homo sapiens__NP_000448.3__HNF4A(1-375)(S461A)
  source 1..1128: mol_type = other RNA
atgcgactctccaaaaccctcgtcgacatggacatggcagattactccgctgccctcgacccggcctacaccacactagagttcgaaaacgttcaagtattaaccatgggcaacgacacatcccccagcgaaggcaccaatctaaacgcacccaactccctcggggtctcagcactatgcgccatctgcggagatcgcgctactggcaaacactacggagcctcctcctgcgacggctgcaaaggcttcttccgaagatcagtccgcaaaaaccacatgtactcatgccgcttctctcgccaatgcgtcgtcgacaaagacaaacgaaaccagtgccgctactgccgcctaaagaaatgctttcgcgccggcatgaagaaagaagcagtacaaaacgaacgcgaccgcatctccacccgccggtcaagctacgaggactcatcactcccatcaatcaacgctctcctccaagcagaagtccttagccgacaaatcacatcccccgtttccggaatcaacggcgacatccgagcaaagaaaatcgcctctatcgcagacgtatgcgaatccatgaaagaacaactcctagtcctagtcgaatgggcaaaatatatacccgccttctgcgaactgcccctagacgatcaagtcgcactactccgagcccacgccggcgagcacctcctgctcggcgccacaaaacgatccatggtattcaaagacgtactactcctcgggaacgactacatcgtaccccgccactgccccgagctcgccgaaatgtcacgtgtctcaattcgcatactagacgagctagtcctccccttccaagaactacaaatagacgacaacgaatacgcatacctaaaagccatcatcttcttcgaccccgatgccaaaggactatccgaccccggcaaaatcaaacgccttcgttcacaagtgcaagtctcgctcgaagactacatcaacgaccgccaatacgactccagaggccgattcggagaactcctactcctcctccccaccctccaatccatcacatggcaaatgatagaacaaatccaattcataaaactcttcggcatggccaaaatcgacaacctgctccaagaaatgctcctctga

SEQ ID NO: 1015 - RNA, 1128 nt, synthetic construct
  misc_feature 1..1128: note = CDS (opt11) from Homo sapiens__NP_000448.3__HNF4A(1-375)(S461E)
  source 1..1128: mol_type = other RNA
atgcgactgtccaaaaccctagtcgacatggacatggcagactacagcgcagcactcgatcccgcctacaccaccctagagttcgaaaacgtacaagtactaacaatgggaaacgacacctctccatccgaaggcacaaacctcaacgcacccaactccctcggcgtctccgcactttgcgcaatctgcggcgaccgagccaccggcaaacattacggagcctccagctgcgacggctgcaagggattcttccgccgcagcgtccgcaaaaaccacatgtactcgtgccgcttctcacgacagtgcgtagtcgacaaagacaaacgcaaccaatgcagatactgcagacttaaaaagtgcttccgcgcgggaatgaagaaagaagccgtccaaaacgaacgagatcgcatctccacccgccggagctcatacgaagactcatcactaccatcaataaacgccctcctacaagccgaagtcctatcccgccaaataacctcccccgtctctggcatcaacggagacatccgcgccaagaaaatcgcaagcatcgccgacgtctgcgaatcaatgaaagagcaactactcgtcctagtagaatgggcaaaatacataccagccttctgcgaactccccctagacgaccaagtcgcgctactccgagcccacgcaggagaacaccttctcctaggcgcaaccaaacgctccatggtatttaaagacgtcctactcctgggcaacgactacatagtcccccgccattgcccagaactcgccgaaatgtcacgcgtatcgatacgcatcctcgacgagctagtcctccccttccaagaactacaaatagacgacaacgaatacgcctacttgaaagccataatcttcttcgacccagacgccaaaggcctctccgacccaggcaaaataaaacgcctacgcagccaggtacaggtcagcctcgaagactatatcaacgaccgtcaatacgactcccgaggccgattcggagaactcctcctactcctaccaaccctccaatcaatcacctggcaaatgatcgaacaaatacaattcatcaaactgttcggcatggcaaaaatagacaacctacttcaagaaatgctcttatga

SEQ ID NO: 1016 - RNA, 1128 nt, synthetic construct
  misc_feature 1..1128: note = CDS (opt11) from Homo sapiens__NP_000448.3__HNF4A(1-375)(S142A_S143A_S313A)
  source 1..1128: mol_type = other RNA
atgcgcctctccaaaacccttgtcgacatggacatggcagactactccgccgcacttgacccggcttacacaaccctagaattcgaaaacgtccaagtactcaccatgggaaatgacacctcaccctctgaagggaccaacctaaacgcaccaaactcactcggagtcagcgccctatgcgccatctgcggcgaccgcgcaaccggaaaacactacggcgcctcctcttgcgacggctgcaaaggcttcttccgaagatccgtcagaaaaaaccatatgtacagctgccgcttctcacgacaatgcgtcgtcgacaaagacaaaagaaaccaatgcagatattgccgactcaaaaaatgctttcgagccggcatgaaaaaggaagcagtccaaaacgaacgcgaccgcatttccacccgcagagccgcctacgaagacagctccctccccagcatcaacgcactactccaagctgaagtattatcccgccaaatcacctccccagtctccggcatcaacggcgacatacgggccaaaaaaatcgcctcaatcgccgacgtctgcgaatccatgaaagaacaactcctagtcctagtcgaatgggccaaatacatacccgcattctgcgaactacctttagacgaccaagtcgccctcttacgagcccacgccggcgaacatctactgcttggcgccaccaaacgatccatggttttcaaagacgtactactcctcggaaacgactacatcgtcccacgtcactgcccagaactagccgaaatgtcccgcgtctcaatccgcatcctcgacgaactcgtactcccctttcaagaactacaaatcgacgacaacgagtacgcctacctcaaagccatcatcttcttcgaccccgacgcaaaaggcctctccgaccccggcaaaattaaacgacttagagcacaagtacaagtcagcctagaagactacataaatgaccgccaatacgacagcagaggccgcttcggcgagctcctactcctcctccccaccctacaatcaattacctggcagatgatcgaacaaatacaattcataaaacttttcggaatggccaaaatcgacaacctactccaagaaatgctcctctga

SEQ ID NO: 1017 - RNA, 1128 nt, synthetic construct
  misc_feature 1..1128: note = CDS (opt11) from Homo sapiens__NP_000448.3__HNF4A(1-375)(S142A_S143A_S313A_K458R)
  source 1..1128: mol_type = other RNA
atgcgcctcagcaaaacactagtagacatggacatggcagactactccgccgccctagacccagcctacacaaccctcgaattcgaaaacgtccaagtcctaacgatgggcaacgacacatccccctccgagggcaccaacctcaacgcccccaactctctcggcgtctctgccctctgcgccatctgcggcgaccgcgccaccggaaaacactacggagccagctcatgcgacggctgcaaaggattctttcgacgctccgttagaaaaaaccacatgtactcatgccgtttctctcgccaatgcgtcgtcgacaaagacaaacgtaaccagtgccgctactgccgcctaaaaaaatgcttccgcgcaggcatgaaaaaagaagccgtccaaaacgagagagaccgcatatccacccgccgagccgcctacgaagactcttcactaccgtccataaacgccctcctacaagccgaagtcctatcacgacaaataacctcccccgtcagcggcatcaacggcgacatcagagccaagaaaatagcctctatagcagacgtatgcgaatcaatgaaagaacaactcctagtactagtcgaatgggccaaatacattcccgccttctgcgaactgccactcgacgaccaagtggccctactccgtgcccacgccggcgaacatttactcctcggcgccaccaaacgatcaatggtattcaaagacgtactactcctcggcaacgactacatagtcccccgccactgccccgaactcgccgaaatgtcacgtgtctctatccggatcctagacgaactcgtcctccccttccaagaactccaaatcgacgacaacgaatacgcctacctaaaagccatcatattcttcgatcccgacgccaagggtctctccgacccaggaaaaatcaaacgcctacgcgcacaagtacaagtatccctcgaagactacatcaacgaccgacaatacgacagccgcggccgattcggcgaactactccttctcctccccacactacaatcaataacctggcaaatgatcgaacaaatccagttcataaaactctttggcatggccaaaatagacaacctcctccaggaaatgctcctctga

SEQ ID NO: 1018 - RNA, 1128 nt, synthetic construct
  misc_feature 1..1128: note = CDS (opt11) from Homo sapiens__NP_000448.3__HNF4A(1-375)(S142A_S143A_S167A_S313A_ S378A_T429A_T432A_S436A_K458R)
  source 1..1128: mol_type = other RNA
atgcgcctaagcaaaaccctagtcgacatggacatggcagactactccgccgccctcgaccccgcctacaccaccctagaattcgaaaacgttcaggtcctcaccatggggaacgacacatcgccaagcgaaggaaccaaccttaacgccccaaactccctgggcgtctccgccctttgcgccatctgcggagaccgcgccacaggcaaacactatggcgcctccagctgcgacggctgcaaaggcttcttccgacgctcagtacggaaaaaccacatgtactcatgccgcttctcacgccaatgcgtcgtcgacaaagacaaacgcaaccaatgccgctactgccgactcaaaaaatgcttccgcgcaggcatgaaaaaggaagccgtccaaaacgaacgcgaccgtatctcaacccgacgtgctgcatacgaagactcatccctcccctccatcaacgccctactccaggccgaagtcctgagtcgacaaatcacagcccccgtctcaggcatcaacggcgacatccgagcaaagaaaatcgcctctatagccgacgtctgcgaatcaatgaaagaacaactcctcgtcctcgtagaatgggccaaatacatccccgcattctgcgaactacccctcgacgaccaagtcgccctactaagagcccacgccggcgaacaccttctgcttggcgccacaaaacgcagcatggtattcaaagacgtactactcctcggcaacgactacatcgtaccccgacactgccccgaactcgccgaaatgtcccgcgtctccatacgcatcctagacgaactggtcctccccttccaggaactccaaatcgacgacaacgaatacgcctacctcaaagccatcatattcttcgacccagacgcaaaaggcctcagcgaccccggcaaaatcaaaagactccgcgcccaagtacaagtcagcctagaagattacataaacgaccgccaatacgatagcagaggccgattcggcgaactcctcctactcctacccacactacaatcaatcacctggcaaatgatagaacaaatccaattcatcaagctattcggcatggcaaaaattgacaacctactacaagaaatgctcctctga

SEQ ID NO: 1019 - RNA, 1128 nt, synthetic construct
  misc_feature 1..1128: note = CDS (opt11) from Homo sapiens__NP_000448.3__HNF4A(1-375)(S142A_S143A_S148A_S167A_ S313A_S378A_T429A_T432A_S436A_K458R)
  source 1..1128: mol_type = other RNA
atgcgcctttccaaaaccctagtcgacatggacatggccgactactcagccgcactagaccccgcctatactaccctagagttcgaaaacgtccaagtcctcaccatgggcaatgacacctccccatccgaaggcaccaacctcaacgcccccaactcactaggagtctccgccctttgcgccatctgcggcgaccgcgccacaggaaaacactacggcgcgtcaagctgcgatggatgcaaaggtttcttccgtcgttccgtccgcaaaaaccacatgtattcctgccgattctcgcgccaatgcgtcgtcgacaaagacaaacgaaaccaatgccgatactgccgcctcaaaaagtgcttccgcgccggcatgaagaaagaagccgtccaaaacgaacgcgacagaatatcaacccgacgagccgcctacgaagactcagccctcccctcaataaatgccctcctccaagcagaggtcctttccagacagatcaccgcccccgtctccggcatcaacggcgacatcagagccaagaaaatcgcctccatcgccgacgtctgcgaatccatgaaagaacaacttctagttctcgtcgaatgggccaaatacatccccgccttctgcgaactaccccttgacgaccaagtcgctctcctgcgcgcccacgccggcgaacacctccttctcggagcaactaaacgctccatggtgttcaaagacgtcctcctcctcggcaacgactacatcgtcccccgacactgccccgaactagctgaaatgtcacgcgtcagcatcagaatcctcgacgaactcgtcctccccttccaagaactccaaatcgatgacaacgagtacgcctatcttaaagccatcatattcttcgacccagacgcaaaaggtctctccgaccccggcaaaataaaacgactccgcgcccaagtccaagtttccctcgaagactacatcaacgaccgacaatacgattcccgcggccgattcggcgaactcctcctactccttcccaccctccagtccataacatggcaaatgatcgaacaaatccaattcataaaactcttcggcatggccaaaatagacaacctcctccaagagatgctactctga

SEQ ID NO: 1020 - RNA, 1128 nt, synthetic construct
  misc_feature 1..1128: note = CDS (opt11) from Homo sapiens__NP_000448.3__HNF4A(1-375)(K106R_K108R_K126R_K127R_ S142A_S143A_S148A_S167A_S313A_S378A_T429A_T432A_S436A_K458R )
  source 1..1128: mol_type = other RNA
atgcgcctctccaagaccctcgtcgacatggacatggcagactacagcgcagccctagaccccgcctacaccacccttgagttcgaaaacgtccaagtcctaacaatgggaaacgacacctcaccatccgaaggcacaaacctaaacgcccccaactcacttggcgtttcggccctctgcgccatatgcggagaccgcgccaccggcaaacactacggagcatcctcctgcgacggctgtaaaggcttcttcagacgatccgtacgcaaaaaccacatgtactcctgccgcttcagcagacaatgcgtcgtcgaccgcgaccgccgcaaccaatgccgctactgccgcctaaagaaatgcttccgcgcaggcatgcgccgagaagcagtccaaaacgaacgagaccgaataagcacccgcagagccgcgtacgaagactccgccctcccatcaatcaacgcacttctacaagccgaagtactctcccgccaaataaccgccccagtatccggaatcaacggcgacatccgcgccaagaaaatcgcttccatagcagacgtctgtgaatccatgaaagagcaactcctcgtcctcgtcgagtgggccaaatacatccccgccttctgcgagctacccctcgacgaccaagtcgccctcctccgagcccacgctggcgaacacctcctactcggcgccaccaaaagatccatggttttcaaagacgtactccttctgggaaacgactacatcgtacccaggcactgccccgagctagccgaaatgtccagagtctcaatccgcatactcgacgagctcgtccttccctttcaagaacttcaaatagacgacaacgaatacgcatacctgaaagccatcatcttcttcgaccccgacgccaaaggactatccgacccaggcaaaatcaaacgcctacgagcacaagtacaagtctccctagaagactacataaacgaccgccaatacgactcgagaggccgcttcggcgaactactccttctcctccctaccctacaaagcatcacctggcaaatgatcgaacaaatccaattcataaaactcttcggaatggccaaaatcgacaatttactccaggaaatgttactctga

SEQ ID NO: 1021 - RNA, 1128 nt, synthetic construct
  misc_feature 1..1128: note = CDS (opt11) from Homo sapiens__NP_000448.3__HNF4A(1-375)(S142A_S143A_S148A_T166A_ S167A_S313A_S378A_T429A_T432A_S436A_K458R)
  source 1..1128: mol_type = other RNA
atgcgcctctccaaaacactcgtcgatatggacatggccgactacagcgctgcccttgaccccgcgtacaccaccctagaattcgaaaacgtccaagttctcaccatgggcaacgacacctccccctcagaaggaaccaacctaaatgcccccaactctctcggcgtctccgctctctgcgccatctgcggcgaccgagccaccggaaaacactacggagcctcctcctgcgacgggtgcaaaggcttcttcagaagatccgtccgcaaaaaccacatgtactcatgccggttctcccgacaatgcgtagtcgacaaagacaaacgcaaccaatgccgctactgccgcctcaaaaaatgctttcgcgccggcatgaagaaagaagcagtacaaaacgaaagagacagaatctcaactcgcagagccgcctacgaagactcggcgctcccctctatcaacgccctgcttcaagccgaagtcctctcacgccaaatcgccgcacccgtatccggaatcaacggcgatatccgcgcaaaaaaaatcgcatccatcgccgacgtctgcgaatccatgaaggaacaactgctagtcctcgtagaatgggccaaatacatccctgccttctgtgaactccccctagacgatcaagtcgccctcctacgcgcccacgccggcgagcacctactacttggagccaccaaacgttctatggtcttcaaagacgtactcttactcggcaacgactacatagtcccccgccactgcccagaactggccgaaatgagccgcgtctcaatacgaatcctagacgaactcgtgctaccattccaagaactacaaatcgacgacaacgaatacgcatacctaaaagctattatcttcttcgaccccgacgccaaaggcctatccgaccccggcaaaataaaacgcctgcgagcccaagtacaagtaagcctcgaagactacatcaacgaccgacagtacgactcccgaggccgcttcggcgaactcctacttctcctccccaccctacaatccatcacctggcaaatgatagaacaaatccaattcatcaaactcttcggaatggcaaaaatcgataacctgctccaagaaatgctcctctga

SEQ ID NO: 1022 - RNA, 1128 nt, synthetic construct
  misc_feature 1..1128: note = CDS (opt11) from Homo sapiens__NP_000448.3__HNF4A(1-375)(S87A_S142A_S143A_S148A_T 166A_S167A_S313A_S378A_T429A_T432A_S436A_K458R)
  source 1..1128: mol_type = other RNA
atgcgcctctccaaaaccctcgtcgacatggacatggcagactactctgccgccctcgaccccgcctacacaaccctcgagttcgaaaacgtacaagtcttaaccatgggaaacgacacctcaccatcagaaggtacaaacctcaacgcccctaactcactcggcgtatctgcactatgcgcaatatgcggagaccgtgccactggcaaacactacggagcctcatcatgtgacggctgcaaaggcttcttccgacgtgcagtccgcaaaaaccatatgtactcctgccgattctcccgacaatgcgtcgtagacaaagacaaacgaaaccaatgccggtactgccgcctaaagaaatgcttccgcgccgggatgaagaaagaagccgtacaaaacgaacgagatcgcatctccacacgccgagccgcctacgaagactccgccctcccctccatcaacgccctactccaggccgaagtactgtcgcgccaaatcgccgcgccagtttccggaataaacggcgacatccgcgccaagaaaatcgcctcaatcgcagacgtatgcgaatccatgaaagaacaactcctcgtcctcgtagaatgggccaaatacatccccgcattctgcgaactacccctagatgaccaagtagcactattacgcgctcacgccggagaacacctcctcctcggagccactaaacgctccatggtcttcaaagacgtcctcctcctcggcaacgactacatcgtaccccgccactgccccgaactcgcagaaatgtcaagggtctccataagaatcctagacgagctagtcctaccgttccaagaactccaaatcgacgacaatgaatacgcatacctcaaagccataatcttcttcgacccagacgccaaaggcctctcagaccccggcaaaatcaaacgactacgcgcccaggtccaagtctccctagaagactacatcaacgacagacaatacgacagccgagggagattcggcgaactcctcctactcctccccaccctccaatcaataacatggcaaatgatcgaacaaatccagttcatcaaactcttcggcatggccaaaatcgacaacctactccaagaaatgctcctctga

SEQ ID NO: 1023 - RNA, 1128 nt, synthetic construct
  misc_feature 1..1128: note = CDS (opt11) from Homo sapiens__NP_000448.3__HNF4A(1-375)(S87A_K106R_K108R_K126R_K 127R_S142A_S143A_S148A_T166A_S167A_S313A_S378A_T429A_T432A_ S436A_K458R)
  source 1..1128: mol_type = other RNA
atgcgcctcagcaagacactcgtagacatggacatggccgactactccgccgcacttgaccccgcctataccaccctcgaattcgaaaacgtacaagtactcacaatgggaaacgacacctccccatccgaaggtaccaacttaaacgcccccaactccttaggcgtctccgccctctgcgcaatctgcggcgaccgagctacaggtaaacactacggcgcatcaagctgtgacggctgcaaaggcttcttccgacgagccgtccgcaaaaaccacatgtactcatgcagattctcccgacaatgcgtcgtggacagagaccgacgaaaccaatgccgctactgccgcctcaaaaaatgcttccgcgccggcatgcgacgtgaagcagtccaaaacgaacgtgatcgcataagcactagacgcgccgcctacgaagactccgccctgccctccatcaacgccctactacaagccgaagtccttagcagacaaatagccgccccagtctccggaataaacggagacatacgtgccaaaaaaatagcatccatcgccgacgtatgcgaaagcatgaaagaacaactccttgtcctagtagaatgggctaaatacatccccgcattctgcgaactccccctagacgaccaagtagccctcctccgagcacacgccggcgaacacctcctactcggcgccacaaaaagaagcatggtcttcaaagacgtcctacttctaggaaacgactacatcgtccctcgccactgccccgaactcgccgagatgagtagagtctctatcagaatcctcgacgaactcgtactcccattccaagaactacaaatagacgacaacgaatacgcctacctcaaagcgatcatcttcttcgaccccgacgccaaaggcctatcagaccccggcaaaatcaaaagactccgcgcccaagtacaagtctccctagaagactacatcaacgaccgccagtacgacagccgaggccgattcggcgaactacttctactcctcccaacactacaatcaatcacctggcagatgatcgaacaaatccaattcatcaaactattcggcatggccaaaatagacaaccttctacaagaaatgctcctatga

SEQ ID NO: 1024 - RNA, 1128 nt, synthetic construct
  misc_feature 1..1128: note = CDS (opt11) from Homo sapiens__NP_000448.3__HNF4A(1-375)(S87A_K106R_K108R_K126R_K 127R)
  source 1..1128: mol_type = other RNA
atgcgcctctccaaaacactcgtcgacatggacatggccgactactcagcagccctagaccccgcttacaccaccctcgagttcgaaaacgtacaagtcctcaccatgggcaacgacaccagcccatctgaaggtaccaacctcaacgcaccaaactccctcggcgtttcagctctatgcgccatatgcggagaccgcgccaccggcaaacactacggagcctcctcttgcgacggctgcaaaggcttcttccgcagagccgtacgcaaaaaccacatgtacagctgtagattttcccgccaatgcgtcgtcgaccgcgaccgccgcaaccagtgcagatattgccgactcaagaaatgcttccgcgcaggaatgcgccgcgaagccgtacaaaacgaacgcgaccgcatctccacacgccgctcatcttacgaagactcctccctaccaagcatcaacgcactacttcaagcagaagtcctatcccgacaaatcacctcccccgtctcaggcataaacggcgacataagggcaaagaaaatcgcctccatagccgacgtatgcgaatcaatgaaagaacaactcctagtcctcgtcgaatgggccaaatacatccccgccttctgcgaactgcccctcgacgaccaagtagcacttctccgcgcccacgccggcgaacacctcctactcggcgccaccaaacgttccatggtcttcaaagacgtcctcctacttggtaacgactacatcgtaccccgccactgccctgaactcgcagaaatgtcccgcgtctcaataagaatcctcgacgagctagttctccccttccaagaactacaaatcgacgacaacgaatacgcctacctcaaagccatcatatttttcgaccccgacgccaaaggcctttccgaccccggcaaaataaaacgcctccgctctcaagtccaggtcagcctcgaagactacatcaacgaccgccaatacgactctcgtggccgcttcggagaactactactactcctccccacactacaatccatcacctggcaaatgatcgaacaaatccaattcatcaaactcttcggcatggccaaaattgacaacctactccaagaaatgctcctatga

SEQ ID NO: 1025 - RNA, 1128 nt, synthetic construct
  misc_feature 1..1128: note = CDS (opt11) from Homo sapiens__NP_000448.3__HNF4A(1-375)(S87A_K106R_K108R_K126R_K 127R_S142A_S143A_S148A_T166A_S167A_S313A_S378A_T429A_T432A_ S436A_K458R_S461A)
  source 1..1128: mol_type = other RNA
atgcgcctaagcaaaaccctagtagacatggacatggcagactactcagcagcactagaccccgcctacaccaccctcgaatttgaaaacgttcaagtcctaacaatgggcaacgacacctctcccagcgaaggcacaaacctcaacgcccccaactcactcggggtctccgccctctgcgccatatgcggtgaccgtgcaaccggcaaacactacggcgcctcatcctgcgacggctgcaaaggattcttccgacgcgccgtacgcaaaaaccacatgtactcctgcagattctcacgccaatgcgtcgtggaccgagaccgccgcaaccaatgccgttactgccgcctcaagaaatgcttccgagccggaatgcgaagagaagccgtacaaaacgaacgcgaccgcatctccacacgacgagcagcctacgaagactccgccctaccctccataaacgcactcctccaagccgaagtactctcccgacaaatagccgcaccagtctccggcataaacggagacatccgagcaaagaaaatagcctcaatcgccgacgtatgcgaatcaatgaaagaacaacttctcgtcctcgtcgaatgggccaaatatatacccgccttctgcgaactccccctagacgaccaagtggcccttcttcgcgcccacgccggcgaacacctcctactcggagccaccaaacgctccatggtcttcaaagacgtactactcctcggtaacgactacatcgtcccacgacactgccccgaactagccgaaatgtcacgcgtctccatccgcatcctagacgaactcgtactcccattccaagaactccaaatcgacgacaacgaatacgcatacctcaaagccatcatcttcttcgacccagacgccaaaggcctatccgacccaggaaaaataaaacgcttacgcgcacaagtccaagtctccctcgaagactacatcaacgaccgtcagtacgacagccgggggagattcggcgaactgctactactacttcccaccctccaatccatcacctggcaaatgatagaacaaatacaattcatcaaactattcggcatggccaaaatcgacaacctcctacaagaaatgctactctga

SEQ ID NO: 1026 - RNA, 1128 nt, synthetic construct
  misc_feature 1..1128: note = CDS (opt11) from Homo sapiens__NP_000448.3__HNF4A(1-375)(S87A_K106R_K108R_K126R_K 127R_S142A_S143A_S148A_T166A_S167A_S313A_S378A_T429A_T432A_ S436A_K458R_S461E)
  source 1..1128: mol_type = other RNA
atgcgcctctccaaaaccctcgtcgacatggacatggcagactacagcgccgccctcgaccccgcatacaccaccctagagttcgaaaacgtccaagtcctaacgatgggaaacgacacctcaccatccgaaggcacaaacctcaacgccccgaactccctaggagtctcagccctctgcgccatatgcggcgaccgagccacaggcaaacactacggcgcctcatcgtgcgacggatgcaaaggattcttccgacgagctgtccgcaaaaaccacatgtactcctgccgcttctcccgccaatgcgtcgttgaccgcgaccggcgcaaccaatgcagatactgccgactcaagaaatgcttccgcgcaggcatgcgacgagaagccgtccaaaacgaacgcgaccgcatctcaaccagacgcgccgcctacgaagactctgcactccccagcatcaacgccctcctgcaagccgaagtattatcccgacagatcgccgcccccgtatccggcatcaacggcgacatccgcgccaagaaaatcgcctccatcgcagatgtctgcgaaagcatgaaagaacaattactcgtactcgtcgaatgggcaaaatacatccccgcattctgcgaactccccctcgacgaccaagtcgccctattacgcgcccacgcaggagaacaccttctcttaggcgcaacgaaacgcagcatggtcttcaaagacgtcctactcctcggcaacgactacatcgtcccccgtcactgccccgaactcgccgaaatgtcccgcgtatccatccgcatcctcgacgaactcgtcctaccattccaagaactccaaatcgacgacaacgaatacgcctacctcaaagcaatcatcttcttcgaccccgacgcaaaaggactatccgaccccggcaaaatcaaacgcctccgcgcacaagtccaagtctccctcgaagactacataaacgacagacaatacgacagccgaggcagattcggagaacttctcctcctcctccccacactacaatccatcacatggcaaatgatcgaacaaatacaattcatcaaactcttcggcatggcaaaaatcgacaacctgctccaagaaatgctactttga

SEQ ID NO: 1027 - RNA, 1128 nt, synthetic construct
  misc_feature 1..1128: note = CDS (opt11) from Homo sapiens__NP_000448.3__HNF4A(1-375)(S87A_K106R_K108R_K126R_K 127R_S142A_S143A_S148E_T166A_S167E_S313A_S378E_T429E_T432E_ S436E_K458R_S461E)
  source 1..1128: mol_type = other RNA
atgcgactaagcaagaccctagtagacatggacatggccgactactccgccgccctggatcccgcctacaccacactagaatttgaaaacgtacaagtcctcaccatgggcaacgacacaagccccagcgaagggaccaacctcaacgcgccaaacagcctaggcgtctcagccctatgtgccatctgcggagacagagccaccggcaaacactacggagcctcatcctgcgacggatgcaaaggcttcttccgacgcgccgtccgcaaaaaccacatgtactcctgccgtttctcccgacaatgcgtcgtagaccgcgaccgccgcaaccaatgccgctattgccgcctaaagaaatgcttccgcgccggcatgcgacgcgaagccgtccagaacgagcgcgaccgaatctccacacgtcgcgctgcctacgaagactctgaactcccctcgataaacgcactgctccaagccgaagttctatcacgccaaatagccgaacccgtcagcggcatcaacggcgacatccgcgccaagaaaatcgcatcaatcgcagatgtatgcgaatccatgaaagaacagctcctcgtcctcgtagaatgggctaaatacatccccgccttctgtgagctccccctcgacgaccaggtagccctgctaagagcccatgccggcgaacacctcctccttggcgccactaaacgatcaatggtattcaaagacgtcctcctactaggaaacgactacatagtccccagacactgccccgaacttgcagaaatgagccgagtctccatccgcatcttagacgaactcgtcctcccattccaagaactccagatcgacgacaacgaatacgcataccttaaagcaataatcttcttcgaccccgacgccaaaggactatcagaccccgggaaaattaaaagactccgagcacaagtccaagtctcactcgaagactacatcaacgatcgccaatacgactcacgcggacgatttggcgaactcctcctgttactccccaccctacaaagcatcacctggcaaatgatcgaacaaatccagttcataaaactcttcggaatggccaaaatcgacaacctgctccaagaaatgctcctctga

SEQ ID NO: 1028 - RNA, 1128 nt, synthetic construct
  misc_feature 1..1128: note = CDS (opt11) from Homo sapiens__NP_000448.3__HNF4A(1-375)(S87A_K106R_K108R_K126R_K 127R_S142A_S143A_S148A_T166A_S167A_K179R_K180R_S313A_S378A_ T429A_T432A_S436A_K458R_S461E)
  source 1..1128: mol_type = other RNA
atgcggctctccaaaactctcgtcgacatggacatggcagactacagcgccgccctcgacccagcctacacaaccctcgaattcgaaaacgttcaagtcctcaccatgggtaacgacacatccccctcagaaggaaccaacctcaacgcacccaactccctcggagtttccgccctatgcgcaatctgcggcgatcgagccaccggcaaacactacggcgcctcgtcttgcgacggctgcaaaggcttcttccgccgcgccgtcagaaaaaaccacatgtactcatgccggttctccagacaatgcgtcgtcgaccgagaccgccgaaaccaatgcaggtactgccgcctgaaaaaatgcttccgcgcaggcatgcgccgcgaagccgtccaaaacgagcgagaccgaatctcaacgcgacgcgccgcctacgaagactcagccctcccatccatcaacgcactactacaagccgaagtactatcccgacaaatagccgcaccagtctcaggaatcaacggagacatacgcgccagacgaatagcctccattgccgacgtatgcgaaagcatgaaagaacaactactcgttctcgtcgagtgggccaaatacattcccgctttctgcgaattacccctagacgaccaagtcgccctcctcagagcccacgcaggcgaacacctcctactcggagccaccaaacgatccatggtcttcaaagacgtcttactcctcggcaacgactacatcgtccccagacactgtcccgaactcgccgaaatgtcccgcgtctccatccgaatcctcgacgaactcgtactccccttccaggaactccaaatcgacgacaacgaatacgcctacctaaaagccatcatttttttcgaccctgatgccaaaggcctctctgaccccggcaaaatcaaacgactacgcgcccaagtccaagtctcactcgaagactacatcaacgatcgccagtacgactcccgaggccgcttcggtgaactcctcctcctcctgcccaccctacaatcaataacttggcaaatgatcgaacaaatacaattcatcaaactcttcggcatggccaaaattgacaacctcctacaagaaatgcttctctga

SEQ ID NO: 1029 - RNA, 1128 nt, synthetic construct
  misc_feature 1..1128: note = CDS (opt11) from Homo sapiens__NP_000448.3__HNF4A(1-375)(S87A_K106R_K108R_K126R_K 127R_S142A_S143A_S148A_T166A_S167A_K300R_K307R_K309R_S313A_ S378A_T429A_T432A_S436A_K458R_S461E)
  source 1..1128: mol_type = other RNA
atgcgcctatccaaaacactcgttgacatggacatggcagactactccgcagccctcgaccccgcctacaccaccctcgaattcgaaaacgtccaagtcctaacaatgggaaacgacacatccccatcagaagggaccaacctaaacgcccccaactccctcggcgtctccgcactctgcgcaatctgcggcgacagagccaccggaaaacactacggcgcctcctcatgcgacggatgcaaaggattcttccgaagagccgtccgaaaaaaccacatgtactcatgccgattctcgcgccaatgcgtcgtcgatcgcgacagacgcaaccaatgccgatactgcagacttaaaaaatgcttccgtgctggcatgcgacgcgaagctgtccaaaatgagcgcgaccgcatatctacccgaagagccgcctacgaagactcagcactaccctcaatcaacgccctactccaggccgaagtcctatcccgacaaatcgcagcccccgtgtccggcataaacggtgacatccgcgccaaaaaaatcgcctcaatagccgacgtctgtgaaagcatgaaagaacaactactagttctcgtcgaatgggcaaaatacatacccgcattctgcgaactcccactagacgaccaagtggccctcctccgagcccatgcaggagaacacctcctcctcggggccacaaaacgctccatggtgttcaaagacgtactactcctaggaaacgactacatcgtaccccgccactgccccgaactagctgaaatgtcacgcgtctcgatccgcatcctcgacgaactcgtcctaccattccaagaactgcaaatcgacgacaacgagtacgcgtacctaaaagcaataatattcttcgaccccgacgcccgcggcctctccgaccccggaagaatcaggcgactccgcgcccaagtccaagtaagcctcgaagactacatcaacgaccgccaatacgactcacgaggcagattcggcgaactactcctcctcctcccaacacttcaatcaatcacctggcaaatgatcgaacaaatccaattcatcaagctattcggcatggccaaaatcgacaacctcctacaagaaatgctactgtga

SEQ ID NO: 1030 - RNA, 1128 nt, synthetic construct
  misc_feature 1..1128: note = CDS (opt11) from Homo sapiens__NP_000448.3__HNF4A(1-375)(S87A_K106R_K108R_K126R_K 127R_S142A_S143A_S148A_T166A_S167A_S313A_S378A_T429A_T432A_ S436A_K447R_K458R_S461E_K470R)
  source 1..1128: mol_type = other RNA
atgagactatcaaaaaccctggtggacatggacatggccgactacagcgctgccctcgaccccgcctataccacactagagttcgaaaacgtccaagtcctaaccatgggcaacgacacatccccctccgaaggaacaaacctaaacgcccccaactccctcggtgtgtccgccttatgcgccatctgcggagaccgcgccacaggcaaacactacggcgcatcaagctgcgacggctgtaaaggattcttccgccgcgccgtgcgcaaaaaccacatgtactcatgccgcttctcccgccagtgcgtcgtcgaccgcgaccgccgcaaccaatgccgatactgccgcctcaagaaatgcttccgagccggcatgcgacgagaagcagtccaaaacgaacgcgatcgcatctccacaagacgcgcagcatatgaagactcggccctcccatcaatcaacgccctcctacaagccgaagtactatcccgccaaatcgccgcccccgtctccggcatcaacggcgacatacgcgctaagaaaatcgcctcaatagcagacgtctgcgaatcaatgaaagaacaactgctcgtactcgtggaatgggccaaatacatcccagcgttctgcgaactccccctcgacgaccaagtagcattactacgcgcccacgccggcgaacaccttctactaggagcaaccaaacgatccatggtcttcaaagacgtcctgctcctaggaaatgactacatcgtcccccgccattgccctgaactagcagaaatgtcgcgcgtctcaatccgaatcctcgacgaactcgttctaccattccaagaactacaaatcgacgacaacgaatacgcctaccttaaagcaataatcttcttcgacccagatgcaaaaggcctctccgaccccggcaaaatcaaacgcctacgagcacaagtccaagtctctctcgaagactacatcaacgaccgccaatacgactcacgtggccgcttcggcgaactcctcctcctcctacccacccttcaatcaatcacatggcaaatgatcgaacaaatacaattcataaaactattcggcatggccaaaatcgacaacctcctccaagaaatgctactctga

SEQ ID NO: 1031 - RNA, 1128 nt, synthetic construct
  misc_feature 1..1128: note = CDS (opt11) from Homo sapiens__NP_000448.3__HNF4A(1-375)(S87A_K106R_K108R_K126R_K 127R_S142A_S143A_S148A_T166A_S167A_K179R_K180R_K234R_K300R_ K307R_K309R_S313A_S378A_T429A_T432A_S436A_K447R_K458R_S461E _K470R)
  source 1..1128: mol_type = other RNA
atgcgcctttccaaaaccctagtcgacatggacatggccgactactccgcagccctagacccagcgtacaccaccctcgagttcgaaaacgtccaagtactcacaatgggcaacgacacctccccctcggaaggcaccaacctcaacgcccctaactcactcggcgtttccgctctctgcgccatctgcggagaccgagcgacaggaaaacactacggagcctcctcatgcgatggctgcaaaggcttcttccgccgcgcagtacgcaaaaaccacatgtactcatgcagattctcaagacaatgcgtcgtcgaccgcgaccgacgcaaccaatgccgatactgccgcctcaagaaatgcttccgcgccggcatgcgccgagaagcagtccaaaacgaacgcgacagaataagtactcgccgagccgcatacgaagacagcgccctaccatccatcaacgcactcctccaagccgaagtcctatcacgacaaatcgcagctcccgtttccggcatcaacggcgatatccgcgcaagacgaatagcaagcattgcagacgtctgcgaatcaatgaaagaacaactcctcgtcctcgtcgaatgggccaaatacatccccgcattctgcgaactccccctcgacgaccaagtcgccctactaagagcccacgccggcgaacacctcctcctaggcgctacccgacgctccatggtattcaaagacgtcctactcctaggtaacgactacatcgtaccccgccactgccccgaactcgcagaaatgagcagagtttcaatccgcatcctagacgagctagttctccccttccaagaacttcaaatcgacgataacgaatacgcctacctaaaagccatcatcttcttcgacccagacgcccgaggcctctccgacccaggacgaataagaagactacgcgcccaagtacaagtttccctcgaagattacatcaacgacagacagtacgactccagaggccgattcggtgaactcctcctgctactccccaccctccaaagcataacatggcaaatgatcgaacaaatccaattcatcaaactcttcggcatggccaaaatcgacaacctcctacaagaaatgctactgtga

SEQ ID NO: 1032 - RNA, 1128 nt, synthetic construct
  misc_feature 1..1128: note = CDS (opt11) from Homo sapiens__NP_000448.3__HNF4A(1-375)(S87A_S95A_S99A_K106R_K10 8R_K126R_K127R_S142A_S143A_S148A_T166A_S167A_S313A_S378A_T4 29A_T432A_S436A_K458R_S461E)
  source 1..1128: mol_type = other RNA
atgagactaagcaaaaccctcgtcgacatggacatggccgactacagcgccgccctcgaccccgcatacaccaccctcgaatttgaaaacgtacaagtcctcaccatgggtaacgatacctccccatccgaaggaaccaacctcaacgccccaaactcactaggcgtctccgccctctgcgccatctgcggcgaccgcgccaccggcaaacactacggcgcctcttcctgtgacggatgcaaaggctttttccggcgcgcagtccgcaaaaaccacatgtacgcctgccgtttcgcccgacagtgcgtagtcgaccgcgaccgtcgaaaccaatgcagatactgccgactaaagaaatgcttccgcgccggcatgcgcagagaagcagtacaaaacgaacgagaccgcatctcaacccgccgtgcggcatatgaagactcggccctaccatccatcaacgccctgctccaagccgaagtattatcccgccaaatcgcagcccccgttagtggaatcaacggcgacatccgagccaagaaaatcgcctccatagccgacgtctgcgagagcatgaaagaacaactcctcgtactcgtagaatgggcaaaatacatacccgccttctgcgaactccccctagacgaccaagtagccctactccgagcccacgccggtgaacatctactcctcggagccaccaaaagatccatggtattcaaagacgtcctcctcctaggcaacgactacatcgtcccccgccactgccccgaactcgccgaaatgtcccgcgtctcaatccgcatactggacgagctcgtactccccttccaagaactacaaatcgacgacaacgaatacgcttacctaaaagcaatcatcttcttcgacccagacgcgaaaggcctatcagatcccggcaaaatcaaacgcctacgcgcacaagtacaagtatcccttgaagactacataaacgaccgacaatacgacagccggggccgtttcggagaacttctcctcctcctacccacactccaatccattacctggcaaatgatagaacaaatccaattcatcaaactcttcggaatggccaagatcgacaacctcctccaagaaatgctactctga

SEQ ID NO: 1033 - RNA, 1128 nt, synthetic construct
  misc_feature 1..1128: note = CDS (opt11) from Homo sapiens__NP_000448.3__HNF4A(1-375)(S87A_K106R_K108R_K126R_K 127R_S138A_T139A_S142A_S143A_S148A_T166A_S167A_S313A_S378A_ T429A_T432A_S436A_K458R_S461E)
  source 1..1128: mol_type = other RNA
atgcgcctctccaaaaccctagtagatatggacatggcagactatagcgcagcactcgaccccgcctacactacccttgaattcgaaaacgtccaagtcctcacaatgggaaacgacacctctccttccgaaggcaccaacctcaacgccccaaactccctcggcgtctccgccttgtgcgccatctgcggcgaccgagccacaggaaaacactacggagcctcctcctgcgatggctgcaaaggcttcttccgccgcgcagtaagaaaaaaccacatgtactcatgccgcttctcccgccagtgcgtcgtagaccgcgaccgccgcaaccaatgccgctactgccgcctcaaaaaatgcttccgagccggaatgcgaagagaagccgtccaaaacgaacgcgaccgcatcgccgcccgacgggccgcatacgaggatagcgccctcccaagcatcaatgctcttctccaagccgaggtcctttcccgtcaaatcgcagcccccgtatccggaatcaacggagacatacgcgccaaaaaaatcgcaagcatcgccgacgtctgcgaaagcatgaaagaacaactcctcgtactcgtcgaatgggccaaatacataccagccttctgcgaactacccctcgacgatcaagtagccctcctacgagcccacgccggagaacacctcctacttggcgccacaaaacgaagcatggttttcaaggacgtcctcctcctcggcaacgactacatagtaccccgccactgccccgaactagcagaaatgtcccgggtatcgatccgcatactagacgaactagtcctcccctttcaagaactccaaatcgatgacaacgaatacgcttacctgaaagcaataatcttcttcgaccctgacgccaaaggcctctccgacccaggaaaaataaaacgcctccgcgcccaagtacaagtctccctagaagactacataaacgaccgacaatacgactcccgaggacgattcggcgaactactattattactacctacactacaatccatcacctggcaaatgatcgaacaaatccaattcatcaaactattcggcatggccaaaatcgacaacctactccaagaaatgctcctatga

SEQ ID NO: 1034 - RNA, 1128 nt, synthetic construct
  misc_feature 1..1128: note = CDS (opt11) from Homo sapiens__NP_000448.3__HNF4A(1-375)(S87A_S95A_S99A_K106R_K10 8R_K126R_K127R_S138A_T139A_S142A_S143A_S148A_T166A_S167A_S3 13A_S378A_T429A_T432A_S436A_K458R_S461E)
  source 1..1128: mol_type = other RNA
atgcgactaagcaaaaccctagtcgacatggacatggcagactatagcgccgcactcgacccagcctacacaacgctcgagttcgaaaacgttcaagtccttaccatgggcaacgacacctcccccagcgaaggcaccaacctaaacgcccctaactcactcggagtgtccgcactatgcgcaatctgcggggaccgcgccaccggcaaacactacggcgcctccagctgcgacggctgcaaaggcttcttccgccgagccgtccgcaagaaccacatgtacgcctgccgcttcgctcgccaatgcgtcgtagaccgagaccgcagaaaccaatgcagatactgcagactcaagaaatgcttccgcgccggcatgcgacgcgaagccgtacaaaacgaacgcgaccgcatcgccgctcgtcgagcagcctatgaagactcagcccttccctcaataaacgcactactccaagccgaagtcctcagccgacaaatcgccgccccagtctcaggcatcaacggcgacatccgcgccaagaaaatagcctccatcgcggacgtctgcgagtccatgaaagaacaactcctagttctggtcgaatgggctaaatacatccccgcattctgcgaactcccactcgacgaccaagtagccctactccgagcccacgcaggagaacacctactcctaggagccacaaaacgttccatggtatttaaagacgtcctcctactaggcaacgactacatcgtcccccgccactgccccgaactcgccgaaatgtcccgcgtctccatccgcatcctagacgagctcgtactcccattccaagaactccaaatagacgacaacgaatacgcctacctaaaagccatcatcttcttcgatccagacgcaaaaggcctctcagacccaggcaaaatcaaaagacttagagcccaagtccaagtatcactcgaagactacatcaacgaccgacaatacgactcccgcggaaggttcggcgaactcctcctcctcctccccacactacaatccatcacctggcaaatgatagaacaaattcaattcataaaactattcggcatggccaagatagacaacctcctccaagaaatgctcctctga

SEQ ID NO: 1035 - RNA, 1128 nt, synthetic construct
  misc_feature 1..1128: note = CDS (opt28) from Homo sapiens__NP_000448.3__HNF4A(1-375)
  source 1..1128: mol_type = other RNA
atgcggctgagcaagaccctggtggacatggatatggcagactactccgccgctctggatccagcatatacaactctggagttcgaaaacgtccaggtgctgaccatgggaaatgacacatctcccagtgagggcactaacctgaatgcccctaactcactgggggtgagcgctctgtgcgcaatctgcggagacagggccaccggcaaacactacggggcttcctcttgtgatggatgcaagggctttttcagacgcagcgtccggaaaaatcatatgtacagttgccgattttcaaggcagtgcgtggtggacaaggacaagagaaaccagtgccgctattgtcggctgaaaaagtgcttcagggcaggaatgaaaaaggaagccgtccagaatgagagagatcgaatttccacacggcgcagctcttacgaagacagctccctgccaagtatcaacgctctgctgcaggcagaggtgctgtcaaggcagatcactagccccgtgtctgggattaacggcgatatcagagccaagaaaattgcttccatcgcagacgtctgcgaaagcatgaaggagcagctgctggtgctggtggagtgggccaaatacatccctgcattttgcgaactgccactggacgatcaggtcgctctgctgcgggcccacgcaggagagcatctgctgctgggcgctaccaagcgaagtatggtgttcaaggacgtgctgctgctggggaatgactatattgtccccaggcactgccctgaactggccgagatgtcaagagtgtctatccgcatcctggatgaactggtgctgccattccaggagctgcagattgacgataacgaatacgcatacctgaaagctatcatctttttcgaccccgacgccaagggactgtccgatcctggcaaaattaagcggctgaggagccaggtccaggtgagtctggaggactatatcaatgacagacagtacgatagccgagggcggtttggagaactgctgctgctgctgccaacactgcagtccattacctggcagatgatcgagcagatccagttcattaaactgttcggcatggcaaagatcgacaacctgctgcaggagatgctgctgtga

SEQ ID NO: 1036 - RNA, 1128 nt, synthetic construct
  misc_feature 1..1128: note = CDS (opt28) from Homo sapiens__NP_000448.3__HNF4A(1-375)(S313A)
  source 1..1128: mol_type = other RNA
atgcggctgagcaagaccctggtggacatggatatggcagactactccgccgctctggatccagcatatacaactctggagttcgaaaacgtccaggtgctgaccatgggaaatgacacatctccctcagagggcactaacctgaatgcccctaacagtctgggggtgagcgctctgtgcgcaatctgcggagacagggccaccggcaaacactacggggcttcctcttgtgatggatgcaagggctttttcagacgcagcgtccggaaaaatcatatgtactcatgccgatttagtaggcagtgcgtggtggacaaggacaagagaaaccagtgccgctattgtcggctgaaaaagtgcttcagggcaggaatgaaaaaggaagccgtccagaatgagagagatcgaatttccacacggcgcagctcttacgaagacagctccctgccatcaatcaacgctctgctgcaggcagaggtgctgagtaggcagatcactagccccgtgtctgggattaacggcgatatcagagccaagaaaattgcatccatcgctgacgtctgcgaaagcatgaaggagcagctgctggtgctggtggagtgggccaaatacatccctgcattttgcgaactgccactggacgatcaggtcgctctgctgcgggcccacgcaggagagcatctgctgctgggcgctaccaagcgatcaatggtgttcaaggacgtgctgctgctggggaatgactatattgtccccaggcactgccctgaactggccgagatgagtagagtgtctatccgcatcctggatgaactggtgctgccattccaggagctgcagattgacgataacgaatacgcatacctgaaagctatcatctttttcgaccccgacgccaagggactgtccgatcctggcaaaattaagcggctgagggcacaggtccaggtgagcctggaggactatatcaatgacagacagtacgatagccgagggcggtttggagaactgctgctgctgctgccaacactgcagtccattacctggcagatgatcgagcagatccagttcattaaactgttcggcatggccaagatcgacaacctgctgcaggagatgctgctgtga

SEQ ID NO: 1037 - RNA, 1128 nt, synthetic construct
  misc_feature 1..1128: note = CDS (opt28) from Homo sapiens__NP_000448.3__HNF4A(1-375)(S313E)
  source 1..1128: mol_type = other RNA
atgcggctgagcaagaccctggtggacatggatatggcagactactccgccgctctggatccagcatatacaactctggagttcgaaaacgtccaggtgctgaccatgggaaatgacacatctccctcagagggcactaacctgaatgcccctaacagtctgggggtgagcgctctgtgcgcaatctgcggagacagggccaccggcaaacactacggggcttcctcttgtgatggatgcaagggctttttcagacgcagcgtccggaaaaatcatatgtactcatgccgatttagtaggcagtgcgtggtggacaaggacaagagaaaccagtgccgctattgtcggctgaaaaagtgcttcagggcaggaatgaaaaaggaagccgtccagaatgagagagatcgaatttccacacggcgcagctcttacgaagacagctccctgccatcaatcaacgctctgctgcaggcagaggtgctgagtaggcagatcactagccccgtgtctgggattaacggcgatatcagagccaagaaaattgcatccatcgctgacgtctgcgaaagcatgaaggagcagctgctggtgctggtggagtgggccaaatacatccctgcattttgcgaactgccactggacgatcaggtcgctctgctgcgggcccacgcaggagagcatctgctgctgggcgctaccaagcgatcaatggtgttcaaggacgtgctgctgctggggaatgactatattgtccccaggcactgccctgaactggccgagatgagtagagtgtctatccgcatcctggatgaactggtgctgccattccaggagctgcagattgacgataacgaatacgcatacctgaaagctatcatctttttcgaccccgacgccaagggactgtccgatcctggcaaaattaagcggctgagggagcaggtccaggtgagcctggaagactatatcaatgacagacagtacgatagccgagggcggtttggagagctgctgctgctgctgccaacactgcagtccattacctggcagatgatcgagcagatccagttcattaaactgttcggcatggcaaagatcgacaacctgctgcaggaaatgctgctgtga

SEQ ID NO: 1038 - RNA, 1128 nt, synthetic construct
  misc_feature 1..1128: note = CDS (opt28) from Homo sapiens__NP_000448.3__HNF4A(1-375)(S142A_S143A)
  source 1..1128: mol_type = other RNA
atgcggctgagcaagaccctggtggacatggatatggcagactactccgccgctctggatccagcatatacaactctggagttcgaaaacgtccaggtgctgaccatgggaaatgacacatctccctcagagggcactaacctgaatgcccctaacagtctgggggtgagcgctctgtgcgcaatctgcggagacagggccaccggcaaacactacggggcttcctcttgtgatggatgcaagggctttttcagacgcagcgtccggaaaaatcatatgtactcatgccgatttagtaggcagtgcgtggtggacaaggacaagagaaaccagtgccgctattgtcggctgaaaaagtgcttcagggcaggaatgaaaaaggaagccgtccagaatgagagagatcgaatttccacacggcgcgctgcatacgaagacagctctctgccaagcatcaacgccctgctgcaggcagaggtgctgtccaggcagatcacttcacccgtgagtgggattaacggcgatatcagagctaagaaaattgccagcatcgcagacgtctgcgaatctatgaaggagcagctgctggtgctggtggagtgggctaaatacatccctgccttttgcgaactgccactggacgatcaggtcgcactgctgcgggctcacgccggagagcatctgctgctgggcgcaaccaagcgatccatggtgttcaaggacgtgctgctgctggggaatgactatattgtccccaggcactgccctgaactggctgagatgagcagagtgtcaatccgcatcctggatgaactggtgctgccattccaggagctgcagattgacgataacgaatacgcctacctgaaagcaatcatctttttcgaccccgacgccaagggactgagtgatcctggcaaaattaagcggctgaggtctcaggtccaggtgtccctggaggactatatcaatgacagacagtacgatagccgagggcggtttggagaactgctgctgctgctgccaacactgcagagcattacctggcagatgatcgagcagatccagttcattaaactgttcggcatggctaagatcgacaacctgctgcaggagatgctgctgtga

SEQ ID NO: 1039 - RNA, 1128 nt, synthetic construct
  misc_feature 1..1128: note = CDS (opt28) from Homo sapiens__NP_000448.3__HNF4A(1-375)(S142E_S143E)
  source 1..1128: mol_type = other RNA
atgcggctgagcaagaccctggtggacatggatatggcagactactccgccgctctggatccagcatatacaactctggagttcgaaaacgtccaggtgctgaccatgggaaatgacacatctccctcagagggcactaacctgaatgcccctaacagtctgggggtgagcgctctgtgcgcaatctgcggagacagggccaccggcaaacactacggggcttcctcttgtgatggatgcaagggctttttcagacgcagcgtccggaaaaatcatatgtactcatgccgatttagtaggcagtgcgtggtggacaaggacaagagaaaccagtgccgctattgtcggctgaaaaagtgcttcagggcaggaatgaaaaaggaagccgtccagaatgagagagatcgaatttccacacggcgcgaagagtacgaagacagctctctgccaagcatcaacgctctgctgcaggcagaggtgctgtccaggcagatcacttcacccgtgagtgggattaacggcgatatcagagccaagaaaattgcaagcatcgctgacgtctgcgagtctatgaaggaacagctgctggtgctggtggagtgggccaaatacatccctgcattttgcgaactgccactggacgatcaggtcgctctgctgcgggcccacgcaggagagcatctgctgctgggcgctaccaagcgatccatggtgttcaaggacgtgctgctgctggggaatgactatattgtccccaggcactgccctgaactggccgagatgagcagagtgtcaatccgcatcctggatgaactggtgctgccattccaggagctgcagattgacgataacgaatacgcatacctgaaagctatcatctttttcgaccccgacgccaagggactgagtgatcctggcaaaattaagcggctgaggtctcaggtccaggtgtccctggaggactatatcaatgacagacagtacgatagccgagggcggtttggagagctgctgctgctgctgccaacactgcagagcattacctggcagatgatcgaacagatccagttcattaaactgttcggcatggcaaagatcgacaacctgctgcaggagatgctgctgtga

SEQ ID NO: 1040 - RNA, 1128 nt, synthetic construct
  misc_feature 1..1128: note = CDS (opt28) from Homo sapiens__NP_000448.3__HNF4A(1-375)(S143A)
  source 1..1128: mol_type = other RNA
atgcggctgagcaagaccctggtggacatggatatggcagactactccgccgctctggatccagcatatacaactctggagttcgaaaacgtccaggtgctgaccatgggaaatgacacatctccctcagagggcactaacctgaatgcccctaacagtctgggggtgagcgctctgtgcgcaatctgcggagacagggccaccggcaaacactacggggcttcctcttgtgatggatgcaagggctttttcagacgcagcgtccggaaaaatcatatgtactcatgccgatttagtaggcagtgcgtggtggacaaggacaagagaaaccagtgccgctattgtcggctgaaaaagtgcttcagggcaggaatgaaaaaggaagccgtccagaatgagagagatcgaatttccacacggcgcagcgcttacgaagactctagcctgccatccatcaacgcactgctgcaggccgaggtgctgtcaaggcagatcaccagtcccgtgagcgggattaacggcgatatcagagcaaagaaaattgcttctatcgccgacgtctgcgaatccatgaaggagcagctgctggtgctggtggagtgggcaaaatacatccctgctttttgcgaactgccactggacgatcaggtcgccctgctgcgggcacacgctggagagcatctgctgctgggcgccactaagcgaagcatggtgttcaaggacgtgctgctgctggggaatgactatattgtccccaggcactgccctgaactggcagagatgtcaagagtgagtatccgcatcctggatgaactggtgctgccattccaggagctgcagattgacgataacgaatacgcttacctgaaagccatcatctttttcgaccccgacgcaaagggactgtctgatcctggcaaaattaagcggctgaggtcccaggtccaggtgagcctggaggactatatcaatgacagacagtacgatagccgagggcggtttggagaactgctgctgctgctgccaacactgcagtccattacctggcagatgatcgagcagatccagttcattaaactgttcggcatggccaagatcgacaacctgctgcaggagatgctgctgtga

SEQ ID NO: 1041 - RNA, 1128 nt, synthetic construct
  misc_feature 1..1128: note = CDS (opt28) from Homo sapiens__NP_000448.3__HNF4A(1-375)(T166A)
  source 1..1128: mol_type = other RNA
atgcggctgagcaagaccctggtggacatggatatggcagactactccgccgctctggatccagcatatacaactctggagttcgaaaacgtccaggtgctgaccatgggaaatgacacatctccctcagagggcactaacctgaatgcccctaacagtctgggggtgagcgctctgtgcgcaatctgcggagacagggccaccggcaaacactacggggcttcctcttgtgatggatgcaagggctttttcagacgcagcgtccggaaaaatcatatgtactcatgccgatttagtaggcagtgcgtggtggacaaggacaagagaaaccagtgccgctattgtcggctgaaaaagtgcttcagggcaggaatgaaaaaggaagccgtccagaatgagagagatcgaatttccacacggcgcagctcttacgaagacagctccctgccatcaatcaacgctctgctgcaggcagaggtgctgagtaggcagatcgccagccccgtgtctgggattaacggcgatatcagagcaaagaaaattgcttccatcgccgacgtctgcgaaagcatgaaggagcagctgctggtgctggtggagtgggcaaaatacatccctgctttttgcgaactgccactggacgatcaggtcgccctgctgcgggcacacgctggagagcatctgctgctgggcgccactaagcgatcaatggtgttcaaggacgtgctgctgctggggaatgactatattgtccccaggcactgccctgaactggcagagatgagtagagtgtctatccgcatcctggatgaactggtgctgccattccaggagctgcagattgacgataacgaatacgcttacctgaaagccatcatctttttcgaccccgacgcaaagggactgtccgatcctggcaaaattaagcggctgaggagccaggtccaggtgagcctggaggactatatcaatgacagacagtacgattcccgagggcggtttggagaactgctgctgctgctgccaaccctgcagtcaattacatggcagatgatcgagcagatccagttcattaaactgttcggcatggccaagatcgacaacctgctgcaggagatgctgctgtga

SEQ ID NO: 1042 - RNA, 1128 nt, synthetic construct
  misc_feature 1..1128: note = CDS (opt28) from Homo sapiens__NP_000448.3__HNF4A(1-375)(S167E)
  source 1..1128: mol_type = other RNA
atgcggctgagcaagaccctggtggacatggatatggcagactactccgccgctctggatccagcatatacaactctggagttcgaaaacgtccaggtgctgaccatgggaaatgacacatctccctcagagggcactaacctgaatgcccctaacagtctgggggtgagcgctctgtgcgcaatctgcggagacagggccaccggcaaacactacggggcttcctcttgtgatggatgcaagggctttttcagacgcagcgtccggaaaaatcatatgtactcatgccgatttagtaggcagtgcgtggtggacaaggacaagagaaaccagtgccgctattgtcggctgaaaaagtgcttcagggcaggaatgaaaaaggaagccgtccagaatgagagagatcgaatttccacacggcgcagctcttacgaagacagctccctgccatcaatcaacgctctgctgcaggcagaggtgctgagtaggcagatcactgaacccgtgagcgggattaacggcgatatcagagccaagaaaattgcatctatcgctgacgtctgcgagtccatgaaggagcagctgctggtgctggtggaatgggccaaatacatccctgcattttgcgagctgccactggacgatcaggtcgctctgctgcgggcccacgcaggagaacatctgctgctgggcgctaccaagcgaagcatggtgttcaaggacgtgctgctgctggggaatgactatattgtccccaggcactgccctgagctggccgaaatgtcaagagtgagtatccgcatcctggatgagctggtgctgccattccaggaactgcagattgacgataacgagtacgcatacctgaaagctatcatctttttcgaccccgacgccaagggactgtctgatcctggcaaaattaagcggctgaggtcccaggtccaggtgagcctggaagactatatcaatgacagacagtacgatagccgagggcggtttggagagctgctgctgctgctgccaacactgcagtccattacctggcagatgatcgagcagatccagttcattaaactgttcggcatggcaaagatcgacaacctgctgcaggaaatgctgctgtga

SEQ ID NO: 1043 - RNA, 1128 nt, synthetic construct
  misc_feature 1..1128: note = CDS (opt28) from Homo sapiens__NP_000448.3__HNF4A(1-375)(S167A)
  source 1..1128: mol_type = other RNA
atgcggctgagcaagaccctggtggacatggatatggcagactactccgccgctctggatccagcatatacaactctggagttcgaaaacgtccaggtgctgaccatgggaaatgacacatctccctcagagggcactaacctgaatgcccctaacagtctgggggtgagcgctctgtgcgcaatctgcggagacagggccaccggcaaacactacggggcttcctcttgtgatggatgcaagggctttttcagacgcagcgtccggaaaaatcatatgtactcatgccgatttagtaggcagtgcgtggtggacaaggacaagagaaaccagtgccgctattgtcggctgaaaaagtgcttcagggcaggaatgaaaaaggaagccgtccagaatgagagagatcgaatttccacacggcgcagctcttacgaagacagctccctgccatcaatcaacgctctgctgcaggcagaggtgctgagtaggcagatcactgcccccgtgagcgggattaacggcgatatcagagcaaagaaaattgcttctatcgccgacgtctgcgaatccatgaaggagcagctgctggtgctggtggagtgggcaaaatacatccctgctttttgcgaactgccactggacgatcaggtcgccctgctgcgggcacacgctggagagcatctgctgctgggcgccaccaagcgaagcatggtgttcaaggacgtgctgctgctggggaatgactatattgtccccaggcactgccctgaactggcagagatgtcaagagtgagtatccgcatcctggatgaactggtgctgccattccaggagctgcagattgacgataacgaatacgcttacctgaaagccatcatctttttcgaccccgacgcaaagggactgtctgatcctggcaaaattaagcggctgaggtcccaggtccaggtgagcctggaggactatatcaatgacagacagtacgatagccgagggcggtttggagaactgctgctgctgctgccaacactgcagtccattacctggcagatgatcgagcagatccagttcattaaactgttcggcatggccaagatcgacaacctgctgcaggagatgctgctgtga

SEQ ID NO: 1044 - RNA, 1128 nt, synthetic construct; identical to SEQ ID NO: 1043
  misc_feature 1..1128: note = CDS (opt28) from Homo sapiens__NP_000448.3__HNF4A(1-375)(S167A_S378A_T429A_T432A_ S436A)
  source 1..1128: mol_type = other RNA

SEQ ID NO: 1045 - RNA, 1128 nt, synthetic construct; identical to SEQ ID NO: 1042
  misc_feature 1..1128: note = CDS (opt28) from Homo sapiens__NP_000448.3__HNF4A(1-375)(S167E_S378E_T429E_T432E_ S436E)
  source 1..1128: mol_type = other RNA

SEQ ID NO: 1046 - RNA, 1128 nt, synthetic construct
  misc_feature 1..1128: note = CDS (opt28) from Homo sapiens__NP_000448.3__HNF4A(1-375)(S87A)
  source 1..1128: mol_type = other RNA
atgcggctgagcaagaccctggtggacatggatatggcagactactccgccgctctggatccagcatatacaactctggagttcgaaaacgtccaggtgctgaccatgggaaatgacacatctccctcagagggcactaacctgaatgcccctaacagtctgggggtgagcgctctgtgcgcaatctgcggagacagggccaccggcaaacactacggggcttcctcttgtgatggatgcaagggctttttcagacgcgcagtccggaaaaatcatatgtacagctgccgattttcaaggcagtgcgtggtggacaaggacaagagaaaccagtgccgctattgtcggctgaaaaagtgcttcagggccggaatgaaaaaggaagctgtccagaatgagagagatcgaattagtacacggcgctccagctacgaagactctagcctgccatccatcaacgcactgctgcaggccgaggtgctgtcaaggcagatcaccagtcccgtgagcgggattaacggcgatatcagagcaaagaaaattgcttctatcgccgacgtctgcgaatccatgaaggagcagctgctggtgctggtggagtgggcaaaatacatccctgctttttgcgaactgccactggacgatcaggtcgccctgctgcgggcacacgctggagagcatctgctgctgggcgccactaagcgaagcatggtgttcaaggacgtgctgctgctggggaatgactatattgtccccaggcactgccctgaactggcagagatgtcaagagtgagtatccgcatcctggatgaactggtgctgccattccaggagctgcagattgacgataacgaatacgcttacctgaaagccatcatctttttcgaccccgacgcaaagggactgtctgatcctggcaaaattaagcggctgaggtcccaggtccaggtgagcctggaggactatatcaatgacagacagtacgatagccgagggcggtttggagaactgctgctgctgctgccaacactgcagtccattacctggcagatgatcgagcagatccagttcattaaactgttcggcatggccaagatcgacaacctgctgcaggagatgctgctgtga

SEQ ID NO: 1047 - RNA, 1128 nt, synthetic construct
  misc_feature 1..1128: note = CDS (opt28) from Homo sapiens__NP_000448.3__HNF4A(1-375)(S87E)
  source 1..1128: mol_type = other RNA
atgcggctgagcaagaccctggtggacatggatatggcagactactccgccgctctggatccagcatatacaactctggagttcgaaaacgtccaggtgctgaccatgggaaatgacacatctccctcagagggcactaacctgaatgcccctaacagtctgggggtgagcgctctgtgcgcaatctgcggagacagggccaccggcaaacactacggggcttcctcttgtgatggatgcaagggctttttcagacgcgaagtccggaaaaatcatatgtacagctgccgattttcaaggcagtgcgtggtggacaaggacaagagaaaccagtgccgctattgtcggctgaaaaagtgcttcagggcaggaatgaaaaaggaggccgtccagaatgaaagagatcgaattagtacacggcgctccagctacgaggactctagcctgccatccatcaacgctctgctgcaggcagaagtgctgtcaaggcagatcaccagtcccgtgagcgggattaacggcgatatcagagccaagaaaattgcatctatcgctgacgtctgcgagtccatgaaggagcagctgctggtgctggtggaatgggccaaatacatccctgcattttgcgagctgccactggacgatcaggtcgctctgctgcgggcccacgcaggagaacatctgctgctgggcgctactaagcgaagcatggtgttcaaggacgtgctgctgctggggaatgactatattgtccccaggcactgccctgagctggccgaaatgtcaagagtgagtatccgcatcctggatgagctggtgctgccattccaggaactgcagattgacgataacgagtacgcatacctgaaagctatcatctttttcgaccccgacgccaagggactgtctgatcctggcaaaattaagcggctgaggtcccaggtccaggtgagcctggaagactatatcaatgacagacagtacgatagccgagggcggtttggagagctgctgctgctgctgccaacactgcagtccattacctggcagatgatcgagcagatccagttcattaaactgttcggcatggcaaagatcgacaacctgctgcaggaaatgctgctgtga

SEQ ID NO: 1048 - RNA, 1128 nt, synthetic construct
  misc_feature 1..1128: note = CDS (opt28) from Homo sapiens__NP_000448.3__HNF4A(1-375)(R2V)
  source 1..1128: mol_type = other RNA
atggtgctgagcaagaccctggtcgacatggatatggcagactactccgccgctctggatccagcatatacaactctggagttcgaaaacgtccaggtgctgaccatgggaaatgacacatctccctcagagggcactaacctgaatgcccctaacagtctgggggtgagcgctctgtgcgcaatctgcggagaccgggccaccggcaaacactacggggcttcctcttgtgatggatgcaagggctttttcaggagaagcgtgcgcaaaaatcatatgtactcatgccgatttagtcggcagtgcgtggtcgacaaggacaagaggaaccagtgcagatattgtcgcctgaaaaagtgcttccgggcaggaatgaaaaaggaagccgtgcagaatgagagggatagaatttccacacgacggagctcttacgaagacagctccctgccatcaatcaacgctctgctgcaggcagaggtgctgagtcgccagatcactagccccgtctctgggattaacggcgatatcagggccaagaaaattgcatccatcgctgacgtgtgcgaaagcatgaaggagcagctgctggtgctggtcgagtgggccaaatacatccctgcattttgcgaactgccactggacgatcaggtggctctgctgagagcccacgcaggagagcatctgctgctgggcgctaccaagcggtcaatggtgttcaaggacgtcctgctgctggggaatgactatattgtgccccgacactgccctgaactggccgagatgagtagggtgtctatcagaatcctggatgaactggtcctgccattccaggagctgcagattgacgataacgaatacgcatacctgaaagctatcatctttttcgaccccgacgccaagggactgtccgatcctggcaaaattaagcgcctgcggagccaggtccaggtgagcctggaggactatatcaatgacaggcagtacgattccagagggcgatttggagaactgctgctgctgctgccaacactgcagtcaattacctggcagatgatcgagcagatccagttcattaaactgttcggcatggcaaagatcgacaacctgctgcaggagatgctgctgtga

SEQ ID NO: 1049 - RNA, 1128 nt, synthetic construct
  misc_feature 1..1128: note = CDS (opt28) from Homo sapiens__NP_000448.3__HNF4A(1-375)(R2V_K5V)
  source 1..1128: mol_type = other RNA
atggtgctgagcgtcaccctggtggacatggatatggcagactactccgccgctctggatccagcatatacaactctggagttcgaaaacgtgcaggtcctgaccatgggaaatgacacatctccctcagagggcactaacctgaatgcccctaacagtctgggggtgagcgctctgtgcgcaatctgcggagaccgggccaccggcaagcactacggggcttcctcttgtgatggatgcaaaggctttttcaggagaagcgtgcgcaagaatcatatgtactcatgccgatttagtcggcagtgcgtcgtggacaaagacaagaggaaccagtgcagatattgtcgcctgaagaaatgcttccgggcaggaatgaagaaagaagccgtgcagaatgagagggatagaatttccacacgacggagctcttacgaagacagctccctgccatcaatcaacgctctgctgcaggcagaggtcctgagtcgccagatcactagccccgtgtctgggattaacggcgatatcagggccaagaagattgcatccatcgctgacgtgtgcgaaagcatgaaagagcagctgctggtcctggtggagtgggccaagtacatccctgcattttgcgaactgccactggacgatcaggtggctctgctgagagcccacgcaggagagcatctgctgctgggcgctaccaaacggtcaatggtcttcaaggacgtgctgctgctggggaatgactatattgtgccccgacactgccctgaactggccgagatgagtagggtctctatcagaatcctggatgaactggtgctgccattccaggagctgcagattgacgataacgaatacgcatacctgaaggctatcatctttttcgaccccgacgccaaaggactgtccgatcctggcaagattaaacgcctgcggagccaggtgcaggtcagcctggaggactatatcaatgacaggcagtacgattccagagggcgatttggagaactgctgctgctgctgccaacactgcagtcaattacctggcagatgatcgagcagatccagttcattaagctgttcggcatggcaaaaatcgacaacctgctgcaggagatgctgctgtga

SEQ ID NO: 1050 - RNA, 1128 nt, synthetic construct
  misc_feature 1..1128: note = CDS (opt28) from Homo sapiens__NP_000448.3__HNF4A(1-375)(K179R_K180R)
  source 1..1128: mol_type = other RNA
atgcggctgagcaagaccctggtggacatggatatggcagactactccgccgctctggatccagcatatacaactctggagttcgaaaacgtccaggtgctgaccatgggaaatgacacatctccctcagagggcactaacctgaatgcccctaacagtctgggggtgagcgctctgtgcgcaatctgcggagacagggccaccggcaaacactacggggcttcctcttgtgatggatgcaagggctttttcagacgcagcgtccggaaaaatcatatgtactcatgccgatttagtaggcagtgcgtggtggacaaggacaagagaaaccagtgccgctattgtcggctgaaaaagtgcttcagggcaggaatgaaaaaggaagccgtccagaatgagagagatcgaatttccacacggcgcagctcttacgaagacagctccctgccatcaatcaacgctctgctgcaggcagaggtgctgagtaggcagatcactagccccgtgtctgggattaacggcgatatcagagcccggcgaattgcatccatcgctgacgtctgcgaaagcatgaaggagcagctgctggtgctggtggagtgggccaaatacatccctgcattttgcgaactgccactggacgatcaggtcgctctgctgagggcccacgcaggagagcatctgctgctgggcgctaccaagagatcaatggtgttcaaagacgtgctgctgctggggaatgactatattgtcccccgccactgccctgaactggccgagatgagtcgggtgtctatcaggatcctggatgaactggtgctgccattccaggagctgcagattgacgataacgaatacgcatacctgaaggctatcatctttttcgaccccgacgccaagggactgtccgatcctggcaaaattaagagactgcgaagccaggtccaggtgagcctggaggactatatcaatgaccggcagtacgattcccgcgggaggtttggagaactgctgctgctgctgccaacactgcagtcaattacctggcagatgatcgagcagatccagttcattaaactgttcggcatggcaaagatcgacaacctgctgcaggagatgctgctgtga

SEQ ID NO: 1051 - RNA, 1128 nt, synthetic construct
  misc_feature 1..1128: note = CDS (opt28) from Homo sapiens__NP_000448.3__HNF4A(1-375)(K234R)
  source 1..1128: mol_type = other RNA
atgcggctgagcaagaccctggtggacatggatatggcagactactccgccgctctggatccagcatatacaactctggagttcgaaaacgtccaggtgctgaccatgggaaatgacacatctccctcagagggcactaacctgaatgcccctaacagtctgggggtgagcgctctgtgcgcaatctgcggagacagggccaccggcaaacactacggggcttcctcttgtgatggatgcaagggctttttcagacgcagcgtccggaaaaatcatatgtactcatgccgatttagtaggcagtgcgtggtggacaaggacaagagaaaccagtgccgctattgtcggctgaaaaagtgcttcagggcaggaatgaaaaaggaagccgtccagaatgagagagatcgaatttccacacggcgcagctcttacgaagacagctccctgccatcaatcaacgctctgctgcaggcagaggtgctgagtaggcagatcactagccccgtgtctgggattaacggcgatatcagagccaagaaaattgcatccatcgctgacgtctgcgaaagcatgaaggagcagctgctggtgctggtggagtgggccaaatacatccctgcattttgcgaactgccactggacgatcaggtcgctctgctgcgggcccacgcaggagagcatctgctgctgggcgctacccgaaggtcaatggtgttcaaggacgtgctgctgctggggaatgactatattgtccccagacactgccctgaactggccgagatgagtcgcgtgtctatccggatcctggatgaactggtgctgccattccaggagctgcagattgacgataacgaatacgcatacctgaaggctatcatctttttcgaccccgacgccaaaggactgtccgatcctggcaagattaaaaggctgagaagccaggtccaggtgagcctggaggactatatcaatgaccgacagtacgattcccgggggcgctttggagaactgctgctgctgctgccaacactgcagtcaattacctggcagatgatcgagcagatccagttcattaagctgttcggcatggcaaaaatcgacaacctgctgcaggagatgctgctgtga

SEQ ID NO: 1052 - RNA, 1128 nt, synthetic construct
  misc_feature 1..1128: note = CDS (opt28) from Homo sapiens__NP_000448.3__HNF4A(1-375)(K300R)
  source 1..1128: mol_type = other RNA
atgcggctgagcaagaccctggtggacatggatatggcagactactccgccgctctggatccagcatatacaactctggagttcgaaaacgtccaggtgctgaccatgggaaatgacacatctccctcagagggcactaacctgaatgcccctaacagtctgggggtgagcgctctgtgcgcaatctgcggagacagggccaccggcaaacactacggggcttcctcttgtgatggatgcaagggctttttcagacgcagcgtccggaaaaatcatatgtactcatgccgatttagtaggcagtgcgtggtggacaaggacaagagaaaccagtgccgctattgtcggctgaaaaagtgcttcagggcaggaatgaaaaaggaagccgtccagaatgagagagatcgaatttccacacggcgcagctcttacgaagacagctccctgccatcaatcaacgctctgctgcaggcagaggtgctgagtaggcagatcactagccccgtgtctgggattaacggcgatatcagagccaagaaaattgcatccatcgctgacgtctgcgaaagcatgaaggagcagctgctggtgctggtggagtgggccaaatacatccctgcattttgcgaactgccactggacgatcaggtcgctctgctgcgggcccacgcaggagagcatctgctgctgggcgctaccaagcgatcaatggtgttcaaggacgtgctgctgctggggaatgactatattgtccccaggcactgccctgaactggccgagatgagtagagtgtctatccgcatcctggatgaactggtgctgccattccaggagctgcagattgacgataacgaatacgcatacctgaaagctatcatctttttcgaccccgacgcccggggactgtccgatcctggcaagattaaaaggctgagaagccaggtccaggtgagcctggaggactatatcaatgaccgacagtacgattcccgggggcgctttggagaactgctgctgctgctgccaacactgcagtcaattacctggcagatgatcgagcagatccagttcattaagctgttcggcatggcaaaaatcgacaacctgctgcaggagatgctgctgtga

SEQ ID NO: 1053 - RNA, 1128 nt, synthetic construct
  misc_feature 1..1128: note = CDS (opt28) from Homo sapiens__NP_000448.3__HNF4A(1-375)(K300R_K307R_K309R)
  source 1..1128: mol_type = other RNA
atgcggctgagcaagaccctggtggacatggatatggcagactactccgccgctctggatccagcatatacaactctggagttcgaaaacgtccaggtgctgaccatgggaaatgacacatctccctcagagggcactaacctgaatgcccctaacagtctgggggtgagcgctctgtgcgcaatctgcggagacagggccaccggcaaacactacggggcttcctcttgtgatggatgcaagggctttttcagacgcagcgtccggaaaaatcatatgtactcatgccgatttagtaggcagtgcgtggtggacaaggacaagagaaaccagtgccgctattgtcggctgaaaaagtgcttcagggcaggaatgaaaaaggaagccgtccagaatgagagagatcgaatttccacacggcgcagctcttacgaagacagctccctgccatcaatcaacgctctgctgcaggcagaggtgctgagtaggcagatcactagccccgtgtctgggattaacggcgatatcagagccaagaaaattgcatccatcgctgacgtctgcgaaagcatgaaggagcagctgctggtgctggtggagtgggccaaatacatccctgcattttgcgaactgccactggacgatcaggtcgctctgctgcgggcccacgcaggagagcatctgctgctgggcgctaccaagcgatcaatggtgttcaaggacgtgctgctgctggggaatgactatattgtccccaggcactgccctgaactggccgagatgagtagagtgtctatccgcatcctggatgaactggtgctgccattccaggagctgcagattgacgataacgaatacgcatacctgaaagctatcatctttttcgaccccgacgcccggggactgtccgatcctggcaggattagacgactgcggagccaggtccaggtgagcctggaggactatatcaatgaccgccagtacgattccagggggagatttggagaactgctgctgctgctgccaacactgcagtcaattacctggcagatgatcgagcagatccagttcattaagctgttcggcatggcaaaaatcgacaacctgctgcaggagatgctgctgtga

SEQ ID NO: 1054 - RNA, 1128 nt, synthetic construct
  misc_feature 1..1128: note = CDS (opt28) from Homo sapiens__NP_000448.3__HNF4A(1-375)(K447R_K470R)
  source 1..1128: mol_type = other RNA
atgcggctgagcaagaccctggtggacatggatatggcagactactccgccgctctggatccagcatatacaactctggagttcgaaaacgtccaggtgctgaccatgggaaatgacacatctccctcagagggcactaacctgaatgcccctaacagtctgggggtgagcgctctgtgcgcaatctgcggagacagggccaccggcaaacactacggggcttcctcttgtgatggatgcaagggctttttcagacgcagcgtccggaaaaatcatatgtactcatgccgatttagtaggcagtgcgtggtggacaaggacaagagaaaccagtgccgctattgtcggctgaaaaagtgcttcagggcaggaatgaaaaaggaagccgtccagaatgagagagatcgaatttccacacggcgcagctcttacgaagacagctccctgccatcaatcaacgctctgctgcaggcagaggtgctgagtaggcagatcactagccccgtgtctgggattaacggcgatatcagagccaagaaaattgcatccatcgctgacgtctgcgaaagcatgaaggagcagctgctggtgctggtggagtgggccaaatacatccctgcattttgcgaactgccactggacgatcaggtcgctctgctgcgggcccacgcaggagagcatctgctgctgggcgctaccaagcgatcaatggtgttcaaggacgtgctgctgctggggaatgactatattgtccccaggcactgccctgaactggccgagatgagtagagtgtctatccgcatcctggatgaactggtgctgccattccaggagctgcagattgacgataacgaatacgcatacctgaaagctatcatctttttcgaccccgacgccaagggactgtccgatcctggcaaaattaagcggctgaggagccaggtccaggtgagcctggaggactatatcaatgacagacagtacgattcccgagggcggtttggagaactgctgctgctgctgccaacactgcagtcaattacctggcagatgatcgagcagatccagttcattaaactgttcggcatggcaaagatcgacaacctgctgcaggagatgctgctgtga

SEQ ID NO: 1055 - RNA, 1128 nt, synthetic construct; identical to SEQ ID NO: 1054
  misc_feature 1..1128: note = CDS (opt28) from Homo sapiens__NP_000448.3__HNF4A(1-375)(K458R)
  source 1..1128: mol_type = other RNA

SEQ ID NO: 1056 - RNA, 1128 nt, synthetic construct
  misc_feature 1..1128: note = CDS (opt28) from Homo sapiens__NP_000448.3__HNF4A(1-375)(K106R_K108R_K126R_K127R)
  source 1..1128: mol_type = other RNA
atgcggctgagcaagaccctggtggacatggatatggcagactactccgccgctctggatccagcatatacaactctggagttcgaaaacgtccaggtgctgaccatgggaaatgacacatctccctcagagggcactaacctgaatgcccctaacagtctgggggtgagcgctctgtgcgcaatctgcggagacagggccaccggcaaacactacggggcttcctcttgtgatggatgcaagggctttttcagacgcagcgtccggaaaaatcatatgtactcatgccgatttagtaggcagtgcgtggtggacagagaccgccggaaccagtgcaggtattgtagactgaagaagtgcttccgagcaggaatgcggcgcgaagccgtccagaatgagagggatagaatttccacacggcgaagctcttacgaagacagctccctgccatcaatcaacgctctgctgcaggcagaggtgctgagtaggcagatcactagccccgtgtctgggattaacggcgatatcagagccaaaaagattgcatccatcgctgacgtctgcgaaagcatgaaagagcagctgctggtgctggtggagtgggccaagtacatccctgcattttgcgaactgccactggacgatcaggtcgctctgctgcgcgcccacgcaggagagcatctgctgctgggcgctaccaagcggtcaatggtgttcaaagacgtgctgctgctggggaatgactatattgtccccaggcactgccctgaactggccgagatgagtagagtgtctatccgaatcctggatgaactggtgctgccattccaggagctgcagattgacgataacgaatacgcatacctgaaggctatcatctttttcgaccccgacgccaaaggactgtccgatcctggcaagattaagcggctgcgcagccaggtccaggtgagcctggaggactatatcaatgacaggcagtacgattccagagggcggtttggagaactgctgctgctgctgccaacactgcagtcaattacctggcagatgatcgagcagatccagttcattaaactgttcggcatggcaaagatcgacaacctgctgcaggagatgctgctgtga

SEQ ID NO: 1057 - RNA, 1128 nt, synthetic construct
  misc_feature 1..1128: note = CDS (opt28) from Homo sapiens__NP_000448.3__HNF4A(1-375)(E285Q)
  source 1..1128: mol_type = other RNA
atgcggctgagcaagaccctggtggacatggatatggcagactactccgccgctctggatccagcatatacaactctggagttcgaaaacgtccaggtgctgaccatgggaaatgacacatctccctcagagggcactaacctgaatgcccctaacagtctgggggtgagcgctctgtgcgcaatctgcggagacagggccaccggcaaacactacggggcttcctcttgtgatggatgcaagggctttttcagacgcagcgtccggaaaaatcatatgtactcatgccgatttagtaggcagtgcgtggtggacaaggacaagagaaaccagtgccgctattgtcggctgaaaaagtgcttcagggcaggaatgaaaaaggaagccgtccagaatgagagagatcgaatttccacacggcgcagctcttacgaagacagctccctgccatcaatcaacgctctgctgcaggcagaggtgctgagtaggcagatcactagccccgtgtctgggattaacggcgatatcagagccaagaaaattgcatccatcgctgacgtctgcgaaagcatgaaggagcagctgctggtgctggtggagtgggccaaatacatccctgcattttgcgaactgccactggacgatcaggtcgctctgctgcgggcccacgcaggagagcatctgctgctgggcgctaccaagcgatcaatggtgttcaaggacgtgctgctgctggggaatgactatattgtccccaggcactgccctgaactggccgagatgagtagagtgtctatccgcatcctggatgaactggtgctgccattccaggagctgcagattgacgataaccagtacgcatacctgaaagctatcatctttttcgaccccgacgccaagggactgtccgatcctggcaaaattaagcggctgaggagccaggtccaggtgagcctggaagactatatcaatgacagacagtacgattcccgagggcggtttggagagctgctgctgctgctgccaacactgcagtcaattacctggcagatgatcgaacagatccagttcattaaactgttcggcatggcaaagatcgacaacctgctgcaggagatgctgctgtga

SEQ ID NO: 1058 - RNA, 1128 nt, synthetic construct
  misc_feature 1..1128: note = CDS (opt28) from Homo sapiens__NP_000448.3__HNF4A(1-375)(T166E)
  source 1..1128: mol_type = other RNA
atgcggctgagcaagaccctggtggacatggatatggcagactactccgccgctctggatccagcatatacaactctggagttcgaaaacgtccaggtgctgaccatgggaaatgacacatctccctcagagggcactaacctgaatgcccctaacagtctgggggtgagcgctctgtgcgcaatctgcggagacagggccaccggcaaacactacggggcttcctcttgtgatggatgcaagggctttttcagacgcagcgtccggaaaaatcatatgtactcatgccgatttagtaggcagtgcgtggtggacaaggacaagagaaaccagtgccgctattgtcggctgaaaaagtgcttcagggcaggaatgaaaaaggaagccgtccagaatgagagagatcgaatttccacacggcgcagctcttacgaagacagctccctgccatcaatcaacgctctgctgcaggcagaggtgctgagtaggcagatcgaaagccccgtgtctgggattaacggcgatatcagagccaagaaaattgcatccatcgctgacgtctgcgagagcatgaaggagcagctgctggtgctggtggaatgggccaaatacatccctgcattttgcgagctgccactggacgatcaggtcgctctgctgcgggcccacgcaggagaacatctgctgctgggcgctactaagcgatcaatggtgttcaaggacgtgctgctgctggggaatgactatattgtccccaggcactgccctgagctggccgaaatgagtagagtgtctatccgcatcctggatgagctggtgctgccattccaggaactgcagattgacgataacgagtacgcatacctgaaagctatcatctttttcgaccccgacgccaagggactgtccgatcctggcaaaattaagcggctgaggagccaggtccaggtgagcctggaagactatatcaatgacagacagtacgattcccgagggcggtttggagagctgctgctgctgctgccaaccctgcagtcaattacatggcagatgatcgagcagatccagttcattaaactgttcggcatggcaaagatcgacaacctgctgcaggaaatgctgctgtga

SEQ ID NO: 1059 - RNA, 1128 nt, synthetic construct
  misc_feature 1..1128: note = CDS (opt28) from Homo sapiens__NP_000448.3__HNF4A(1-375)(S148A)
  source 1..1128: mol_type = other RNA
atgcggctgagcaagaccctggtggacatggatatggcagactactccgccgctctggatccagcatatacaactctggagttcgaaaacgtccaggtgctgaccatgggaaatgacacatctccctcagagggcactaacctgaatgcccctaacagtctgggggtgagcgctctgtgcgcaatctgcggagacagggccaccggcaaacactacggggcttcctcttgtgatggatgcaagggctttttcagacgcagcgtccggaaaaatcatatgtactcatgccgatttagtaggcagtgcgtggtggacaaggacaagagaaaccagtgccgctattgtcggctgaaaaagtgcttcagggcaggaatgaaaaaggaagccgtccagaatgagagagatcgaatttccacacggcgcagctcttacgaagacagcgctctgccatccatcaacgcactgctgcaggccgaggtgctgtcaaggcagatcaccagtcccgtgagcgggattaacggcgatatcagagcaaagaaaattgcttctatcgccgacgtctgcgaatccatgaaggagcagctgctggtgctggtggagtgggcaaaatacatccctgctttttgcgaactgccactggacgatcaggtcgccctgctgcgggcacacgctggagagcatctgctgctgggcgccactaagcgaagcatggtgttcaaggacgtgctgctgctggggaatgactatattgtccccaggcactgccctgaactggcagagatgtcaagagtgagtatccgcatcctggatgaactggtgctgccattccaggagctgcagattgacgataacgaatacgcttacctgaaagccatcatctttttcgaccccgacgcaaagggactgtctgatcctggcaaaattaagcggctgaggtcccaggtccaggtgagcctggaggactatatcaatgacagacagtacgatagccgagggcggtttggagaactgctgctgctgctgccaacactgcagtccattacctggcagatgatcgagcagatccagttcattaaactgttcggcatggccaagatcgacaacctgctgcaggagatgctgctgtga

SEQ ID NO: 1060 - RNA, 1128 nt, synthetic construct
  misc_feature 1..1128: note = CDS (opt28) from Homo sapiens__NP_000448.3__HNF4A(1-375)(S148E)
  source 1..1128: mol_type = other RNA
atgcggctgagcaagaccctggtggacatggatatggcagactactccgccgctctggatccagcatatacaactctggagttcgaaaacgtccaggtgctgaccatgggaaatgacacatctccctcagagggcactaacctgaatgcccctaacagtctgggggtgagcgctctgtgcgcaatctgcggagacagggccaccggcaaacactacggggcttcctcttgtgatggatgcaagggctttttcagacgcagcgtccggaaaaatcatatgtactcatgccgatttagtaggcagtgcgtggtggacaaggacaagagaaaccagtgccgctattgtcggctgaaaaagtgcttcagggcaggaatgaaaaaggaagccgtccagaatgagagagatcgaatttccacacggcgcagctcttacgaagacagcgagctgccatccatcaacgctctgctgcaggcagaagtgctgtcaaggcagatcaccagtcccgtgagcgggattaacggcgatatcagagccaagaaaattgcatctatcgctgacgtctgcgagtccatgaaggagcagctgctggtgctggtggaatgggccaaatacatccctgcattttgcgagctgccactggacgatcaggtcgctctgctgcgggcccacgcaggagaacatctgctgctgggcgctactaagcgaagcatggtgttcaaggacgtgctgctgctggggaatgactatattgtccccaggcactgccctgagctggccgaaatgtcaagagtgagtatccgcatcctggatgagctggtgctgccattccaggaactgcagattgacgataacgagtacgcatacctgaaagctatcatctttttcgaccccgacgccaagggactgtctgatcctggcaaaattaagcggctgaggtcccaggtccaggtgagcctggaagactatatcaatgacagacagtacgatagccgagggcggtttggagagctgctgctgctgctgccaacactgcagtccattacctggcagatgatcgagcagatccagttcattaaactgttcggcatggcaaagatcgacaacctgctgcaggaaatgctgctgtga

SEQ ID NO: 1061 - RNA, 1128 nt, synthetic construct
  misc_feature 1..1128: note = CDS (opt28) from Homo sapiens__NP_000448.3__HNF4A(1-375)(S183A)
  source 1..1128: mol_type = other RNA
atgcggctgagcaagaccctggtggacatggatatggcagactactccgccgctctggatccagcatatacaactctggagttcgaaaacgtccaggtgctgaccatgggaaatgacacatctccctcagagggcactaacctgaatgcccctaacagtctgggggtgagcgctctgtgcgcaatctgcggagacagggccaccggcaaacactacggggcttcctcttgtgatggatgcaagggctttttcagacgcagcgtccggaaaaatcatatgtactcatgccgatttagtaggcagtgcgtggtggacaaggacaagagaaaccagtgccgctattgtcggctgaaaaagtgcttcagggcaggaatgaaaaaggaagccgtccagaatgagagagatcgaatttccacacggcgcagctcttacgaagacagctccctgccatcaatcaacgctctgctgcaggcagaggtgctgagtaggcagatcactagccccgtgtctgggattaacggcgatatcagagccaagaaaattgcagctatcgccgacgtctgcgaatccatgaaggagcagctgctggtgctggtggagtgggcaaaatacatccctgctttttgcgaactgccactggacgatcaggtcgccctgctgcgggcacacgctggagagcatctgctgctgggcgccaccaagcgaagcatggtgttcaaggacgtgctgctgctggggaatgactatattgtccccaggcactgccctgaactggcagagatgtcaagagtgagtatccgcatcctggatgaactggtgctgccattccaggagctgcagattgacgataacgaatacgcttacctgaaagccatcatctttttcgaccccgacgcaaagggactgtctgatcctggcaaaattaagcggctgaggtcccaggtccaggtgagcctggaggactatatcaatgacagacagtacgatagccgagggcggtttggagaactgctgctgctgctgccaacactgcagtccattacctggcagatgatcgagcagatccagttcattaaactgttcggcatggccaagatcgacaacctgctgcaggagatgctgctgtga

SEQ ID NO: 1062 - RNA, 1128 nt, synthetic construct
  misc_feature 1..1128: note = CDS (opt28) from Homo sapiens__NP_000448.3__HNF4A(1-375)(S183E)
  source 1..1128: mol_type = other RNA
atgcggctgagcaagaccctggtggacatggatatggcagactactccgccgctctggatccagcatatacaactctggagttcgaaaacgtccaggtgctgaccatgggaaatgacacatctccctcagagggcactaacctgaatgcccctaacagtctgggggtgagcgctctgtgcgcaatctgcggagacagggccaccggcaaacactacggggcttcctcttgtgatggatgcaagggctttttcagacgcagcgtccggaaaaatcatatgtactcatgccgatttagtaggcagtgcgtggtggacaaggacaagagaaaccagtgccgctattgtcggctgaaaaagtgcttcagggcaggaatgaaaaaggaagccgtccagaatgagagagatcgaatttccacacggcgcagctcttacgaagacagctccctgccatcaatcaacgctctgctgcaggcagaggtgctgagtaggcagatcactagccccgtgtctgggattaacggcgatatcagagccaagaaaattgcagaaatcgctgacgtctgcgagtccatgaaggagcagctgctggtgctggtggaatgggccaaatacatccctgcattttgcgagctgccactggacgatcaggtcgctctgctgcgggcccacgcaggagaacatctgctgctgggcgctaccaagcgaagcatggtgttcaaggacgtgctgctgctggggaatgactatattgtccccaggcactgccctgagctggccgaaatgtcaagagtgagtatccgcatcctggatgagctggtgctgccattccaggaactgcagattgacgataacgagtacgcatacctgaaagctatcatctttttcgaccccgacgccaagggactgtctgatcctggcaaaattaagcggctgaggtcccaggtccaggtgagcctggaagactatatcaatgacagacagtacgatagccgagggcggtttggagagctgctgctgctgctgccaacactgcagtccattacctggcagatgatcgagcagatccagttcattaaactgttcggcatggcaaagatcgacaacctgctgcaggaaatgctgctgtga

SEQ ID NO: 1063 - RNA, 1128 nt, synthetic construct; identical to SEQ ID NO: 1054
  misc_feature 1..1128: note = CDS (opt28) from Homo sapiens__NP_000448.3__HNF4A(1-375)(S461A)
  source 1..1128: mol_type = other RNA

SEQ ID NO: 1064 - RNA, 1128 nt, synthetic construct; identical to SEQ ID NO: 1054
  misc_feature 1..1128: note = CDS (opt28) from Homo sapiens__NP_000448.3__HNF4A(1-375)(S461E)
  source 1..1128: mol_type = other RNA

SEQ ID NO: 1065 - RNA, 1128 nt, synthetic construct
  misc_feature 1..1128: note = CDS (opt28) from Homo sapiens__NP_000448.3__HNF4A(1-375)(S142A_S143A_S313A)
  source 1..1128: mol_type = other RNA
atgcggctgagcaagaccctggtggacatggatatggcagactactccgccgctctggatccagcatatacaactctggagttcgaaaacgtccaggtgctgaccatgggaaatgacacatctccctcagagggcactaacctgaatgcccctaacagtctgggggtgagcgctctgtgcgcaatctgcggagacagggccaccggcaaacactacggggcttcctcttgtgatggatgcaagggctttttcagacgcagcgtccggaaaaatcatatgtactcatgccgatttagtaggcagtgcgtggtggacaaggacaagagaaaccagtgccgctattgtcggctgaaaaagtgcttcagggcaggaatgaaaaaggaagccgtccagaatgagagagatcgaatttccacacggcgcgctgcatacgaagacagctctctgccaagcatcaacgccctgctgcaggcagaggtgctgtccaggcagatcacttcacccgtgagtgggattaacggcgatatcagagctaagaaaattgccagcatcgcagacgtctgcgaatctatgaaggagcagctgctggtgctggtggagtgggctaaatacatccctgccttttgcgaactgccactggacgatcaggtcgcactgctgcgggctcacgccggagagcatctgctgctgggcgcaaccaagcgatccatggtgttcaaggacgtgctgctgctggggaatgactatattgtccccaggcactgccctgaactggctgagatgagcagagtgtcaatccgcatcctggatgaactggtgctgccattccaggagctgcagattgacgataacgaatacgcctacctgaaagcaatcatctttttcgaccccgacgccaagggactgagtgatcctggcaaaattaagcggctgagggctcaggtccaggtgtctctggaggactatatcaatgacagacagtacgattcccgagggcggtttggagaactgctgctgctgctgccaacactgcagagcattacctggcagatgatcgagcagatccagttcattaaactgttcggcatggcaaagatcgacaacctgctgcaggagatgctgctgtga

SEQ ID NO: 1066 - RNA, 1128 nt, synthetic construct; identical to SEQ ID NO: 1065
  misc_feature 1..1128: note = CDS (opt28) from Homo sapiens__NP_000448.3__HNF4A(1-375)(S142A_S143A_S313A_K458R)
  source 1..1128: mol_type = other RNA

SEQ ID NO: 1067 - RNA, 1128 nt, synthetic construct
  misc_feature 1..1128: note = CDS (opt28) from Homo sapiens__NP_000448.3__HNF4A(1-375)(S142A_S143A_S167A_S313A_ S378A_T429A_T432A_S436A_K458R)
  source 1..1128: mol_type = other RNA
atgcggctgagcaagaccctggtggacatggatatggcagactactccgccgctctggatccagcatatacaactctggagttcgaaaacgtccaggtgctgaccatgggaaatgacacatctccctcagagggcactaacctgaatgcccctaacagtctgggggtgagcgctctgtgcgcaatctgcggagacagggccaccggcaaacactacggggcttcctcttgtgatggatgcaagggctttttcagacgcagcgtccggaaaaatcatatgtactcatgccgatttagtaggcagtgcgtggtggacaaggacaagagaaaccagtgccgctattgtcggctgaaaaagtgcttcagggcaggaatgaaaaaggaagccgtccagaatgagagagatcgaatttccacacggcgcgctgcatacgaagacagctctctgccaagcatcaacgccctgctgcaggcagaggtgctgtccaggcagatcactgctcccgtgtcagggattaacggcgatatcagagccaagaaaattgcaagtatcgctgacgtctgcgaaagcatgaaggagcagctgctggtgctggtggagtgggccaaatacatccctgcattttgcgaactgccactggacgatcaggtcgctctgctgcgggcccacgcaggagagcatctgctgctgggcgctaccaagcgatctatggtgttcaaggacgtgctgctgctggggaatgactatattgtccccaggcactgccctgaactggccgagatgtccagagtgagcatccgcatcctggatgaactggtgctgccattccaggagctgcagattgacgataacgaatacgcatacctgaaagccatcatctttttcgaccccgacgctaagggactgtcagatcctggcaaaattaagcggctgagggcacaggtccaggtgagtctggaggactatatcaatgacagacagtacgattctcgagggcggtttggagaactgctgctgctgctgccaacactgcagtccattacctggcagatgatcgagcagatccagttcattaaactgttcggcatggccaagatcgacaacctgctgcaggagatgctgctgtga

SEQ ID NO: 1068 - RNA, 1128 nt, synthetic construct
  misc_feature 1..1128: note = CDS (opt28) from Homo sapiens__NP_000448.3__HNF4A(1-375)(S142A_S143A_S148A_S167A_ S313A_S378A_T429A_T432A_S436A_K458R)
  source 1..1128: mol_type = other RNA
atgcggctgagcaagaccctggtggacatggatatggcagactactccgccgctctggatccagcatatacaactctggagttcgaaaacgtccaggtgctgaccatgggaaatgacacatctccctcagagggcactaacctgaatgcccctaacagtctgggggtgagcgctctgtgcgcaatctgcggagacagggccaccggcaaacactacggggcttcctcttgtgatggatgcaagggctttttcagacgcagcgtccggaaaaatcatatgtactcatgccgatttagtaggcagtgcgtggtggacaaggacaagagaaaccagtgccgctattgtcggctgaaaaagtgcttcagggcaggaatgaaaaaggaagccgtccagaatgagagagatcgaatttccacacggcgcgctgcatacgaagacagcgccctgccatctatcaacgcactgctgcaggctgaggtgctgagcaggcagatcactgcccccgtgtccgggattaacggcgatatcagagcaaagaaaattgcttcaatcgccgacgtctgcgaaagtatgaaggagcagctgctggtgctggtggagtgggcaaaatacatccctgctttttgcgaactgccactggacgatcaggtcgccctgctgcgggcacacgctggagagcatctgctgctgggcgccaccaagcgaagcatggtgttcaaggacgtgctgctgctggggaatgactatattgtccccaggcactgccctgaactggcagagatgtctagagtgtccatccgcatcctggatgaactggtgctgccattccaggagctgcagattgacgataacgaatacgcctacctgaaagctatcatctttttcgaccccgacgcaaagggactgagcgatcctggcaaaattaagcggctgagggcccaggtccaggtgtcactggaggactatatcaatgacagacagtacgatagtcgagggcggtttggagaactgctgctgctgctgccaacactgcagtctattacctggcagatgatcgagcagatccagttcattaaactgttcggcatggcaaagatcgacaacctgctgcaggagatgctgctgtga

SEQ ID NO: 1069 - RNA, 1128 nt, synthetic construct
  misc_feature 1..1128: note = CDS (opt28) from Homo sapiens__NP_000448.3__HNF4A(1-375)(K106R_K108R_K126R_K127R_ S142A_S143A_S148A_S167A_S313A_S378A_T429A_T432A_S436A_K458R )
  source 1..1128: mol_type = other RNA
atgcggctgagcaagaccctggtggacatggatatggcagactactccgccgctctggatccagcatatacaactctggagttcgaaaacgtccaggtgctgaccatgggaaatgacacatctccctcagagggcactaacctgaatgcccctaacagtctgggggtgagcgctctgtgcgcaatctgcggagacagggccaccggcaaacactacggggcttcctcttgtgatggatgcaagggctttttcagacgcagcgtccggaaaaatcatatgtactcatgccgatttagtaggcagtgcgtggtggacagagaccgccggaaccagtgcaggtattgtagactgaagaagtgcttccgagcaggaatgcggcgcgaagccgtccagaatgagagggatagaatttccacacggcgagctgcatacgaagacagcgccctgccatctatcaacgcactgctgcaggctgaggtgctgagcaggcagatcactgcccccgtgtccgggattaacggcgatatcagagctaaaaagattgcatcaatcgccgacgtctgcgaaagtatgaaagagcagctgctggtgctggtggagtgggcaaagtacatccctgctttttgcgaactgccactggacgatcaggtcgccctgctgcgcgcacacgctggagagcatctgctgctgggcgccaccaagcggagcatggtgttcaaagacgtgctgctgctggggaatgactatattgtccccaggcactgccctgaactggcagagatgtctagagtgtccatccgaatcctggatgaactggtgctgccattccaggagctgcagattgacgataacgaatacgcctacctgaaggctatcatctttttcgaccccgacgcaaaaggactgagcgatcctggcaagattaagcggctgcgcgcccaggtccaggtgtcactggaggactatatcaatgacaggcagtacgatagtagagggcggtttggagaactgctgctgctgctgccaacactgcagtctattacctggcagatgatcgagcagatccagttcattaaactgttcggcatggcaaagatcgacaacctgctgcaggagatgctgctgtga

SEQ ID NO: 1070 - RNA, 1128 nt, synthetic construct
  misc_feature 1..1128: note = CDS (opt28) from Homo sapiens__NP_000448.3__HNF4A(1-375)(S142A_S143A_S148A_T166A_ S167A_S313A_S378A_T429A_T432A_S436A_K458R)
  source 1..1128: mol_type = other RNA
atgcggctgagcaagaccctggtggacatggatatggcagactactccgccgctctggatccagcatatacaactctggagttcgaaaacgtccaggtgctgaccatgggaaatgacacatctccctcagagggcactaacctgaatgcccctaacagtctgggggtgagcgctctgtgcgcaatctgcggagacagggccaccggcaaacactacggggcttcctcttgtgatggatgcaagggctttttcagacgcagcgtccggaaaaatcatatgtactcatgccgatttagtaggcagtgcgtggtggacaaggacaagagaaaccagtgccgctattgtcggctgaaaaagtgcttcagggcaggaatgaaaaaggaagccgtccagaatgagagagatcgaatttccacacggcgcgctgcatacgaagacagcgccctgccatctatcaacgcactgctgcaggctgaggtgctgagcaggcagatcgccgcacccgtgtccgggattaacggcgatatcagagctaagaaaattgcctcaatcgcagacgtctgcgaaagtatgaaggagcagctgctggtgctggtggagtgggctaaatacatccctgccttttgcgaactgccactggacgatcaggtcgcactgctgcgggctcacgccggagagcatctgctgctgggcgcaactaagcgaagcatggtgttcaaggacgtgctgctgctggggaatgactatattgtccccaggcactgccctgaactggccgagatgtctagagtgtccatccgcatcctggatgaactggtgctgccattccaggagctgcagattgacgataacgaatacgcttacctgaaagcaatcatctttttcgaccccgacgccaagggactgagcgatcctggcaaaattaagcggctgagggcacaggtccaggtgtcactggaggactatatcaatgacagacagtacgatagtcgagggcggtttggagaactgctgctgctgctgccaaccctgcagtctattacatggcagatgatcgagcagatccagttcattaaactgttcggcatggctaagatcgacaacctgctgcaggagatgctgctgtga

SEQ ID NO: 1071 - RNA, 1128 nt, synthetic construct
  misc_feature 1..1128: note = CDS (opt28) from Homo sapiens__NP_000448.3__HNF4A(1-375)(S87A_S142A_S143A_S148A_T 166A_S167A_S313A_S378A_T429A_T432A_S436A_K458R)
  source 1..1128: mol_type = other RNA
atgcggctgagcaagaccctggtggacatggatatggcagactactccgccgctctggatccagcatatacaactctggagttcgaaaacgtccaggtgctgaccatgggaaatgacacatctccctcagagggcactaacctgaatgcccctaacagtctgggggtgagcgctctgtgcgcaatctgcggagacagggccaccggcaaacactacggggcttcctcttgtgatggatgcaagggctttttcagacgcgcagtccggaaaaatcatatgtacagctgccgattttcaaggcagtgcgtggtggacaaggacaagagaaaccagtgccgctattgtcggctgaaaaagtgcttcagggccggaatgaaaaaggaagctgtccagaatgagagagatcgaattagtacacggcgcgcagcctacgaagactccgcactgccaagcatcaacgctctgctgcaggccgaggtgctgtctaggcagatcgcagctcccgtgagcgggattaacggcgatatcagagccaagaaaattgcatccatcgctgacgtctgcgaatcaatgaaggagcagctgctggtgctggtggagtgggccaaatacatccctgcattttgcgaactgccactggacgatcaggtcgctctgctgcgggcccacgcaggagagcatctgctgctgggcgccactaagcgaagtatggtgttcaaggacgtgctgctgctggggaatgactatattgtccccaggcactgccctgaactggctgagatgagcagagtgtctatccgcatcctggatgaactggtgctgccattccaggagctgcagattgacgataacgaatacgcatacctgaaagccatcatctttttcgaccccgacgcaaagggactgtccgatcctggcaaaattaagcggctgagggctcaggtccaggtgagcctggaggactatatcaatgacagacagtacgattcacgagggcggtttggagaactgctgctgctgctgccaaccctgcagagtattacatggcagatgatcgagcagatccagttcattaaactgttcggcatggcaaagatcgacaacctgctgcaggagatgctgctgtga

SEQ ID NO: 1072 - RNA, 1128 nt, synthetic construct
  misc_feature 1..1128: note = CDS (opt28) from Homo sapiens__NP_000448.3__HNF4A(1-375)(S87A_K106R_K108R_K126R_K 127R_S142A_S143A_S148A_T166A_S167A_S313A_S378A_T429A_T432A_ S436A_K458R)
  source 1..1128: mol_type = other RNA
atgcggctgagcaagaccctggtggacatggatatggcagactactccgccgctctggatccagcatatacaactctggagttcgaaaacgtccaggtgctgaccatgggaaatgacacatctccctcagagggcactaacctgaatgcccctaacagtctgggggtgagcgctctgtgcgcaatctgcggagacagggccaccggcaaacactacggggcttcctcttgtgatggatgcaagggctttttcagacgcgcagtccggaaaaatcatatgtacagctgccgattttcaaggcagtgcgtggtggacagagaccgccggaaccagtgcaggtattgtagactgaagaagtgcttccgagccggaatgcggcgcgaagctgtccagaatgagagggatagaattagtacacggcgagcagcctacgaagactccgcactgccaagcatcaacgctctgctgcaggccgaggtgctgtctaggcagatcgcagctcccgtgagcgggattaacggcgatatcagagccaaaaagattgcatccatcgctgacgtctgcgaatcaatgaaagagcagctgctggtgctggtggagtgggccaagtacatccctgcattttgcgaactgccactggacgatcaggtcgctctgctgcgcgcccacgcaggagagcatctgctgctgggcgccactaagcggagtatggtgttcaaagacgtgctgctgctggggaatgactatattgtccccaggcactgccctgaactggctgagatgagcagagtgtctatccgaatcctggatgaactggtgctgccattccaggagctgcagattgacgataacgaatacgcatacctgaaggccatcatctttttcgaccccgacgcaaaaggactgtccgatcctggcaagattaagcggctgcgcgctcaggtccaggtgagcctggaggactatatcaatgacaggcagtacgattcaagagggcggtttggagaactgctgctgctgctgccaaccctgcagagtattacatggcagatgatcgagcagatccagttcattaaactgttcggcatggcaaagatcgacaacctgctgcaggagatgctgctgtga

SEQ ID NO: 1073 - RNA, 1128 nt, synthetic construct
  misc_feature 1..1128: note = CDS (opt28) from Homo sapiens__NP_000448.3__HNF4A(1-375)(S87A_K106R_K108R_K126R_K 127R)
  source 1..1128: mol_type = other RNA
atgcggctgagcaagaccctggtggacatggatatggcagactactccgccgctctggatccagcatatacaactctggagttcgaaaacgtccaggtgctgaccatgggaaatgacacatctccctcagagggcactaacctgaatgcccctaacagtctgggggtgagcgctctgtgcgcaatctgcggagacagggccaccggcaaacactacggggcttcctcttgtgatggatgcaagggctttttcagacgcgcagtccggaaaaatcatatgtacagctgccgattttcaaggcagtgcgtggtggacagagaccgccggaaccagtgcaggtattgtagactgaagaagtgcttccgagccggaatgcggcgcgaagctgtccagaatgagagggatagaattagtacacggcgatccagctacgaagactctagcctgccatccatcaacgcactgctgcaggccgaggtgctgtcaaggcagatcaccagtcccgtgagcgggattaacggcgatatcagagctaaaaagattgcatctatcgccgacgtctgcgaatccatgaaagagcagctgctggtgctggtggagtgggcaaagtacatccctgctttttgcgaactgccactggacgatcaggtcgccctgctgcgcgcacacgctggagagcatctgctgctgggcgccactaagcggagcatggtgttcaaagacgtgctgctgctggggaatgactatattgtccccaggcactgccctgaactggcagagatgtcaagagtgagtatccgaatcctggatgaactggtgctgccattccaggagctgcagattgacgataacgaatacgcttacctgaaggccatcatctttttcgaccccgacgcaaaaggactgtctgatcctggcaagattaagcggctgcgctcccaggtccaggtgagcctggaggactatatcaatgacaggcagtacgatagcagagggcggtttggagaactgctgctgctgctgccaacactgcagtccattacctggcagatgatcgagcagatccagttcattaaactgttcggcatggccaagatcgacaacctgctgcaggagatgctgctgtga

SEQ ID NO: 1074 - RNA, 1128 nt, synthetic construct; identical to SEQ ID NO: 1072
  misc_feature 1..1128: note = CDS (opt28) from Homo sapiens__NP_000448.3__HNF4A(1-375)(S87A_K106R_K108R_K126R_K 127R_S142A_S143A_S148A_T166A_S167A_S313A_S378A_T429A_T432A_ S436A_K458R_S461A)
  source 1..1128: mol_type = other RNA

SEQ ID NO: 1075 - RNA, 1128 nt, synthetic construct; identical to SEQ ID NO: 1072
  misc_feature 1..1128: note = CDS (opt28) from Homo sapiens__NP_000448.3__HNF4A(1-375)(S87A_K106R_K108R_K126R_K 127R_S142A_S143A_S148A_T166A_S167A_S313A_S378A_T429A_T432A_ S436A_K458R_S461E)
  source 1..1128: mol_type = other RNA

SEQ ID NO: 1076 - RNA, 1128 nt, synthetic construct
  misc_feature 1..1128: note = CDS (opt28) from Homo sapiens__NP_000448.3__HNF4A(1-375)(S87A_K106R_K108R_K126R_K 127R_S142A_S143A_S148E_T166A_S167E_S313A_S378E_T429E_T432E_ S436E_K458R_S461E)
  source 1..1128: mol_type = other RNA
atgcggctgagcaagaccctggtggacatggatatggcagactactccgccgctctggatccagcatatacaactctggagttcgaaaacgtccaggtgctgaccatgggaaatgacacatctccctcagagggcactaacctgaatgcccctaacagtctgggggtgagcgctctgtgcgcaatctgcggagacagggccaccggcaaacactacggggcttcctcttgtgatggatgcaagggctttttcagacgcgcagtccggaaaaatcatatgtacagctgccgattttcaaggcagtgcgtggtggacagagaccgccggaaccagtgcaggtattgtagactgaagaagtgcttccgagccggaatgcggcgcgaagctgtccagaatgagagggatagaattagtacacggcgagcagcctacgaagactccgagctgccaagcatcaacgcactgctgcaggctgaagtgctgtctaggcagatcgccgagcccgtgagcgggattaacggcgatatcagagctaaaaagattgcatccatcgccgacgtctgcgagtcaatgaaagaacagctgctggtgctggtggagtgggcaaagtacatccctgctttttgcgaactgccactggacgatcaggtcgccctgctgcgcgcacacgctggagagcatctgctgctgggcgccactaagcggagtatggtgttcaaagacgtgctgctgctggggaatgactatattgtccccaggcactgccctgaactggcagagatgagcagagtgtctatccgaatcctggatgaactggtgctgccattccaggagctgcagattgacgataacgaatacgcctacctgaaggctatcatctttttcgaccccgacgcaaaaggactgtccgatcctggcaagattaagcggctgcgcgcccaggtccaggtgagcctggaggactatatcaatgacaggcagtacgattcaagagggcggtttggagagctgctgctgctgctgccaaccctgcagagtattacatggcagatgatcgaacagatccagttcattaaactgttcggcatggcaaagatcgacaacctgctgcaggagatgctgctgtga

SEQ ID NO: 1077 - RNA, 1128 nt, synthetic construct
  misc_feature 1..1128: note = CDS (opt28) from Homo sapiens__NP_000448.3__HNF4A(1-375)(S87A_K106R_K108R_K126R_K 127R_S142A_S143A_S148A_T166A_S167A_K179R_K180R_S313A_S378A_ T429A_T432A_S436A_K458R_S461E)
  source 1..1128: mol_type = other RNA
atgcggctgagcaagaccctggtggacatggatatggcagactactccgccgctctggatccagcatatacaactctggagttcgaaaacgtccaggtgctgaccatgggaaatgacacatctccctcagagggcactaacctgaatgcccctaacagtctgggggtgagcgctctgtgcgcaatctgcggagacagggccaccggcaaacactacggggcttcctcttgtgatggatgcaagggctttttcagacgcgcagtccggaaaaatcatatgtacagctgccgattttcaaggcagtgcgtggtggacagagaccgccggaaccagtgcaggtattgtagactgaagaagtgcttccgagccggaatgcggcgcgaagctgtccagaatgagagggatagaattagtacacggcgagcagcctacgaagactccgcactgccaagcatcaacgctctgctgcaggccgaggtgctgtctaggcagatcgcagctcccgtgagcgggattaacggcgatatcagagcccgccggattgcatccatcgctgacgtctgcgaatcaatgaaagagcagctgctggtgctggtggagtgggccaagtacatccctgcattttgcgaactgccactggacgatcaggtcgctctgctgagggcccacgcaggagagcatctgctgctgggcgccactaaaagaagtatggtgttcaaggacgtgctgctgctggggaatgactatattgtcccccgacactgccctgaactggctgagatgagccgggtgtctatccgcatcctggatgaactggtgctgccattccaggagctgcagattgacgataacgaatacgcatacctgaaggccatcatctttttcgaccccgacgcaaaaggactgtccgatcctggcaagattaaaaggctgagagctcaggtccaggtgagcctggaggactatatcaatgaccggcagtacgattcacgcgggaggtttggagaactgctgctgctgctgccaaccctgcagagtattacatggcagatgatcgagcagatccagttcattaagctgttcggcatggcaaagatcgacaacctgctgcaggagatgctgctgtga

SEQ ID NO: 1078 - RNA, 1128 nt, synthetic construct
  misc_feature 1..1128: note = CDS (opt28) from Homo sapiens__NP_000448.3__HNF4A(1-375)(S87A_K106R_K108R_K126R_K 127R_S142A_S143A_S148A_T166A_S167A_K300R_K307R_K309R_S313A_ S378A_T429A_T432A_S436A_K458R_S461E)
  source 1..1128: mol_type = other RNA
atgcggctgagcaagaccctggtggacatggatatggcagactactccgccgctctggatccagcatatacaactctggagttcgaaaacgtccaggtgctgaccatgggaaatgacacatctccctcagagggcactaacctgaatgcccctaacagtctgggggtgagcgctctgtgcgcaatctgcggagacagggccaccggcaaacactacggggcttcctcttgtgatggatgcaagggctttttcagacgcgcagtccggaaaaatcatatgtacagctgccgattttcaaggcagtgcgtggtggacagagaccgccggaaccagtgcaggtattgtagactgaagaagtgcttccgagccggaatgcggcgcgaagctgtccagaatgagagggatagaattagtacacggcgagcagcctacgaagactccgcactgccaagcatcaacgctctgctgcaggccgaggtgctgtctaggcagatcgcagctcccgtgagcgggattaacggcgatatcagagccaaaaagattgcatccatcgctgacgtctgcgaatcaatgaaagagcagctgctggtgctggtggagtgggccaagtacatccctgcattttgcgaactgccactggacgatcaggtcgctctgctgcgcgcccacgcaggagagcatctgctgctgggcgccactaagcggagtatggtgttcaaagacgtgctgctgctggggaatgactatattgtccccaggcactgccctgaactggctgagatgagcagagtgtctatccgaatcctggatgaactggtgctgccattccaggagctgcagattgacgataacgaatacgcatacctgaaggccatcatctttttcgaccccgacgcacggggactgtccgatcctggccgcattaggagactgcgggctcaggtccaggtgagcctggaggactatatcaatgaccgccagtacgattcaagggggagatttggagaactgctgctgctgctgccaaccctgcagagtattacatggcagatgatcgagcagatccagttcattaaactgttcggcatggcaaagatcgacaacctgctgcaggagatgctgctgtga

SEQ ID NO: 1079 - RNA, 1128 nt, synthetic construct; identical to SEQ ID NO: 1072
  misc_feature 1..1128: note = CDS (opt28) from Homo sapiens__NP_000448.3__HNF4A(1-375)(S87A_K106R_K108R_K126R_K 127R_S142A_S143A_S148A_T166A_S167A_S313A_S378A_T429A_T432A_ S436A_K447R_K458R_S461E_K470R)
  source 1..1128: mol_type = other RNA

SEQ ID NO: 1080 - RNA, 1128 nt, synthetic construct
  misc_feature 1..1128: note = CDS (opt28) from Homo sapiens__NP_000448.3__HNF4A(1-375)(S87A_K106R_K108R_K126R_K 127R_S142A_S143A_S148A_T166A_S167A_K179R_K180R_K234R_K300R_ K307R_K309R_S313A_S378A_T429A_T432A_S436A_K447R_K458R_S461E _K470R)
  source 1..1128: mol_type = other RNA
atgcggctgagcaagaccctggtggacatggatatggcagactactccgccgctctggatccagcatatacaactctggagttcgaaaacgtccaggtgctgaccatgggaaatgacacatctccctcagagggcactaacctgaatgcccctaacagtctgggggtgagcgctctgtgcgcaatctgcggagacagggccaccggcaaacactacggggcttcctcttgtgatggatgcaagggctttttcagacgcgcagtccggaaaaatcatatgtacagctgccgattttcaaggcagtgcgtggtggacagagaccgccggaaccagtgcaggtattgtagactgaagaagtgcttccgagccggaatgcggcgcgaagctgtccagaatgagagggatagaattagtacacggcgagcagcctacgaagactccgcactgccaagcatcaacgctctgctgcaggccgaggtgctgtctaggcagatcgcagctcccgtgagcgggattaacggcgatatcagagcccgccggattgcatccatcgctgacgtctgcgaatcaatgaaagagcagctgctggtgctggtggagtgggccaagtacatccctgcattttgcgaactgccactggacgatcaggtcgctctgctgagggcccacgcaggagagcatctgctgctgggcgccactagacgaagtatggtgttcaaagacgtgctgctgctggggaatgactatattgtcccccggcactgccctgaactggctgagatgagccgcgtgtctatcaggatcctggatgaactggtgctgccattccaggagctgcagattgacgataacgaatacgcatacctgaaggccatcatctttttcgaccccgacgcaagaggactgtccgatcctggccggattcgcaggctgagagctcaggtccaggtgagcctggaggactatatcaatgaccgacagtacgattcacgggggaggtttggagaactgctgctgctgctgccaaccctgcagagtattacatggcagatgatcgagcagatccagttcattaagctgttcggcatggcaaaaatcgacaacctgctgcaggagatgctgctgtga

SEQ ID NO: 1081 - RNA, 1128 nt, synthetic construct
  misc_feature 1..1128: note = CDS (opt28) from Homo sapiens__NP_000448.3__HNF4A(1-375)(S87A_S95A_S99A_K106R_K10 8R_K126R_K127R_S142A_S143A_S148A_T166A_S167A_S313A_S378A_T4 29A_T432A_S436A_K458R_S461E)
  source 1..1128: mol_type = other RNA
atgcggctgagcaagaccctggtggacatggatatggcagactactccgccgctctggatccagcatatacaactctggagttcgaaaacgtccaggtgctgaccatgggaaatgacacatctccctcagagggcactaacctgaatgcccctaacagtctgggggtgagcgctctgtgcgcaatctgcggagacagggccaccggcaaacactacggggcttcctcttgtgatggatgcaagggctttttcagacgcgcagtccggaaaaatcatatgtacgcctgccgatttgctaggcagtgcgtggtggacagagaccgccggaaccagtgcaggtattgtagactgaagaagtgcttccgagcaggaatgcggcgcgaagccgtccagaatgagagggatagaattagcacacggcgagcagcttacgaagactcagccctgccaagtatcaacgcactgctgcaggctgaggtgctgtccaggcagatcgccgcacccgtgagcgggattaacggcgatatcagagctaaaaagattgcctctatcgcagacgtctgcgaaagcatgaaagagcagctgctggtgctggtggagtgggctaagtacatccctgccttttgcgaactgccactggacgatcaggtcgcactgctgcgcgcccacgctggagagcatctgctgctgggcgcaactaagcggtccatggtgttcaaagacgtgctgctgctggggaatgactatattgtccccaggcactgccctgaactggccgagatgtcaagagtgagtatccgaatcctggatgaactggtgctgccattccaggagctgcagattgacgataacgaatacgcatacctgaaggctatcatctttttcgaccccgacgcaaaaggactgagcgatcctggcaagattaagcggctgcgcgcccaggtccaggtgtctctggaggactatatcaatgacaggcagtacgattccagagggcggtttggagaactgctgctgctgctgccaaccctgcagagcattacatggcagatgatcgagcagatccagttcattaaactgttcggcatggctaagatcgacaacctgctgcaggagatgctgctgtga

SEQ ID NO: 1082 - RNA, 1128 nt, synthetic construct
  misc_feature 1..1128: note = CDS (opt28) from Homo sapiens__NP_000448.3__HNF4A(1-375)(S87A_K106R_K108R_K126R_K 127R_S138A_T139A_S142A_S143A_S148A_T166A_S167A_S313A_S378A_ T429A_T432A_S436A_K458R_S461E)
  source 1..1128: mol_type = other RNA
atgcggctgagcaagaccctggtggacatggatatggcagactactccgccgctctggatccagcatatacaactctggagttcgaaaacgtccaggtgctgaccatgggaaatgacacatctccctcagagggcactaacctgaatgcccctaacagtctgggggtgagcgctctgtgcgcaatctgcggagacagggccaccggcaaacactacggggcttcctcttgtgatggatgcaagggctttttcagacgcgcagtccggaaaaatcatatgtacagctgccgattttcaaggcagtgcgtggtggacagagaccgccggaaccagtgcaggtattgtagactgaagaagtgcttccgagccggaatgcggcgcgaagctgtccagaatgagagggatagaattgcagcccggcgagcagcttacgaagacagtgccctgccatccatcaacgcactgctgcaggctgaggtgctgagcaggcagatcgccgcacccgtgtctgggattaacggcgatatcagagctaaaaagattgccagcatcgcagacgtctgcgaatccatgaaagagcagctgctggtgctggtggagtgggctaagtacatccctgccttttgcgaactgccactggacgatcaggtcgcactgctgcgcgcccacgctggagagcatctgctgctgggcgcaacaaagcggtcaatggtgttcaaagacgtgctgctgctggggaatgactatattgtccccaggcactgccctgaactggccgagatgagtagagtgagcatccgaatcctggatgaactggtgctgccattccaggagctgcagattgacgataacgaatacgcatacctgaaggctatcatctttttcgaccccgacgcaaaaggactgtctgatcctggcaagattaagcggctgcgcgcccaggtccaggtgtccctggaggactatatcaatgacaggcagtacgatagcagagggcggtttggagaactgctgctgctgctgccaactctgcagtcaattacctggcagatgatcgagcagatccagttcattaaactgttcggcatggctaagatcgacaacctgctgcaggagatgctgctgtga

SEQ ID NO: 1083 - RNA, 1128 nt, synthetic construct
  misc_feature 1..1128: note = CDS (opt28) from Homo sapiens__NP_000448.3__HNF4A(1-375)(S87A_S95A_S99A_K106R_K10 8R_K126R_K127R_S138A_T139A_S142A_S143A_S148A_T166A_S167A_S3 13A_S378A_T429A_T432A_S436A_K458R_S461E)
  source 1..1128: mol_type = other RNA
atgcggctgagcaagaccctggtggacatggatatggcagactactccgccgctctggatccagcatatacaactctggagttcgaaaacgtccaggtgctgaccatgggaaatgacacatctccctcagagggcactaacctgaatgcccctaacagtctgggggtgagcgctctgtgcgcaatctgcggagacagggccaccggcaaacactacggggcttcctcttgtgatggatgcaagggctttttcagacgcgcagtccggaaaaatcatatgtacgcctgccgatttgctaggcagtgcgtggtggacagagaccgccggaaccagtgcaggtattgtagactgaagaagtgcttccgagcaggaatgcggcgcgaagccgtccagaatgagagggatagaattgcagctcggcgagccgcatacgaagacagcgctctgccatcaatcaacgccctgctgcaggcagaggtgctgagtaggcagatcgctgcccccgtgtccgggattaacggcgatatcagagctaaaaagattgcaagcatcgccgacgtctgcgaatctatgaaagagcagctgctggtgctggtggagtgggcaaagtacatccctgccttttgcgaactgccactggacgatcaggtcgctctgctgcgcgcacacgccggagagcatctgctgctgggcgcaacaaagcggagcatggtgttcaaagacgtgctgctgctggggaatgactatattgtccccaggcactgccctgaactggctgagatgtccagagtgtcaatccgaatcctggatgaactggtgctgccattccaggagctgcagattgacgataacgaatacgcatacctgaaggccatcatctttttcgaccccgacgctaaaggactgagtgatcctggcaagattaagcggctgcgcgcacaggtccaggtgagcctggaggactatatcaatgacaggcagtacgattctagagggcggtttggagaactgctgctgctgctgccaactctgcagtccattacctggcagatgatcgagcagatccagttcattaaactgttcggcatggccaagatcgacaacctgctgcaggagatgctgctgtga

SEQ ID NO: 1084 - RNA, 1128 nt, synthetic construct
  misc_feature 1..1128: note = CDS (opt29) from Homo sapiens__NP_000448.3__HNF4A(1-375)
  source 1..1128: mol_type = other RNA
atgagactgagcaagaccctggtggacatggacatggccgactactctgccgccctggaccctgcctacaccaccctggagttcgaaaacgtgcaagtgctgaccatgggcaacgacaccagccctagcgagggcaccaacctgaacgcccctaatagcctgggagtgtccgccctgtgtgccatctgtggcgatagagccaccggcaagcactacggcgccagctcttgtgatggctgcaagggcttcttccggcggagcgtgcggaagaaccacatgtacagctgccggttcagccggcagtgcgtggtggacaaggataagcggaaccagtgccggtactgcagactgaagaagtgcttcagagccggcatgaagaaagaagccgtgcagaacgagcgggaccggatcagcaccagaagaagcagctacgaggacagcagcctgcccagcatcaacgccctgctgcaggccgaggtgctgagcagacagatcaccagcccagtgtccggcatcaacggcgacatccgggccaagaagatcgccagcattgccgacgtgtgcgagagcatgaaggaacagctgctggtgctggtggaatgggccaagtacatccccgccttttgcgagctgcccctggacgatcaggtggccctgctgagagcacacgccggcgaacatctgctgctgggagccaccaagcggagcatggtgttcaaggacgtgctgctgctgggcaacgactacatcgtgcccagacactgccctgagctggccgagatgagccgggtgtccatcagaatcctggacgaactggtgctgccgtttcaggaactgcagatcgacgacaacgagtacgcctacctgaaggccatcatctttttcgaccccgacgccaagggcctgagcgaccctggcaagatcaagcggctgagaagccaggtgcaagtgtccctggaagattacatcaacgaccggcagtacgacagccggggcagatttggcgaactgctcctgctgctgcccaccctgcagagcatcacctggcagatgatcgagcagatccagttcatcaagctgttcggcatggccaagatcgacaatctgctgcaggaaatgctgctctga

SEQ ID NO: 1085 - RNA, 1128 nt, synthetic construct
  misc_feature 1..1128: note = CDS (opt29) from Homo sapiens__NP_000448.3__HNF4A(1-375)(S313A)
  source 1..1128: mol_type = other RNA
atgagactgagcaagaccctggtggacatggacatggccgactactctgccgccctggaccctgcctacaccaccctggagttcgaaaacgtgcaagtgctgaccatgggcaacgacaccagccctagcgagggcaccaacctgaacgcccctaatagcctgggagtgtccgccctgtgtgccatctgtggcgatagagccaccggcaagcactacggcgccagctcttgtgatggctgcaagggcttcttccggcggagcgtgcggaagaaccacatgtacagctgccggttcagccggcagtgcgtggtggacaaggataagcggaaccagtgccggtactgcagactgaagaagtgcttcagagccggcatgaagaaagaagccgtgcagaacgagcgggaccggatcagcaccagaagaagcagctacgaggacagcagcctgcccagcatcaacgccctgctgcaggccgaggtgctgagcagacagatcaccagcccagtgtccggcatcaacggcgacatccgggccaagaagatcgccagcattgccgacgtgtgcgagagcatgaaggaacagctgctggtgctggtggaatgggccaagtacatccccgccttttgcgagctgcccctggacgatcaggtggccctgctgagagcacacgccggcgaacatctgctgctgggagccaccaagcggagcatggtgttcaaggacgtgctgctgctgggcaacgactacatcgtgcccagacactgccctgagctggccgagatgagccgggtgtccatcagaatcctggacgaactggtgctgccgtttcaggaactgcagatcgacgacaacgagtacgcctacctgaaggccatcatctttttcgaccccgacgccaagggcctgagcgaccctggcaagatcaagcggctgagagcccaggtgcaagtgtccctggaagattacatcaacgaccggcagtacgacagccggggcagatttggcgaactgctcctgctgctgcccaccctgcagagcatcacctggcagatgatcgagcagatccagttcatcaagctgttcggcatggccaagatcgacaatctgctgcaggaaatgctgctctga

SEQ ID NO: 1086 - RNA, 1128 nt, synthetic construct
  misc_feature 1..1128: note = CDS (opt29) from Homo sapiens__NP_000448.3__HNF4A(1-375)(S313E)
  source 1..1128: mol_type = other RNA
atgagactgagcaagaccctggtggacatggacatggccgactactctgccgccctggaccctgcctacaccaccctggagttcgaaaacgtgcaagtgctgaccatgggcaacgacaccagccctagcgagggcaccaacctgaacgcccctaatagcctgggagtgtccgccctgtgtgccatctgtggcgatagagccaccggcaagcactacggcgccagctcttgtgatggctgcaagggcttcttccggcggagcgtgcggaagaaccacatgtacagctgccggttcagccggcagtgcgtggtggacaaggataagcggaaccagtgccggtactgcagactgaagaagtgcttcagagccggcatgaagaaagaagccgtgcagaacgagcgggaccggatcagcaccagaagaagcagctacgaggacagcagcctgcccagcatcaacgccctgctgcaggccgaggtgctgagcagacagatcaccagcccagtgtccggcatcaacggcgacatccgggccaagaagatcgccagcattgccgacgtgtgcgagagcatgaaggaacagctgctggtgctggtggaatgggccaagtacatccccgccttttgcgagctgcccctggacgatcaggtggccctgctgagagcacacgccggcgaacatctgctgctgggagccaccaagcggagcatggtgttcaaggacgtgctgctgctgggcaacgactacatcgtgcccagacactgccctgagctggccgagatgagccgggtgtccatcagaatcctggacgaactggtgctgccgtttcaggaactgcagatcgacgacaacgagtacgcctacctgaaggccatcatctttttcgaccccgacgccaagggcctgagcgaccctggcaagatcaagcggctgagagaacaggtgcaagtgtccctggaagattacatcaacgaccggcagtacgacagccggggcagatttggcgaactgctcctgctgctgcccaccctgcagagcatcacctggcagatgatcgagcagatccagttcatcaagctgttcggcatggccaagatcgacaatctgctgcaggaaatgctgctctga

SEQ ID NO: 1087 - RNA, 1128 nt, synthetic construct
  misc_feature 1..1128: note = CDS (opt29) from Homo sapiens__NP_000448.3__HNF4A(1-375)(S142A_S143A)
  source 1..1128: mol_type = other RNA
atgagactgagcaagaccctggtggacatggacatggccgactactctgccgccctggaccctgcctacaccaccctggagttcgaaaacgtgcaagtgctgaccatgggcaacgacaccagccctagcgagggcaccaacctgaacgcccctaatagcctgggagtgtccgccctgtgtgccatctgtggcgatagagccaccggcaagcactacggcgccagctcttgtgatggctgcaagggcttcttccggcggagcgtgcggaagaaccacatgtacagctgccggttcagccggcagtgcgtggtggacaaggataagcggaaccagtgccggtactgcagactgaagaagtgcttcagagccggcatgaagaaagaagccgtgcagaacgagcgggaccggatcagcaccagaagagccgcctacgaggacagcagcctgcccagcatcaacgccctgctgcaggccgaggtgctgagcagacagatcaccagcccagtgtccggcatcaacggcgacatccgggccaagaagatcgccagcattgccgacgtgtgcgagagcatgaaggaacagctgctggtgctggtggaatgggccaagtacatccccgccttttgcgagctgcccctggacgatcaggtggccctgctgagagcacacgccggcgaacatctgctgctgggagccaccaagcggagcatggtgttcaaggacgtgctgctgctgggcaacgactacatcgtgcccagacactgccctgagctggccgagatgagccgggtgtccatcagaatcctggacgaactggtgctgccgtttcaggaactgcagatcgacgacaacgagtacgcctacctgaaggccatcatctttttcgaccccgacgccaagggcctgagcgaccctggcaagatcaagcggctgagaagccaggtgcaagtgtccctggaagattacatcaacgaccggcagtacgacagccggggcagatttggcgaactgctcctgctgctgcccaccctgcagagcatcacctggcagatgatcgagcagatccagttcatcaagctgttcggcatggccaagatcgacaatctgctgcaggaaatgctgctctga

SEQ ID NO: 1088 - RNA, 1128 nt, synthetic construct
  misc_feature 1..1128: note = CDS (opt29) from Homo sapiens__NP_000448.3__HNF4A(1-375)(S142E_S143E)
  source 1..1128: mol_type = other RNA
atgagactgagcaagaccctggtggacatggacatggccgactactctgccgccctggaccctgcctacaccaccctggagttcgaaaacgtgcaagtgctgaccatgggcaacgacaccagccctagcgagggcaccaacctgaacgcccctaatagcctgggagtgtccgccctgtgtgccatctgtggcgatagagccaccggcaagcactacggcgccagctcttgtgatggctgcaagggcttcttccggcggagcgtgcggaagaaccacatgtacagctgccggttcagccggcagtgcgtggtggacaaggataagcggaaccagtgccggtactgcagactgaagaagtgcttcagagccggcatgaagaaagaagccgtgcagaacgagcgggaccggatcagcaccagaagagaagagtacgaggacagcagcctgcccagcatcaacgccctgctgcaggccgaggtgctgagcagacagatcaccagcccagtgtccggcatcaacggcgacatccgggccaagaagatcgccagcattgccgacgtgtgcgagagcatgaaggaacagctgctggtgctggtggaatgggccaagtacatccccgccttttgcgagctgcccctggacgatcaggtggccctgctgagagcacacgccggcgaacatctgctgctgggagccaccaagcggagcatggtgttcaaggacgtgctgctgctgggcaacgactacatcgtgcccagacactgccctgagctggccgagatgagccgggtgtccatcagaatcctggacgaactggtgctgccgtttcaggaactgcagatcgacgacaacgagtacgcctacctgaaggccatcatctttttcgaccccgacgccaagggcctgagcgaccctggcaagatcaagcggctgagaagccaggtgcaagtgtccctggaagattacatcaacgaccggcagtacgacagccggggcagatttggcgaactgctcctgctgctgcccaccctgcagagcatcacctggcagatgatcgagcagatccagttcatcaagctgttcggcatggccaagatcgacaatctgctgcaggaaatgctgctctga

SEQ ID NO: 1089 - RNA, 1128 nt, synthetic construct
  misc_feature 1..1128: note = CDS (opt29) from Homo sapiens__NP_000448.3__HNF4A(1-375)(S143A)
  source 1..1128: mol_type = other RNA
atgagactgagcaagaccctggtggacatggacatggccgactactctgccgccctggaccctgcctacaccaccctggagttcgaaaacgtgcaagtgctgaccatgggcaacgacaccagccctagcgagggcaccaacctgaacgcccctaatagcctgggagtgtccgccctgtgtgccatctgtggcgatagagccaccggcaagcactacggcgccagctcttgtgatggctgcaagggcttcttccggcggagcgtgcggaagaaccacatgtacagctgccggttcagccggcagtgcgtggtggacaaggataagcggaaccagtgccggtactgcagactgaagaagtgcttcagagccggcatgaagaaagaagccgtgcagaacgagcgggaccggatcagcaccagaagaagcgcctacgaggacagcagcctgcccagcatcaacgccctgctgcaggccgaggtgctgagcagacagatcaccagcccagtgtccggcatcaacggcgacatccgggccaagaagatcgccagcattgccgacgtgtgcgagagcatgaaggaacagctgctggtgctggtggaatgggccaagtacatccccgccttttgcgagctgcccctggacgatcaggtggccctgctgagagcacacgccggcgaacatctgctgctgggagccaccaagcggagcatggtgttcaaggacgtgctgctgctgggcaacgactacatcgtgcccagacactgccctgagctggccgagatgagccgggtgtccatcagaatcctggacgaactggtgctgccgtttcaggaactgcagatcgacgacaacgagtacgcctacctgaaggccatcatctttttcgaccccgacgccaagggcctgagcgaccctggcaagatcaagcggctgagaagccaggtgcaagtgtccctggaagattacatcaacgaccggcagtacgacagccggggcagatttggcgaactgctcctgctgctgcccaccctgcagagcatcacctggcagatgatcgagcagatccagttcatcaagctgttcggcatggccaagatcgacaatctgctgcaggaaatgctgctctga

SEQ ID NO: 1090 - RNA, 1128 nt, synthetic construct
  misc_feature 1..1128: note = CDS (opt29) from Homo sapiens__NP_000448.3__HNF4A(1-375)(T166A)
  source 1..1128: mol_type = other RNA
atgagactgagcaagaccctggtggacatggacatggccgactactctgccgccctggaccctgcctacaccaccctggagttcgaaaacgtgcaagtgctgaccatgggcaacgacaccagccctagcgagggcaccaacctgaacgcccctaatagcctgggagtgtccgccctgtgtgccatctgtggcgatagagccaccggcaagcactacggcgccagctcttgtgatggctgcaagggcttcttccggcggagcgtgcggaagaaccacatgtacagctgccggttcagccggcagtgcgtggtggacaaggataagcggaaccagtgccggtactgcagactgaagaagtgcttcagagccggcatgaagaaagaagccgtgcagaacgagcgggaccggatcagcaccagaagaagcagctacgaggacagcagcctgcccagcatcaacgccctgctgcaggccgaggtgctgagcagacagatcgccagcccagtgtccggcatcaacggcgacatccgggccaagaagatcgccagcattgccgacgtgtgcgagagcatgaaggaacagctgctggtgctggtggaatgggccaagtacatccccgccttttgcgagctgcccctggacgatcaggtggccctgctgagagcacacgccggcgaacatctgctgctgggagccaccaagcggagcatggtgttcaaggacgtgctgctgctgggcaacgactacatcgtgcccagacactgccctgagctggccgagatgagccgggtgtccatcagaatcctggacgaactggtgctgccgtttcaggaactgcagatcgacgacaacgagtacgcctacctgaaggccatcatctttttcgaccccgacgccaagggcctgagcgaccctggcaagatcaagcggctgagaagccaggtgcaagtgtccctggaagattacatcaacgaccggcagtacgacagccggggcagatttggcgaactgctcctgctgctgcccaccctgcagagcatcacctggcagatgatcgagcagatccagttcatcaagctgttcggcatggccaagatcgacaatctgctgcaggaaatgctgctctga

SEQ ID NO: 1091 - RNA, 1128 nt, synthetic construct
  misc_feature 1..1128: note = CDS (opt29) from Homo sapiens__NP_000448.3__HNF4A(1-375)(S167E)
  source 1..1128: mol_type = other RNA
atgagactgagcaagaccctggtggacatggacatggccgactactctgccgccctggaccctgcctacaccaccctggagttcgaaaacgtgcaagtgctgaccatgggcaacgacaccagccctagcgagggcaccaacctgaacgcccctaatagcctgggagtgtccgccctgtgtgccatctgtggcgatagagccaccggcaagcactacggcgccagctcttgtgatggctgcaagggcttcttccggcggagcgtgcggaagaaccacatgtacagctgccggttcagccggcagtgcgtggtggacaaggataagcggaaccagtgccggtactgcagactgaagaagtgcttcagagccggcatgaagaaagaagccgtgcagaacgagcgggaccggatcagcaccagaagaagcagctacgaggacagcagcctgcccagcatcaacgccctgctgcaggccgaggtgctgagcagacagatcaccgaaccagtgtccggcatcaacggcgacatccgggccaagaagatcgccagcattgccgacgtgtgcgagagcatgaaggaacagctgctggtgctggtggaatgggccaagtacatccccgccttttgcgagctgcccctggacgatcaggtggccctgctgagagcacacgccggcgaacatctgctgctgggagccaccaagcggagcatggtgttcaaggacgtgctgctgctgggcaacgactacatcgtgcccagacactgccctgagctggccgagatgagccgggtgtccatcagaatcctggacgaactggtgctgccgtttcaggaactgcagatcgacgacaacgagtacgcctacctgaaggccatcatctttttcgaccccgacgccaagggcctgagcgaccctggcaagatcaagcggctgagaagccaggtgcaagtgtccctggaagattacatcaacgaccggcagtacgacagccggggcagatttggcgaactgctcctgctgctgcccaccctgcagagcatcacctggcagatgatcgagcagatccagttcatcaagctgttcggcatggccaagatcgacaatctgctgcaggaaatgctgctctga

SEQ ID NO: 1092 - RNA, 1128 nt, synthetic construct
  misc_feature 1..1128: note = CDS (opt29) from Homo sapiens__NP_000448.3__HNF4A(1-375)(S167A)
  source 1..1128: mol_type = other RNA
atgagactgagcaagaccctggtggacatggacatggccgactactctgccgccctggaccctgcctacaccaccctggagttcgaaaacgtgcaagtgctgaccatgggcaacgacaccagccctagcgagggcaccaacctgaacgcccctaatagcctgggagtgtccgccctgtgtgccatctgtggcgatagagccaccggcaagcactacggcgccagctcttgtgatggctgcaagggcttcttccggcggagcgtgcggaagaaccacatgtacagctgccggttcagccggcagtgcgtggtggacaaggataagcggaaccagtgccggtactgcagactgaagaagtgcttcagagccggcatgaagaaagaagccgtgcagaacgagcgggaccggatcagcaccagaagaagcagctacgaggacagcagcctgcccagcatcaacgccctgctgcaggccgaggtgctgagcagacagatcaccgccccagtgtccggcatcaacggcgacatccgggccaagaagatcgccagcattgccgacgtgtgcgagagcatgaaggaacagctgctggtgctggtggaatgggccaagtacatccccgccttttgcgagctgcccctggacgatcaggtggccctgctgagagcacacgccggcgaacatctgctgctgggagccaccaagcggagcatggtgttcaaggacgtgctgctgctgggcaacgactacatcgtgcccagacactgccctgagctggccgagatgagccgggtgtccatcagaatcctggacgaactggtgctgccgtttcaggaactgcagatcgacgacaacgagtacgcctacctgaaggccatcatctttttcgaccccgacgccaagggcctgagcgaccctggcaagatcaagcggctgagaagccaggtgcaagtgtccctggaagattacatcaacgaccggcagtacgacagccggggcagatttggcgaactgctcctgctgctgcccaccctgcagagcatcacctggcagatgatcgagcagatccagttcatcaagctgttcggcatggccaagatcgacaatctgctgcaggaaatgctgctctga

SEQ ID NO: 1093 - RNA, 1128 nt, synthetic construct; identical to SEQ ID NO: 1092
  misc_feature 1..1128: note = CDS (opt29) from Homo sapiens__NP_000448.3__HNF4A(1-375)(S167A_S378A_T429A_T432A_ S436A)
  source 1..1128: mol_type = other RNA

SEQ ID NO: 1094 - RNA, 1128 nt, synthetic construct; identical to SEQ ID NO: 1091
  misc_feature 1..1128: note = CDS (opt29) from Homo sapiens__NP_000448.3__HNF4A(1-375)(S167E_S378E_T429E_T432E_ S436E)
  source 1..1128: mol_type = other RNA

SEQ ID NO: 1095 - RNA, 1128 nt, synthetic construct
  misc_feature 1..1128: note = CDS (opt29) from Homo sapiens__NP_000448.3__HNF4A(1-375)(S87A)
  source 1..1128: mol_type = other RNA
atgagactgagcaagaccctggtggacatggacatggccgactactctgccgccctggaccctgcctacaccaccctggagttcgaaaacgtgcaagtgctgaccatgggcaacgacaccagccctagcgagggcaccaacctgaacgcccctaatagcctgggagtgtccgccctgtgtgccatctgtggcgatagagccaccggcaagcactacggcgccagctcttgtgatggctgcaagggcttcttccggcgggccgtgcggaagaaccacatgtacagctgccggttcagccggcagtgcgtggtggacaaggataagcggaaccagtgccggtactgcagactgaagaagtgcttcagagccggcatgaagaaagaagccgtgcagaacgagcgggaccggatcagcaccagaagaagcagctacgaggacagcagcctgcccagcatcaacgccctgctgcaggccgaggtgctgagcagacagatcaccagcccagtgtccggcatcaacggcgacatccgggccaagaagatcgccagcattgccgacgtgtgcgagagcatgaaggaacagctgctggtgctggtggaatgggccaagtacatccccgccttttgcgagctgcccctggacgatcaggtggccctgctgagagcacacgccggcgaacatctgctgctgggagccaccaagcggagcatggtgttcaaggacgtgctgctgctgggcaacgactacatcgtgcccagacactgccctgagctggccgagatgagccgggtgtccatcagaatcctggacgaactggtgctgccgtttcaggaactgcagatcgacgacaacgagtacgcctacctgaaggccatcatctttttcgaccccgacgccaagggcctgagcgaccctggcaagatcaagcggctgagaagccaggtgcaagtgtccctggaagattacatcaacgaccggcagtacgacagccggggcagatttggcgaactgctcctgctgctgcccaccctgcagagcatcacctggcagatgatcgagcagatccagttcatcaagctgttcggcatggccaagatcgacaatctgctgcaggaaatgctgctctga

SEQ ID NO: 1096 - RNA, 1128 nt, synthetic construct
  misc_feature 1..1128: note = CDS (opt29) from Homo sapiens__NP_000448.3__HNF4A(1-375)(S87E)
  source 1..1128: mol_type = other RNA
atgagactgagcaagaccctggtggacatggacatggccgactactctgccgccctggaccctgcctacaccaccctggagttcgaaaacgtgcaagtgctgaccatgggcaacgacaccagccctagcgagggcaccaacctgaacgcccctaatagcctgggagtgtccgccctgtgtgccatctgtggcgatagagccaccggcaagcactacggcgccagctcttgtgatggctgcaagggcttcttccggcgggaggtgcggaagaaccacatgtacagctgccggttcagccggcagtgcgtggtggacaaggataagcggaaccagtgccggtactgcagactgaagaagtgcttcagagccggcatgaagaaagaagccgtgcagaacgagcgggaccggatcagcaccagaagaagcagctacgaggacagcagcctgcccagcatcaacgccctgctgcaggccgaggtgctgagcagacagatcaccagcccagtgtccggcatcaacggcgacatccgggccaagaagatcgccagcattgccgacgtgtgcgagagcatgaaggaacagctgctggtgctggtggaatgggccaagtacatccccgccttttgcgagctgcccctggacgatcaggtggccctgctgagagcacacgccggcgaacatctgctgctgggagccaccaagcggagcatggtgttcaaggacgtgctgctgctgggcaacgactacatcgtgcccagacactgccctgagctggccgagatgagccgggtgtccatcagaatcctggacgaactggtgctgccgtttcaggaactgcagatcgacgacaacgagtacgcctacctgaaggccatcatctttttcgaccccgacgccaagggcctgagcgaccctggcaagatcaagcggctgagaagccaggtgcaagtgtccctggaagattacatcaacgaccggcagtacgacagccggggcagatttggcgaactgctcctgctgctgcccaccctgcagagcatcacctggcagatgatcgagcagatccagttcatcaagctgttcggcatggccaagatcgacaatctgctgcaggaaatgctgctctga

SEQ ID NO: 1097 - RNA, 1128 nt, synthetic construct
  misc_feature 1..1128: note = CDS (opt29) from Homo sapiens__NP_000448.3__HNF4A(1-375)(R2V)
  source 1..1128: mol_type = other RNA
atggtgctgagcaagaccctggtggacatggacatggccgactactctgccgccctggaccctgcctacaccaccctggagttcgaaaacgtgcaagtgctgaccatgggcaacgacaccagccctagcgagggcaccaacctgaacgcccctaatagcctgggagtgtccgccctgtgtgccatctgtggcgatagagccaccggcaagcactacggcgccagctcttgtgatggctgcaagggcttcttccggcggagcgtgcggaagaaccacatgtacagctgccggttcagccggcagtgcgtggtggacaaggataagcggaaccagtgccggtactgcagactgaagaagtgcttcagagccggcatgaagaaagaagccgtgcagaacgagcgggaccggatcagcaccagaagaagcagctacgaggacagcagcctgcccagcatcaacgccctgctgcaggccgaggtgctgagcagacagatcaccagcccagtgtccggcatcaacggcgacatccgggccaagaagatcgccagcattgccgacgtgtgcgagagcatgaaggaacagctgctggtgctggtggaatgggccaagtacatccccgccttttgcgagctgcccctggacgatcaggtggccctgctgagagcacacgccggcgaacatctgctgctgggagccaccaagcggagcatggtgttcaaggacgtgctgctgctgggcaacgactacatcgtgcccagacactgccctgagctggccgagatgagccgggtgtccatcagaatcctggacgaactggtgctgccgtttcaggaactgcagatcgacgacaacgagtacgcctacctgaaggccatcatctttttcgaccccgacgccaagggcctgagcgaccctggcaagatcaagcggctgagaagccaggtgcaagtgtccctggaagattacatcaacgaccggcagtacgacagccggggcagatttggcgaactgctcctgctgctgcccaccctgcagagcatcacctggcagatgatcgagcagatccagttcatcaagctgttcggcatggccaagatcgacaatctgctgcaggaaatgctgctctga

SEQ ID NO: 1098 - RNA, 1128 nt, synthetic construct
  misc_feature 1..1128: note = CDS (opt29) from Homo sapiens__NP_000448.3__HNF4A(1-375)(R2V_K5V)
  source 1..1128: mol_type = other RNA
atggtgctgagcgtgaccctggtggacatggacatggccgactactctgccgccctggaccctgcctacaccaccctggagttcgaaaacgtgcaagtgctgaccatgggcaacgacaccagccctagcgagggcaccaacctgaacgcccctaatagcctgggagtgtccgccctgtgtgccatctgtggcgatagagccaccggcaagcactacggcgccagctcttgtgatggctgcaagggcttcttccggcggagcgtgcggaagaaccacatgtacagctgccggttcagccggcagtgcgtggtggacaaggataagcggaaccagtgccggtactgcagactgaagaagtgcttcagagccggcatgaagaaagaagccgtgcagaacgagcgggaccggatcagcaccagaagaagcagctacgaggacagcagcctgcccagcatcaacgccctgctgcaggccgaggtgctgagcagacagatcaccagcccagtgtccggcatcaacggcgacatccgggccaagaagatcgccagcattgccgacgtgtgcgagagcatgaaggaacagctgctggtgctggtggaatgggccaagtacatccccgccttttgcgagctgcccctggacgatcaggtggccctgctgagagcacacgccggcgaacatctgctgctgggagccaccaagcggagcatggtgttcaaggacgtgctgctgctgggcaacgactacatcgtgcccagacactgccctgagctggccgagatgagccgggtgtccatcagaatcctggacgaactggtgctgccgtttcaggaactgcagatcgacgacaacgagtacgcctacctgaaggccatcatctttttcgaccccgacgccaagggcctgagcgaccctggcaagatcaagcggctgagaagccaggtgcaagtgtccctggaagattacatcaacgaccggcagtacgacagccggggcagatttggcgaactgctcctgctgctgcccaccctgcagagcatcacctggcagatgatcgagcagatccagttcatcaagctgttcggcatggccaagatcgacaatctgctgcaggaaatgctgctctga

SEQ ID NO: 1099 - RNA, 1128 nt, synthetic construct
  misc_feature 1..1128: note = CDS (opt29) from Homo sapiens__NP_000448.3__HNF4A(1-375)(K179R_K180R)
  source 1..1128: mol_type = other RNA
atgagactgagcaagaccctggtggacatggacatggccgactactctgccgccctggaccctgcctacaccaccctggagttcgaaaacgtgcaagtgctgaccatgggcaacgacaccagccctagcgagggcaccaacctgaacgcccctaatagcctgggagtgtccgccctgtgtgccatctgtggcgatagagccaccggcaagcactacggcgccagctcttgtgatggctgcaagggcttcttccggcggagcgtgcggaagaaccacatgtacagctgccggttcagccggcagtgcgtggtggacaaggataagcggaaccagtgccggtactgcagactgaagaagtgcttcagagccggcatgaagaaagaagccgtgcagaacgagcgggaccggatcagcaccagaagaagcagctacgaggacagcagcctgcccagcatcaacgccctgctgcaggccgaggtgctgagcagacagatcaccagcccagtgtccggcatcaacggcgacatccgggcccggagaatcgccagcattgccgacgtgtgcgagagcatgaaggaacagctgctggtgctggtggaatgggccaagtacatccccgccttttgcgagctgcccctggacgatcaggtggccctgctgagagcacacgccggcgaacatctgctgctgggagccaccaagcggagcatggtgttcaaggacgtgctgctgctgggcaacgactacatcgtgcccagacactgccctgagctggccgagatgagccgggtgtccatcagaatcctggacgaactggtgctgccgtttcaggaactgcagatcgacgacaacgagtacgcctacctgaaggccatcatctttttcgaccccgacgccaagggcctgagcgaccctggcaagatcaagcggctgagaagccaggtgcaagtgtccctggaagattacatcaacgaccggcagtacgacagccggggcagatttggcgaactgctcctgctgctgcccaccctgcagagcatcacctggcagatgatcgagcagatccagttcatcaagctgttcggcatggccaagatcgacaatctgctgcaggaaatgctgctctga

SEQ ID NO: 1100 - RNA, 1128 nt, synthetic construct
  misc_feature 1..1128: note = CDS (opt29) from Homo sapiens__NP_000448.3__HNF4A(1-375)(K234R)
  source 1..1128: mol_type = other RNA
atgagactgagcaagaccctggtggacatggacatggccgactactctgccgccctggaccctgcctacaccaccctggagttcgaaaacgtgcaagtgctgaccatgggcaacgacaccagccctagcgagggcaccaacctgaacgcccctaatagcctgggagtgtccgccctgtgtgccatctgtggcgatagagccaccggcaagcactacggcgccagctcttgtgatggctgcaagggcttcttccggcggagcgtgcggaagaaccacatgtacagctgccggttcagccggcagtgcgtggtggacaaggataagcggaaccagtgccggtactgcagactgaagaagtgcttcagagccggcatgaagaaagaagccgtgcagaacgagcgggaccggatcagcaccagaagaagcagctacgaggacagcagcctgcccagcatcaacgccctgctgcaggccgaggtgctgagcagacagatcaccagcccagtgtccggcatcaacggcgacatccgggccaagaagatcgccagcattgccgacgtgtgcgagagcatgaaggaacagctgctggtgctggtggaatgggccaagtacatccccgccttttgcgagctgcccctggacgatcaggtggccctgctgagagcacacgccggcgaacatctgctgctgggagccacccggcggagcatggtgttcaaggacgtgctgctgctgggcaacgactacatcgtgcccagacactgccctgagctggccgagatgagccgggtgtccatcagaatcctggacgaactggtgctgccgtttcaggaactgcagatcgacgacaacgagtacgcctacctgaaggccatcatctttttcgaccccgacgccaagggcctgagcgaccctggcaagatcaagcggctgagaagccaggtgcaagtgtccctggaagattacatcaacgaccggcagtacgacagccggggcagatttggcgaactgctcctgctgctgcccaccctgcagagcatcacctggcagatgatcgagcagatccagttcatcaagctgttcggcatggccaagatcgacaatctgctgcaggaaatgctgctctga

SEQ ID NO: 1101 - RNA, 1128 nt, synthetic construct
  misc_feature 1..1128: note = CDS (opt29) from Homo sapiens__NP_000448.3__HNF4A(1-375)(K300R)
  source 1..1128: mol_type = other RNA
atgagactgagcaagaccctggtggacatggacatggccgactactctgccgccctggaccctgcctacaccaccctggagttcgaaaacgtgcaagtgctgaccatgggcaacgacaccagccctagcgagggcaccaacctgaacgcccctaatagcctgggagtgtccgccctgtgtgccatctgtggcgatagagccaccggcaagcactacggcgccagctcttgtgatggctgcaagggcttcttccggcggagcgtgcggaagaaccacatgtacagctgccggttcagccggcagtgcgtggtggacaaggataagcggaaccagtgccggtactgcagactgaagaagtgcttcagagccggcatgaagaaagaagccgtgcagaacgagcgggaccggatcagcaccagaagaagcagctacgaggacagcagcctgcccagcatcaacgccctgctgcaggccgaggtgctgagcagacagatcaccagcccagtgtccggcatcaacggcgacatccgggccaagaagatcgccagcattgccgacgtgtgcgagagcatgaaggaacagctgctggtgctggtggaatgggccaagtacatccccgccttttgcgagctgcccctggacgatcaggtggccctgctgagagcacacgccggcgaacatctgctgctgggagccaccaagcggagcatggtgttcaaggacgtgctgctgctgggcaacgactacatcgtgcccagacactgccctgagctggccgagatgagccgggtgtccatcagaatcctggacgaactggtgctgccgtttcaggaactgcagatcgacgacaacgagtacgcctacctgaaggccatcatctttttcgaccccgacgccagaggcctgagcgaccctggcaagatcaagcggctgagaagccaggtgcaagtgtccctggaagattacatcaacgaccggcagtacgacagccggggcagatttggcgaactgctcctgctgctgcccaccctgcagagcatcacctggcagatgatcgagcagatccagttcatcaagctgttcggcatggccaagatcgacaatctgctgcaggaaatgctgctctga

SEQ ID NO: 1102 - RNA, 1128 nt, synthetic construct
  misc_feature 1..1128: note = CDS (opt29) from Homo sapiens__NP_000448.3__HNF4A(1-375)(K300R_K307R_K309R)
  source 1..1128: mol_type = other RNA
atgagactgagcaagaccctggtggacatggacatggccgactactctgccgccctggaccctgcctacaccaccctggagttcgaaaacgtgcaagtgctgaccatgggcaacgacaccagccctagcgagggcaccaacctgaacgcccctaatagcctgggagtgtccgccctgtgtgccatctgtggcgatagagccaccggcaagcactacggcgccagctcttgtgatggctgcaagggcttcttccggcggagcgtgcggaagaaccacatgtacagctgccggttcagccggcagtgcgtggtggacaaggataagcggaaccagtgccggtactgcagactgaagaagtgcttcagagccggcatgaagaaagaagccgtgcagaacgagcgggaccggatcagcaccagaagaagcagctacgaggacagcagcctgcccagcatcaacgccctgctgcaggccgaggtgctgagcagacagatcaccagcccagtgtccggcatcaacggcgacatccgggccaagaagatcgccagcattgccgacgtgtgcgagagcatgaaggaacagctgctggtgctggtggaatgggccaagtacatccccgccttttgcgagctgcccctggacgatcaggtggccctgctgagagcacacgccggcgaacatctgctgctgggagccaccaagcggagcatggtgttcaaggacgtgctgctgctgggcaacgactacatcgtgcccagacactgccctgagctggccgagatgagccgggtgtccatcagaatcctggacgaactggtgctgccgtttcaggaactgcagatcgacgacaacgagtacgcctacctgaaggccatcatctttttcgaccccgacgccagaggcctgagcgaccctggccggatcagacggctgagaagccaggtgcaagtgtccctggaagattacatcaacgaccggcagtacgacagccggggcagatttggcgaactgctcctgctgctgcccaccctgcagagcatcacctggcagatgatcgagcagatccagttcatcaagctgttcggcatggccaagatcgacaatctgctgcaggaaatgctgctctga

SEQ ID NO: 1103 - RNA, 1128 nt, synthetic construct; identical to SEQ ID NO: 1084
  misc_feature 1..1128: note = CDS (opt29) from Homo sapiens__NP_000448.3__HNF4A(1-375)(K447R_K470R)
  source 1..1128: mol_type = other RNA

SEQ ID NO: 1104 - RNA, 1128 nt, synthetic construct; identical to SEQ ID NO: 1084
  misc_feature 1..1128: note = CDS (opt29) from Homo sapiens__NP_000448.3__HNF4A(1-375)(K458R)
  source 1..1128: mol_type = other RNA

SEQ ID NO: 1105 - RNA, 1128 nt, synthetic construct
  misc_feature 1..1128: note = CDS (opt29) from Homo sapiens__NP_000448.3__HNF4A(1-375)(K106R_K108R_K126R_K127R)
  source 1..1128: mol_type = other RNA
atgagactgagcaagaccctggtggacatggacatggccgactactctgccgccctggaccctgcctacaccaccctggagttcgaaaacgtgcaagtgctgaccatgggcaacgacaccagccctagcgagggcaccaacctgaacgcccctaatagcctgggagtgtccgccctgtgtgccatctgtggcgatagagccaccggcaagcactacggcgccagctcttgtgatggctgcaagggcttcttccggcggagcgtgcggaagaaccacatgtacagctgccggttcagccggcagtgcgtggtggaccgggatagacggaaccagtgccggtactgcagactgaagaagtgcttcagagccggcatgcggagagaagccgtgcagaacgagcgggaccggatcagcaccagaagaagcagctacgaggacagcagcctgcccagcatcaacgccctgctgcaggccgaggtgctgagcagacagatcaccagcccagtgtccggcatcaacggcgacatccgggccaagaagatcgccagcattgccgacgtgtgcgagagcatgaaggaacagctgctggtgctggtggaatgggccaagtacatccccgccttttgcgagctgcccctggacgatcaggtggccctgctgagagcacacgccggcgaacatctgctgctgggagccaccaagcggagcatggtgttcaaggacgtgctgctgctgggcaacgactacatcgtgcccagacactgccctgagctggccgagatgagccgggtgtccatcagaatcctggacgaactggtgctgccgtttcaggaactgcagatcgacgacaacgagtacgcctacctgaaggccatcatctttttcgaccccgacgccaagggcctgagcgaccctggcaagatcaagcggctgagaagccaggtgcaagtgtccctggaagattacatcaacgaccggcagtacgacagccggggcagatttggcgaactgctcctgctgctgcccaccctgcagagcatcacctggcagatgatcgagcagatccagttcatcaagctgttcggcatggccaagatcgacaatctgctgcaggaaatgctgctctga

SEQ ID NO: 1106 - RNA, 1128 nt, synthetic construct
  misc_feature 1..1128: note = CDS (opt29) from Homo sapiens__NP_000448.3__HNF4A(1-375)(E285Q)
  source 1..1128: mol_type = other RNA
atgagactgagcaagaccctggtggacatggacatggccgactactctgccgccctggaccctgcctacaccaccctggagttcgaaaacgtgcaagtgctgaccatgggcaacgacaccagccctagcgagggcaccaacctgaacgcccctaatagcctgggagtgtccgccctgtgtgccatctgtggcgatagagccaccggcaagcactacggcgccagctcttgtgatggctgcaagggcttcttccggcggagcgtgcggaagaaccacatgtacagctgccggttcagccggcagtgcgtggtggacaaggataagcggaaccagtgccggtactgcagactgaagaagtgcttcagagccggcatgaagaaagaagccgtgcagaacgagcgggaccggatcagcaccagaagaagcagctacgaggacagcagcctgcccagcatcaacgccctgctgcaggccgaggtgctgagcagacagatcaccagcccagtgtccggcatcaacggcgacatccgggccaagaagatcgccagcattgccgacgtgtgcgagagcatgaaggaacagctgctggtgctggtggaatgggccaagtacatccccgccttttgcgagctgcccctggacgatcaggtggccctgctgagagcacacgccggcgaacatctgctgctgggagccaccaagcggagcatggtgttcaaggacgtgctgctgctgggcaacgactacatcgtgcccagacactgccctgagctggccgagatgagccgggtgtccatcagaatcctggacgaactggtgctgccgtttcaggaactgcagatcgacgacaaccagtacgcctacctgaaggccatcatctttttcgaccccgacgccaagggcctgagcgaccctggcaagatcaagcggctgagaagccaggtgcaagtgtccctggaagattacatcaacgaccggcagtacgacagccggggcagatttggcgaactgctcctgctgctgcccaccctgcagagcatcacctggcagatgatcgagcagatccagttcatcaagctgttcggcatggccaagatcgacaatctgctgcaggaaatgctgctctga

SEQ ID NO: 1107 - RNA, 1128 nt, synthetic construct
  misc_feature 1..1128: note = CDS (opt29) from Homo sapiens__NP_000448.3__HNF4A(1-375)(T166E)
  source 1..1128: mol_type = other RNA
atgagactgagcaagaccctggtggacatggacatggccgactactctgccgccctggaccctgcctacaccaccctggagttcgaaaacgtgcaagtgctgaccatgggcaacgacaccagccctagcgagggcaccaacctgaacgcccctaatagcctgggagtgtccgccctgtgtgccatctgtggcgatagagccaccggcaagcactacggcgccagctcttgtgatggctgcaagggcttcttccggcggagcgtgcggaagaaccacatgtacagctgccggttcagccggcagtgcgtggtggacaaggataagcggaaccagtgccggtactgcagactgaagaagtgcttcagagccggcatgaagaaagaagccgtgcagaacgagcgggaccggatcagcaccagaagaagcagctacgaggacagcagcctgcccagcatcaacgccctgctgcaggccgaggtgctgagcagacagatcgagagcccagtgtccggcatcaacggcgacatccgggccaagaagatcgccagcattgccgacgtgtgcgagagcatgaaggaacagctgctggtgctggtggaatgggccaagtacatccccgccttttgcgagctgcccctggacgatcaggtggccctgctgagagcacacgccggcgaacatctgctgctgggagccaccaagcggagcatggtgttcaaggacgtgctgctgctgggcaacgactacatcgtgcccagacactgccctgagctggccgagatgagccgggtgtccatcagaatcctggacgaactggtgctgccgtttcaggaactgcagatcgacgacaacgagtacgcctacctgaaggccatcatctttttcgaccccgacgccaagggcctgagcgaccctggcaagatcaagcggctgagaagccaggtgcaagtgtccctggaagattacatcaacgaccggcagtacgacagccggggcagatttggcgaactgctcctgctgctgcccaccctgcagagcatcacctggcagatgatcgagcagatccagttcatcaagctgttcggcatggccaagatcgacaatctgctgcaggaaatgctgctctga

SEQ ID NO: 1108 - RNA, 1128 nt, synthetic construct
  misc_feature 1..1128: note = CDS (opt29) from Homo sapiens__NP_000448.3__HNF4A(1-375)(S148A)
  source 1..1128: mol_type = other RNA
atgagactgagcaagaccctggtggacatggacatggccgactactctgccgccctggaccctgcctacaccaccctggagttcgaaaacgtgcaagtgctgaccatgggcaacgacaccagccctagcgagggcaccaacctgaacgcccctaatagcctgggagtgtccgccctgtgtgccatctgtggcgatagagccaccggcaagcactacggcgccagctcttgtgatggctgcaagggcttcttccggcggagcgtgcggaagaaccacatgtacagctgccggttcagccggcagtgcgtggtggacaaggataagcggaaccagtgccggtactgcagactgaagaagtgcttcagagccggcatgaagaaagaagccgtgcagaacgagcgggaccggatcagcaccagaagaagcagctacgaggacagcgccctgcccagcatcaacgccctgctgcaggccgaggtgctgagcagacagatcaccagcccagtgtccggcatcaacggcgacatccgggccaagaagatcgccagcattgccgacgtgtgcgagagcatgaaggaacagctgctggtgctggtggaatgggccaagtacatccccgccttttgcgagctgcccctggacgatcaggtggccctgctgagagcacacgccggcgaacatctgctgctgggagccaccaagcggagcatggtgttcaaggacgtgctgctgctgggcaacgactacatcgtgcccagacactgccctgagctggccgagatgagccgggtgtccatcagaatcctggacgaactggtgctgccgtttcaggaactgcagatcgacgacaacgagtacgcctacctgaaggccatcatctttttcgaccccgacgccaagggcctgagcgaccctggcaagatcaagcggctgagaagccaggtgcaagtgtccctggaagattacatcaacgaccggcagtacgacagccggggcagatttggcgaactgctcctgctgctgcccaccctgcagagcatcacctggcagatgatcgagcagatccagttcatcaagctgttcggcatggccaagatcgacaatctgctgcaggaaatgctgctctga

SEQ ID NO: 1109 - RNA, 1128 nt, synthetic construct
  misc_feature 1..1128: note = CDS (opt29) from Homo sapiens__NP_000448.3__HNF4A(1-375)(S148E)
  source 1..1128: mol_type = other RNA
atgagactgagcaagaccctggtggacatggacatggccgactactctgccgccctggaccctgcctacaccaccctggagttcgaaaacgtgcaagtgctgaccatgggcaacgacaccagccctagcgagggcaccaacctgaacgcccctaatagcctgggagtgtccgccctgtgtgccatctgtggcgatagagccaccggcaagcactacggcgccagctcttgtgatggctgcaagggcttcttccggcggagcgtgcggaagaaccacatgtacagctgccggttcagccggcagtgcgtggtggacaaggataagcggaaccagtgccggtactgcagactgaagaagtgcttcagagccggcatgaagaaagaagccgtgcagaacgagcgggaccggatcagcaccagaagaagcagctacgaggacagcgaactgcccagcatcaacgccctgctgcaggccgaggtgctgagcagacagatcaccagcccagtgtccggcatcaacggcgacatccgggccaagaagatcgccagcattgccgacgtgtgcgagagcatgaaggaacagctgctggtgctggtggaatgggccaagtacatccccgccttttgcgagctgcccctggacgatcaggtggccctgctgagagcacacgccggcgaacatctgctgctgggagccaccaagcggagcatggtgttcaaggacgtgctgctgctgggcaacgactacatcgtgcccagacactgccctgagctggccgagatgagccgggtgtccatcagaatcctggacgaactggtgctgccgtttcaggaactgcagatcgacgacaacgagtacgcctacctgaaggccatcatctttttcgaccccgacgccaagggcctgagcgaccctggcaagatcaagcggctgagaagccaggtgcaagtgtccctggaagattacatcaacgaccggcagtacgacagccggggcagatttggcgaactgctcctgctgctgcccaccctgcagagcatcacctggcagatgatcgagcagatccagttcatcaagctgttcggcatggccaagatcgacaatctgctgcaggaaatgctgctctga

SEQ ID NO: 1110 - RNA, 1128 nt, synthetic construct
  misc_feature 1..1128: note = CDS (opt29) from Homo sapiens__NP_000448.3__HNF4A(1-375)(S183A)
  source 1..1128: mol_type = other RNA
atgagactgagcaagaccctggtggacatggacatggccgactactctgccgccctggaccctgcctacaccaccctggagttcgaaaacgtgcaagtgctgaccatgggcaacgacaccagccctagcgagggcaccaacctgaacgcccctaatagcctgggagtgtccgccctgtgtgccatctgtggcgatagagccaccggcaagcactacggcgccagctcttgtgatggctgcaagggcttcttccggcggagcgtgcggaagaaccacatgtacagctgccggttcagccggcagtgcgtggtggacaaggataagcggaaccagtgccggtactgcagactgaagaagtgcttcagagccggcatgaagaaagaagccgtgcagaacgagcgggaccggatcagcaccagaagaagcagctacgaggacagcagcctgcccagcatcaacgccctgctgcaggccgaggtgctgagcagacagatcaccagcccagtgtccggcatcaacggcgacatccgggccaagaagatcgccgccattgccgacgtgtgcgagagcatgaaggaacagctgctggtgctggtggaatgggccaagtacatccccgccttttgcgagctgcccctggacgatcaggtggccctgctgagagcacacgccggcgaacatctgctgctgggagccaccaagcggagcatggtgttcaaggacgtgctgctgctgggcaacgactacatcgtgcccagacactgccctgagctggccgagatgagccgggtgtccatcagaatcctggacgaactggtgctgccgtttcaggaactgcagatcgacgacaacgagtacgcctacctgaaggccatcatctttttcgaccccgacgccaagggcctgagcgaccctggcaagatcaagcggctgagaagccaggtgcaagtgtccctggaagattacatcaacgaccggcagtacgacagccggggcagatttggcgaactgctcctgctgctgcccaccctgcagagcatcacctggcagatgatcgagcagatccagttcatcaagctgttcggcatggccaagatcgacaatctgctgcaggaaatgctgctctga

SEQ ID NO: 1111 - RNA, 1128 nt, synthetic construct
  misc_feature 1..1128: note = CDS (opt29) from Homo sapiens__NP_000448.3__HNF4A(1-375)(S183E)
  source 1..1128: mol_type = other RNA
atgagactgagcaagaccctggtggacatggacatggccgactactctgccgccctggaccctgcctacaccaccctggagttcgaaaacgtgcaagtgctgaccatgggcaacgacaccagccctagcgagggcaccaacctgaacgcccctaatagcctgggagtgtccgccctgtgtgccatctgtggcgatagagccaccggcaagcactacggcgccagctcttgtgatggctgcaagggcttcttccggcggagcgtgcggaagaaccacatgtacagctgccggttcagccggcagtgcgtggtggacaaggataagcggaaccagtgccggtactgcagactgaagaagtgcttcagagccggcatgaagaaagaagccgtgcagaacgagcgggaccggatcagcaccagaagaagcagctacgaggacagcagcctgcccagcatcaacgccctgctgcaggccgaggtgctgagcagacagatcaccagcccagtgtccggcatcaacggcgacatccgggccaagaagatcgccgagattgccgacgtgtgcgagagcatgaaggaacagctgctggtgctggtggaatgggccaagtacatccccgccttttgcgagctgcccctggacgatcaggtggccctgctgagagcacacgccggcgaacatctgctgctgggagccaccaagcggagcatggtgttcaaggacgtgctgctgctgggcaacgactacatcgtgcccagacactgccctgagctggccgagatgagccgggtgtccatcagaatcctggacgaactggtgctgccgtttcaggaactgcagatcgacgacaacgagtacgcctacctgaaggccatcatctttttcgaccccgacgccaagggcctgagcgaccctggcaagatcaagcggctgagaagccaggtgcaagtgtccctggaagattacatcaacgaccggcagtacgacagccggggcagatttggcgaactgctcctgctgctgcccaccctgcagagcatcacctggcagatgatcgagcagatccagttcatcaagctgttcggcatggccaagatcgacaatctgctgcaggaaatgctgctctga

SEQ ID NO: 1112 - RNA, 1128 nt, synthetic construct; identical to SEQ ID NO: 1084
  misc_feature 1..1128: note = CDS (opt29) from Homo sapiens__NP_000448.3__HNF4A(1-375)(S461A)
  source 1..1128: mol_type = other RNA

SEQ ID NO: 1113 - RNA, 1128 nt, synthetic construct; identical to SEQ ID NO: 1084
  misc_feature 1..1128: note = CDS (opt29) from Homo sapiens__NP_000448.3__HNF4A(1-375)(S461E)
  source 1..1128: mol_type = other RNA

SEQ ID NO: 1114 - RNA, 1128 nt, synthetic construct
  misc_feature 1..1128: note = CDS (opt29) from Homo sapiens__NP_000448.3__HNF4A(1-375)(S142A_S143A_S313A)
  source 1..1128: mol_type = other RNA
atgagactgagcaagaccctggtggacatggacatggccgactactctgccgccctggaccctgcctacaccaccctggagttcgaaaacgtgcaagtgctgaccatgggcaacgacaccagccctagcgagggcaccaacctgaacgcccctaatagcctgggagtgtccgccctgtgtgccatctgtggcgatagagccaccggcaagcactacggcgccagctcttgtgatggctgcaagggcttcttccggcggagcgtgcggaagaaccacatgtacagctgccggttcagccggcagtgcgtggtggacaaggataagcggaaccagtgccggtactgcagactgaagaagtgcttcagagccggcatgaagaaagaagccgtgcagaacgagcgggaccggatcagcaccagaagagccgcctacgaggacagcagcctgcccagcatcaacgccctgctgcaggccgaggtgctgagcagacagatcaccagcccagtgtccggcatcaacggcgacatccgggccaagaagatcgccagcattgccgacgtgtgcgagagcatgaaggaacagctgctggtgctggtggaatgggccaagtacatccccgccttttgcgagctgcccctggacgatcaggtggccctgctgagagcacacgccggcgaacatctgctgctgggagccaccaagcggagcatggtgttcaaggacgtgctgctgctgggcaacgactacatcgtgcccagacactgccctgagctggccgagatgagccgggtgtccatcagaatcctggacgaactggtgctgccgtttcaggaactgcagatcgacgacaacgagtacgcctacctgaaggccatcatctttttcgaccccgacgccaagggcctgagcgaccctggcaagatcaagcggctgagagcccaggtgcaagtgtccctggaagattacatcaacgaccggcagtacgacagccggggcagatttggcgaactgctcctgctgctgcccaccctgcagagcatcacctggcagatgatcgagcagatccagttcatcaagctgttcggcatggccaagatcgacaatctgctgcaggaaatgctgctctga

SEQ ID NO: 1115 - RNA, 1128 nt, synthetic construct; identical to SEQ ID NO: 1114
  misc_feature 1..1128: note = CDS (opt29) from Homo sapiens__NP_000448.3__HNF4A(1-375)(S142A_S143A_S313A_K458R)
  source 1..1128: mol_type = other RNA

SEQ ID NO: 1116 - RNA, 1128 nt, synthetic construct
  misc_feature 1..1128: note = CDS (opt29) from Homo sapiens__NP_000448.3__HNF4A(1-375)(S142A_S143A_S167A_S313A_ S378A_T429A_T432A_S436A_K458R)
  source 1..1128: mol_type = other RNA
atgagactgagcaagaccctggtggacatggacatggccgactactctgccgccctggaccctgcctacaccaccctggagttcgaaaacgtgcaagtgctgaccatgggcaacgacaccagccctagcgagggcaccaacctgaacgcccctaatagcctgggagtgtccgccctgtgtgccatctgtggcgatagagccaccggcaagcactacggcgccagctcttgtgatggctgcaagggcttcttccggcggagcgtgcggaagaaccacatgtacagctgccggttcagccggcagtgcgtggtggacaaggataagcggaaccagtgccggtactgcagactgaagaagtgcttcagagccggcatgaagaaagaagccgtgcagaacgagcgggaccggatcagcaccagaagagccgcctacgaggacagcagcctgcccagcatcaacgccctgctgcaggccgaggtgctgagcagacagatcaccgccccagtgtccggcatcaacggcgacatccgggccaagaagatcgccagcattgccgacgtgtgcgagagcatgaaggaacagctgctggtgctggtggaatgggccaagtacatccccgccttttgcgagctgcccctggacgatcaggtggccctgctgagagcacacgccggcgaacatctgctgctgggagccaccaagcggagcatggtgttcaaggacgtgctgctgctgggcaacgactacatcgtgcccagacactgccctgagctggccgagatgagccgggtgtccatcagaatcctggacgaactggtgctgccgtttcaggaactgcagatcgacgacaacgagtacgcctacctgaaggccatcatctttttcgaccccgacgccaagggcctgagcgaccctggcaagatcaagcggctgagagcccaggtgcaagtgtccctggaagattacatcaacgaccggcagtacgacagccggggcagatttggcgaactgctcctgctgctgcccaccctgcagagcatcacctggcagatgatcgagcagatccagttcatcaagctgttcggcatggccaagatcgacaatctgctgcaggaaatgctgctctga

SEQ ID NO: 1117 - RNA, 1128 nt, synthetic construct
  misc_feature 1..1128: note = CDS (opt29) from Homo sapiens__NP_000448.3__HNF4A(1-375)(S142A_S143A_S148A_S167A_ S313A_S378A_T429A_T432A_S436A_K458R)
  source 1..1128: mol_type = other RNA
atgagactgagcaagaccctggtggacatggacatggccgactactctgccgccctggaccctgcctacaccaccctggagttcgaaaacgtgcaagtgctgaccatgggcaacgacaccagccctagcgagggcaccaacctgaacgcccctaatagcctgggagtgtccgccctgtgtgccatctgtggcgatagagccaccggcaagcactacggcgccagctcttgtgatggctgcaagggcttcttccggcggagcgtgcggaagaaccacatgtacagctgccggttcagccggcagtgcgtggtggacaaggataagcggaaccagtgccggtactgcagactgaagaagtgcttcagagccggcatgaagaaagaagccgtgcagaacgagcgggaccggatcagcaccagaagagccgcctacgaggacagcgccctgcccagcatcaacgccctgctgcaggccgaggtgctgagcagacagatcaccgccccagtgtccggcatcaacggcgacatccgggccaagaagatcgccagcattgccgacgtgtgcgagagcatgaaggaacagctgctggtgctggtggaatgggccaagtacatccccgccttttgcgagctgcccctggacgatcaggtggccctgctgagagcacacgccggcgaacatctgctgctgggagccaccaagcggagcatggtgttcaaggacgtgctgctgctgggcaacgactacatcgtgcccagacactgccctgagctggccgagatgagccgggtgtccatcagaatcctggacgaactggtgctgccgtttcaggaactgcagatcgacgacaacgagtacgcctacctgaaggccatcatctttttcgaccccgacgccaagggcctgagcgaccctggcaagatcaagcggctgagagcccaggtgcaagtgtccctggaagattacatcaacgaccggcagtacgacagccggggcagatttggcgaactgctcctgctgctgcccaccctgcagagcatcacctggcagatgatcgagcagatccagttcatcaagctgttcggcatggccaagatcgacaatctgctgcaggaaatgctgctctga

SEQ ID NO: 1118 - RNA, 1128 nt, synthetic construct
  misc_feature 1..1128: note = CDS (opt29) from Homo sapiens__NP_000448.3__HNF4A(1-375)(K106R_K108R_K126R_K127R_ S142A_S143A_S148A_S167A_S313A_S378A_T429A_T432A_S436A_K458R )
  source 1..1128: mol_type = other RNA
atgagactgagcaagaccctggtggacatggacatggccgactactctgccgccctggaccctgcctacaccaccctggagttcgaaaacgtgcaagtgctgaccatgggcaacgacaccagccctagcgagggcaccaacctgaacgcccctaatagcctgggagtgtccgccctgtgtgccatctgtggcgatagagccaccggcaagcactacggcgccagctcttgtgatggctgcaagggcttcttccggcggagcgtgcggaagaaccacatgtacagctgccggttcagccggcagtgcgtggtggaccgggatagacggaaccagtgccggtactgcagactgaagaagtgcttcagagccggcatgcggagagaagccgtgcagaacgagcgggaccggatcagcaccagaagagccgcctacgaggacagcgccctgcccagcatcaacgccctgctgcaggccgaggtgctgagcagacagatcaccgccccagtgtccggcatcaacggcgacatccgggccaagaagatcgccagcattgccgacgtgtgcgagagcatgaaggaacagctgctggtgctggtggaatgggccaagtacatccccgccttttgcgagctgcccctggacgatcaggtggccctgctgagagcacacgccggcgaacatctgctgctgggagccaccaagcggagcatggtgttcaaggacgtgctgctgctgggcaacgactacatcgtgcccagacactgccctgagctggccgagatgagccgggtgtccatcagaatcctggacgaactggtgctgccgtttcaggaactgcagatcgacgacaacgagtacgcctacctgaaggccatcatctttttcgaccccgacgccaagggcctgagcgaccctggcaagatcaagcggctgagagcccaggtgcaagtgtccctggaagattacatcaacgaccggcagtacgacagccggggcagatttggcgaactgctcctgctgctgcccaccctgcagagcatcacctggcagatgatcgagcagatccagttcatcaagctgttcggcatggccaagatcgacaatctgctgcaggaaatgctgctctga

SEQ ID NO: 1119 - RNA, 1128 nt, synthetic construct
  misc_feature 1..1128: note = CDS (opt29) from Homo sapiens__NP_000448.3__HNF4A(1-375)(S142A_S143A_S148A_T166A_ S167A_S313A_S378A_T429A_T432A_S436A_K458R)
  source 1..1128: mol_type = other RNA
atgagactgagcaagaccctggtggacatggacatggccgactactctgccgccctggaccctgcctacaccaccctggagttcgaaaacgtgcaagtgctgaccatgggcaacgacaccagccctagcgagggcaccaacctgaacgcccctaatagcctgggagtgtccgccctgtgtgccatctgtggcgatagagccaccggcaagcactacggcgccagctcttgtgatggctgcaagggcttcttccggcggagcgtgcggaagaaccacatgtacagctgccggttcagccggcagtgcgtggtggacaaggataagcggaaccagtgccggtactgcagactgaagaagtgcttcagagccggcatgaagaaagaagccgtgcagaacgagcgggaccggatcagcaccagaagagccgcctacgaggacagcgccctgcccagcatcaacgccctgctgcaggccgaggtgctgagcagacagatcgccgccccagtgtccggcatcaacggcgacatccgggccaagaagatcgccagcattgccgacgtgtgcgagagcatgaaggaacagctgctggtgctggtggaatgggccaagtacatccccgccttttgcgagctgcccctggacgatcaggtggccctgctgagagcacacgccggcgaacatctgctgctgggagccaccaagcggagcatggtgttcaaggacgtgctgctgctgggcaacgactacatcgtgcccagacactgccctgagctggccgagatgagccgggtgtccatcagaatcctggacgaactggtgctgccgtttcaggaactgcagatcgacgacaacgagtacgcctacctgaaggccatcatctttttcgaccccgacgccaagggcctgagcgaccctggcaagatcaagcggctgagagcccaggtgcaagtgtccctggaagattacatcaacgaccggcagtacgacagccggggcagatttggcgaactgctcctgctgctgcccaccctgcagagcatcacctggcagatgatcgagcagatccagttcatcaagctgttcggcatggccaagatcgacaatctgctgcaggaaatgctgctctga

SEQ ID NO: 1120 - RNA, 1128 nt, synthetic construct
  misc_feature 1..1128: note = CDS (opt29) from Homo sapiens__NP_000448.3__HNF4A(1-375)(S87A_S142A_S143A_S148A_T 166A_S167A_S313A_S378A_T429A_T432A_S436A_K458R)
  source 1..1128: mol_type = other RNA
atgagactgagcaagaccctggtggacatggacatggccgactactctgccgccctggaccctgcctacaccaccctggagttcgaaaacgtgcaagtgctgaccatgggcaacgacaccagccctagcgagggcaccaacctgaacgcccctaatagcctgggagtgtccgccctgtgtgccatctgtggcgatagagccaccggcaagcactacggcgccagctcttgtgatggctgcaagggcttcttccggcgggccgtgcggaagaaccacatgtacagctgccggttcagccggcagtgcgtggtggacaaggataagcggaaccagtgccggtactgcagactgaagaagtgcttcagagccggcatgaagaaagaagccgtgcagaacgagcgggaccggatcagcaccagaagagccgcctacgaggacagcgccctgcccagcatcaacgccctgctgcaggccgaggtgctgagcagacagatcgccgccccagtgtccggcatcaacggcgacatccgggccaagaagatcgccagcattgccgacgtgtgcgagagcatgaaggaacagctgctggtgctggtggaatgggccaagtacatccccgccttttgcgagctgcccctggacgatcaggtggccctgctgagagcacacgccggcgaacatctgctgctgggagccaccaagcggagcatggtgttcaaggacgtgctgctgctgggcaacgactacatcgtgcccagacactgccctgagctggccgagatgagccgggtgtccatcagaatcctggacgaactggtgctgccgtttcaggaactgcagatcgacgacaacgagtacgcctacctgaaggccatcatctttttcgaccccgacgccaagggcctgagcgaccctggcaagatcaagcggctgagagcccaggtgcaagtgtccctggaagattacatcaacgaccggcagtacgacagccggggcagatttggcgaactgctcctgctgctgcccaccctgcagagcatcacctggcagatgatcgagcagatccagttcatcaagctgttcggcatggccaagatcgacaatctgctgcaggaaatgctgctctga

SEQ ID NO: 1121 - RNA, 1128 nt, synthetic construct
  misc_feature 1..1128: note = CDS (opt29) from Homo sapiens__NP_000448.3__HNF4A(1-375)(S87A_K106R_K108R_K126R_K 127R_S142A_S143A_S148A_T166A_S167A_S313A_S378A_T429A_T432A_ S436A_K458R)
  source 1..1128: mol_type = other RNA
atgagactgagcaagaccctggtggacatggacatggccgactactctgccgccctggaccctgcctacaccaccctggagttcgaaaacgtgcaagtgctgaccatgggcaacgacaccagccctagcgagggcaccaacctgaacgcccctaatagcctgggagtgtccgccctgtgtgccatctgtggcgatagagccaccggcaagcactacggcgccagctcttgtgatggctgcaagggcttcttccggcgggccgtgcggaagaaccacatgtacagctgccggttcagccggcagtgcgtggtggaccgggatagacggaaccagtgccggtactgcagactgaagaagtgcttcagagccggcatgcggagagaagccgtgcagaacgagcgggaccggatcagcaccagaagagccgcctacgaggacagcgccctgcccagcatcaacgccctgctgcaggccgaggtgctgagcagacagatcgccgccccagtgtccggcatcaacggcgacatccgggccaagaagatcgccagcattgccgacgtgtgcgagagcatgaaggaacagctgctggtgctggtggaatgggccaagtacatccccgccttttgcgagctgcccctggacgatcaggtggccctgctgagagcacacgccggcgaacatctgctgctgggagccaccaagcggagcatggtgttcaaggacgtgctgctgctgggcaacgactacatcgtgcccagacactgccctgagctggccgagatgagccgggtgtccatcagaatcctggacgaactggtgctgccgtttcaggaactgcagatcgacgacaacgagtacgcctacctgaaggccatcatctttttcgaccccgacgccaagggcctgagcgaccctggcaagatcaagcggctgagagcccaggtgcaagtgtccctggaagattacatcaacgaccggcagtacgacagccggggcagatttggcgaactgctcctgctgctgcccaccctgcagagcatcacctggcagatgatcgagcagatccagttcatcaagctgttcggcatggccaagatcgacaatctgctgcaggaaatgctgctctga

SEQ ID NO: 1122 - RNA, 1128 nt, synthetic construct
  misc_feature 1..1128: note = CDS (opt29) from Homo sapiens__NP_000448.3__HNF4A(1-375)(S87A_K106R_K108R_K126R_K 127R)
  source 1..1128: mol_type = other RNA
atgagactgagcaagaccctggtggacatggacatggccgactactctgccgccctggaccctgcctacaccaccctggagttcgaaaacgtgcaagtgctgaccatgggcaacgacaccagccctagcgagggcaccaacctgaacgcccctaatagcctgggagtgtccgccctgtgtgccatctgtggcgatagagccaccggcaagcactacggcgccagctcttgtgatggctgcaagggcttcttccggcgggccgtgcggaagaaccacatgtacagctgccggttcagccggcagtgcgtggtggaccgggatagacggaaccagtgccggtactgcagactgaagaagtgcttcagagccggcatgcggagagaagccgtgcagaacgagcgggaccggatcagcaccagaagaagcagctacgaggacagcagcctgcccagcatcaacgccctgctgcaggccgaggtgctgagcagacagatcaccagcccagtgtccggcatcaacggcgacatccgggccaagaagatcgccagcattgccgacgtgtgcgagagcatgaaggaacagctgctggtgctggtggaatgggccaagtacatccccgccttttgcgagctgcccctggacgatcaggtggccctgctgagagcacacgccggcgaacatctgctgctgggagccaccaagcggagcatggtgttcaaggacgtgctgctgctgggcaacgactacatcgtgcccagacactgccctgagctggccgagatgagccgggtgtccatcagaatcctggacgaactggtgctgccgtttcaggaactgcagatcgacgacaacgagtacgcctacctgaaggccatcatctttttcgaccccgacgccaagggcctgagcgaccctggcaagatcaagcggctgagaagccaggtgcaagtgtccctggaagattacatcaacgaccggcagtacgacagccggggcagatttggcgaactgctcctgctgctgcccaccctgcagagcatcacctggcagatgatcgagcagatccagttcatcaagctgttcggcatggccaagatcgacaatctgctgcaggaaatgctgctctga

SEQ ID NO: 1123 - RNA, 1128 nt, synthetic construct; identical to SEQ ID NO: 1121
  misc_feature 1..1128: note = CDS (opt29) from Homo sapiens__NP_000448.3__HNF4A(1-375)(S87A_K106R_K108R_K126R_K 127R_S142A_S143A_S148A_T166A_S167A_S313A_S378A_T429A_T432A_ S436A_K458R_S461A)
  source 1..1128: mol_type = other RNA

SEQ ID NO: 1124 - RNA, 1128 nt, synthetic construct; identical to SEQ ID NO: 1121
  misc_feature 1..1128: note = CDS (opt29) from Homo sapiens__NP_000448.3__HNF4A(1-375)(S87A_K106R_K108R_K126R_K 127R_S142A_S143A_S148A_T166A_S167A_S313A_S378A_T429A_T432A_ S436A_K458R_S461E)
  source 1..1128: mol_type = other RNA

SEQ ID NO: 1125 - RNA, 1128 nt, synthetic construct
  misc_feature 1..1128: note = CDS (opt29) from Homo sapiens__NP_000448.3__HNF4A(1-375)(S87A_K106R_K108R_K126R_K 127R_S142A_S143A_S148E_T166A_S167E_S313A_S378E_T429E_T432E_ S436E_K458R_S461E)
  source 1..1128: mol_type = other RNA
atgagactgagcaagaccctggtggacatggacatggccgactactctgccgccctggaccctgcctacaccaccctggagttcgaaaacgtgcaagtgctgaccatgggcaacgacaccagccctagcgagggcaccaacctgaacgcccctaatagcctgggagtgtccgccctgtgtgccatctgtggcgatagagccaccggcaagcactacggcgccagctcttgtgatggctgcaagggcttcttccggcgggccgtgcggaagaaccacatgtacagctgccggttcagccggcagtgcgtggtggaccgggatagacggaaccagtgccggtactgcagactgaagaagtgcttcagagccggcatgcggagagaagccgtgcagaacgagcgggaccggatcagcaccagaagagccgcctacgaggacagcgaactgcccagcatcaacgccctgctgcaggccgaggtgctgagcagacagatcgccgaaccagtgtccggcatcaacggcgacatccgggccaagaagatcgccagcattgccgacgtgtgcgagagcatgaaggaacagctgctggtgctggtggaatgggccaagtacatccccgccttttgcgagctgcccctggacgatcaggtggccctgctgagagcacacgccggcgaacatctgctgctgggagccaccaagcggagcatggtgttcaaggacgtgctgctgctgggcaacgactacatcgtgcccagacactgccctgagctggccgagatgagccgggtgtccatcagaatcctggacgaactggtgctgccgtttcaggaactgcagatcgacgacaacgagtacgcctacctgaaggccatcatctttttcgaccccgacgccaagggcctgagcgaccctggcaagatcaagcggctgagagcccaggtgcaagtgtccctggaagattacatcaacgaccggcagtacgacagccggggcagatttggcgaactgctcctgctgctgcccaccctgcagagcatcacctggcagatgatcgagcagatccagttcatcaagctgttcggcatggccaagatcgacaatctgctgcaggaaatgctgctctga

SEQ ID NO: 1126 - RNA, 1128 nt, synthetic construct
  misc_feature 1..1128: note = CDS (opt29) from Homo sapiens__NP_000448.3__HNF4A(1-375)(S87A_K106R_K108R_K126R_K 127R_S142A_S143A_S148A_T166A_S167A_K179R_K180R_S313A_S378A_ T429A_T432A_S436A_K458R_S461E)
  source 1..1128: mol_type = other RNA
atgagactgagcaagaccctggtggacatggacatggccgactactctgccgccctggaccctgcctacaccaccctggagttcgaaaacgtgcaagtgctgaccatgggcaacgacaccagccctagcgagggcaccaacctgaacgcccctaatagcctgggagtgtccgccctgtgtgccatctgtggcgatagagccaccggcaagcactacggcgccagctcttgtgatggctgcaagggcttcttccggcgggccgtgcggaagaaccacatgtacagctgccggttcagccggcagtgcgtggtggaccgggatagacggaaccagtgccggtactgcagactgaagaagtgcttcagagccggcatgcggagagaagccgtgcagaacgagcgggaccggatcagcaccagaagagccgcctacgaggacagcgccctgcccagcatcaacgccctgctgcaggccgaggtgctgagcagacagatcgccgccccagtgtccggcatcaacggcgacatccgggcccggagaatcgccagcattgccgacgtgtgcgagagcatgaaggaacagctgctggtgctggtggaatgggccaagtacatccccgccttttgcgagctgcccctggacgatcaggtggccctgctgagagcacacgccggcgaacatctgctgctgggagccaccaagcggagcatggtgttcaaggacgtgctgctgctgggcaacgactacatcgtgcccagacactgccctgagctggccgagatgagccgggtgtccatcagaatcctggacgaactggtgctgccgtttcaggaactgcagatcgacgacaacgagtacgcctacctgaaggccatcatctttttcgaccccgacgccaagggcctgagcgaccctggcaagatcaagcggctgagagcccaggtgcaagtgtccctggaagattacatcaacgaccggcagtacgacagccggggcagatttggcgaactgctcctgctgctgcccaccctgcagagcatcacctggcagatgatcgagcagatccagttcatcaagctgttcggcatggccaagatcgacaatctgctgcaggaaatgctgctctga

SEQ ID NO: 1127 - RNA, 1128 nt, synthetic construct
  misc_feature 1..1128: note = CDS (opt29) from Homo sapiens__NP_000448.3__HNF4A(1-375)(S87A_K106R_K108R_K126R_K 127R_S142A_S143A_S148A_T166A_S167A_K300R_K307R_K309R_S313A_ S378A_T429A_T432A_S436A_K458R_S461E)
  source 1..1128: mol_type = other RNA
atgagactgagcaagaccctggtggacatggacatggccgactactctgccgccctggaccctgcctacaccaccctggagttcgaaaacgtgcaagtgctgaccatgggcaacgacaccagccctagcgagggcaccaacctgaacgcccctaatagcctgggagtgtccgccctgtgtgccatctgtggcgatagagccaccggcaagcactacggcgccagctcttgtgatggctgcaagggcttcttccggcgggccgtgcggaagaaccacatgtacagctgccggttcagccggcagtgcgtggtggaccgggatagacggaaccagtgccggtactgcagactgaagaagtgcttcagagccggcatgcggagagaagccgtgcagaacgagcgggaccggatcagcaccagaagagccgcctacgaggacagcgccctgcccagcatcaacgccctgctgcaggccgaggtgctgagcagacagatcgccgccccagtgtccggcatcaacggcgacatccgggccaagaagatcgccagcattgccgacgtgtgcgagagcatgaaggaacagctgctggtgctggtggaatgggccaagtacatccccgccttttgcgagctgcccctggacgatcaggtggccctgctgagagcacacgccggcgaacatctgctgctgggagccaccaagcggagcatggtgttcaaggacgtgctgctgctgggcaacgactacatcgtgcccagacactgccctgagctggccgagatgagccgggtgtccatcagaatcctggacgaactggtgctgccgtttcaggaactgcagatcgacgacaacgagtacgcctacctgaaggccatcatctttttcgaccccgacgccagaggcctgagcgaccctggccggatcagacggctgagagcccaggtgcaagtgtccctggaagattacatcaacgaccggcagtacgacagccggggcagatttggcgaactgctcctgctgctgcccaccctgcagagcatcacctggcagatgatcgagcagatccagttcatcaagctgttcggcatggccaagatcgacaatctgctgcaggaaatgctgctctga

SEQ ID NO: 1128 - RNA, 1128 nt, synthetic construct; identical to SEQ ID NO: 1121
  misc_feature 1..1128: note = CDS (opt29) from Homo sapiens__NP_000448.3__HNF4A(1-375)(S87A_K106R_K108R_K126R_K 127R_S142A_S143A_S148A_T166A_S167A_S313A_S378A_T429A_T432A_ S436A_K447R_K458R_S461E_K470R)
  source 1..1128: mol_type = other RNA

SEQ ID NO: 1129 - RNA, 1128 nt, synthetic construct
  misc_feature 1..1128: note = CDS (opt29) from Homo sapiens__NP_000448.3__HNF4A(1-375)(S87A_K106R_K108R_K126R_K 127R_S142A_S143A_S148A_T166A_S167A_K179R_K180R_K234R_K300R_ K307R_K309R_S313A_S378A_T429A_T432A_S436A_K447R_K458R_S461E _K470R)
  source 1..1128: mol_type = other RNA
atgagactgagcaagaccctggtggacatggacatggccgactactctgccgccctggaccctgcctacaccaccctggagttcgaaaacgtgcaagtgctgaccatgggcaacgacaccagccctagcgagggcaccaacctgaacgcccctaatagcctgggagtgtccgccctgtgtgccatctgtggcgatagagccaccggcaagcactacggcgccagctcttgtgatggctgcaagggcttcttccggcgggccgtgcggaagaaccacatgtacagctgccggttcagccggcagtgcgtggtggaccgggatagacggaaccagtgccggtactgcagactgaagaagtgcttcagagccggcatgcggagagaagccgtgcagaacgagcgggaccggatcagcaccagaagagccgcctacgaggacagcgccctgcccagcatcaacgccctgctgcaggccgaggtgctgagcagacagatcgccgccccagtgtccggcatcaacggcgacatccgggcccggagaatcgccagcattgccgacgtgtgcgagagcatgaaggaacagctgctggtgctggtggaatgggccaagtacatccccgccttttgcgagctgcccctggacgatcaggtggccctgctgagagcacacgccggcgaacatctgctgctgggagccacccggcggagcatggtgttcaaggacgtgctgctgctgggcaacgactacatcgtgcccagacactgccctgagctggccgagatgagccgggtgtccatcagaatcctggacgaactggtgctgccgtttcaggaactgcagatcgacgacaacgagtacgcctacctgaaggccatcatctttttcgaccccgacgccagaggcctgagcgaccctggccggatcagacggctgagagcccaggtgcaagtgtccctggaagattacatcaacgaccggcagtacgacagccggggcagatttggcgaactgctcctgctgctgcccaccctgcagagcatcacctggcagatgatcgagcagatccagttcatcaagctgttcggcatggccaagatcgacaatctgctgcaggaaatgctgctctga

SEQ ID NO: 1130 - RNA, 1128 nt, synthetic construct
  misc_feature 1..1128: note = CDS (opt29) from Homo sapiens__NP_000448.3__HNF4A(1-375)(S87A_S95A_S99A_K106R_K10 8R_K126R_K127R_S142A_S143A_S148A_T166A_S167A_S313A_S378A_T4 29A_T432A_S436A_K458R_S461E)
  source 1..1128: mol_type = other RNA
atgagactgagcaagaccctggtggacatggacatggccgactactctgccgccctggaccctgcctacaccaccctggagttcgaaaacgtgcaagtgctgaccatgggcaacgacaccagccctagcgagggcaccaacctgaacgcccctaatagcctgggagtgtccgccctgtgtgccatctgtggcgatagagccaccggcaagcactacggcgccagctcttgtgatggctgcaagggcttcttccggcgggccgtgcggaagaaccacatgtacgcctgccggttcgcccggcagtgcgtggtggaccgggatagacggaaccagtgccggtactgcagactgaagaagtgcttcagagccggcatgcggagagaagccgtgcagaacgagcgggaccggatcagcaccagaagagccgcctacgaggacagcgccctgcccagcatcaacgccctgctgcaggccgaggtgctgagcagacagatcgccgccccagtgtccggcatcaacggcgacatccgggccaagaagatcgccagcattgccgacgtgtgcgagagcatgaaggaacagctgctggtgctggtggaatgggccaagtacatccccgccttttgcgagctgcccctggacgatcaggtggccctgctgagagcacacgccggcgaacatctgctgctgggagccaccaagcggagcatggtgttcaaggacgtgctgctgctgggcaacgactacatcgtgcccagacactgccctgagctggccgagatgagccgggtgtccatcagaatcctggacgaactggtgctgccgtttcaggaactgcagatcgacgacaacgagtacgcctacctgaaggccatcatctttttcgaccccgacgccaagggcctgagcgaccctggcaagatcaagcggctgagagcccaggtgcaagtgtccctggaagattacatcaacgaccggcagtacgacagccggggcagatttggcgaactgctcctgctgctgcccaccctgcagagcatcacctggcagatgatcgagcagatccagttcatcaagctgttcggcatggccaagatcgacaatctgctgcaggaaatgctgctctga

SEQ ID NO: 1131 - RNA, 1128 nt, synthetic construct
  misc_feature 1..1128: note = CDS (opt29) from Homo sapiens__NP_000448.3__HNF4A(1-375)(S87A_K106R_K108R_K126R_K 127R_S138A_T139A_S142A_S143A_S148A_T166A_S167A_S313A_S378A_ T429A_T432A_S436A_K458R_S461E)
  source 1..1128: mol_type = other RNA
atgagactgagcaagaccctggtggacatggacatggccgactactctgccgccctggaccctgcctacaccaccctggagttcgaaaacgtgcaagtgctgaccatgggcaacgacaccagccctagcgagggcaccaacctgaacgcccctaatagcctgggagtgtccgccctgtgtgccatctgtggcgatagagccaccggcaagcactacggcgccagctcttgtgatggctgcaagggcttcttccggcgggccgtgcggaagaaccacatgtacagctgccggttcagccggcagtgcgtggtggaccgggatagacggaaccagtgccggtactgcagactgaagaagtgcttcagagccggcatgcggagagaagccgtgcagaacgagcgggaccggatcgccgccagaagagccgcctacgaggacagcgccctgcccagcatcaacgccctgctgcaggccgaggtgctgagcagacagatcgccgccccagtgtccggcatcaacggcgacatccgggccaagaagatcgccagcattgccgacgtgtgcgagagcatgaaggaacagctgctggtgctggtggaatgggccaagtacatccccgccttttgcgagctgcccctggacgatcaggtggccctgctgagagcacacgccggcgaacatctgctgctgggagccaccaagcggagcatggtgttcaaggacgtgctgctgctgggcaacgactacatcgtgcccagacactgccctgagctggccgagatgagccgggtgtccatcagaatcctggacgaactggtgctgccgtttcaggaactgcagatcgacgacaacgagtacgcctacctgaaggccatcatctttttcgaccccgacgccaagggcctgagcgaccctggcaagatcaagcggctgagagcccaggtgcaagtgtccctggaagattacatcaacgaccggcagtacgacagccggggcagatttggcgaactgctcctgctgctgcccaccctgcagagcatcacctggcagatgatcgagcagatccagttcatcaagctgttcggcatggccaagatcgacaatctgctgcaggaaatgctgctctga

SEQ ID NO: 1132 - RNA, 1128 nt, synthetic construct
  misc_feature 1..1128: note = CDS (opt29) from Homo sapiens__NP_000448.3__HNF4A(1-375)(S87A_S95A_S99A_K106R_K10 8R_K126R_K127R_S138A_T139A_S142A_S143A_S148A_T166A_S167A_S3 13A_S378A_T429A_T432A_S436A_K458R_S461E)
  source 1..1128: mol_type = other RNA
atgagactgagcaagaccctggtggacatggacatggccgactactctgccgccctggaccctgcctacaccaccctggagttcgaaaacgtgcaagtgctgaccatgggcaacgacaccagccctagcgagggcaccaacctgaacgcccctaatagcctgggagtgtccgccctgtgtgccatctgtggcgatagagccaccggcaagcactacggcgccagctcttgtgatggctgcaagggcttcttccggcgggccgtgcggaagaaccacatgtacgcctgccggttcgcccggcagtgcgtggtggaccgggatagacggaaccagtgccggtactgcagactgaagaagtgcttcagagccggcatgcggagagaagccgtgcagaacgagcgggaccggatcgccgccagaagagccgcctacgaggacagcgccctgcccagcatcaacgccctgctgcaggccgaggtgctgagcagacagatcgccgccccagtgtccggcatcaacggcgacatccgggccaagaagatcgccagcattgccgacgtgtgcgagagcatgaaggaacagctgctggtgctggtggaatgggccaagtacatccccgccttttgcgagctgcccctggacgatcaggtggccctgctgagagcacacgccggcgaacatctgctgctgggagccaccaagcggagcatggtgttcaaggacgtgctgctgctgggcaacgactacatcgtgcccagacactgccctgagctggccgagatgagccgggtgtccatcagaatcctggacgaactggtgctgccgtttcaggaactgcagatcgacgacaacgagtacgcctacctgaaggccatcatctttttcgaccccgacgccaagggcctgagcgaccctggcaagatcaagcggctgagagcccaggtgcaagtgtccctggaagattacatcaacgaccggcagtacgacagccggggcagatttggcgaactgctcctgctgctgcccaccctgcagagcatcacctggcagatgatcgagcagatccagttcatcaagctgttcggcatggccaagatcgacaatctgctgcaggaaatgctgctctga

SEQ ID NO: 1133 - RNA, 1314 nt, Homo sapiens
  misc_feature 1..1314: note = CDS (wt) from Homo sapiens__NP_000448.3__HNF4A(39-474)
  source 1..1314: mol_type = mRNA
atggacacgtccccatcagaaggcaccaacctcaacgcgcccaacagcctgggtgtcagcgccctgtgtgccatctgcggggaccgggccacgggcaaacactacggtgcctcgagctgtgacggctgcaagggcttcttccggaggagcgtgcggaagaaccacatgtactcctgcagatttagccggcagtgcgtggtggacaaagacaagaggaaccagtgccgctactgcaggctcaagaaatgcttccgggctggcatgaagaaggaagccgtccagaatgagcgggaccggatcagcactcgaaggtcaagctatgaggacagcagcctgccctccatcaatgcgctcctgcaggcggaggtcctgtcccgacagatcacctcccccgtctccgggatcaacggcgacattcgggcgaagaagattgccagcatcgcagatgtgtgtgagtccatgaaggagcagctgctggttctcgttgagtgggccaagtacatcccagctttctgcgagctccccctggacgaccaggtggccctgctcagagcccatgctggcgagcacctgctgctcggagccaccaagagatccatggtgttcaaggacgtgctgctcctaggcaatgactacattgtccctcggcactgcccggagctggcggagatgagccgggtgtccatacgcatccttgacgagctggtgctgcccttccaggagctgcagatcgatgacaatgagtatgcctacctcaaagccatcatcttctttgacccagatgccaaggggctgagcgatccagggaagatcaagcggctgcgttcccaggtgcaggtgagcttggaggactacatcaacgaccgccagtatgactcgcgtggccgctttggagagctgctgctgctgctgcccaccttgcagagcatcacctggcagatgatcgagcagatccagttcatcaagctcttcggcatggccaagattgacaacctgttgcaggagatgctgctgggagggtcccccagcgatgcaccccatgcccaccaccccctgcaccctcacctgatgcaggaacatatgggaaccaacgtcatcgttgccaacacaatgcccactcacctcagcaacggacagatgtgtgagtggccccgacccaggggacaggcagccacccctgagaccccacagccctcaccgccaggtggctcagggtctgagccctataagctcctgccgggagccgtcgccacaatcgtcaagcccctctctgccatcccccagccgaccatcaccaagcaggaagttatctag

SEQ ID NO: 1134 - RNA, 1314 nt, synthetic construct
  misc_feature 1..1314: note = CDS (wt mod) from Homo sapiens__NP_000448.3__HNF4A(39-474)
  source 1..1314: mol_type = other RNA
atggacacgtccccatcagaaggcaccaacctcaacgcgcccaacagcctgggtgtgagcgccctgtgtgccatctgcggggaccgggccacgggcaaacactacggtgcctcgagctgtgacggctgcaagggcttcttccggaggagcgtgcggaagaaccacatgtactcctgcagatttagccggcagtgcgtggtggacaaagacaagaggaaccagtgccgctactgcaggctcaagaaatgcttccgggctggcatgaagaaggaagccgtccagaatgagcgggaccggatcagcactcgaaggtcaagctatgaggacagcagcctgccctccatcaatgcgctcctgcaggcggaggtcctgtcccgacagatcacctcccccgtctccgggatcaacggcgacattcgggcgaagaagattgccagcatcgcagatgtgtgtgagtccatgaaggagcagctgctggttctcgttgagtgggccaagtacatcccagctttctgcgagctccccctggacgaccaggtggccctgctcagagcccatgctggcgagcacctcctgctcggagccaccaagagatccatggtgttcaaggacgtgctgctcctaggcaatgactacattgtccctcggcactgcccggagctggcggagatgagccgggtgtccatacgcatccttgacgagctggtgctgcccttccaggagctgcagatcgatgacaatgagtatgcctacctcaaagccatcatcttctttgacccagatgccaaggggctgagcgatccagggaagatcaagcggctgcgttcccaggtccaggtgagcttggaggactacatcaacgaccgccagtatgactcgcgtggccgctttggagagctgctgctgctgctgcccaccttgcagagcatcacctggcagatgatcgagcagatccagttcatcaagctgttcggcatggccaagattgacaacctgttgcaggagatgctgctgggagggtcccccagcgatgcaccccatgcccaccaccccctgcaccctcacctgatgcaggaacatatgggaaccaacgtgatcgttgccaacacaatgcccactcacctcagcaacggacagatgtgtgagtggccccgacccaggggacaggcagccacccctgagaccccacagccctcaccgccaggtggctcagggtctgagccctataagctcctgccgggagccgtcgccacaatcgtcaagcccctctctgccatcccccagccgaccatcaccaagcaggaagttatctga

SEQ ID NO: 1135 - RNA, 1314 nt, synthetic construct
  misc_feature 1..1314: note = CDS (opt1) from Homo sapiens__NP_000448.3__HNF4A(39-474)
  source 1..1314: mol_type = other RNA
atggacaccagcccgtccgaggggaccaacctgaacgcccccaacagcctgggcgtgtccgccctctgcgccatctgcggggaccgggcgacgggcaagcactacggggccagctcctgcgacggctgcaagggcttcttccgccggagcgtccgcaagaaccacatgtactcctgccggttcagccgccagtgcgtggtggacaaggacaagcggaaccagtgccgctactgccggctgaagaagtgcttccgcgccgggatgaagaaggaggccgtccagaacgagcgggaccgcatctccacccggcgcagctcctacgaggacagctccctgcccagcatcaacgcgctcctgcaggccgaggtgctgtcccggcagatcaccagccccgtgtccggcatcaacggggacatccgcgccaagaagatcgccagcatcgccgacgtctgcgagagcatgaaggagcagctcctggtgctggtggagtgggcgaagtacatcccggccttctgcgagctccccctggacgaccaggtcgccctgctccgggcccacgccggcgagcacctcctgctgggggcgaccaagcgctccatggtgttcaaggacgtgctgctgctcggcaacgactacatcgtcccccggcactgccccgagctggccgagatgagccgcgtgtccatccggatcctggacgagctcgtgctgccgttccaggagctgcagatcgacgacaacgagtacgcctacctcaaggccatcatcttcttcgaccccgacgccaagggcctgagcgaccccgggaagatcaagcgcctgcgctcccaggtccaggtgagcctcgaggactacatcaacgaccggcagtacgactcccgcggccggttcggggagctgctgctcctgctgcccacgctccagagcatcacctggcagatgatcgagcagatccagttcatcaagctgttcggcatggcgaagatcgacaacctgctccaggagatgctgctgggcgggtccccgagcgacgcgccccacgcccaccaccccctccacccccacctgatgcaggagcacatgggcaccaacgtgatcgtcgccaacaccatgccgacgcacctgtccaacgggcagatgtgcgagtggccccgcccccggggccaggccgccacccccgagaccccgcagcccagcccgcccgggggctccggcagcgagccctacaagctgctccccggggccgtggccaccatcgtgaagcccctgtccgccatcccccagccgacgatcaccaagcaggaggtcatctga

SEQ ID NO: 1136 - RNA, 1314 nt, synthetic construct
  misc_feature 1..1314: note = CDS (opt1) from Homo sapiens__NP_000448.3__HNF4A(39-474)(S313A)
  source 1..1314: mol_type = other RNA
atggacaccagcccgtccgaggggaccaacctgaacgcccccaacagcctgggcgtgtccgccctctgcgccatctgcggggaccgggcgacgggcaagcactacggggccagctcctgcgacggctgcaagggcttcttccgccggagcgtccgcaagaaccacatgtactcctgccggttcagccgccagtgcgtggtggacaaggacaagcggaaccagtgccgctactgccggctgaagaagtgcttccgcgccgggatgaagaaggaggccgtccagaacgagcgggaccgcatctccacccggcgcagctcctacgaggacagctccctgcccagcatcaacgcgctcctgcaggccgaggtgctgtcccggcagatcaccagccccgtgtccggcatcaacggggacatccgcgccaagaagatcgccagcatcgccgacgtctgcgagagcatgaaggagcagctcctggtgctggtggagtgggcgaagtacatcccggccttctgcgagctccccctggacgaccaggtcgccctgctccgggcccacgccggcgagcacctcctgctgggggcgaccaagcgctccatggtgttcaaggacgtgctgctgctcggcaacgactacatcgtcccccggcactgccccgagctggccgagatgagccgcgtgtccatccggatcctggacgagctcgtgctgccgttccaggagctgcagatcgacgacaacgagtacgcctacctcaaggccatcatcttcttcgaccccgacgccaagggcctgagcgaccccgggaagatcaagcgcctgcgcgcgcaggtccaggtgagcctcgaggactacatcaacgaccggcagtacgactcccgcggccggttcggggagctgctgctcctgctgcccacgctccagagcatcacctggcagatgatcgagcagatccagttcatcaagctgttcggcatggcgaagatcgacaacctgctccaggagatgctgctgggcgggtccccgagcgacgcgccccacgcccaccaccccctccacccccacctgatgcaggagcacatgggcaccaacgtgatcgtcgccaacaccatgccgacgcacctgtccaacgggcagatgtgcgagtggccccgcccccggggccaggccgccacccccgagaccccgcagcccagcccgcccgggggctccggcagcgagccctacaagctgctccccggggccgtggccaccatcgtgaagcccctgtccgccatcccccagccgacgatcaccaagcaggaggtcatctga

SEQ ID NO: 1137 - RNA, 1314 nt, synthetic construct
  misc_feature 1..1314: note = CDS (opt1) from Homo sapiens__NP_000448.3__HNF4A(39-474)(S313E)
  source 1..1314: mol_type = other RNA
atggacaccagcccgtccgaggggaccaacctgaacgcccccaacagcctgggcgtgtccgccctctgcgccatctgcggggaccgggcgacgggcaagcactacggggccagctcctgcgacggctgcaagggcttcttccgccggagcgtccgcaagaaccacatgtactcctgccggttcagccgccagtgcgtggtggacaaggacaagcggaaccagtgccgctactgccggctgaagaagtgcttccgcgccgggatgaagaaggaggccgtccagaacgagcgggaccgcatctccacccggcgcagctcctacgaggacagctccctgcccagcatcaacgcgctcctgcaggccgaggtgctgtcccggcagatcaccagccccgtgtccggcatcaacggggacatccgcgccaagaagatcgccagcatcgccgacgtctgcgagagcatgaaggagcagctcctggtgctggtggagtgggcgaagtacatcccggccttctgcgagctccccctggacgaccaggtcgccctgctccgggcccacgccggcgagcacctcctgctgggggcgaccaagcgctccatggtgttcaaggacgtgctgctgctcggcaacgactacatcgtcccccggcactgccccgagctggccgagatgagccgcgtgtccatccggatcctggacgagctcgtgctgccgttccaggagctgcagatcgacgacaacgagtacgcctacctcaaggccatcatcttcttcgaccccgacgccaagggcctgagcgaccccgggaagatcaagcgcctgcgcgagcaggtccaggtgagcctcgaggactacatcaacgaccggcagtacgactcccgcggccggttcggggagctgctgctcctgctgcccacgctccagagcatcacctggcagatgatcgagcagatccagttcatcaagctgttcggcatggcgaagatcgacaacctgctccaggagatgctgctgggcgggtccccgagcgacgcgccccacgcccaccaccccctccacccccacctgatgcaggagcacatgggcaccaacgtgatcgtcgccaacaccatgccgacgcacctgtccaacgggcagatgtgcgagtggccccgcccccggggccaggccgccacccccgagaccccgcagcccagcccgcccgggggctccggcagcgagccctacaagctgctccccggggccgtggccaccatcgtgaagcccctgtccgccatcccccagccgacgatcaccaagcaggaggtcatctga

SEQ ID NO: 1138 - RNA, 1314 nt, synthetic construct
  misc_feature 1..1314: note = CDS (opt1) from Homo sapiens__NP_000448.3__HNF4A(39-474)(S142A_S143A)
  source 1..1314: mol_type = other RNA
atggacaccagcccgtccgaggggaccaacctgaacgcccccaacagcctgggcgtgtccgccctctgcgccatctgcggggaccgggcgacgggcaagcactacggggccagctcctgcgacggctgcaagggcttcttccgccggagcgtccgcaagaaccacatgtactcctgccggttcagccgccagtgcgtggtggacaaggacaagcggaaccagtgccgctactgccggctgaagaagtgcttccgcgccgggatgaagaaggaggccgtccagaacgagcgggaccgcatctccacccggcgcgcggcctacgaggacagctccctgcccagcatcaacgcgctcctgcaggccgaggtgctgtcccggcagatcaccagccccgtgtccggcatcaacggggacatccgcgccaagaagatcgccagcatcgccgacgtctgcgagagcatgaaggagcagctcctggtgctggtggagtgggcgaagtacatcccggccttctgcgagctccccctggacgaccaggtcgccctgctccgggcccacgccggcgagcacctcctgctgggggcgaccaagcgctccatggtgttcaaggacgtgctgctgctcggcaacgactacatcgtcccccggcactgccccgagctggccgagatgagccgcgtgtccatccggatcctggacgagctcgtgctgccgttccaggagctgcagatcgacgacaacgagtacgcctacctcaaggccatcatcttcttcgaccccgacgccaagggcctgagcgaccccgggaagatcaagcgcctgcgctcccaggtccaggtgagcctcgaggactacatcaacgaccggcagtacgactcccgcggccggttcggggagctgctgctcctgctgcccacgctccagagcatcacctggcagatgatcgagcagatccagttcatcaagctgttcggcatggcgaagatcgacaacctgctccaggagatgctgctgggcgggtccccgagcgacgcgccccacgcccaccaccccctccacccccacctgatgcaggagcacatgggcaccaacgtgatcgtcgccaacaccatgccgacgcacctgtccaacgggcagatgtgcgagtggccccgcccccggggccaggccgccacccccgagaccccgcagcccagcccgcccgggggctccggcagcgagccctacaagctgctccccggggccgtggccaccatcgtgaagcccctgtccgccatcccccagccgacgatcaccaagcaggaggtcatctga

SEQ ID NO: 1139 - RNA, 1314 nt, synthetic construct
  misc_feature 1..1314: note = CDS (opt1) from Homo sapiens__NP_000448.3__HNF4A(39-474)(S142E_S143E)
  source 1..1314: mol_type = other RNA
atggacaccagcccgtccgaggggaccaacctgaacgcccccaacagcctgggcgtgtccgccctctgcgccatctgcggggaccgggcgacgggcaagcactacggggccagctcctgcgacggctgcaagggcttcttccgccggagcgtccgcaagaaccacatgtactcctgccggttcagccgccagtgcgtggtggacaaggacaagcggaaccagtgccgctactgccggctgaagaagtgcttccgcgccgggatgaagaaggaggccgtccagaacgagcgggaccgcatctccacccggcgcgaggagtacgaggacagctccctgcccagcatcaacgcgctcctgcaggccgaggtgctgtcccggcagatcaccagccccgtgtccggcatcaacggggacatccgcgccaagaagatcgccagcatcgccgacgtctgcgagagcatgaaggagcagctcctggtgctggtggagtgggcgaagtacatcccggccttctgcgagctccccctggacgaccaggtcgccctgctccgggcccacgccggcgagcacctcctgctgggggcgaccaagcgctccatggtgttcaaggacgtgctgctgctcggcaacgactacatcgtcccccggcactgccccgagctggccgagatgagccgcgtgtccatccggatcctggacgagctcgtgctgccgttccaggagctgcagatcgacgacaacgagtacgcctacctcaaggccatcatcttcttcgaccccgacgccaagggcctgagcgaccccgggaagatcaagcgcctgcgctcccaggtccaggtgagcctcgaggactacatcaacgaccggcagtacgactcccgcggccggttcggggagctgctgctcctgctgcccacgctccagagcatcacctggcagatgatcgagcagatccagttcatcaagctgttcggcatggcgaagatcgacaacctgctccaggagatgctgctgggcgggtccccgagcgacgcgccccacgcccaccaccccctccacccccacctgatgcaggagcacatgggcaccaacgtgatcgtcgccaacaccatgccgacgcacctgtccaacgggcagatgtgcgagtggccccgcccccggggccaggccgccacccccgagaccccgcagcccagcccgcccgggggctccggcagcgagccctacaagctgctccccggggccgtggccaccatcgtgaagcccctgtccgccatcccccagccgacgatcaccaagcaggaggtcatctga

SEQ ID NO: 1140 - RNA, 1314 nt, synthetic construct
  misc_feature 1..1314: note = CDS (opt1) from Homo sapiens__NP_000448.3__HNF4A(39-474)(S143A)
  source 1..1314: mol_type = other RNA
atggacaccagcccgtccgaggggaccaacctgaacgcccccaacagcctgggcgtgtccgccctctgcgccatctgcggggaccgggcgacgggcaagcactacggggccagctcctgcgacggctgcaagggcttcttccgccggagcgtccgcaagaaccacatgtactcctgccggttcagccgccagtgcgtggtggacaaggacaagcggaaccagtgccgctactgccggctgaagaagtgcttccgcgccgggatgaagaaggaggccgtccagaacgagcgggaccgcatctccacccggcgcagcgcgtacgaggacagctccctgcccagcatcaacgcgctcctgcaggccgaggtgctgtcccggcagatcaccagccccgtgtccggcatcaacggggacatccgcgccaagaagatcgccagcatcgccgacgtctgcgagagcatgaaggagcagctcctggtgctggtggagtgggcgaagtacatcccggccttctgcgagctccccctggacgaccaggtcgccctgctccgggcccacgccggcgagcacctcctgctgggggcgaccaagcgctccatggtgttcaaggacgtgctgctgctcggcaacgactacatcgtcccccggcactgccccgagctggccgagatgagccgcgtgtccatccggatcctggacgagctcgtgctgccgttccaggagctgcagatcgacgacaacgagtacgcctacctcaaggccatcatcttcttcgaccccgacgccaagggcctgagcgaccccgggaagatcaagcgcctgcgctcccaggtccaggtgagcctcgaggactacatcaacgaccggcagtacgactcccgcggccggttcggggagctgctgctcctgctgcccacgctccagagcatcacctggcagatgatcgagcagatccagttcatcaagctgttcggcatggcgaagatcgacaacctgctccaggagatgctgctgggcgggtccccgagcgacgcgccccacgcccaccaccccctccacccccacctgatgcaggagcacatgggcaccaacgtgatcgtcgccaacaccatgccgacgcacctgtccaacgggcagatgtgcgagtggccccgcccccggggccaggccgccacccccgagaccccgcagcccagcccgcccgggggctccggcagcgagccctacaagctgctccccggggccgtggccaccatcgtgaagcccctgtccgccatcccccagccgacgatcaccaagcaggaggtcatctga

SEQ ID NO: 1141 - RNA, 1314 nt, synthetic construct
  misc_feature 1..1314: note = CDS (opt1) from Homo sapiens__NP_000448.3__HNF4A(39-474)(T166A)
  source 1..1314: mol_type = other RNA
atggacaccagcccgtccgaggggaccaacctgaacgcccccaacagcctgggcgtgtccgccctctgcgccatctgcggggaccgggcgacgggcaagcactacggggccagctcctgcgacggctgcaagggcttcttccgccggagcgtccgcaagaaccacatgtactcctgccggttcagccgccagtgcgtggtggacaaggacaagcggaaccagtgccgctactgccggctgaagaagtgcttccgcgccgggatgaagaaggaggccgtccagaacgagcgggaccgcatctccacccggcgcagctcctacgaggacagctccctgcccagcatcaacgcgctcctgcaggccgaggtgctgtcccggcagatcgcgagccccgtgtccggcatcaacggggacatccgcgccaagaagatcgccagcatcgccgacgtctgcgagagcatgaaggagcagctcctggtgctggtggagtgggcgaagtacatcccggccttctgcgagctccccctggacgaccaggtcgccctgctccgggcccacgccggcgagcacctcctgctgggggcgaccaagcgctccatggtgttcaaggacgtgctgctgctcggcaacgactacatcgtcccccggcactgccccgagctggccgagatgagccgcgtgtccatccggatcctggacgagctcgtgctgccgttccaggagctgcagatcgacgacaacgagtacgcctacctcaaggccatcatcttcttcgaccccgacgccaagggcctgagcgaccccgggaagatcaagcgcctgcgctcccaggtccaggtgagcctcgaggactacatcaacgaccggcagtacgactcccgcggccggttcggggagctgctgctcctgctgcccacgctccagagcatcacctggcagatgatcgagcagatccagttcatcaagctgttcggcatggcgaagatcgacaacctgctccaggagatgctgctgggcgggtccccgagcgacgcgccccacgcccaccaccccctccacccccacctgatgcaggagcacatgggcaccaacgtgatcgtcgccaacaccatgccgacgcacctgtccaacgggcagatgtgcgagtggccccgcccccggggccaggccgccacccccgagaccccgcagcccagcccgcccgggggctccggcagcgagccctacaagctgctccccggggccgtggccaccatcgtgaagcccctgtccgccatcccccagccgacgatcaccaagcaggaggtcatctga

SEQ ID NO: 1142 - RNA, 1314 nt, synthetic construct
  misc_feature 1..1314: note = CDS (opt1) from Homo sapiens__NP_000448.3__HNF4A(39-474)(S167E)
  source 1..1314: mol_type = other RNA
atggacaccagcccgtccgaggggaccaacctgaacgcccccaacagcctgggcgtgtccgccctctgcgccatctgcggggaccgggcgacgggcaagcactacggggccagctcctgcgacggctgcaagggcttcttccgccggagcgtccgcaagaaccacatgtactcctgccggttcagccgccagtgcgtggtggacaaggacaagcggaaccagtgccgctactgccggctgaagaagtgcttccgcgccgggatgaagaaggaggccgtccagaacgagcgggaccgcatctccacccggcgcagctcctacgaggacagctccctgcccagcatcaacgcgctcctgcaggccgaggtgctgtcccggcagatcaccgagcccgtgtccggcatcaacggggacatccgcgccaagaagatcgccagcatcgccgacgtctgcgagagcatgaaggagcagctcctggtgctggtggagtgggcgaagtacatcccggccttctgcgagctccccctggacgaccaggtcgccctgctccgggcccacgccggcgagcacctcctgctgggggcgaccaagcgctccatggtgttcaaggacgtgctgctgctcggcaacgactacatcgtcccccggcactgccccgagctggccgagatgagccgcgtgtccatccggatcctggacgagctcgtgctgccgttccaggagctgcagatcgacgacaacgagtacgcctacctcaaggccatcatcttcttcgaccccgacgccaagggcctgagcgaccccgggaagatcaagcgcctgcgctcccaggtccaggtgagcctcgaggactacatcaacgaccggcagtacgactcccgcggccggttcggggagctgctgctcctgctgcccacgctccagagcatcacctggcagatgatcgagcagatccagttcatcaagctgttcggcatggcgaagatcgacaacctgctccaggagatgctgctgggcgggtccccgagcgacgcgccccacgcccaccaccccctccacccccacctgatgcaggagcacatgggcaccaacgtgatcgtcgccaacaccatgccgacgcacctgtccaacgggcagatgtgcgagtggccccgcccccggggccaggccgccacccccgagaccccgcagcccagcccgcccgggggctccggcagcgagccctacaagctgctccccggggccgtggccaccatcgtgaagcccctgtccgccatcccccagccgacgatcaccaagcaggaggtcatctga

SEQ ID NO: 1143 - RNA, 1314 nt, synthetic construct
  misc_feature 1..1314: note = CDS (opt1) from Homo sapiens__NP_000448.3__HNF4A(39-474)(S167A)
  source 1..1314: mol_type = other RNA
atggacaccagcccgtccgaggggaccaacctgaacgcccccaacagcctgggcgtgtccgccctctgcgccatctgcggggaccgggcgacgggcaagcactacggggccagctcctgcgacggctgcaagggcttcttccgccggagcgtccgcaagaaccacatgtactcctgccggttcagccgccagtgcgtggtggacaaggacaagcggaaccagtgccgctactgccggctgaagaagtgcttccgcgccgggatgaagaaggaggccgtccagaacgagcgggaccgcatctccacccggcgcagctcctacgaggacagctccctgcccagcatcaacgcgctcctgcaggccgaggtgctgtcccggcagatcaccgcgcccgtgtccggcatcaacggggacatccgcgccaagaagatcgccagcatcgccgacgtctgcgagagcatgaaggagcagctcctggtgctggtggagtgggcgaagtacatcccggccttctgcgagctccccctggacgaccaggtcgccctgctccgggcccacgccggcgagcacctcctgctgggggcgaccaagcgctccatggtgttcaaggacgtgctgctgctcggcaacgactacatcgtcccccggcactgccccgagctggccgagatgagccgcgtgtccatccggatcctggacgagctcgtgctgccgttccaggagctgcagatcgacgacaacgagtacgcctacctcaaggccatcatcttcttcgaccccgacgccaagggcctgagcgaccccgggaagatcaagcgcctgcgctcccaggtccaggtgagcctcgaggactacatcaacgaccggcagtacgactcccgcggccggttcggggagctgctgctcctgctgcccacgctccagagcatcacctggcagatgatcgagcagatccagttcatcaagctgttcggcatggcgaagatcgacaacctgctccaggagatgctgctgggcgggtccccgagcgacgcgccccacgcccaccaccccctccacccccacctgatgcaggagcacatgggcaccaacgtgatcgtcgccaacaccatgccgacgcacctgtccaacgggcagatgtgcgagtggccccgcccccggggccaggccgccacccccgagaccccgcagcccagcccgcccgggggctccggcagcgagccctacaagctgctccccggggccgtggccaccatcgtgaagcccctgtccgccatcccccagccgacgatcaccaagcaggaggtcatctga

SEQ ID NO: 1144 - RNA, 1314 nt, synthetic construct
  misc_feature 1..1314: note = CDS (opt1) from Homo sapiens__NP_000448.3__HNF4A(39-474)(S167A_S378A_T429A_T432A _S436A)
  source 1..1314: mol_type = other RNA
atggacaccagcccgtccgaggggaccaacctgaacgcccccaacagcctgggcgtgtccgccctctgcgccatctgcggggaccgggcgacgggcaagcactacggggccagctcctgcgacggctgcaagggcttcttccgccggagcgtccgcaagaaccacatgtactcctgccggttcagccgccagtgcgtggtggacaaggacaagcggaaccagtgccgctactgccggctgaagaagtgcttccgcgccgggatgaagaaggaggccgtccagaacgagcgggaccgcatctccacccggcgcagctcctacgaggacagctccctgcccagcatcaacgcgctcctgcaggccgaggtgctgtcccggcagatcaccgcgcccgtgtccggcatcaacggggacatccgcgccaagaagatcgccagcatcgccgacgtctgcgagagcatgaaggagcagctcctggtgctggtggagtgggcgaagtacatcccggccttctgcgagctccccctggacgaccaggtcgccctgctccgggcccacgccggcgagcacctcctgctgggggcgaccaagcgctccatggtgttcaaggacgtgctgctgctcggcaacgactacatcgtcccccggcactgccccgagctggccgagatgagccgcgtgtccatccggatcctggacgagctcgtgctgccgttccaggagctgcagatcgacgacaacgagtacgcctacctcaaggccatcatcttcttcgaccccgacgccaagggcctgagcgaccccgggaagatcaagcgcctgcgctcccaggtccaggtgagcctcgaggactacatcaacgaccggcagtacgactcccgcggccggttcggggagctgctgctcctgctgcccacgctccagagcatcacctggcagatgatcgagcagatccagttcatcaagctgttcggcatggcgaagatcgacaacctgctccaggagatgctgctgggcggggcgccgagcgacgcgccccacgcccaccaccccctccacccccacctgatgcaggagcacatgggcaccaacgtgatcgtcgccaacaccatgccgacgcacctgtccaacgggcagatgtgcgagtggccccgcccccggggccaggccgccgcgcccgaggcgccgcagcccgcgccgcccgggggctccggcagcgagccctacaagctgctccccggggccgtggccaccatcgtgaagcccctgtccgccatcccccagccgacgatcaccaagcaggaggtcatctga

SEQ ID NO: 1145 - RNA, 1314 nt, synthetic construct
  misc_feature 1..1314: note = CDS (opt1) from Homo sapiens__NP_000448.3__HNF4A(39-474)(S167E_S378E_T429E_T432E _S436E)
  source 1..1314: mol_type = other RNA
atggacaccagcccgtccgaggggaccaacctgaacgcccccaacagcctgggcgtgtccgccctctgcgccatctgcggggaccgggcgacgggcaagcactacggggccagctcctgcgacggctgcaagggcttcttccgccggagcgtccgcaagaaccacatgtactcctgccggttcagccgccagtgcgtggtggacaaggacaagcggaaccagtgccgctactgccggctgaagaagtgcttccgcgccgggatgaagaaggaggccgtccagaacgagcgggaccgcatctccacccggcgcagctcctacgaggacagctccctgcccagcatcaacgcgctcctgcaggccgaggtgctgtcccggcagatcaccgagcccgtgtccggcatcaacggggacatccgcgccaagaagatcgccagcatcgccgacgtctgcgagagcatgaaggagcagctcctggtgctggtggagtgggcgaagtacatcccggccttctgcgagctccccctggacgaccaggtcgccctgctccgggcccacgccggcgagcacctcctgctgggggcgaccaagcgctccatggtgttcaaggacgtgctgctgctcggcaacgactacatcgtcccccggcactgccccgagctggccgagatgagccgcgtgtccatccggatcctggacgagctcgtgctgccgttccaggagctgcagatcgacgacaacgagtacgcctacctcaaggccatcatcttcttcgaccccgacgccaagggcctgagcgaccccgggaagatcaagcgcctgcgctcccaggtccaggtgagcctcgaggactacatcaacgaccggcagtacgactcccgcggccggttcggggagctgctgctcctgctgcccacgctccagagcatcacctggcagatgatcgagcagatccagttcatcaagctgttcggcatggcgaagatcgacaacctgctccaggagatgctgctgggcggggagccgagcgacgcgccccacgcccaccaccccctccacccccacctgatgcaggagcacatgggcaccaacgtgatcgtcgccaacaccatgccgacgcacctgtccaacgggcagatgtgcgagtggccccgcccccggggccaggccgccgagcccgaggagccgcagcccgagccgcccgggggctccggcagcgagccctacaagctgctccccggggccgtggccaccatcgtgaagcccctgtccgccatcccccagccgacgatcaccaagcaggaggtcatctga

SEQ ID NO: 1146 - RNA, 1314 nt, synthetic construct
  misc_feature 1..1314: note = CDS (opt1) from Homo sapiens__NP_000448.3__HNF4A(39-474)(S87A)
  source 1..1314: mol_type = other RNA
atggacaccagcccgtccgaggggaccaacctgaacgcccccaacagcctgggcgtgtccgccctctgcgccatctgcggggaccgggcgacgggcaagcactacggggccagctcctgcgacggctgcaagggcttcttccgccgggcggtccgcaagaaccacatgtactcctgccggttcagccgccagtgcgtggtggacaaggacaagcggaaccagtgccgctactgccggctgaagaagtgcttccgcgccgggatgaagaaggaggccgtccagaacgagcgggaccgcatctccacccggcgcagctcctacgaggacagctccctgcccagcatcaacgcgctcctgcaggccgaggtgctgtcccggcagatcaccagccccgtgtccggcatcaacggggacatccgcgccaagaagatcgccagcatcgccgacgtctgcgagagcatgaaggagcagctcctggtgctggtggagtgggcgaagtacatcccggccttctgcgagctccccctggacgaccaggtcgccctgctccgggcccacgccggcgagcacctcctgctgggggcgaccaagcgctccatggtgttcaaggacgtgctgctgctcggcaacgactacatcgtcccccggcactgccccgagctggccgagatgagccgcgtgtccatccggatcctggacgagctcgtgctgccgttccaggagctgcagatcgacgacaacgagtacgcctacctcaaggccatcatcttcttcgaccccgacgccaagggcctgagcgaccccgggaagatcaagcgcctgcgctcccaggtccaggtgagcctcgaggactacatcaacgaccggcagtacgactcccgcggccggttcggggagctgctgctcctgctgcccacgctccagagcatcacctggcagatgatcgagcagatccagttcatcaagctgttcggcatggcgaagatcgacaacctgctccaggagatgctgctgggcgggtccccgagcgacgcgccccacgcccaccaccccctccacccccacctgatgcaggagcacatgggcaccaacgtgatcgtcgccaacaccatgccgacgcacctgtccaacgggcagatgtgcgagtggccccgcccccggggccaggccgccacccccgagaccccgcagcccagcccgcccgggggctccggcagcgagccctacaagctgctccccggggccgtggccaccatcgtgaagcccctgtccgccatcccccagccgacgatcaccaagcaggaggtcatctga

SEQ ID NO: 1147 - RNA, 1314 nt, synthetic construct
  misc_feature 1..1314: note = CDS (opt1) from Homo sapiens__NP_000448.3__HNF4A(39-474)(S87E)
  source 1..1314: mol_type = other RNA
atggacaccagcccgtccgaggggaccaacctgaacgcccccaacagcctgggcgtgtccgccctctgcgccatctgcggggaccgggcgacgggcaagcactacggggccagctcctgcgacggctgcaagggcttcttccgccgggaggtccgcaagaaccacatgtactcctgccggttcagccgccagtgcgtggtggacaaggacaagcggaaccagtgccgctactgccggctgaagaagtgcttccgcgccgggatgaagaaggaggccgtccagaacgagcgggaccgcatctccacccggcgcagctcctacgaggacagctccctgcccagcatcaacgcgctcctgcaggccgaggtgctgtcccggcagatcaccagccccgtgtccggcatcaacggggacatccgcgccaagaagatcgccagcatcgccgacgtctgcgagagcatgaaggagcagctcctggtgctggtggagtgggcgaagtacatcccggccttctgcgagctccccctggacgaccaggtcgccctgctccgggcccacgccggcgagcacctcctgctgggggcgaccaagcgctccatggtgttcaaggacgtgctgctgctcggcaacgactacatcgtcccccggcactgccccgagctggccgagatgagccgcgtgtccatccggatcctggacgagctcgtgctgccgttccaggagctgcagatcgacgacaacgagtacgcctacctcaaggccatcatcttcttcgaccccgacgccaagggcctgagcgaccccgggaagatcaagcgcctgcgctcccaggtccaggtgagcctcgaggactacatcaacgaccggcagtacgactcccgcggccggttcggggagctgctgctcctgctgcccacgctccagagcatcacctggcagatgatcgagcagatccagttcatcaagctgttcggcatggcgaagatcgacaacctgctccaggagatgctgctgggcgggtccccgagcgacgcgccccacgcccaccaccccctccacccccacctgatgcaggagcacatgggcaccaacgtgatcgtcgccaacaccatgccgacgcacctgtccaacgggcagatgtgcgagtggccccgcccccggggccaggccgccacccccgagaccccgcagcccagcccgcccgggggctccggcagcgagccctacaagctgctccccggggccgtggccaccatcgtgaagcccctgtccgccatcccccagccgacgatcaccaagcaggaggtcatctga

SEQ ID NO: 1148 - RNA, 1314 nt, synthetic construct; identical to SEQ ID NO: 1135
  misc_feature 1..1314: note = CDS (opt1) from Homo sapiens__NP_000448.3__HNF4A(39-474)(R2V)
  source 1..1314: mol_type = other RNA

SEQ ID NO: 1149 - RNA, 1314 nt, synthetic construct; identical to SEQ ID NO: 1135
  misc_feature 1..1314: note = CDS (opt1) from Homo sapiens__NP_000448.3__HNF4A(39-474)(R2V_K5V)
  source 1..1314: mol_type = other RNA

SEQ ID NO: 1150 - RNA, 1314 nt, synthetic construct
  misc_feature 1..1314: note = CDS (opt1) from Homo sapiens__NP_000448.3__HNF4A(39-474)(K179R_K180R)
  source 1..1314: mol_type = other RNA
atggacaccagcccgtccgaggggaccaacctgaacgcccccaacagcctgggcgtgtccgccctctgcgccatctgcggggaccgggcgacgggcaagcactacggggccagctcctgcgacggctgcaagggcttcttccgccggagcgtccgcaagaaccacatgtactcctgccggttcagccgccagtgcgtggtggacaaggacaagcggaaccagtgccgctactgccggctgaagaagtgcttccgcgccgggatgaagaaggaggccgtccagaacgagcgggaccgcatctccacccggcgcagctcctacgaggacagctccctgcccagcatcaacgcgctcctgcaggccgaggtgctgtcccggcagatcaccagccccgtgtccggcatcaacggggacatccgcgcccggcgcatcgccagcatcgccgacgtctgcgagagcatgaaggagcagctcctggtgctggtggagtgggcgaagtacatcccggccttctgcgagctccccctggacgaccaggtcgccctgctccgggcccacgccggcgagcacctcctgctgggggcgaccaagcgctccatggtgttcaaggacgtgctgctgctcggcaacgactacatcgtcccccggcactgccccgagctggccgagatgagccgcgtgtccatccggatcctggacgagctcgtgctgccgttccaggagctgcagatcgacgacaacgagtacgcctacctcaaggccatcatcttcttcgaccccgacgccaagggcctgagcgaccccgggaagatcaagcgcctgcgctcccaggtccaggtgagcctcgaggactacatcaacgaccggcagtacgactcccgcggccggttcggggagctgctgctcctgctgcccacgctccagagcatcacctggcagatgatcgagcagatccagttcatcaagctgttcggcatggcgaagatcgacaacctgctccaggagatgctgctgggcgggtccccgagcgacgcgccccacgcccaccaccccctccacccccacctgatgcaggagcacatgggcaccaacgtgatcgtcgccaacaccatgccgacgcacctgtccaacgggcagatgtgcgagtggccccgcccccggggccaggccgccacccccgagaccccgcagcccagcccgcccgggggctccggcagcgagccctacaagctgctccccggggccgtggccaccatcgtgaagcccctgtccgccatcccccagccgacgatcaccaagcaggaggtcatctga

SEQ ID NO: 1151 - RNA, 1314 nt, synthetic construct
  misc_feature 1..1314: note = CDS (opt1) from Homo sapiens__NP_000448.3__HNF4A(39-474)(K234R)
  source 1..1314: mol_type = other RNA
atggacaccagcccgtccgaggggaccaacctgaacgcccccaacagcctgggcgtgtccgccctctgcgccatctgcggggaccgggcgacgggcaagcactacggggccagctcctgcgacggctgcaagggcttcttccgccggagcgtccgcaagaaccacatgtactcctgccggttcagccgccagtgcgtggtggacaaggacaagcggaaccagtgccgctactgccggctgaagaagtgcttccgcgccgggatgaagaaggaggccgtccagaacgagcgggaccgcatctccacccggcgcagctcctacgaggacagctccctgcccagcatcaacgcgctcctgcaggccgaggtgctgtcccggcagatcaccagccccgtgtccggcatcaacggggacatccgcgccaagaagatcgccagcatcgccgacgtctgcgagagcatgaaggagcagctcctggtgctggtggagtgggcgaagtacatcccggccttctgcgagctccccctggacgaccaggtcgccctgctccgggcccacgccggcgagcacctcctgctgggggcgacccgccgctccatggtgttcaaggacgtgctgctgctcggcaacgactacatcgtcccccggcactgccccgagctggccgagatgagccgcgtgtccatccggatcctggacgagctcgtgctgccgttccaggagctgcagatcgacgacaacgagtacgcctacctcaaggccatcatcttcttcgaccccgacgccaagggcctgagcgaccccgggaagatcaagcgcctgcgctcccaggtccaggtgagcctcgaggactacatcaacgaccggcagtacgactcccgcggccggttcggggagctgctgctcctgctgcccacgctccagagcatcacctggcagatgatcgagcagatccagttcatcaagctgttcggcatggcgaagatcgacaacctgctccaggagatgctgctgggcgggtccccgagcgacgcgccccacgcccaccaccccctccacccccacctgatgcaggagcacatgggcaccaacgtgatcgtcgccaacaccatgccgacgcacctgtccaacgggcagatgtgcgagtggccccgcccccggggccaggccgccacccccgagaccccgcagcccagcccgcccgggggctccggcagcgagccctacaagctgctccccggggccgtggccaccatcgtgaagcccctgtccgccatcccccagccgacgatcaccaagcaggaggtcatctga

SEQ ID NO: 1152 - RNA, 1314 nt, synthetic construct
  misc_feature 1..1314: note = CDS (opt1) from Homo sapiens__NP_000448.3__HNF4A(39-474)(K300R)
  source 1..1314: mol_type = other RNA
atggacaccagcccgtccgaggggaccaacctgaacgcccccaacagcctgggcgtgtccgccctctgcgccatctgcggggaccgggcgacgggcaagcactacggggccagctcctgcgacggctgcaagggcttcttccgccggagcgtccgcaagaaccacatgtactcctgccggttcagccgccagtgcgtggtggacaaggacaagcggaaccagtgccgctactgccggctgaagaagtgcttccgcgccgggatgaagaaggaggccgtccagaacgagcgggaccgcatctccacccggcgcagctcctacgaggacagctccctgcccagcatcaacgcgctcctgcaggccgaggtgctgtcccggcagatcaccagccccgtgtccggcatcaacggggacatccgcgccaagaagatcgccagcatcgccgacgtctgcgagagcatgaaggagcagctcctggtgctggtggagtgggcgaagtacatcccggccttctgcgagctccccctggacgaccaggtcgccctgctccgggcccacgccggcgagcacctcctgctgggggcgaccaagcgctccatggtgttcaaggacgtgctgctgctcggcaacgactacatcgtcccccggcactgccccgagctggccgagatgagccgcgtgtccatccggatcctggacgagctcgtgctgccgttccaggagctgcagatcgacgacaacgagtacgcctacctcaaggccatcatcttcttcgaccccgacgcccgcggcctgagcgaccccgggaagatcaagcgcctgcgctcccaggtccaggtgagcctcgaggactacatcaacgaccggcagtacgactcccgcggccggttcggggagctgctgctcctgctgcccacgctccagagcatcacctggcagatgatcgagcagatccagttcatcaagctgttcggcatggcgaagatcgacaacctgctccaggagatgctgctgggcgggtccccgagcgacgcgccccacgcccaccaccccctccacccccacctgatgcaggagcacatgggcaccaacgtgatcgtcgccaacaccatgccgacgcacctgtccaacgggcagatgtgcgagtggccccgcccccggggccaggccgccacccccgagaccccgcagcccagcccgcccgggggctccggcagcgagccctacaagctgctccccggggccgtggccaccatcgtgaagcccctgtccgccatcccccagccgacgatcaccaagcaggaggtcatctga

SEQ ID NO: 1153 - RNA, 1314 nt, synthetic construct
  misc_feature 1..1314: note = CDS (opt1) from Homo sapiens__NP_000448.3__HNF4A(39-474)(K300R_K307R_K309R)
  source 1..1314: mol_type = other RNA
atggacaccagcccgtccgaggggaccaacctgaacgcccccaacagcctgggcgtgtccgccctctgcgccatctgcggggaccgggcgacgggcaagcactacggggccagctcctgcgacggctgcaagggcttcttccgccggagcgtccgcaagaaccacatgtactcctgccggttcagccgccagtgcgtggtggacaaggacaagcggaaccagtgccgctactgccggctgaagaagtgcttccgcgccgggatgaagaaggaggccgtccagaacgagcgggaccgcatctccacccggcgcagctcctacgaggacagctccctgcccagcatcaacgcgctcctgcaggccgaggtgctgtcccggcagatcaccagccccgtgtccggcatcaacggggacatccgcgccaagaagatcgccagcatcgccgacgtctgcgagagcatgaaggagcagctcctggtgctggtggagtgggcgaagtacatcccggccttctgcgagctccccctggacgaccaggtcgccctgctccgggcccacgccggcgagcacctcctgctgggggcgaccaagcgctccatggtgttcaaggacgtgctgctgctcggcaacgactacatcgtcccccggcactgccccgagctggccgagatgagccgcgtgtccatccggatcctggacgagctcgtgctgccgttccaggagctgcagatcgacgacaacgagtacgcctacctcaaggccatcatcttcttcgaccccgacgcccgcggcctgagcgaccccgggcgcatccggcgcctgcgctcccaggtccaggtgagcctcgaggactacatcaacgaccggcagtacgactcccgcggccggttcggggagctgctgctcctgctgcccacgctccagagcatcacctggcagatgatcgagcagatccagttcatcaagctgttcggcatggcgaagatcgacaacctgctccaggagatgctgctgggcgggtccccgagcgacgcgccccacgcccaccaccccctccacccccacctgatgcaggagcacatgggcaccaacgtgatcgtcgccaacaccatgccgacgcacctgtccaacgggcagatgtgcgagtggccccgcccccggggccaggccgccacccccgagaccccgcagcccagcccgcccgggggctccggcagcgagccctacaagctgctccccggggccgtggccaccatcgtgaagcccctgtccgccatcccccagccgacgatcaccaagcaggaggtcatctga

SEQ ID NO: 1154 - RNA, 1314 nt, synthetic construct
  misc_feature 1..1314: note = CDS (opt1) from Homo sapiens__NP_000448.3__HNF4A(39-474)(K447R_K470R)
  source 1..1314: mol_type = other RNA
atggacaccagcccgtccgaggggaccaacctgaacgcccccaacagcctgggcgtgtccgccctctgcgccatctgcggggaccgggcgacgggcaagcactacggggccagctcctgcgacggctgcaagggcttcttccgccggagcgtccgcaagaaccacatgtactcctgccggttcagccgccagtgcgtggtggacaaggacaagcggaaccagtgccgctactgccggctgaagaagtgcttccgcgccgggatgaagaaggaggccgtccagaacgagcgggaccgcatctccacccggcgcagctcctacgaggacagctccctgcccagcatcaacgcgctcctgcaggccgaggtgctgtcccggcagatcaccagccccgtgtccggcatcaacggggacatccgcgccaagaagatcgccagcatcgccgacgtctgcgagagcatgaaggagcagctcctggtgctggtggagtgggcgaagtacatcccggccttctgcgagctccccctggacgaccaggtcgccctgctccgggcccacgccggcgagcacctcctgctgggggcgaccaagcgctccatggtgttcaaggacgtgctgctgctcggcaacgactacatcgtcccccggcactgccccgagctggccgagatgagccgcgtgtccatccggatcctggacgagctcgtgctgccgttccaggagctgcagatcgacgacaacgagtacgcctacctcaaggccatcatcttcttcgaccccgacgccaagggcctgagcgaccccgggaagatcaagcgcctgcgctcccaggtccaggtgagcctcgaggactacatcaacgaccggcagtacgactcccgcggccggttcggggagctgctgctcctgctgcccacgctccagagcatcacctggcagatgatcgagcagatccagttcatcaagctgttcggcatggcgaagatcgacaacctgctccaggagatgctgctgggcgggtccccgagcgacgcgccccacgcccaccaccccctccacccccacctgatgcaggagcacatgggcaccaacgtgatcgtcgccaacaccatgccgacgcacctgtccaacgggcagatgtgcgagtggccccgcccccggggccaggccgccacccccgagaccccgcagcccagcccgcccgggggctccggcagcgagccctaccggctgctccccggggccgtggccaccatcgtgaagcccctgtccgccatcccccagccgacgatcacccggcaggaggtcatctga

SEQ ID NO: 1155 - RNA, 1314 nt, synthetic construct
  misc_feature 1..1314: note = CDS (opt1) from Homo sapiens__NP_000448.3__HNF4A(39-474)(K458R)
  source 1..1314: mol_type = other RNA
atggacaccagcccgtccgaggggaccaacctgaacgcccccaacagcctgggcgtgtccgccctctgcgccatctgcggggaccgggcgacgggcaagcactacggggccagctcctgcgacggctgcaagggcttcttccgccggagcgtccgcaagaaccacatgtactcctgccggttcagccgccagtgcgtggtggacaaggacaagcggaaccagtgccgctactgccggctgaagaagtgcttccgcgccgggatgaagaaggaggccgtccagaacgagcgggaccgcatctccacccggcgcagctcctacgaggacagctccctgcccagcatcaacgcgctcctgcaggccgaggtgctgtcccggcagatcaccagccccgtgtccggcatcaacggggacatccgcgccaagaagatcgccagcatcgccgacgtctgcgagagcatgaaggagcagctcctggtgctggtggagtgggcgaagtacatcccggccttctgcgagctccccctggacgaccaggtcgccctgctccgggcccacgccggcgagcacctcctgctgggggcgaccaagcgctccatggtgttcaaggacgtgctgctgctcggcaacgactacatcgtcccccggcactgccccgagctggccgagatgagccgcgtgtccatccggatcctggacgagctcgtgctgccgttccaggagctgcagatcgacgacaacgagtacgcctacctcaaggccatcatcttcttcgaccccgacgccaagggcctgagcgaccccgggaagatcaagcgcctgcgctcccaggtccaggtgagcctcgaggactacatcaacgaccggcagtacgactcccgcggccggttcggggagctgctgctcctgctgcccacgctccagagcatcacctggcagatgatcgagcagatccagttcatcaagctgttcggcatggcgaagatcgacaacctgctccaggagatgctgctgggcgggtccccgagcgacgcgccccacgcccaccaccccctccacccccacctgatgcaggagcacatgggcaccaacgtgatcgtcgccaacaccatgccgacgcacctgtccaacgggcagatgtgcgagtggccccgcccccggggccaggccgccacccccgagaccccgcagcccagcccgcccgggggctccggcagcgagccctacaagctgctccccggggccgtggccaccatcgtgcggcccctgtccgccatcccccagccgacgatcaccaagcaggaggtcatctga

SEQ ID NO: 1156 - RNA, 1314 nt, synthetic construct
  misc_feature 1..1314: note = CDS (opt1) from Homo sapiens__NP_000448.3__HNF4A(39-474)(K106R_K108R_K126R_K127R )
  source 1..1314: mol_type = other RNA
atggacaccagcccgtccgaggggaccaacctgaacgcccccaacagcctgggcgtgtccgccctctgcgccatctgcggggaccgggcgacgggcaagcactacggggccagctcctgcgacggctgcaagggcttcttccgccggagcgtccgcaagaaccacatgtactcctgccggttcagccgccagtgcgtggtggaccgcgaccggcggaaccagtgccgctactgccggctgaagaagtgcttccgcgccgggatgcgccgcgaggccgtccagaacgagcgggaccgcatctccacccggcgcagctcctacgaggacagctccctgcccagcatcaacgcgctcctgcaggccgaggtgctgtcccggcagatcaccagccccgtgtccggcatcaacggggacatccgcgccaagaagatcgccagcatcgccgacgtctgcgagagcatgaaggagcagctcctggtgctggtggagtgggcgaagtacatcccggccttctgcgagctccccctggacgaccaggtcgccctgctccgggcccacgccggcgagcacctcctgctgggggcgaccaagcgctccatggtgttcaaggacgtgctgctgctcggcaacgactacatcgtcccccggcactgccccgagctggccgagatgagccgcgtgtccatccggatcctggacgagctcgtgctgccgttccaggagctgcagatcgacgacaacgagtacgcctacctcaaggccatcatcttcttcgaccccgacgccaagggcctgagcgaccccgggaagatcaagcgcctgcgctcccaggtccaggtgagcctcgaggactacatcaacgaccggcagtacgactcccgcggccggttcggggagctgctgctcctgctgcccacgctccagagcatcacctggcagatgatcgagcagatccagttcatcaagctgttcggcatggcgaagatcgacaacctgctccaggagatgctgctgggcgggtccccgagcgacgcgccccacgcccaccaccccctccacccccacctgatgcaggagcacatgggcaccaacgtgatcgtcgccaacaccatgccgacgcacctgtccaacgggcagatgtgcgagtggccccgcccccggggccaggccgccacccccgagaccccgcagcccagcccgcccgggggctccggcagcgagccctacaagctgctccccggggccgtggccaccatcgtgaagcccctgtccgccatcccccagccgacgatcaccaagcaggaggtcatctga

SEQ ID NO: 1157 - RNA, 1314 nt, synthetic construct
  misc_feature 1..1314: note = CDS (opt1) from Homo sapiens__NP_000448.3__HNF4A(39-474)(E285Q)
  source 1..1314: mol_type = other RNA
atggacaccagcccgtccgaggggaccaacctgaacgcccccaacagcctgggcgtgtccgccctctgcgccatctgcggggaccgggcgacgggcaagcactacggggccagctcctgcgacggctgcaagggcttcttccgccggagcgtccgcaagaaccacatgtactcctgccggttcagccgccagtgcgtggtggacaaggacaagcggaaccagtgccgctactgccggctgaagaagtgcttccgcgccgggatgaagaaggaggccgtccagaacgagcgggaccgcatctccacccggcgcagctcctacgaggacagctccctgcccagcatcaacgcgctcctgcaggccgaggtgctgtcccggcagatcaccagccccgtgtccggcatcaacggggacatccgcgccaagaagatcgccagcatcgccgacgtctgcgagagcatgaaggagcagctcctggtgctggtggagtgggcgaagtacatcccggccttctgcgagctccccctggacgaccaggtcgccctgctccgggcccacgccggcgagcacctcctgctgggggcgaccaagcgctccatggtgttcaaggacgtgctgctgctcggcaacgactacatcgtcccccggcactgccccgagctggccgagatgagccgcgtgtccatccggatcctggacgagctcgtgctgccgttccaggagctgcagatcgacgacaaccagtacgcctacctcaaggccatcatcttcttcgaccccgacgccaagggcctgagcgaccccgggaagatcaagcgcctgcgctcccaggtccaggtgagcctcgaggactacatcaacgaccggcagtacgactcccgcggccggttcggggagctgctgctcctgctgcccacgctccagagcatcacctggcagatgatcgagcagatccagttcatcaagctgttcggcatggcgaagatcgacaacctgctccaggagatgctgctgggcgggtccccgagcgacgcgccccacgcccaccaccccctccacccccacctgatgcaggagcacatgggcaccaacgtgatcgtcgccaacaccatgccgacgcacctgtccaacgggcagatgtgcgagtggccccgcccccggggccaggccgccacccccgagaccccgcagcccagcccgcccgggggctccggcagcgagccctacaagctgctccccggggccgtggccaccatcgtgaagcccctgtccgccatcccccagccgacgatcaccaagcaggaggtcatctga

SEQ ID NO: 1158 - RNA, 1314 nt, synthetic construct
  misc_feature 1..1314: note = CDS (opt1) from Homo sapiens__NP_000448.3__HNF4A(39-474)(T166E)
  source 1..1314: mol_type = other RNA
atggacaccagcccgtccgaggggaccaacctgaacgcccccaacagcctgggcgtgtccgccctctgcgccatctgcggggaccgggcgacgggcaagcactacggggccagctcctgcgacggctgcaagggcttcttccgccggagcgtccgcaagaaccacatgtactcctgccggttcagccgccagtgcgtggtggacaaggacaagcggaaccagtgccgctactgccggctgaagaagtgcttccgcgccgggatgaagaaggaggccgtccagaacgagcgggaccgcatctccacccggcgcagctcctacgaggacagctccctgcccagcatcaacgcgctcctgcaggccgaggtgctgtcccggcagatcgagagccccgtgtccggcatcaacggggacatccgcgccaagaagatcgccagcatcgccgacgtctgcgagagcatgaaggagcagctcctggtgctggtggagtgggcgaagtacatcccggccttctgcgagctccccctggacgaccaggtcgccctgctccgggcccacgccggcgagcacctcctgctgggggcgaccaagcgctccatggtgttcaaggacgtgctgctgctcggcaacgactacatcgtcccccggcactgccccgagctggccgagatgagccgcgtgtccatccggatcctggacgagctcgtgctgccgttccaggagctgcagatcgacgacaacgagtacgcctacctcaaggccatcatcttcttcgaccccgacgccaagggcctgagcgaccccgggaagatcaagcgcctgcgctcccaggtccaggtgagcctcgaggactacatcaacgaccggcagtacgactcccgcggccggttcggggagctgctgctcctgctgcccacgctccagagcatcacctggcagatgatcgagcagatccagttcatcaagctgttcggcatggcgaagatcgacaacctgctccaggagatgctgctgggcgggtccccgagcgacgcgccccacgcccaccaccccctccacccccacctgatgcaggagcacatgggcaccaacgtgatcgtcgccaacaccatgccgacgcacctgtccaacgggcagatgtgcgagtggccccgcccccggggccaggccgccacccccgagaccccgcagcccagcccgcccgggggctccggcagcgagccctacaagctgctccccggggccgtggccaccatcgtgaagcccctgtccgccatcccccagccgacgatcaccaagcaggaggtcatctga

SEQ ID NO: 1159 - RNA, 1314 nt, synthetic construct
  misc_feature 1..1314: note = CDS (opt1) from Homo sapiens__NP_000448.3__HNF4A(39-474)(S148A)
  source 1..1314: mol_type = other RNA
atggacaccagcccgtccgaggggaccaacctgaacgcccccaacagcctgggcgtgtccgccctctgcgccatctgcggggaccgggcgacgggcaagcactacggggccagctcctgcgacggctgcaagggcttcttccgccggagcgtccgcaagaaccacatgtactcctgccggttcagccgccagtgcgtggtggacaaggacaagcggaaccagtgccgctactgccggctgaagaagtgcttccgcgccgggatgaagaaggaggccgtccagaacgagcgggaccgcatctccacccggcgcagctcctacgaggacagcgcgctgcccagcatcaacgcgctcctgcaggccgaggtgctgtcccggcagatcaccagccccgtgtccggcatcaacggggacatccgcgccaagaagatcgccagcatcgccgacgtctgcgagagcatgaaggagcagctcctggtgctggtggagtgggcgaagtacatcccggccttctgcgagctccccctggacgaccaggtcgccctgctccgggcccacgccggcgagcacctcctgctgggggcgaccaagcgctccatggtgttcaaggacgtgctgctgctcggcaacgactacatcgtcccccggcactgccccgagctggccgagatgagccgcgtgtccatccggatcctggacgagctcgtgctgccgttccaggagctgcagatcgacgacaacgagtacgcctacctcaaggccatcatcttcttcgaccccgacgccaagggcctgagcgaccccgggaagatcaagcgcctgcgctcccaggtccaggtgagcctcgaggactacatcaacgaccggcagtacgactcccgcggccggttcggggagctgctgctcctgctgcccacgctccagagcatcacctggcagatgatcgagcagatccagttcatcaagctgttcggcatggcgaagatcgacaacctgctccaggagatgctgctgggcgggtccccgagcgacgcgccccacgcccaccaccccctccacccccacctgatgcaggagcacatgggcaccaacgtgatcgtcgccaacaccatgccgacgcacctgtccaacgggcagatgtgcgagtggccccgcccccggggccaggccgccacccccgagaccccgcagcccagcccgcccgggggctccggcagcgagccctacaagctgctccccggggccgtggccaccatcgtgaagcccctgtccgccatcccccagccgacgatcaccaagcaggaggtcatctga

SEQ ID NO: 1160 - RNA, 1314 nt, synthetic construct
  misc_feature 1..1314: note = CDS (opt1) from Homo sapiens__NP_000448.3__HNF4A(39-474)(S148E)
  source 1..1314: mol_type = other RNA
atggacaccagcccgtccgaggggaccaacctgaacgcccccaacagcctgggcgtgtccgccctctgcgccatctgcggggaccgggcgacgggcaagcactacggggccagctcctgcgacggctgcaagggcttcttccgccggagcgtccgcaagaaccacatgtactcctgccggttcagccgccagtgcgtggtggacaaggacaagcggaaccagtgccgctactgccggctgaagaagtgcttccgcgccgggatgaagaaggaggccgtccagaacgagcgggaccgcatctccacccggcgcagctcctacgaggacagcgagctgcccagcatcaacgcgctcctgcaggccgaggtgctgtcccggcagatcaccagccccgtgtccggcatcaacggggacatccgcgccaagaagatcgccagcatcgccgacgtctgcgagagcatgaaggagcagctcctggtgctggtggagtgggcgaagtacatcccggccttctgcgagctccccctggacgaccaggtcgccctgctccgggcccacgccggcgagcacctcctgctgggggcgaccaagcgctccatggtgttcaaggacgtgctgctgctcggcaacgactacatcgtcccccggcactgccccgagctggccgagatgagccgcgtgtccatccggatcctggacgagctcgtgctgccgttccaggagctgcagatcgacgacaacgagtacgcctacctcaaggccatcatcttcttcgaccccgacgccaagggcctgagcgaccccgggaagatcaagcgcctgcgctcccaggtccaggtgagcctcgaggactacatcaacgaccggcagtacgactcccgcggccggttcggggagctgctgctcctgctgcccacgctccagagcatcacctggcagatgatcgagcagatccagttcatcaagctgttcggcatggcgaagatcgacaacctgctccaggagatgctgctgggcgggtccccgagcgacgcgccccacgcccaccaccccctccacccccacctgatgcaggagcacatgggcaccaacgtgatcgtcgccaacaccatgccgacgcacctgtccaacgggcagatgtgcgagtggccccgcccccggggccaggccgccacccccgagaccccgcagcccagcccgcccgggggctccggcagcgagccctacaagctgctccccggggccgtggccaccatcgtgaagcccctgtccgccatcccccagccgacgatcaccaagcaggaggtcatctga

SEQ ID NO: 1161 - RNA, 1314 nt, synthetic construct
  misc_feature 1..1314: note = CDS (opt1) from Homo sapiens__NP_000448.3__HNF4A(39-474)(S183A)
  source 1..1314: mol_type = other RNA
atggacaccagcccgtccgaggggaccaacctgaacgcccccaacagcctgggcgtgtccgccctctgcgccatctgcggggaccgggcgacgggcaagcactacggggccagctcctgcgacggctgcaagggcttcttccgccggagcgtccgcaagaaccacatgtactcctgccggttcagccgccagtgcgtggtggacaaggacaagcggaaccagtgccgctactgccggctgaagaagtgcttccgcgccgggatgaagaaggaggccgtccagaacgagcgggaccgcatctccacccggcgcagctcctacgaggacagctccctgcccagcatcaacgcgctcctgcaggccgaggtgctgtcccggcagatcaccagccccgtgtccggcatcaacggggacatccgcgccaagaagatcgccgcgatcgccgacgtctgcgagagcatgaaggagcagctcctggtgctggtggagtgggcgaagtacatcccggccttctgcgagctccccctggacgaccaggtcgccctgctccgggcccacgccggcgagcacctcctgctgggggcgaccaagcgctccatggtgttcaaggacgtgctgctgctcggcaacgactacatcgtcccccggcactgccccgagctggccgagatgagccgcgtgtccatccggatcctggacgagctcgtgctgccgttccaggagctgcagatcgacgacaacgagtacgcctacctcaaggccatcatcttcttcgaccccgacgccaagggcctgagcgaccccgggaagatcaagcgcctgcgctcccaggtccaggtgagcctcgaggactacatcaacgaccggcagtacgactcccgcggccggttcggggagctgctgctcctgctgcccacgctccagagcatcacctggcagatgatcgagcagatccagttcatcaagctgttcggcatggcgaagatcgacaacctgctccaggagatgctgctgggcgggtccccgagcgacgcgccccacgcccaccaccccctccacccccacctgatgcaggagcacatgggcaccaacgtgatcgtcgccaacaccatgccgacgcacctgtccaacgggcagatgtgcgagtggccccgcccccggggccaggccgccacccccgagaccccgcagcccagcccgcccgggggctccggcagcgagccctacaagctgctccccggggccgtggccaccatcgtgaagcccctgtccgccatcccccagccgacgatcaccaagcaggaggtcatctga

SEQ ID NO: 1162 - RNA, 1314 nt, synthetic construct
  misc_feature 1..1314: note = CDS (opt1) from Homo sapiens__NP_000448.3__HNF4A(39-474)(S183E)
  source 1..1314: mol_type = other RNA
atggacaccagcccgtccgaggggaccaacctgaacgcccccaacagcctgggcgtgtccgccctctgcgccatctgcggggaccgggcgacgggcaagcactacggggccagctcctgcgacggctgcaagggcttcttccgccggagcgtccgcaagaaccacatgtactcctgccggttcagccgccagtgcgtggtggacaaggacaagcggaaccagtgccgctactgccggctgaagaagtgcttccgcgccgggatgaagaaggaggccgtccagaacgagcgggaccgcatctccacccggcgcagctcctacgaggacagctccctgcccagcatcaacgcgctcctgcaggccgaggtgctgtcccggcagatcaccagccccgtgtccggcatcaacggggacatccgcgccaagaagatcgccgagatcgccgacgtctgcgagagcatgaaggagcagctcctggtgctggtggagtgggcgaagtacatcccggccttctgcgagctccccctggacgaccaggtcgccctgctccgggcccacgccggcgagcacctcctgctgggggcgaccaagcgctccatggtgttcaaggacgtgctgctgctcggcaacgactacatcgtcccccggcactgccccgagctggccgagatgagccgcgtgtccatccggatcctggacgagctcgtgctgccgttccaggagctgcagatcgacgacaacgagtacgcctacctcaaggccatcatcttcttcgaccccgacgccaagggcctgagcgaccccgggaagatcaagcgcctgcgctcccaggtccaggtgagcctcgaggactacatcaacgaccggcagtacgactcccgcggccggttcggggagctgctgctcctgctgcccacgctccagagcatcacctggcagatgatcgagcagatccagttcatcaagctgttcggcatggcgaagatcgacaacctgctccaggagatgctgctgggcgggtccccgagcgacgcgccccacgcccaccaccccctccacccccacctgatgcaggagcacatgggcaccaacgtgatcgtcgccaacaccatgccgacgcacctgtccaacgggcagatgtgcgagtggccccgcccccggggccaggccgccacccccgagaccccgcagcccagcccgcccgggggctccggcagcgagccctacaagctgctccccggggccgtggccaccatcgtgaagcccctgtccgccatcccccagccgacgatcaccaagcaggaggtcatctga

SEQ ID NO: 1163 - RNA, 1314 nt, synthetic construct
  misc_feature 1..1314: note = CDS (opt1) from Homo sapiens__NP_000448.3__HNF4A(39-474)(S461A)
  source 1..1314: mol_type = other RNA
atggacaccagcccgtccgaggggaccaacctgaacgcccccaacagcctgggcgtgtccgccctctgcgccatctgcggggaccgggcgacgggcaagcactacggggccagctcctgcgacggctgcaagggcttcttccgccggagcgtccgcaagaaccacatgtactcctgccggttcagccgccagtgcgtggtggacaaggacaagcggaaccagtgccgctactgccggctgaagaagtgcttccgcgccgggatgaagaaggaggccgtccagaacgagcgggaccgcatctccacccggcgcagctcctacgaggacagctccctgcccagcatcaacgcgctcctgcaggccgaggtgctgtcccggcagatcaccagccccgtgtccggcatcaacggggacatccgcgccaagaagatcgccagcatcgccgacgtctgcgagagcatgaaggagcagctcctggtgctggtggagtgggcgaagtacatcccggccttctgcgagctccccctggacgaccaggtcgccctgctccgggcccacgccggcgagcacctcctgctgggggcgaccaagcgctccatggtgttcaaggacgtgctgctgctcggcaacgactacatcgtcccccggcactgccccgagctggccgagatgagccgcgtgtccatccggatcctggacgagctcgtgctgccgttccaggagctgcagatcgacgacaacgagtacgcctacctcaaggccatcatcttcttcgaccccgacgccaagggcctgagcgaccccgggaagatcaagcgcctgcgctcccaggtccaggtgagcctcgaggactacatcaacgaccggcagtacgactcccgcggccggttcggggagctgctgctcctgctgcccacgctccagagcatcacctggcagatgatcgagcagatccagttcatcaagctgttcggcatggcgaagatcgacaacctgctccaggagatgctgctgggcgggtccccgagcgacgcgccccacgcccaccaccccctccacccccacctgatgcaggagcacatgggcaccaacgtgatcgtcgccaacaccatgccgacgcacctgtccaacgggcagatgtgcgagtggccccgcccccggggccaggccgccacccccgagaccccgcagcccagcccgcccgggggctccggcagcgagccctacaagctgctccccggggccgtggccaccatcgtgaagcccctggcggccatcccccagccgacgatcaccaagcaggaggtcatctga

SEQ ID NO: 1164 - RNA, 1314 nt, synthetic construct
  misc_feature 1..1314: note = CDS (opt1) from Homo sapiens__NP_000448.3__HNF4A(39-474)(S461E)
  source 1..1314: mol_type = other RNA
atggacaccagcccgtccgaggggaccaacctgaacgcccccaacagcctgggcgtgtccgccctctgcgccatctgcggggaccgggcgacgggcaagcactacggggccagctcctgcgacggctgcaagggcttcttccgccggagcgtccgcaagaaccacatgtactcctgccggttcagccgccagtgcgtggtggacaaggacaagcggaaccagtgccgctactgccggctgaagaagtgcttccgcgccgggatgaagaaggaggccgtccagaacgagcgggaccgcatctccacccggcgcagctcctacgaggacagctccctgcccagcatcaacgcgctcctgcaggccgaggtgctgtcccggcagatcaccagccccgtgtccggcatcaacggggacatccgcgccaagaagatcgccagcatcgccgacgtctgcgagagcatgaaggagcagctcctggtgctggtggagtgggcgaagtacatcccggccttctgcgagctccccctggacgaccaggtcgccctgctccgggcccacgccggcgagcacctcctgctgggggcgaccaagcgctccatggtgttcaaggacgtgctgctgctcggcaacgactacatcgtcccccggcactgccccgagctggccgagatgagccgcgtgtccatccggatcctggacgagctcgtgctgccgttccaggagctgcagatcgacgacaacgagtacgcctacctcaaggccatcatcttcttcgaccccgacgccaagggcctgagcgaccccgggaagatcaagcgcctgcgctcccaggtccaggtgagcctcgaggactacatcaacgaccggcagtacgactcccgcggccggttcggggagctgctgctcctgctgcccacgctccagagcatcacctggcagatgatcgagcagatccagttcatcaagctgttcggcatggcgaagatcgacaacctgctccaggagatgctgctgggcgggtccccgagcgacgcgccccacgcccaccaccccctccacccccacctgatgcaggagcacatgggcaccaacgtgatcgtcgccaacaccatgccgacgcacctgtccaacgggcagatgtgcgagtggccccgcccccggggccaggccgccacccccgagaccccgcagcccagcccgcccgggggctccggcagcgagccctacaagctgctccccggggccgtggccaccatcgtgaagcccctggaggccatcccccagccgacgatcaccaagcaggaggtcatctga

SEQ ID NO: 1165 - RNA, 1314 nt, synthetic construct
  misc_feature 1..1314: note = CDS (opt1) from Homo sapiens__NP_000448.3__HNF4A(39-474)(S142A_S143A_S313A)
  source 1..1314: mol_type = other RNA
atggacaccagcccgtccgaggggaccaacctgaacgcccccaacagcctgggcgtgtccgccctctgcgccatctgcggggaccgggcgacgggcaagcactacggggccagctcctgcgacggctgcaagggcttcttccgccggagcgtccgcaagaaccacatgtactcctgccggttcagccgccagtgcgtggtggacaaggacaagcggaaccagtgccgctactgccggctgaagaagtgcttccgcgccgggatgaagaaggaggccgtccagaacgagcgggaccgcatctccacccggcgcgcggcctacgaggacagctccctgcccagcatcaacgcgctcctgcaggccgaggtgctgtcccggcagatcaccagccccgtgtccggcatcaacggggacatccgcgccaagaagatcgccagcatcgccgacgtctgcgagagcatgaaggagcagctcctggtgctggtggagtgggcgaagtacatcccggccttctgcgagctccccctggacgaccaggtcgccctgctccgggcccacgccggcgagcacctcctgctgggggcgaccaagcgctccatggtgttcaaggacgtgctgctgctcggcaacgactacatcgtcccccggcactgccccgagctggccgagatgagccgcgtgtccatccggatcctggacgagctcgtgctgccgttccaggagctgcagatcgacgacaacgagtacgcctacctcaaggccatcatcttcttcgaccccgacgccaagggcctgagcgaccccgggaagatcaagcgcctgcgcgcgcaggtccaggtgagcctcgaggactacatcaacgaccggcagtacgactcccgcggccggttcggggagctgctgctcctgctgcccacgctccagagcatcacctggcagatgatcgagcagatccagttcatcaagctgttcggcatggcgaagatcgacaacctgctccaggagatgctgctgggcgggtccccgagcgacgcgccccacgcccaccaccccctccacccccacctgatgcaggagcacatgggcaccaacgtgatcgtcgccaacaccatgccgacgcacctgtccaacgggcagatgtgcgagtggccccgcccccggggccaggccgccacccccgagaccccgcagcccagcccgcccgggggctccggcagcgagccctacaagctgctccccggggccgtggccaccatcgtgaagcccctgtccgccatcccccagccgacgatcaccaagcaggaggtcatctga

SEQ ID NO: 1166 - RNA, 1314 nt, synthetic construct
  misc_feature 1..1314: note = CDS (opt1) from Homo sapiens__NP_000448.3__HNF4A(39-474)(S142A_S143A_S313A_K458R )
  source 1..1314: mol_type = other RNA
atggacaccagcccgtccgaggggaccaacctgaacgcccccaacagcctgggcgtgtccgccctctgcgccatctgcggggaccgggcgacgggcaagcactacggggccagctcctgcgacggctgcaagggcttcttccgccggagcgtccgcaagaaccacatgtactcctgccggttcagccgccagtgcgtggtggacaaggacaagcggaaccagtgccgctactgccggctgaagaagtgcttccgcgccgggatgaagaaggaggccgtccagaacgagcgggaccgcatctccacccggcgcgcggcctacgaggacagctccctgcccagcatcaacgcgctcctgcaggccgaggtgctgtcccggcagatcaccagccccgtgtccggcatcaacggggacatccgcgccaagaagatcgccagcatcgccgacgtctgcgagagcatgaaggagcagctcctggtgctggtggagtgggcgaagtacatcccggccttctgcgagctccccctggacgaccaggtcgccctgctccgggcccacgccggcgagcacctcctgctgggggcgaccaagcgctccatggtgttcaaggacgtgctgctgctcggcaacgactacatcgtcccccggcactgccccgagctggccgagatgagccgcgtgtccatccggatcctggacgagctcgtgctgccgttccaggagctgcagatcgacgacaacgagtacgcctacctcaaggccatcatcttcttcgaccccgacgccaagggcctgagcgaccccgggaagatcaagcgcctgcgcgcgcaggtccaggtgagcctcgaggactacatcaacgaccggcagtacgactcccgcggccggttcggggagctgctgctcctgctgcccacgctccagagcatcacctggcagatgatcgagcagatccagttcatcaagctgttcggcatggcgaagatcgacaacctgctccaggagatgctgctgggcgggtccccgagcgacgcgccccacgcccaccaccccctccacccccacctgatgcaggagcacatgggcaccaacgtgatcgtcgccaacaccatgccgacgcacctgtccaacgggcagatgtgcgagtggccccgcccccggggccaggccgccacccccgagaccccgcagcccagcccgcccgggggctccggcagcgagccctacaagctgctccccggggccgtggccaccatcgtgcggcccctgtccgccatcccccagccgacgatcaccaagcaggaggtcatctga

SEQ ID NO: 1167 - RNA, 1314 nt, synthetic construct
  misc_feature 1..1314: note = CDS (opt1) from Homo sapiens__NP_000448.3__HNF4A(39-474)(S142A_S143A_S167A_S313A _S378A_T429A_T432A_S436A_K458R)
  source 1..1314: mol_type = other RNA
atggacaccagcccgtccgaggggaccaacctgaacgcccccaacagcctgggcgtgtccgccctctgcgccatctgcggggaccgggcgacgggcaagcactacggggccagctcctgcgacggctgcaagggcttcttccgccggagcgtccgcaagaaccacatgtactcctgccggttcagccgccagtgcgtggtggacaaggacaagcggaaccagtgccgctactgccggctgaagaagtgcttccgcgccgggatgaagaaggaggccgtccagaacgagcgggaccgcatctccacccggcgcgcggcctacgaggacagctccctgcccagcatcaacgcgctcctgcaggccgaggtgctgtcccggcagatcaccgcgcccgtgtccggcatcaacggggacatccgcgccaagaagatcgccagcatcgccgacgtctgcgagagcatgaaggagcagctcctggtgctggtggagtgggcgaagtacatcccggccttctgcgagctccccctggacgaccaggtcgccctgctccgggcccacgccggcgagcacctcctgctgggggcgaccaagcgctccatggtgttcaaggacgtgctgctgctcggcaacgactacatcgtcccccggcactgccccgagctggccgagatgagccgcgtgtccatccggatcctggacgagctcgtgctgccgttccaggagctgcagatcgacgacaacgagtacgcctacctcaaggccatcatcttcttcgaccccgacgccaagggcctgagcgaccccgggaagatcaagcgcctgcgcgcgcaggtccaggtgagcctcgaggactacatcaacgaccggcagtacgactcccgcggccggttcggggagctgctgctcctgctgcccacgctccagagcatcacctggcagatgatcgagcagatccagttcatcaagctgttcggcatggcgaagatcgacaacctgctccaggagatgctgctgggcggggcgccgagcgacgcgccccacgcccaccaccccctccacccccacctgatgcaggagcacatgggcaccaacgtgatcgtcgccaacaccatgccgacgcacctgtccaacgggcagatgtgcgagtggccccgcccccggggccaggccgccgcgcccgaggcgccgcagcccgcgccgcccgggggctccggcagcgagccctacaagctgctccccggggccgtggccaccatcgtgcggcccctgtccgccatcccccagccgacgatcaccaagcaggaggtcatctga

SEQ ID NO: 1168 - RNA, 1314 nt, synthetic construct
  misc_feature 1..1314: note = CDS (opt1) from Homo sapiens__NP_000448.3__HNF4A(39-474)(S142A_S143A_S148A_S167A _S313A_S378A_T429A_T432A_S436A_K458R)
  source 1..1314: mol_type = other RNA
atggacaccagcccgtccgaggggaccaacctgaacgcccccaacagcctgggcgtgtccgccctctgcgccatctgcggggaccgggcgacgggcaagcactacggggccagctcctgcgacggctgcaagggcttcttccgccggagcgtccgcaagaaccacatgtactcctgccggttcagccgccagtgcgtggtggacaaggacaagcggaaccagtgccgctactgccggctgaagaagtgcttccgcgccgggatgaagaaggaggccgtccagaacgagcgggaccgcatctccacccggcgcgcggcctacgaggacagcgcgctgcccagcatcaacgcgctcctgcaggccgaggtgctgtcccggcagatcaccgcgcccgtgtccggcatcaacggggacatccgcgccaagaagatcgccagcatcgccgacgtctgcgagagcatgaaggagcagctcctggtgctggtggagtgggcgaagtacatcccggccttctgcgagctccccctggacgaccaggtcgccctgctccgggcccacgccggcgagcacctcctgctgggggcgaccaagcgctccatggtgttcaaggacgtgctgctgctcggcaacgactacatcgtcccccggcactgccccgagctggccgagatgagccgcgtgtccatccggatcctggacgagctcgtgctgccgttccaggagctgcagatcgacgacaacgagtacgcctacctcaaggccatcatcttcttcgaccccgacgccaagggcctgagcgaccccgggaagatcaagcgcctgcgcgcgcaggtccaggtgagcctcgaggactacatcaacgaccggcagtacgactcccgcggccggttcggggagctgctgctcctgctgcccacgctccagagcatcacctggcagatgatcgagcagatccagttcatcaagctgttcggcatggcgaagatcgacaacctgctccaggagatgctgctgggcggggcgccgagcgacgcgccccacgcccaccaccccctccacccccacctgatgcaggagcacatgggcaccaacgtgatcgtcgccaacaccatgccgacgcacctgtccaacgggcagatgtgcgagtggccccgcccccggggccaggccgccgcgcccgaggcgccgcagcccgcgccgcccgggggctccggcagcgagccctacaagctgctccccggggccgtggccaccatcgtgcggcccctgtccgccatcccccagccgacgatcaccaagcaggaggtcatctga

SEQ ID NO: 1169 - RNA, 1314 nt, synthetic construct
  misc_feature 1..1314: note = CDS (opt1) from Homo sapiens__NP_000448.3__HNF4A(39-474)(K106R_K108R_K126R_K127R _S142A_S143A_S148A_S167A_S313A_S378A_T429A_T432A_S436A_K458 R)
  source 1..1314: mol_type = other RNA
atggacaccagcccgtccgaggggaccaacctgaacgcccccaacagcctgggcgtgtccgccctctgcgccatctgcggggaccgggcgacgggcaagcactacggggccagctcctgcgacggctgcaagggcttcttccgccggagcgtccgcaagaaccacatgtactcctgccggttcagccgccagtgcgtggtggaccgcgaccggcggaaccagtgccgctactgccggctgaagaagtgcttccgcgccgggatgcgccgcgaggccgtccagaacgagcgggaccgcatctccacccggcgcgcggcctacgaggacagcgcgctgcccagcatcaacgcgctcctgcaggccgaggtgctgtcccggcagatcaccgcgcccgtgtccggcatcaacggggacatccgcgccaagaagatcgccagcatcgccgacgtctgcgagagcatgaaggagcagctcctggtgctggtggagtgggcgaagtacatcccggccttctgcgagctccccctggacgaccaggtcgccctgctccgggcccacgccggcgagcacctcctgctgggggcgaccaagcgctccatggtgttcaaggacgtgctgctgctcggcaacgactacatcgtcccccggcactgccccgagctggccgagatgagccgcgtgtccatccggatcctggacgagctcgtgctgccgttccaggagctgcagatcgacgacaacgagtacgcctacctcaaggccatcatcttcttcgaccccgacgccaagggcctgagcgaccccgggaagatcaagcgcctgcgcgcgcaggtccaggtgagcctcgaggactacatcaacgaccggcagtacgactcccgcggccggttcggggagctgctgctcctgctgcccacgctccagagcatcacctggcagatgatcgagcagatccagttcatcaagctgttcggcatggcgaagatcgacaacctgctccaggagatgctgctgggcggggcgccgagcgacgcgccccacgcccaccaccccctccacccccacctgatgcaggagcacatgggcaccaacgtgatcgtcgccaacaccatgccgacgcacctgtccaacgggcagatgtgcgagtggccccgcccccggggccaggccgccgcgcccgaggcgccgcagcccgcgccgcccgggggctccggcagcgagccctacaagctgctccccggggccgtggccaccatcgtgcggcccctgtccgccatcccccagccgacgatcaccaagcaggaggtcatctga

SEQ ID NO: 1170 - RNA, 1314 nt, synthetic construct
  misc_feature 1..1314: note = CDS (opt1) from Homo sapiens__NP_000448.3__HNF4A(39-474)(S142A_S143A_S148A_T166A _S167A_S313A_S378A_T429A_T432A_S436A_K458R)
  source 1..1314: mol_type = other RNA
atggacaccagcccgtccgaggggaccaacctgaacgcccccaacagcctgggcgtgtccgccctctgcgccatctgcggggaccgggcgacgggcaagcactacggggccagctcctgcgacggctgcaagggcttcttccgccggagcgtccgcaagaaccacatgtactcctgccggttcagccgccagtgcgtggtggacaaggacaagcggaaccagtgccgctactgccggctgaagaagtgcttccgcgccgggatgaagaaggaggccgtccagaacgagcgggaccgcatctccacccggcgcgcggcctacgaggacagcgcgctgcccagcatcaacgcgctcctgcaggccgaggtgctgtcccggcagatcgcggcgcccgtgtccggcatcaacggggacatccgcgccaagaagatcgccagcatcgccgacgtctgcgagagcatgaaggagcagctcctggtgctggtggagtgggcgaagtacatcccggccttctgcgagctccccctggacgaccaggtcgccctgctccgggcccacgccggcgagcacctcctgctgggggcgaccaagcgctccatggtgttcaaggacgtgctgctgctcggcaacgactacatcgtcccccggcactgccccgagctggccgagatgagccgcgtgtccatccggatcctggacgagctcgtgctgccgttccaggagctgcagatcgacgacaacgagtacgcctacctcaaggccatcatcttcttcgaccccgacgccaagggcctgagcgaccccgggaagatcaagcgcctgcgcgcgcaggtccaggtgagcctcgaggactacatcaacgaccggcagtacgactcccgcggccggttcggggagctgctgctcctgctgcccacgctccagagcatcacctggcagatgatcgagcagatccagttcatcaagctgttcggcatggcgaagatcgacaacctgctccaggagatgctgctgggcggggcgccgagcgacgcgccccacgcccaccaccccctccacccccacctgatgcaggagcacatgggcaccaacgtgatcgtcgccaacaccatgccgacgcacctgtccaacgggcagatgtgcgagtggccccgcccccggggccaggccgccgcgcccgaggcgccgcagcccgcgccgcccgggggctccggcagcgagccctacaagctgctccccggggccgtggccaccatcgtgcggcccctgtccgccatcccccagccgacgatcaccaagcaggaggtcatctga

SEQ ID NO: 1171 - RNA, 1314 nt, synthetic construct
  misc_feature 1..1314: note = CDS (opt1) from Homo sapiens__NP_000448.3__HNF4A(39-474)(S87A_S142A_S143A_S148A_ T166A_S167A_S313A_S378A_T429A_T432A_S436A_K458R)
  source 1..1314: mol_type = other RNA
atggacaccagcccgtccgaggggaccaacctgaacgcccccaacagcctgggcgtgtccgccctctgcgccatctgcggggaccgggcgacgggcaagcactacggggccagctcctgcgacggctgcaagggcttcttccgccgggcggtccgcaagaaccacatgtactcctgccggttcagccgccagtgcgtggtggacaaggacaagcggaaccagtgccgctactgccggctgaagaagtgcttccgcgccgggatgaagaaggaggccgtccagaacgagcgggaccgcatctccacccggcgcgcggcctacgaggacagcgcgctgcccagcatcaacgcgctcctgcaggccgaggtgctgtcccggcagatcgcggcgcccgtgtccggcatcaacggggacatccgcgccaagaagatcgccagcatcgccgacgtctgcgagagcatgaaggagcagctcctggtgctggtggagtgggcgaagtacatcccggccttctgcgagctccccctggacgaccaggtcgccctgctccgggcccacgccggcgagcacctcctgctgggggcgaccaagcgctccatggtgttcaaggacgtgctgctgctcggcaacgactacatcgtcccccggcactgccccgagctggccgagatgagccgcgtgtccatccggatcctggacgagctcgtgctgccgttccaggagctgcagatcgacgacaacgagtacgcctacctcaaggccatcatcttcttcgaccccgacgccaagggcctgagcgaccccgggaagatcaagcgcctgcgcgcgcaggtccaggtgagcctcgaggactacatcaacgaccggcagtacgactcccgcggccggttcggggagctgctgctcctgctgcccacgctccagagcatcacctggcagatgatcgagcagatccagttcatcaagctgttcggcatggcgaagatcgacaacctgctccaggagatgctgctgggcggggcgccgagcgacgcgccccacgcccaccaccccctccacccccacctgatgcaggagcacatgggcaccaacgtgatcgtcgccaacaccatgccgacgcacctgtccaacgggcagatgtgcgagtggccccgcccccggggccaggccgccgcgcccgaggcgccgcagcccgcgccgcccgggggctccggcagcgagccctacaagctgctccccggggccgtggccaccatcgtgcggcccctgtccgccatcccccagccgacgatcaccaagcaggaggtcatctga

SEQ ID NO: 1172 - RNA, 1314 nt, synthetic construct
  misc_feature 1..1314: note = CDS (opt1) from Homo sapiens__NP_000448.3__HNF4A(39-474)(S87A_K106R_K108R_K126R_ K127R_S142A_S143A_S148A_T166A_S167A_S313A_S378A_T429A_T432A _S436A_K458R)
  source 1..1314: mol_type = other RNA
atggacaccagcccgtccgaggggaccaacctgaacgcccccaacagcctgggcgtgtccgccctctgcgccatctgcggggaccgggcgacgggcaagcactacggggccagctcctgcgacggctgcaagggcttcttccgccgggcggtccgcaagaaccacatgtactcctgccggttcagccgccagtgcgtggtggaccgcgaccggcggaaccagtgccgctactgccggctgaagaagtgcttccgcgccgggatgcgccgcgaggccgtccagaacgagcgggaccgcatctccacccggcgcgcggcctacgaggacagcgcgctgcccagcatcaacgcgctcctgcaggccgaggtgctgtcccggcagatcgcggcgcccgtgtccggcatcaacggggacatccgcgccaagaagatcgccagcatcgccgacgtctgcgagagcatgaaggagcagctcctggtgctggtggagtgggcgaagtacatcccggccttctgcgagctccccctggacgaccaggtcgccctgctccgggcccacgccggcgagcacctcctgctgggggcgaccaagcgctccatggtgttcaaggacgtgctgctgctcggcaacgactacatcgtcccccggcactgccccgagctggccgagatgagccgcgtgtccatccggatcctggacgagctcgtgctgccgttccaggagctgcagatcgacgacaacgagtacgcctacctcaaggccatcatcttcttcgaccccgacgccaagggcctgagcgaccccgggaagatcaagcgcctgcgcgcgcaggtccaggtgagcctcgaggactacatcaacgaccggcagtacgactcccgcggccggttcggggagctgctgctcctgctgcccacgctccagagcatcacctggcagatgatcgagcagatccagttcatcaagctgttcggcatggcgaagatcgacaacctgctccaggagatgctgctgggcggggcgccgagcgacgcgccccacgcccaccaccccctccacccccacctgatgcaggagcacatgggcaccaacgtgatcgtcgccaacaccatgccgacgcacctgtccaacgggcagatgtgcgagtggccccgcccccggggccaggccgccgcgcccgaggcgccgcagcccgcgccgcccgggggctccggcagcgagccctacaagctgctccccggggccgtggccaccatcgtgcggcccctgtccgccatcccccagccgacgatcaccaagcaggaggtcatctga

SEQ ID NO: 1173 - RNA, 1314 nt, synthetic construct
  misc_feature 1..1314: note = CDS (opt1) from Homo sapiens__NP_000448.3__HNF4A(39-474)(S87A_K106R_K108R_K126R_ K127R)
  source 1..1314: mol_type = other RNA
atggacaccagcccgtccgaggggaccaacctgaacgcccccaacagcctgggcgtgtccgccctctgcgccatctgcggggaccgggcgacgggcaagcactacggggccagctcctgcgacggctgcaagggcttcttccgccgggcggtccgcaagaaccacatgtactcctgccggttcagccgccagtgcgtggtggaccgcgaccggcggaaccagtgccgctactgccggctgaagaagtgcttccgcgccgggatgcgccgggaggccgtccagaacgagcgggaccgcatctccacccggcgcagctcctacgaggacagctccctgcccagcatcaacgcgctcctgcaggccgaggtgctgtcccggcagatcaccagccccgtgtccggcatcaacggggacatccgcgccaagaagatcgccagcatcgccgacgtctgcgagagcatgaaggagcagctcctggtgctggtggagtgggcgaagtacatcccggccttctgcgagctccccctggacgaccaggtcgccctgctccgggcccacgccggcgagcacctcctgctgggggcgaccaagcgctccatggtgttcaaggacgtgctgctgctcggcaacgactacatcgtcccccggcactgccccgagctggccgagatgagccgcgtgtccatccggatcctggacgagctcgtgctgccgttccaggagctgcagatcgacgacaacgagtacgcctacctcaaggccatcatcttcttcgaccccgacgccaagggcctgagcgaccccgggaagatcaagcgcctgcgctcccaggtccaggtgagcctcgaggactacatcaacgaccggcagtacgactcccgcggccggttcggggagctgctgctcctgctgcccacgctccagagcatcacctggcagatgatcgagcagatccagttcatcaagctgttcggcatggcgaagatcgacaacctgctccaggagatgctgctgggcgggtccccgagcgacgcgccccacgcccaccaccccctccacccccacctgatgcaggagcacatgggcaccaacgtgatcgtcgccaacaccatgccgacgcacctgtccaacgggcagatgtgcgagtggccccgcccccggggccaggccgccacccccgagaccccgcagcccagcccgcccgggggctccggcagcgagccctacaagctgctccccggggccgtggccaccatcgtgaagcccctgtccgccatcccccagccgacgatcaccaagcaggaggtcatctga

SEQ ID NO: 1174 - RNA, 1314 nt, synthetic construct
  misc_feature 1..1314: note = CDS (opt1) from Homo sapiens__NP_000448.3__HNF4A(39-474)(S87A_K106R_K108R_K126R_ K127R_S142A_S143A_S148A_T166A_S167A_S313A_S378A_T429A_T432A _S436A_K458R_S461A)
  source 1..1314: mol_type = other RNA
atggacaccagcccgtccgaggggaccaacctgaacgcccccaacagcctgggcgtgtccgccctctgcgccatctgcggggaccgggcgacgggcaagcactacggggccagctcctgcgacggctgcaagggcttcttccgccgggcggtccgcaagaaccacatgtactcctgccggttcagccgccagtgcgtggtggaccgcgaccggcggaaccagtgccgctactgccggctgaagaagtgcttccgcgccgggatgcgccgggaggccgtccagaacgagcgggaccgcatctccacccggcgcgccgcctacgaggacagcgccctgcccagcatcaacgcgctcctgcaggccgaggtgctgtcccggcagatcgccgcgcccgtgtccggcatcaacggggacatccgcgccaagaagatcgccagcatcgccgacgtctgcgagagcatgaaggagcagctcctggtgctggtggagtgggcgaagtacatcccggccttctgcgagctccccctggacgaccaggtcgccctgctccgggcccacgccggcgagcacctcctgctgggggcgaccaagcgctccatggtgttcaaggacgtgctgctgctcggcaacgactacatcgtcccccggcactgccccgagctggccgagatgagccgcgtgtccatccggatcctggacgagctcgtgctgccgttccaggagctgcagatcgacgacaacgagtacgcctacctcaaggccatcatcttcttcgaccccgacgccaagggcctgagcgaccccgggaagatcaagcgcctgcgcgcccaggtccaggtgagcctcgaggactacatcaacgaccggcagtacgactcccgcggccggttcggggagctgctgctcctgctgcccacgctccagagcatcacctggcagatgatcgagcagatccagttcatcaagctgttcggcatggcgaagatcgacaacctgctccaggagatgctgctgggcggggccccgagcgacgcgccccacgcccaccaccccctccacccccacctgatgcaggagcacatgggcaccaacgtgatcgtcgccaacaccatgccgacgcacctgtccaacgggcagatgtgcgagtggccccgcccccggggccaggccgccgcccccgaggccccgcagcccgcgccgcccgggggctccggcagcgagccctacaagctgctccccggggccgtggccaccatcgtgcggcccctggccgccatcccccagccgacgatcaccaagcaggaggtcatctga

SEQ ID NO: 1175 - RNA, 1314 nt, synthetic construct
  misc_feature 1..1314: note = CDS (opt1) from Homo sapiens__NP_000448.3__HNF4A(39-474)(S87A_K106R_K108R_K126R_ K127R_S142A_S143A_S148A_T166A_S167A_S313A_S378A_T429A_T432A _S436A_K458R_S461E)
  source 1..1314: mol_type = other RNA
atggacaccagcccgtccgaggggaccaacctgaacgcccccaacagcctgggcgtgtccgccctctgcgccatctgcggggaccgggcgacgggcaagcactacggggccagctcctgcgacggctgcaagggcttcttccgccgggcggtccgcaagaaccacatgtactcctgccggttcagccgccagtgcgtggtggaccgcgaccggcggaaccagtgccgctactgccggctgaagaagtgcttccgcgccgggatgcgccgggaggccgtccagaacgagcgggaccgcatctccacccggcgcgccgcctacgaggacagcgccctgcccagcatcaacgcgctcctgcaggccgaggtgctgtcccggcagatcgccgcgcccgtgtccggcatcaacggggacatccgcgccaagaagatcgccagcatcgccgacgtctgcgagagcatgaaggagcagctcctggtgctggtggagtgggcgaagtacatcccggccttctgcgagctccccctggacgaccaggtcgccctgctccgggcccacgccggcgagcacctcctgctgggggcgaccaagcgctccatggtgttcaaggacgtgctgctgctcggcaacgactacatcgtcccccggcactgccccgagctggccgagatgagccgcgtgtccatccggatcctggacgagctcgtgctgccgttccaggagctgcagatcgacgacaacgagtacgcctacctcaaggccatcatcttcttcgaccccgacgccaagggcctgagcgaccccgggaagatcaagcgcctgcgcgcccaggtccaggtgagcctcgaggactacatcaacgaccggcagtacgactcccgcggccggttcggggagctgctgctcctgctgcccacgctccagagcatcacctggcagatgatcgagcagatccagttcatcaagctgttcggcatggcgaagatcgacaacctgctccaggagatgctgctgggcggggccccgagcgacgcgccccacgcccaccaccccctccacccccacctgatgcaggagcacatgggcaccaacgtgatcgtcgccaacaccatgccgacgcacctgtccaacgggcagatgtgcgagtggccccgcccccggggccaggccgccgcccccgaggccccgcagcccgcgccgcccgggggctccggcagcgagccctacaagctgctccccggggccgtggccaccatcgtgcggcccctggaggccatcccccagccgacgatcaccaagcaggaggtcatctga

SEQ ID NO: 1176 - RNA, 1314 nt, synthetic construct
  misc_feature 1..1314: note = CDS (opt1) from Homo sapiens__NP_000448.3__HNF4A(39-474)(S87A_K106R_K108R_K126R_ K127R_S142A_S143A_S148E_T166A_S167E_S313A_S378E_T429E_T432E _S436E_K458R_S461E)
  source 1..1314: mol_type = other RNA
atggacaccagcccgtccgaggggaccaacctgaacgcccccaacagcctgggcgtgtccgccctctgcgccatctgcggggaccgggcgacgggcaagcactacggggccagctcctgcgacggctgcaagggcttcttccgccgggcggtccgcaagaaccacatgtactcctgccggttcagccgccagtgcgtggtggaccgcgaccggcggaaccagtgccgctactgccggctgaagaagtgcttccgcgccgggatgcgccgggaggccgtccagaacgagcgggaccgcatctccacccggcgcgccgcctacgaggacagcgagctgcccagcatcaacgcgctcctgcaggccgaggtgctgtcccggcagatcgccgagcccgtgtccggcatcaacggggacatccgcgccaagaagatcgccagcatcgccgacgtctgcgagagcatgaaggagcagctcctggtgctggtggagtgggcgaagtacatcccggccttctgcgagctccccctggacgaccaggtcgccctgctccgggcccacgccggcgagcacctcctgctgggggcgaccaagcgctccatggtgttcaaggacgtgctgctgctcggcaacgactacatcgtcccccggcactgccccgagctggccgagatgagccgcgtgtccatccggatcctggacgagctcgtgctgccgttccaggagctgcagatcgacgacaacgagtacgcctacctcaaggccatcatcttcttcgaccccgacgccaagggcctgagcgaccccgggaagatcaagcgcctgcgcgcccaggtccaggtgagcctcgaggactacatcaacgaccggcagtacgactcccgcggccggttcggggagctgctgctcctgctgcccacgctccagagcatcacctggcagatgatcgagcagatccagttcatcaagctgttcggcatggcgaagatcgacaacctgctccaggagatgctgctgggcggggagccgagcgacgcgccccacgcccaccaccccctccacccccacctgatgcaggagcacatgggcaccaacgtgatcgtcgccaacaccatgccgacgcacctgtccaacgggcagatgtgcgagtggccccgcccccggggccaggccgccgagcccgaggagccgcagcccgagccgcccgggggctccggcagcgagccctacaagctgctccccggggccgtggccaccatcgtgcggcccctggaggccatcccccagccgacgatcaccaagcaggaggtcatctga

SEQ ID NO: 1177 - RNA, 1314 nt, synthetic construct
  misc_feature 1..1314: note = CDS (opt1) from Homo sapiens__NP_000448.3__HNF4A(39-474)(S87A_K106R_K108R_K126R_ K127R_S142A_S143A_S148A_T166A_S167A_K179R_K180R_S313A_S378A _T429A_T432A_S436A_K458R_S461E)
  source 1..1314: mol_type = other RNA
atggacaccagcccgtccgaggggaccaacctgaacgcccccaacagcctgggcgtgtccgccctctgcgccatctgcggggaccgggcgacgggcaagcactacggggccagctcctgcgacggctgcaagggcttcttccgccgggcggtccgcaagaaccacatgtactcctgccggttcagccgccagtgcgtggtggaccgcgaccggcggaaccagtgccgctactgccggctgaagaagtgcttccgcgccgggatgcgccgggaggccgtccagaacgagcgggaccgcatctccacccggcgcgccgcctacgaggacagcgccctgcccagcatcaacgcgctcctgcaggccgaggtgctgtcccggcagatcgccgcgcccgtgtccggcatcaacggggacatccgcgcccgccggatcgccagcatcgccgacgtctgcgagagcatgaaggagcagctcctggtgctggtggagtgggcgaagtacatcccggccttctgcgagctccccctggacgaccaggtcgccctgctccgggcccacgccggcgagcacctcctgctgggggcgaccaagcgctccatggtgttcaaggacgtgctgctgctcggcaacgactacatcgtcccccggcactgccccgagctggccgagatgagccgcgtgtccatccggatcctggacgagctcgtgctgccgttccaggagctgcagatcgacgacaacgagtacgcctacctcaaggccatcatcttcttcgaccccgacgccaagggcctgagcgaccccgggaagatcaagcgcctgcgcgcccaggtccaggtgagcctcgaggactacatcaacgaccggcagtacgactcccgcggccggttcggggagctgctgctcctgctgcccacgctccagagcatcacctggcagatgatcgagcagatccagttcatcaagctgttcggcatggcgaagatcgacaacctgctccaggagatgctgctgggcggggccccgagcgacgcgccccacgcccaccaccccctccacccccacctgatgcaggagcacatgggcaccaacgtgatcgtcgccaacaccatgccgacgcacctgtccaacgggcagatgtgcgagtggccccgcccccggggccaggccgccgcccccgaggccccgcagcccgcgccgcccgggggctccggcagcgagccctacaagctgctccccggggccgtggccaccatcgtgcggcccctggaggccatcccccagccgacgatcaccaagcaggaggtcatctga

SEQ ID NO: 1178 - RNA, 1314 nt, synthetic construct
  misc_feature 1..1314: note = CDS (opt1) from Homo sapiens__NP_000448.3__HNF4A(39-474)(S87A_K106R_K108R_K126R_ K127R_S142A_S143A_S148A_T166A_S167A_K300R_K307R_K309R_S313A _S378A_T429A_T432A_S436A_K458R_S461E)
  source 1..1314: mol_type = other RNA
atggacaccagcccgtccgaggggaccaacctgaacgcccccaacagcctgggcgtgtccgccctctgcgccatctgcggggaccgggcgacgggcaagcactacggggccagctcctgcgacggctgcaagggcttcttccgccgggcggtccgcaagaaccacatgtactcctgccggttcagccgccagtgcgtggtggaccgcgaccggcggaaccagtgccgctactgccggctgaagaagtgcttccgcgccgggatgcgccgggaggccgtccagaacgagcgggaccgcatctccacccggcgcgccgcctacgaggacagcgccctgcccagcatcaacgcgctcctgcaggccgaggtgctgtcccggcagatcgccgcgcccgtgtccggcatcaacggggacatccgcgccaagaagatcgccagcatcgccgacgtctgcgagagcatgaaggagcagctcctggtgctggtggagtgggcgaagtacatcccggccttctgcgagctccccctggacgaccaggtcgccctgctccgggcccacgccggcgagcacctcctgctgggggcgaccaagcgctccatggtgttcaaggacgtgctgctgctcggcaacgactacatcgtcccccggcactgccccgagctggccgagatgagccgcgtgtccatccggatcctggacgagctcgtgctgccgttccaggagctgcagatcgacgacaacgagtacgcctacctcaaggccatcatcttcttcgaccccgacgcccgcggcctgagcgaccccgggcggatccgccgcctgcgcgcccaggtccaggtgagcctcgaggactacatcaacgaccggcagtacgactcccgcggccggttcggggagctgctgctcctgctgcccacgctccagagcatcacctggcagatgatcgagcagatccagttcatcaagctgttcggcatggcgaagatcgacaacctgctccaggagatgctgctgggcggggccccgagcgacgcgccccacgcccaccaccccctccacccccacctgatgcaggagcacatgggcaccaacgtgatcgtcgccaacaccatgccgacgcacctgtccaacgggcagatgtgcgagtggccccgcccccggggccaggccgccgcccccgaggccccgcagcccgcgccgcccgggggctccggcagcgagccctacaagctgctccccggggccgtggccaccatcgtgcggcccctggaggccatcccccagccgacgatcaccaagcaggaggtcatctga

SEQ ID NO: 1179 - RNA, 1314 nt, synthetic construct
  misc_feature 1..1314: note = CDS (opt1) from Homo sapiens__NP_000448.3__HNF4A(39-474)(S87A_K106R_K108R_K126R_ K127R_S142A_S143A_S148A_T166A_S167A_S313A_S378A_T429A_T432A _S436A_K447R_K458R_S461E_K470R)
  source 1..1314: mol_type = other RNA
atggacaccagcccgtccgaggggaccaacctgaacgcccccaacagcctgggcgtgtccgccctctgcgccatctgcggggaccgggcgacgggcaagcactacggggccagctcctgcgacggctgcaagggcttcttccgccgggcggtccgcaagaaccacatgtactcctgccggttcagccgccagtgcgtggtggaccgcgaccggcggaaccagtgccgctactgccggctgaagaagtgcttccgcgccgggatgcgccgggaggccgtccagaacgagcgggaccgcatctccacccggcgcgccgcctacgaggacagcgccctgcccagcatcaacgcgctcctgcaggccgaggtgctgtcccggcagatcgccgcgcccgtgtccggcatcaacggggacatccgcgccaagaagatcgccagcatcgccgacgtctgcgagagcatgaaggagcagctcctggtgctggtggagtgggcgaagtacatcccggccttctgcgagctccccctggacgaccaggtcgccctgctccgggcccacgccggcgagcacctcctgctgggggcgaccaagcgctccatggtgttcaaggacgtgctgctgctcggcaacgactacatcgtcccccggcactgccccgagctggccgagatgagccgcgtgtccatccggatcctggacgagctcgtgctgccgttccaggagctgcagatcgacgacaacgagtacgcctacctcaaggccatcatcttcttcgaccccgacgccaagggcctgagcgaccccgggaagatcaagcgcctgcgcgcccaggtccaggtgagcctcgaggactacatcaacgaccggcagtacgactcccgcggccggttcggggagctgctgctcctgctgcccacgctccagagcatcacctggcagatgatcgagcagatccagttcatcaagctgttcggcatggcgaagatcgacaacctgctccaggagatgctgctgggcggggccccgagcgacgcgccccacgcccaccaccccctccacccccacctgatgcaggagcacatgggcaccaacgtgatcgtcgccaacaccatgccgacgcacctgtccaacgggcagatgtgcgagtggccccgcccccggggccaggccgccgcccccgaggccccgcagcccgcgccgcccgggggctccggcagcgagccctaccgcctgctccccggggccgtggccaccatcgtgcggcccctggaggccatcccccagccgacgatcacccggcaggaggtcatctga

SEQ ID NO: 1180 - RNA, 1314 nt, synthetic construct
  misc_feature 1..1314: note = CDS (opt1) from Homo sapiens__NP_000448.3__HNF4A(39-474)(S87A_K106R_K108R_K126R_ K127R_S142A_S143A_S148A_T166A_S167A_K179R_K180R_K234R_K300R _K307R_K309R_S313A_S378A_T429A_T432A_S436A_K447R_K458R_S461 E_K470R)
  source 1..1314: mol_type = other RNA
atggacaccagcccgtccgaggggaccaacctgaacgcccccaacagcctgggcgtgtccgccctctgcgccatctgcggggaccgggcgacgggcaagcactacggggccagctcctgcgacggctgcaagggcttcttccgccgggcggtccgcaagaaccacatgtactcctgccggttcagccgccagtgcgtggtggaccgcgaccggcggaaccagtgccgctactgccggctgaagaagtgcttccgcgccgggatgcgccgggaggccgtccagaacgagcgggaccgcatctccacccggcgcgccgcctacgaggacagcgccctgcccagcatcaacgcgctcctgcaggccgaggtgctgtcccggcagatcgccgcgcccgtgtccggcatcaacggggacatccgcgcccgccggatcgccagcatcgccgacgtctgcgagagcatgaaggagcagctcctggtgctggtggagtgggcgaagtacatcccggccttctgcgagctccccctggacgaccaggtcgccctgctccgggcccacgccggcgagcacctcctgctgggggcgacccggcgctccatggtgttcaaggacgtgctgctgctcggcaacgactacatcgtcccccggcactgccccgagctggccgagatgagccgcgtgtccatccggatcctggacgagctcgtgctgccgttccaggagctgcagatcgacgacaacgagtacgcctacctcaaggccatcatcttcttcgaccccgacgcccgcggcctgagcgaccccgggcggatccgccgcctgcgcgcccaggtccaggtgagcctcgaggactacatcaacgaccggcagtacgactcccgcggccggttcggggagctgctgctcctgctgcccacgctccagagcatcacctggcagatgatcgagcagatccagttcatcaagctgttcggcatggcgaagatcgacaacctgctccaggagatgctgctgggcggggccccgagcgacgcgccccacgcccaccaccccctccacccccacctgatgcaggagcacatgggcaccaacgtgatcgtcgccaacaccatgccgacgcacctgtccaacgggcagatgtgcgagtggccccgcccccggggccaggccgccgcccccgaggccccgcagcccgcgccgcccgggggctccggcagcgagccctaccgcctgctccccggggccgtggccaccatcgtgcggcccctggaggccatcccccagccgacgatcacccggcaggaggtcatctga

SEQ ID NO: 1181 - RNA, 1314 nt, synthetic construct
  misc_feature 1..1314: note = CDS (opt1) from Homo sapiens__NP_000448.3__HNF4A(39-474)(S87A_S95A_S99A_K106R_K1 08R_K126R_K127R_S142A_S143A_S148A_T166A_S167A_S313A_S378A_T 429A_T432A_S436A_K458R_S461E)
  source 1..1314: mol_type = other RNA
atggacaccagcccgtccgaggggaccaacctgaacgcccccaacagcctgggcgtgtccgccctctgcgccatctgcggggaccgggcgacgggcaagcactacggggccagctcctgcgacggctgcaagggcttcttccgccgggcggtccgcaagaaccacatgtacgcctgccggttcgcccgccagtgcgtggtggaccgcgaccggcggaaccagtgccgctactgccggctgaagaagtgcttccgcgccgggatgcgccgggaggccgtccagaacgagcgggaccgcatctccacccggcgcgccgcctacgaggacagcgccctgcccagcatcaacgcgctcctgcaggccgaggtgctgtcccggcagatcgccgcgcccgtgtccggcatcaacggggacatccgcgccaagaagatcgccagcatcgccgacgtctgcgagagcatgaaggagcagctcctggtgctggtggagtgggcgaagtacatcccggccttctgcgagctccccctggacgaccaggtcgccctgctccgggcccacgccggcgagcacctcctgctgggggcgaccaagcgctccatggtgttcaaggacgtgctgctgctcggcaacgactacatcgtcccccggcactgccccgagctggccgagatgagccgcgtgtccatccggatcctggacgagctcgtgctgccgttccaggagctgcagatcgacgacaacgagtacgcctacctcaaggccatcatcttcttcgaccccgacgccaagggcctgagcgaccccgggaagatcaagcgcctgcgcgcccaggtccaggtgagcctcgaggactacatcaacgaccggcagtacgactcccgcggccggttcggggagctgctgctcctgctgcccacgctccagagcatcacctggcagatgatcgagcagatccagttcatcaagctgttcggcatggcgaagatcgacaacctgctccaggagatgctgctgggcggggccccgagcgacgcgccccacgcccaccaccccctccacccccacctgatgcaggagcacatgggcaccaacgtgatcgtcgccaacaccatgccgacgcacctgtccaacgggcagatgtgcgagtggccccgcccccggggccaggccgccgcccccgaggccccgcagcccgcgccgcccgggggctccggcagcgagccctacaagctgctccccggggccgtggccaccatcgtgcggcccctggaggccatcccccagccgacgatcaccaagcaggaggtcatctga

SEQ ID NO: 1182 - RNA, 1314 nt, synthetic construct
  misc_feature 1..1314: note = CDS (opt1) from Homo sapiens__NP_000448.3__HNF4A(39-474)(S87A_K106R_K108R_K126R_ K127R_S138A_T139A_S142A_S143A_S148A_T166A_S167A_S313A_S378A _T429A_T432A_S436A_K458R_S461E)
  source 1..1314: mol_type = other RNA
atggacaccagcccgtccgaggggaccaacctgaacgcccccaacagcctgggcgtgtccgccctctgcgccatctgcggggaccgggcgacgggcaagcactacggggccagctcctgcgacggctgcaagggcttcttccgccgggcggtccgcaagaaccacatgtactcctgccggttcagccgccagtgcgtggtggaccgcgaccggcggaaccagtgccgctactgccggctgaagaagtgcttccgcgccgggatgcgccgggaggccgtccagaacgagcgggaccgcatcgccgcccggcgcgccgcctacgaggacagcgccctgcccagcatcaacgcgctcctgcaggccgaggtgctgtcccggcagatcgccgcgcccgtgtccggcatcaacggggacatccgcgccaagaagatcgccagcatcgccgacgtctgcgagagcatgaaggagcagctcctggtgctggtggagtgggcgaagtacatcccggccttctgcgagctccccctggacgaccaggtcgccctgctccgggcccacgccggcgagcacctcctgctgggggcgaccaagcgctccatggtgttcaaggacgtgctgctgctcggcaacgactacatcgtcccccggcactgccccgagctggccgagatgagccgcgtgtccatccggatcctggacgagctcgtgctgccgttccaggagctgcagatcgacgacaacgagtacgcctacctcaaggccatcatcttcttcgaccccgacgccaagggcctgagcgaccccgggaagatcaagcgcctgcgcgcccaggtccaggtgagcctcgaggactacatcaacgaccggcagtacgactcccgcggccggttcggggagctgctgctcctgctgcccacgctccagagcatcacctggcagatgatcgagcagatccagttcatcaagctgttcggcatggcgaagatcgacaacctgctccaggagatgctgctgggcggggccccgagcgacgcgccccacgcccaccaccccctccacccccacctgatgcaggagcacatgggcaccaacgtgatcgtcgccaacaccatgccgacgcacctgtccaacgggcagatgtgcgagtggccccgcccccggggccaggccgccgcccccgaggccccgcagcccgcgccgcccgggggctccggcagcgagccctacaagctgctccccggggccgtggccaccatcgtgcggcccctggaggccatcccccagccgacgatcaccaagcaggaggtcatctga

SEQ ID NO: 1183 - RNA, 1314 nt, synthetic construct
  misc_feature 1..1314: note = CDS (opt1) from Homo sapiens__NP_000448.3__HNF4A(39-474)(S87A_S95A_S99A_K106R_K1 08R_K126R_K127R_S138A_T139A_S142A_S143A_S148A_T166A_S167A_S 313A_S378A_T429A_T432A_S436A_K458R_S461E)
  source 1..1314: mol_type = other RNA
atggacaccagcccgtccgaggggaccaacctgaacgcccccaacagcctgggcgtgtccgccctctgcgccatctgcggggaccgggcgacgggcaagcactacggggccagctcctgcgacggctgcaagggcttcttccgccgggcggtccgcaagaaccacatgtacgcctgccggttcgcccgccagtgcgtggtggaccgcgaccggcggaaccagtgccgctactgccggctgaagaagtgcttccgcgccgggatgcgccgggaggccgtccagaacgagcgggaccgcatcgccgcccggcgcgccgcctacgaggacagcgccctgcccagcatcaacgcgctcctgcaggccgaggtgctgtcccggcagatcgccgcgcccgtgtccggcatcaacggggacatccgcgccaagaagatcgccagcatcgccgacgtctgcgagagcatgaaggagcagctcctggtgctggtggagtgggcgaagtacatcccggccttctgcgagctccccctggacgaccaggtcgccctgctccgggcccacgccggcgagcacctcctgctgggggcgaccaagcgctccatggtgttcaaggacgtgctgctgctcggcaacgactacatcgtcccccggcactgccccgagctggccgagatgagccgcgtgtccatccggatcctggacgagctcgtgctgccgttccaggagctgcagatcgacgacaacgagtacgcctacctcaaggccatcatcttcttcgaccccgacgccaagggcctgagcgaccccgggaagatcaagcgcctgcgcgcccaggtccaggtgagcctcgaggactacatcaacgaccggcagtacgactcccgcggccggttcggggagctgctgctcctgctgcccacgctccagagcatcacctggcagatgatcgagcagatccagttcatcaagctgttcggcatggcgaagatcgacaacctgctccaggagatgctgctgggcggggccccgagcgacgcgccccacgcccaccaccccctccacccccacctgatgcaggagcacatgggcaccaacgtgatcgtcgccaacaccatgccgacgcacctgtccaacgggcagatgtgcgagtggccccgcccccggggccaggccgccgcccccgaggccccgcagcccgcgccgcccgggggctccggcagcgagccctacaagctgctccccggggccgtggccaccatcgtgcggcccctggaggccatcccccagccgacgatcaccaagcaggaggtcatctga

SEQ ID NO: 1184 - RNA, 1314 nt, synthetic construct
  misc_feature 1..1314: note = CDS (opt1) from Homo sapiens__NP_000448.3__HNF4A(39-474)
  source 1..1314: mol_type = other RNA
atggacaccagcccgtccgaggggaccaacctgaacgcccccaacagcctgggcgtgtccgccctctgcgccatctgcggggaccgggcgacgggcaagcactacggggccagctcctgcgacggctgcaagggcttcttccgccggagcgtccgcaagaaccacatgtactcctgccggttcagccgccagtgcgtggtggacaaggacaagcggaaccagtgccgctactgccggctgaagaagtgcttccgcgccgggatgaagaaggaggccgtccagaacgagcgggaccgcatctccacccggcgcagctcctacgaggacagctccctgcccagcatcaacgcgctcctgcaggccgaggtgctgtcccggcagatcaccagccccgtgtccggcatcaacggggacatccgcgccaagaagatcgccagcatcgccgacgtctgcgagagcatgaaggagcagctcctggtgctggtggagtgggcgaagtacatcccggccttctgcgagctccccctggacgaccaggtcgccctgctccgggcccacgccggcgagcacctcctgctgggggcgaccaagcgctccatggtgttcaaggacgtgctgctgctcggcaacgactacatcgtcccccggcactgccccgagctggccgagatgagccgcgtgtccatccggatcctggacgagctcgtgctgccgttccaggagctgcagatcgacgacaacgagtacgcctacctcaaggccatcatcttcttcgaccccgacgccaagggcctgagcgaccccgggaagatcaagcgcctgcgctcccaggtccaggtgagcctcgaggactacatcaacgaccggcagtacgactcccgcggccggttcggggagctgctgctcctgctgcccacgctccagagcatcacctggcagatgatcgagcagatccagttcatcaagctgttcggcatggcgaagatcgacaacctgctccaggagatgctgctgggcgggtccccgagcgacgcgccccacgcccaccaccccctccacccccacctgatgcaggagcacatgggcaccaacgtgatcgtcgccaacaccatgccgacgcacctgtccaacgggcagatgtgcgagtggccccgcccccggggccaggccgccacccccgagaccccgcagcccagcccgcccgggggctccggcagcgagccctacaagctcctgcccggggccgtggccaccatcgtgaagcccctgtccgccatcccccagccgacgatcaccaagcaggaggtcatctga

SEQ ID NO: 1185 - RNA, 1314 nt, synthetic construct
  misc_feature 1..1314: note = CDS (opt1) from Homo sapiens__NP_000448.3__HNF4A(39-474)(S313A)
  source 1..1314: mol_type = other RNA
atggacaccagcccgtccgaggggaccaacctgaacgcccccaacagcctgggcgtgtccgccctctgcgccatctgcggggaccgggcgacgggcaagcactacggggccagctcctgcgacggctgcaagggcttcttccgccggagcgtccgcaagaaccacatgtactcctgccggttcagccgccagtgcgtggtggacaaggacaagcggaaccagtgccgctactgccggctgaagaagtgcttccgcgccgggatgaagaaggaggccgtccagaacgagcgggaccgcatctccacccggcgcagctcctacgaggacagctccctgcccagcatcaacgcgctcctgcaggccgaggtgctgtcccggcagatcaccagccccgtgtccggcatcaacggggacatccgcgccaagaagatcgccagcatcgccgacgtctgcgagagcatgaaggagcagctcctggtgctggtggagtgggcgaagtacatcccggccttctgcgagctccccctggacgaccaggtcgccctgctccgggcccacgccggcgagcacctcctgctgggggcgaccaagcgctccatggtgttcaaggacgtgctgctgctcggcaacgactacatcgtcccccggcactgccccgagctggccgagatgagccgcgtgtccatccggatcctggacgagctcgtgctgccgttccaggagctgcagatcgacgacaacgagtacgcctacctcaaggccatcatcttcttcgaccccgacgccaagggcctgagcgaccccgggaagatcaagcgcctgcgcgcgcaggtccaggtgtccctcgaggactacatcaacgaccggcagtacgacagccgcggccggttcggggagctgctgctcctgctgcccacgctccagtccatcacctggcagatgatcgagcagatccagttcatcaagctgttcggcatggccaagatcgacaacctgctccaggagatgctgctgggcgggagcccgtccgacgcgccccacgcccaccaccccctccacccccacctgatgcaggagcacatgggcaccaacgtgatcgtcgccaacaccatgccgacgcacctgagcaacgggcagatgtgcgagtggccccgcccccggggccaggccgccacccccgagaccccgcagccctccccgcccgggggcagcggctccgagccctacaagctgctccccggggccgtggccaccatcgtgaagcccctgagcgcgatcccccagccgacgatcaccaagcaggaggtcatctga

SEQ ID NO: 1186 - RNA, 1314 nt, synthetic construct
  misc_feature 1..1314: note = CDS (opt1) from Homo sapiens__NP_000448.3__HNF4A(39-474)(S313E)
  source 1..1314: mol_type = other RNA
atggacaccagcccgtccgaggggaccaacctgaacgcccccaacagcctgggcgtgtccgccctctgcgccatctgcggggaccgggcgacgggcaagcactacggggccagctcctgcgacggctgcaagggcttcttccgccggagcgtccgcaagaaccacatgtactcctgccggttcagccgccagtgcgtggtggacaaggacaagcggaaccagtgccgctactgccggctgaagaagtgcttccgcgccgggatgaagaaggaggccgtccagaacgagcgggaccgcatctccacccggcgcagctcctacgaggacagctccctgcccagcatcaacgcgctcctgcaggccgaggtgctgtcccggcagatcaccagccccgtgtccggcatcaacggggacatccgcgccaagaagatcgccagcatcgccgacgtctgcgagagcatgaaggagcagctcctggtgctggtggagtgggcgaagtacatcccggccttctgcgagctccccctggacgaccaggtcgccctgctccgggcccacgccggcgagcacctcctgctgggggcgaccaagcgctccatggtgttcaaggacgtgctgctgctcggcaacgactacatcgtcccccggcactgccccgagctggccgagatgagccgcgtgtccatccggatcctggacgagctcgtgctgccgttccaggagctgcagatcgacgacaacgagtacgcctacctcaaggccatcatcttcttcgaccccgacgccaagggcctgagcgaccccgggaagatcaagcgcctgcgcgagcaggtccaggtgtccctcgaggactacatcaacgaccggcagtacgacagccgcggccggttcggggagctgctgctcctgctgcccacgctccagtccatcacctggcagatgatcgagcagatccagttcatcaagctgttcggcatggcgaagatcgacaacctgctccaggagatgctgctgggcgggagcccgtccgacgcgccccacgcccaccaccccctccacccccacctgatgcaggagcacatgggcaccaacgtgatcgtcgccaacaccatgccgacgcacctgagcaacgggcagatgtgcgagtggccccgcccccggggccaggccgccacccccgagaccccgcagccctccccgcccgggggcagcggctccgagccctacaagctgctccccggggccgtggccaccatcgtgaagcccctgagcgccatcccccagccgacgatcaccaagcaggaggtcatctga

SEQ ID NO: 1187 - RNA, 1314 nt, synthetic construct
  misc_feature 1..1314: note = CDS (opt1) from Homo sapiens__NP_000448.3__HNF4A(39-474)(S142A_S143A)
  source 1..1314: mol_type = other RNA
atggacaccagcccgtccgaggggaccaacctgaacgcccccaacagcctgggcgtgtccgccctctgcgccatctgcggggaccgggcgacgggcaagcactacggggccagctcctgcgacggctgcaagggcttcttccgccggagcgtccgcaagaaccacatgtactcctgccggttcagccgccagtgcgtggtggacaaggacaagcggaaccagtgccgctactgccggctgaagaagtgcttccgcgccgggatgaagaaggaggccgtccagaacgagcgggaccgcatctccacccggcgcgcggcctacgaggacagctccctgcccagcatcaacgccctcctgcaggccgaggtgctgtcccggcagatcaccagccccgtgtccggcatcaacggggacatccgcgccaagaagatcgcgagcatcgccgacgtctgcgagtccatgaaggagcagctcctggtgctggtggagtgggccaagtacatcccggccttctgcgagctccccctggacgaccaggtcgccctgctccgggcgcacgccggcgagcacctcctgctgggggccaccaagcgcagcatggtgttcaaggacgtgctgctgctcggcaacgactacatcgtcccccggcactgccccgagctggccgagatgagccgcgtgtccatccggatcctggacgagctcgtgctgccgttccaggagctgcagatcgacgacaacgagtacgcctacctcaaggcgatcatcttcttcgaccccgacgccaagggcctgagcgaccccgggaagatcaagcgcctgcgctcccaggtccaggtgagcctcgaggactacatcaacgaccggcagtacgactcccgcggccggttcggggagctgctgctcctgctgcccacgctccagagcatcacctggcagatgatcgagcagatccagttcatcaagctgttcggcatggccaagatcgacaacctgctccaggagatgctgctgggcgggtccccgagcgacgcgccccacgcccaccaccccctccacccccacctgatgcaggagcacatgggcaccaacgtgatcgtcgccaacaccatgccgacgcacctgtccaacgggcagatgtgcgagtggccccgcccccggggccaggccgccacccccgagaccccgcagcccagcccgcccgggggctccggcagcgagccctacaagctgctccccggggccgtggcgaccatcgtgaagcccctgtccgccatcccccagccgacgatcaccaagcaggaggtcatctga

SEQ ID NO: 1188 - RNA, 1314 nt, synthetic construct
  misc_feature 1..1314: note = CDS (opt1) from Homo sapiens__NP_000448.3__HNF4A(39-474)(S142E_S143E)
  source 1..1314: mol_type = other RNA
atggacaccagcccgtccgaggggaccaacctgaacgcccccaacagcctgggcgtgtccgccctctgcgccatctgcggggaccgggcgacgggcaagcactacggggccagctcctgcgacggctgcaagggcttcttccgccggagcgtccgcaagaaccacatgtactcctgccggttcagccgccagtgcgtggtggacaaggacaagcggaaccagtgccgctactgccggctgaagaagtgcttccgcgccgggatgaagaaggaggccgtccagaacgagcgggaccgcatctccacccggcgcgaggagtacgaggacagctccctgcccagcatcaacgcgctcctgcaggccgaggtgctgtcccggcagatcaccagccccgtgtccggcatcaacggggacatccgcgccaagaagatcgccagcatcgccgacgtctgcgagtccatgaaggagcagctcctggtgctggtggagtgggcgaagtacatcccggccttctgcgagctccccctggacgaccaggtcgccctgctccgggcccacgccggcgagcacctcctgctgggggcgaccaagcgcagcatggtgttcaaggacgtgctgctgctcggcaacgactacatcgtcccccggcactgccccgagctggccgagatgagccgcgtgtccatccggatcctggacgagctcgtgctgccgttccaggagctgcagatcgacgacaacgagtacgcctacctcaaggccatcatcttcttcgaccccgacgccaagggcctgagcgaccccgggaagatcaagcgcctgcgctcccaggtccaggtgagcctcgaggactacatcaacgaccggcagtacgactcccgcggccggttcggggagctgctgctcctgctgcccacgctccagagcatcacctggcagatgatcgagcagatccagttcatcaagctgttcggcatggcgaagatcgacaacctgctccaggagatgctgctgggcgggtccccgagcgacgcgccccacgcccaccaccccctccacccccacctgatgcaggagcacatgggcaccaacgtgatcgtcgccaacaccatgccgacgcacctgtccaacgggcagatgtgcgagtggccccgcccccggggccaggccgccacccccgagaccccgcagcccagcccgcccgggggctccggcagcgagccctacaagctgctccccggggccgtggccaccatcgtgaagcccctgtccgccatcccccagccgacgatcaccaagcaggaggtcatctga

SEQ ID NO: 1189 - RNA, 1314 nt, synthetic construct
  misc_feature 1..1314: note = CDS (opt1) from Homo sapiens__NP_000448.3__HNF4A(39-474)(S143A)
  source 1..1314: mol_type = other RNA
atggacaccagcccgtccgaggggaccaacctgaacgcccccaacagcctgggcgtgtccgccctctgcgccatctgcggggaccgggcgacgggcaagcactacggggccagctcctgcgacggctgcaagggcttcttccgccggagcgtccgcaagaaccacatgtactcctgccggttcagccgccagtgcgtggtggacaaggacaagcggaaccagtgccgctactgccggctgaagaagtgcttccgcgccgggatgaagaaggaggccgtccagaacgagcgggaccgcatctccacccggcgcagcgcgtacgaggactccagcctgccctccatcaacgccctcctgcaggccgaggtgctgagccggcagatcacctcccccgtgagcggcatcaacggggacatccgcgccaagaagatcgcctccatcgcggacgtctgcgagagcatgaaggagcagctcctggtgctggtggagtgggccaagtacatcccggccttctgcgagctccccctggacgaccaggtcgccctgctccgggcccacgcgggcgagcacctcctgctgggggccaccaagcgcagcatggtgttcaaggacgtgctgctgctcggcaacgactacatcgtcccccggcactgccccgagctggccgagatgtcccgcgtgagcatccggatcctggacgagctcgtgctgccgttccaggagctgcagatcgacgacaacgagtacgcctacctcaaggccatcatcttcttcgaccccgacgcgaagggcctgtccgaccccgggaagatcaagcgcctgcgcagccaggtccaggtgtccctcgaggactacatcaacgaccggcagtacgacagccgcggccggttcggggagctgctgctcctgctgcccacgctccagtccatcacctggcagatgatcgagcagatccagttcatcaagctgttcggcatggccaagatcgacaacctgctccaggagatgctgctgggcgggagcccgtccgacgcgccccacgcccaccaccccctccacccccacctgatgcaggagcacatgggcaccaacgtgatcgtcgccaacaccatgccgacgcacctgagcaacgggcagatgtgcgagtggccccgcccccggggccaggccgccacccccgagaccccgcagccctccccgcccgggggcagcggctccgagccctacaagctgctccccggggccgtggccaccatcgtgaagcccctgagcgcgatcccccagccgacgatcaccaagcaggaggtcatctga

SEQ ID NO: 1190 - RNA, 1314 nt, synthetic construct
  misc_feature 1..1314: note = CDS (opt1) from Homo sapiens__NP_000448.3__HNF4A(39-474)(T166A)
  source 1..1314: mol_type = other RNA
atggacaccagcccgtccgaggggaccaacctgaacgcccccaacagcctgggcgtgtccgccctctgcgccatctgcggggaccgggcgacgggcaagcactacggggccagctcctgcgacggctgcaagggcttcttccgccggagcgtccgcaagaaccacatgtactcctgccggttcagccgccagtgcgtggtggacaaggacaagcggaaccagtgccgctactgccggctgaagaagtgcttccgcgccgggatgaagaaggaggccgtccagaacgagcgggaccgcatctccacccggcgcagctcctacgaggacagctccctgcccagcatcaacgcgctcctgcaggccgaggtgctgtcccggcagatcgccagccccgtgtccggcatcaacggggacatccgcgccaagaagatcgccagcatcgcggacgtctgcgagagcatgaaggagcagctcctggtgctggtggagtgggccaagtacatcccggccttctgcgagctccccctggacgaccaggtcgccctgctccgggcccacgcgggcgagcacctcctgctgggggccaccaagcgctccatggtgttcaaggacgtgctgctgctcggcaacgactacatcgtcccccggcactgccccgagctggccgagatgagccgcgtgtccatccggatcctggacgagctcgtgctgccgttccaggagctgcagatcgacgacaacgagtacgcctacctcaaggccatcatcttcttcgaccccgacgcgaagggcctgagcgaccccgggaagatcaagcgcctgcgctcccaggtccaggtgagcctcgaggactacatcaacgaccggcagtacgactcccgcggccggttcggggagctgctgctcctgctgcccaccctccagagcatcacgtggcagatgatcgagcagatccagttcatcaagctgttcggcatggccaagatcgacaacctgctccaggagatgctgctgggcgggtccccgagcgacgcgccccacgcccaccaccccctccacccccacctgatgcaggagcacatgggcaccaacgtgatcgtcgccaacaccatgccgacccacctgtccaacgggcagatgtgcgagtggccccgcccccggggccaggccgccacgcccgagaccccgcagcccagcccgcccgggggctccggcagcgagccctacaagctgctccccggggccgtggccaccatcgtgaagcccctgtccgcgatcccccagccgaccatcacgaagcaggaggtcatctga

SEQ ID NO: 1191 - RNA, 1314 nt, synthetic construct
  misc_feature 1..1314: note = CDS (opt1) from Homo sapiens__NP_000448.3__HNF4A(39-474)(S167E)
  source 1..1314: mol_type = other RNA
atggacaccagcccgtccgaggggaccaacctgaacgcccccaacagcctgggcgtgtccgccctctgcgccatctgcggggaccgggcgacgggcaagcactacggggccagctcctgcgacggctgcaagggcttcttccgccggagcgtccgcaagaaccacatgtactcctgccggttcagccgccagtgcgtggtggacaaggacaagcggaaccagtgccgctactgccggctgaagaagtgcttccgcgccgggatgaagaaggaggccgtccagaacgagcgggaccgcatctccacccggcgcagctcctacgaggacagctccctgcccagcatcaacgcgctcctgcaggccgaggtgctgtcccggcagatcaccgagcccgtgagcggcatcaacggggacatccgcgccaagaagatcgcctccatcgccgacgtctgcgagagcatgaaggagcagctcctggtgctggtggagtgggcgaagtacatcccggccttctgcgagctccccctggacgaccaggtcgccctgctccgggcccacgccggcgagcacctcctgctgggggcgaccaagcgcagcatggtgttcaaggacgtgctgctgctcggcaacgactacatcgtcccccggcactgccccgagctggccgagatgtcccgcgtgagcatccggatcctggacgagctcgtgctgccgttccaggagctgcagatcgacgacaacgagtacgcctacctcaaggccatcatcttcttcgaccccgacgccaagggcctgtccgaccccgggaagatcaagcgcctgcgcagccaggtccaggtgtccctcgaggactacatcaacgaccggcagtacgacagccgcggccggttcggggagctgctgctcctgctgcccacgctccagtccatcacctggcagatgatcgagcagatccagttcatcaagctgttcggcatggcgaagatcgacaacctgctccaggagatgctgctgggcgggagcccgtccgacgcgccccacgcccaccaccccctccacccccacctgatgcaggagcacatgggcaccaacgtgatcgtcgccaacaccatgccgacgcacctgagcaacgggcagatgtgcgagtggccccgcccccggggccaggccgccacccccgagaccccgcagccctccccgcccgggggcagcggctccgagccctacaagctgctccccggggccgtggccaccatcgtgaagcccctgagcgccatcccccagccgacgatcaccaagcaggaggtcatctga

SEQ ID NO: 1192 - RNA, 1314 nt, synthetic construct
  misc_feature 1..1314: note = CDS (opt1) from Homo sapiens__NP_000448.3__HNF4A(39-474)(S167A)
  source 1..1314: mol_type = other RNA
atggacaccagcccgtccgaggggaccaacctgaacgcccccaacagcctgggcgtgtccgccctctgcgccatctgcggggaccgggcgacgggcaagcactacggggccagctcctgcgacggctgcaagggcttcttccgccggagcgtccgcaagaaccacatgtactcctgccggttcagccgccagtgcgtggtggacaaggacaagcggaaccagtgccgctactgccggctgaagaagtgcttccgcgccgggatgaagaaggaggccgtccagaacgagcgggaccgcatctccacccggcgcagctcctacgaggacagctccctgcccagcatcaacgcgctcctgcaggccgaggtgctgtcccggcagatcaccgcccccgtgagcggcatcaacggggacatccgcgccaagaagatcgcctccatcgcggacgtctgcgagagcatgaaggagcagctcctggtgctggtggagtgggccaagtacatcccggccttctgcgagctccccctggacgaccaggtcgccctgctccgggcccacgcgggcgagcacctcctgctgggggccaccaagcgcagcatggtgttcaaggacgtgctgctgctcggcaacgactacatcgtcccccggcactgccccgagctggccgagatgtcccgcgtgagcatccggatcctggacgagctcgtgctgccgttccaggagctgcagatcgacgacaacgagtacgcctacctcaaggccatcatcttcttcgaccccgacgcgaagggcctgtccgaccccgggaagatcaagcgcctgcgcagccaggtccaggtgtccctcgaggactacatcaacgaccggcagtacgacagccgcggccggttcggggagctgctgctcctgctgcccacgctccagtccatcacctggcagatgatcgagcagatccagttcatcaagctgttcggcatggccaagatcgacaacctgctccaggagatgctgctgggcgggagcccgtccgacgcgccccacgcccaccaccccctccacccccacctgatgcaggagcacatgggcaccaacgtgatcgtcgccaacaccatgccgacgcacctgagcaacgggcagatgtgcgagtggccccgcccccggggccaggccgccacccccgagaccccgcagccctccccgcccgggggcagcggctccgagccctacaagctgctccccggggccgtggccaccatcgtgaagcccctgagcgcgatcccccagccgacgatcaccaagcaggaggtcatctga

SEQ ID NO: 1193 - RNA, 1314 nt, synthetic construct
  misc_feature 1..1314: note = CDS (opt1) from Homo sapiens__NP_000448.3__HNF4A(39-474)(S167A_S378A_T429A_T432A _S436A)
  source 1..1314: mol_type = other RNA
atggacaccagcccgtccgaggggaccaacctgaacgcccccaacagcctgggcgtgtccgccctctgcgccatctgcggggaccgggcgacgggcaagcactacggggccagctcctgcgacggctgcaagggcttcttccgccggagcgtccgcaagaaccacatgtactcctgccggttcagccgccagtgcgtggtggacaaggacaagcggaaccagtgccgctactgccggctgaagaagtgcttccgcgccgggatgaagaaggaggccgtccagaacgagcgggaccgcatctccacccggcgcagctcctacgaggacagctccctgcccagcatcaacgcgctcctgcaggccgaggtgctgtcccggcagatcaccgcccccgtgagcggcatcaacggggacatccgcgccaagaagatcgcctccatcgcggacgtctgcgagagcatgaaggagcagctcctggtgctggtggagtgggccaagtacatcccggccttctgcgagctccccctggacgaccaggtcgccctgctccgggcccacgcgggcgagcacctcctgctgggggccaccaagcgcagcatggtgttcaaggacgtgctgctgctcggcaacgactacatcgtcccccggcactgccccgagctggccgagatgtcccgcgtgagcatccggatcctggacgagctcgtgctgccgttccaggagctgcagatcgacgacaacgagtacgcctacctcaaggccatcatcttcttcgaccccgacgcgaagggcctgtccgaccccgggaagatcaagcgcctgcgcagccaggtccaggtgtccctcgaggactacatcaacgaccggcagtacgacagccgcggccggttcggggagctgctgctcctgctgcccacgctccagtccatcacctggcagatgatcgagcagatccagttcatcaagctgttcggcatggccaagatcgacaacctgctccaggagatgctgctgggcggggccccgagcgacgcgccccacgcccaccaccccctccacccccacctgatgcaggagcacatgggcaccaacgtgatcgtcgccaacaccatgccgacgcacctgtccaacgggcagatgtgcgagtggccccgcccccggggccaggccgccgcccccgaggcgccgcagcccgccccgcccgggggcagcggctccgagccctacaagctgctccccggggccgtggccaccatcgtgaagcccctgagcgccatcccccagccgaccatcaccaagcaggaggtcatctga

SEQ ID NO: 1194 - RNA, 1314 nt, synthetic construct
  misc_feature 1..1314: note = CDS (opt1) from Homo sapiens__NP_000448.3__HNF4A(39-474)(S167E_S378E_T429E_T432E _S436E)
  source 1..1314: mol_type = other RNA
atggacaccagcccgtccgaggggaccaacctgaacgcccccaacagcctgggcgtgtccgccctctgcgccatctgcggggaccgggcgacgggcaagcactacggggccagctcctgcgacggctgcaagggcttcttccgccggagcgtccgcaagaaccacatgtactcctgccggttcagccgccagtgcgtggtggacaaggacaagcggaaccagtgccgctactgccggctgaagaagtgcttccgcgccgggatgaagaaggaggccgtccagaacgagcgggaccgcatctccacccggcgcagctcctacgaggacagctccctgcccagcatcaacgcgctcctgcaggccgaggtgctgtcccggcagatcaccgagcccgtgagcggcatcaacggggacatccgcgccaagaagatcgcctccatcgccgacgtctgcgagagcatgaaggagcagctcctggtgctggtggagtgggcgaagtacatcccggccttctgcgagctccccctggacgaccaggtcgccctgctccgggcccacgccggcgagcacctcctgctgggggcgaccaagcgcagcatggtgttcaaggacgtgctgctgctcggcaacgactacatcgtcccccggcactgccccgagctggccgagatgtcccgcgtgagcatccggatcctggacgagctcgtgctgccgttccaggagctgcagatcgacgacaacgagtacgcctacctcaaggccatcatcttcttcgaccccgacgccaagggcctgtccgaccccgggaagatcaagcgcctgcgcagccaggtccaggtgtccctcgaggactacatcaacgaccggcagtacgacagccgcggccggttcggggagctgctgctcctgctgcccacgctccagtccatcacctggcagatgatcgagcagatccagttcatcaagctgttcggcatggcgaagatcgacaacctgctccaggagatgctgctgggcggggagccgagcgacgcgccccacgcccaccaccccctccacccccacctgatgcaggagcacatgggcaccaacgtgatcgtcgccaacaccatgccgacgcacctgtccaacgggcagatgtgcgagtggccccgcccccggggccaggccgccgagcccgaggagccgcagcccgagccgcccgggggcagcggctccgagccctacaagctgctccccggggccgtggccaccatcgtgaagcccctgagcgccatcccccagccgaccatcaccaagcaggaggtcatctga

SEQ ID NO: 1195 - RNA, 1314 nt, synthetic construct
  misc_feature 1..1314: note = CDS (opt1) from Homo sapiens__NP_000448.3__HNF4A(39-474)(S87A)
  source 1..1314: mol_type = other RNA
atggacaccagcccgtccgaggggaccaacctgaacgcccccaacagcctgggcgtgtccgccctctgcgccatctgcggggaccgggcgacgggcaagcactacggggccagctcctgcgacggctgcaagggcttcttccgccgggccgtccgcaagaaccacatgtacagctgccggttctcccgccagtgcgtggtggacaaggacaagcggaaccagtgccgctactgccggctgaagaagtgcttccgcgccgggatgaagaaggaggcggtccagaacgagcgggaccgcatcagcacccggcgctccagctacgaggactccagcctgccctccatcaacgccctcctgcaggccgaggtgctgagccggcagatcacctcccccgtgagcggcatcaacggggacatccgcgccaagaagatcgcctccatcgcggacgtctgcgagagcatgaaggagcagctcctggtgctggtggagtgggccaagtacatcccggccttctgcgagctccccctggacgaccaggtcgccctgctccgggcccacgcgggcgagcacctcctgctgggggccaccaagcgcagcatggtgttcaaggacgtgctgctgctcggcaacgactacatcgtcccccggcactgccccgagctggccgagatgtcccgcgtgagcatccggatcctggacgagctcgtgctgccgttccaggagctgcagatcgacgacaacgagtacgcctacctcaaggccatcatcttcttcgaccccgacgcgaagggcctgtccgaccccgggaagatcaagcgcctgcgcagccaggtccaggtgtccctcgaggactacatcaacgaccggcagtacgacagccgcggccggttcggggagctgctgctcctgctgcccacgctccagtccatcacctggcagatgatcgagcagatccagttcatcaagctgttcggcatggccaagatcgacaacctgctccaggagatgctgctgggcgggagcccgtccgacgcgccccacgcccaccaccccctccacccccacctgatgcaggagcacatgggcaccaacgtgatcgtcgccaacaccatgccgacgcacctgagcaacgggcagatgtgcgagtggccccgcccccggggccaggccgccacccccgagaccccgcagccctccccgcccgggggcagcggctccgagccctacaagctgctccccggggccgtggccaccatcgtgaagcccctgagcgcgatcccccagccgacgatcaccaagcaggaggtcatctga

SEQ ID NO: 1196 - RNA, 1314 nt, synthetic construct
  misc_feature 1..1314: note = CDS (opt1) from Homo sapiens__NP_000448.3__HNF4A(39-474)(S87E)
  source 1..1314: mol_type = other RNA
atggacaccagcccgtccgaggggaccaacctgaacgcccccaacagcctgggcgtgtccgccctctgcgccatctgcggggaccgggcgacgggcaagcactacggggccagctcctgcgacggctgcaagggcttcttccgccgggaggtccgcaagaaccacatgtacagctgccggttctcccgccagtgcgtggtggacaaggacaagcggaaccagtgccgctactgccggctgaagaagtgcttccgcgccgggatgaagaaggaggccgtccagaacgagcgggaccgcatcagcacccggcgctccagctacgaggactccagcctgccctccatcaacgcgctcctgcaggccgaggtgctgagccggcagatcacctcccccgtgagcggcatcaacggggacatccgcgccaagaagatcgcctccatcgccgacgtctgcgagagcatgaaggagcagctcctggtgctggtggagtgggcgaagtacatcccggccttctgcgagctccccctggacgaccaggtcgccctgctccgggcccacgccggcgagcacctcctgctgggggcgaccaagcgcagcatggtgttcaaggacgtgctgctgctcggcaacgactacatcgtcccccggcactgccccgagctggccgagatgtcccgcgtgagcatccggatcctggacgagctcgtgctgccgttccaggagctgcagatcgacgacaacgagtacgcctacctcaaggccatcatcttcttcgaccccgacgccaagggcctgtccgaccccgggaagatcaagcgcctgcgcagccaggtccaggtgtccctcgaggactacatcaacgaccggcagtacgacagccgcggccggttcggggagctgctgctcctgctgcccacgctccagtccatcacctggcagatgatcgagcagatccagttcatcaagctgttcggcatggcgaagatcgacaacctgctccaggagatgctgctgggcgggagcccgtccgacgcgccccacgcccaccaccccctccacccccacctgatgcaggagcacatgggcaccaacgtgatcgtcgccaacaccatgccgacgcacctgagcaacgggcagatgtgcgagtggccccgcccccggggccaggccgccacccccgagaccccgcagccctccccgcccgggggcagcggctccgagccctacaagctgctccccggggccgtggccaccatcgtgaagcccctgagcgccatcccccagccgacgatcaccaagcaggaggtcatctga

SEQ ID NO: 1197 - RNA, 1314 nt, synthetic construct
  misc_feature 1..1314: note = CDS (opt1) from Homo sapiens__NP_000448.3__HNF4A(39-474)(R2V)
  source 1..1314: mol_type = other RNA
atggacaccagcccgtccgaggggaccaacctgaacgcccccaacagcctgggcgtgtccgccctctgcgccatctgcggggaccgcgcgacgggcaagcactacggggccagctcctgcgacggctgcaagggcttcttccggcgcagcgtgcggaagaaccacatgtactcctgccgcttcagccggcagtgcgtggtcgacaaggacaagcgcaaccagtgccggtactgccgcctgaagaagtgcttccgggccgggatgaagaaggaggccgtgcagaacgagcgcgaccggatctccacccgccggagctcctacgaggacagctccctgcccagcatcaacgcgctcctgcaggccgaggtgctgtcccgccagatcaccagccccgtctccggcatcaacggggacatccgggccaagaagatcgccagcatcgccgacgtgtgcgagagcatgaaggagcagctcctggtgctggtcgagtgggcgaagtacatcccggccttctgcgagctccccctggacgaccaggtggccctgctccgcgcccacgccggcgagcacctcctgctgggggcgaccaagcggtccatggtgttcaaggacgtcctgctgctcggcaacgactacatcgtgccccgccactgccccgagctggccgagatgagccgggtgtccatccgcatcctggacgagctcgtcctgccgttccaggagctgcagatcgacgacaacgagtacgcctacctcaaggccatcatcttcttcgaccccgacgccaagggcctgagcgaccccgggaagatcaagcggctgcgctcccaggtccaggtgagcctcgaggactacatcaacgaccgccagtacgactcccggggccgcttcggggagctgctgctcctgctgcccacgctccagagcatcacctggcagatgatcgagcagatccagttcatcaagctgttcggcatggcgaagatcgacaacctgctccaggagatgctgctgggcgggtccccgagcgacgcgccccacgcccaccaccccctccacccccacctgatgcaggagcacatgggcaccaacgtgatcgtggccaacaccatgccgacgcacctgtccaacgggcagatgtgcgagtggccccggccccgcggccaggccgccacccccgagaccccgcagcccagcccgcccgggggctccggcagcgagccctacaagctgctccccggggccgtggccaccatcgtcaagcccctgtccgccatcccccagccgacgatcaccaagcaggaggtgatctga

SEQ ID NO: 1198 - RNA, 1314 nt, synthetic construct
  misc_feature 1..1314: note = CDS (opt1) from Homo sapiens__NP_000448.3__HNF4A(39-474)(R2V_K5V)
  source 1..1314: mol_type = other RNA
atggacaccagcccgtccgaggggaccaacctgaacgcccccaacagcctgggcgtgtccgccctctgcgccatctgcggggaccgcgcgacgggcaagcactacggggccagctcctgcgacggctgcaagggcttcttccggcgcagcgtgcggaagaaccacatgtactcctgccgcttcagccggcagtgcgtcgtggacaaggacaagcgcaaccagtgccggtactgccgcctgaagaagtgcttccgggccgggatgaagaaggaggccgtgcagaacgagcgcgaccggatctccacccgccggagctcctacgaggacagctccctgcccagcatcaacgcgctcctgcaggccgaggtcctgtcccgccagatcaccagccccgtgtccggcatcaacggggacatccgggccaagaagatcgccagcatcgccgacgtgtgcgagagcatgaaggagcagctcctggtcctggtggagtgggcgaagtacatcccggccttctgcgagctccccctggacgaccaggtggccctgctccgcgcccacgccggcgagcacctcctgctgggggcgaccaagcggtccatggtcttcaaggacgtgctgctgctcggcaacgactacatcgtgccccgccactgccccgagctggccgagatgagccgggtctccatccgcatcctggacgagctcgtgctgccgttccaggagctgcagatcgacgacaacgagtacgcctacctcaaggccatcatcttcttcgaccccgacgccaagggcctgagcgaccccgggaagatcaagcggctgcgctcccaggtgcaggtcagcctcgaggactacatcaacgaccgccagtacgactcccggggccgcttcggggagctgctgctcctgctgcccacgctccagagcatcacctggcagatgatcgagcagatccagttcatcaagctgttcggcatggcgaagatcgacaacctgctccaggagatgctgctgggcgggtccccgagcgacgcgccccacgcccaccaccccctccacccccacctgatgcaggagcacatgggcaccaacgtgatcgtggccaacaccatgccgacgcacctgtccaacgggcagatgtgcgagtggccccggccccgcggccaggccgccacccccgagaccccgcagcccagcccgcccgggggctccggcagcgagccctacaagctgctccccggggccgtcgccaccatcgtgaagcccctgtccgccatcccccagccgacgatcaccaagcaggaggtcatctga

SEQ ID NO: 1199 - RNA, 1314 nt, synthetic construct
  misc_feature 1..1314: note = CDS (opt1) from Homo sapiens__NP_000448.3__HNF4A(39-474)(K179R_K180R)
  source 1..1314: mol_type = other RNA
atggacaccagcccgtccgaggggaccaacctgaacgcccccaacagcctgggcgtgtccgccctctgcgccatctgcggggaccgggcgacgggcaagcactacggggccagctcctgcgacggctgcaagggcttcttccgccggagcgtccgcaagaaccacatgtactcctgccggttcagccgccagtgcgtggtggacaaggacaagcggaaccagtgccgctactgccggctgaagaagtgcttccgcgccgggatgaagaaggaggccgtccagaacgagcgggaccgcatctccacccggcgcagctcctacgaggacagctccctgcccagcatcaacgcgctcctgcaggccgaggtgctgtcccggcagatcaccagccccgtgtccggcatcaacggggacatccgcgcccggcgcatcgccagcatcgccgacgtctgcgagagcatgaaggagcagctcctggtgctggtggagtgggcgaagtacatcccggccttctgcgagctccccctggacgaccaggtcgccctgctccgggcccacgccggcgagcacctcctgctgggggcgaccaagcgctccatggtgttcaaggacgtgctgctgctcggcaacgactacatcgtcccccggcactgccccgagctggccgagatgagccgcgtgtccatccgcatcctggacgagctcgtgctgccgttccaggagctgcagatcgacgacaacgagtacgcctacctcaaggccatcatcttcttcgaccccgacgccaagggcctgagcgaccccgggaagatcaagcggctgcgctcccaggtccaggtgagcctcgaggactacatcaacgaccggcagtacgactcccgcggccggttcggggagctgctgctcctgctgcccacgctccagagcatcacctggcagatgatcgagcagatccagttcatcaagctgttcggcatggcgaagatcgacaacctgctccaggagatgctgctgggcgggtccccgagcgacgcgccccacgcccaccaccccctccacccccacctgatgcaggagcacatgggcaccaacgtgatcgtcgccaacaccatgccgacgcacctgtccaacgggcagatgtgcgagtggccccgcccccggggccaggccgccacccccgagaccccgcagcccagcccgcccgggggctccggcagcgagccctacaagctgctccccggggccgtggccaccatcgtgaagcccctgtccgccatcccccagccgacgatcaccaagcaggaggtcatctga

SEQ ID NO: 1200 - RNA, 1314 nt, synthetic construct
  misc_feature 1..1314: note = CDS (opt1) from Homo sapiens__NP_000448.3__HNF4A(39-474)(K234R)
  source 1..1314: mol_type = other RNA
atggacaccagcccgtccgaggggaccaacctgaacgcccccaacagcctgggcgtgtccgccctctgcgccatctgcggggaccgggcgacgggcaagcactacggggccagctcctgcgacggctgcaagggcttcttccgccggagcgtccgcaagaaccacatgtactcctgccggttcagccgccagtgcgtggtggacaaggacaagcggaaccagtgccgctactgccggctgaagaagtgcttccgcgccgggatgaagaaggaggccgtccagaacgagcgggaccgcatctccacccggcgcagctcctacgaggacagctccctgcccagcatcaacgcgctcctgcaggccgaggtgctgtcccggcagatcaccagccccgtgtccggcatcaacggggacatccgcgccaagaagatcgccagcatcgccgacgtctgcgagagcatgaaggagcagctcctggtgctggtggagtgggcgaagtacatcccggccttctgcgagctccccctggacgaccaggtcgccctgctccgggcccacgccggcgagcacctcctgctgggggcgacccgccggtccatggtgttcaaggacgtgctgctgctcggcaacgactacatcgtcccccgccactgccccgagctggccgagatgagccgggtgtccatccgcatcctggacgagctcgtgctgccgttccaggagctgcagatcgacgacaacgagtacgcctacctcaaggccatcatcttcttcgaccccgacgccaagggcctgagcgaccccgggaagatcaagcgcctgcggtcccaggtccaggtgagcctcgaggactacatcaacgaccgccagtacgactcccggggccgcttcggggagctgctgctcctgctgcccacgctccagagcatcacctggcagatgatcgagcagatccagttcatcaagctgttcggcatggcgaagatcgacaacctgctccaggagatgctgctgggcgggtccccgagcgacgcgccccacgcccaccaccccctccacccccacctgatgcaggagcacatgggcaccaacgtgatcgtcgccaacaccatgccgacgcacctgtccaacgggcagatgtgcgagtggccccggccccgcggccaggccgccacccccgagaccccgcagcccagcccgcccgggggctccggcagcgagccctacaagctgctccccggggccgtggccaccatcgtgaagcccctgtccgccatcccccagccgacgatcaccaagcaggaggtcatctga

SEQ ID NO: 1201 - RNA, 1314 nt, synthetic construct
  misc_feature 1..1314: note = CDS (opt1) from Homo sapiens__NP_000448.3__HNF4A(39-474)(K300R)
  source 1..1314: mol_type = other RNA
atggacaccagcccgtccgaggggaccaacctgaacgcccccaacagcctgggcgtgtccgccctctgcgccatctgcggggaccgggcgacgggcaagcactacggggccagctcctgcgacggctgcaagggcttcttccgccggagcgtccgcaagaaccacatgtactcctgccggttcagccgccagtgcgtggtggacaaggacaagcggaaccagtgccgctactgccggctgaagaagtgcttccgcgccgggatgaagaaggaggccgtccagaacgagcgggaccgcatctccacccggcgcagctcctacgaggacagctccctgcccagcatcaacgcgctcctgcaggccgaggtgctgtcccggcagatcaccagccccgtgtccggcatcaacggggacatccgcgccaagaagatcgccagcatcgccgacgtctgcgagagcatgaaggagcagctcctggtgctggtggagtgggcgaagtacatcccggccttctgcgagctccccctggacgaccaggtcgccctgctccgggcccacgccggcgagcacctcctgctgggggcgaccaagcgctccatggtgttcaaggacgtgctgctgctcggcaacgactacatcgtcccccggcactgccccgagctggccgagatgagccgcgtgtccatccggatcctggacgagctcgtgctgccgttccaggagctgcagatcgacgacaacgagtacgcctacctcaaggccatcatcttcttcgaccccgacgcccgcggcctgagcgaccccgggaagatcaagcgcctgcggtcccaggtccaggtgagcctcgaggactacatcaacgaccgccagtacgactcccggggccgcttcggggagctgctgctcctgctgcccacgctccagagcatcacctggcagatgatcgagcagatccagttcatcaagctgttcggcatggcgaagatcgacaacctgctccaggagatgctgctgggcgggtccccgagcgacgcgccccacgcccaccaccccctccacccccacctgatgcaggagcacatgggcaccaacgtgatcgtcgccaacaccatgccgacgcacctgtccaacgggcagatgtgcgagtggccccggccccgcggccaggccgccacccccgagaccccgcagcccagcccgcccgggggctccggcagcgagccctacaagctgctccccggggccgtggccaccatcgtgaagcccctgtccgccatcccccagccgacgatcaccaagcaggaggtcatctga

SEQ ID NO: 1202 - RNA, 1314 nt, synthetic construct
  misc_feature 1..1314: note = CDS (opt1) from Homo sapiens__NP_000448.3__HNF4A(39-474)(K300R_K307R_K309R)
  source 1..1314: mol_type = other RNA
atggacaccagcccgtccgaggggaccaacctgaacgcccccaacagcctgggcgtgtccgccctctgcgccatctgcggggaccgggcgacgggcaagcactacggggccagctcctgcgacggctgcaagggcttcttccgccggagcgtccgcaagaaccacatgtactcctgccggttcagccgccagtgcgtggtggacaaggacaagcggaaccagtgccgctactgccggctgaagaagtgcttccgcgccgggatgaagaaggaggccgtccagaacgagcgggaccgcatctccacccggcgcagctcctacgaggacagctccctgcccagcatcaacgcgctcctgcaggccgaggtgctgtcccggcagatcaccagccccgtgtccggcatcaacggggacatccgcgccaagaagatcgccagcatcgccgacgtctgcgagagcatgaaggagcagctcctggtgctggtggagtgggcgaagtacatcccggccttctgcgagctccccctggacgaccaggtcgccctgctccgggcccacgccggcgagcacctcctgctgggggcgaccaagcgctccatggtgttcaaggacgtgctgctgctcggcaacgactacatcgtcccccggcactgccccgagctggccgagatgagccgcgtgtccatccggatcctggacgagctcgtgctgccgttccaggagctgcagatcgacgacaacgagtacgcctacctcaaggccatcatcttcttcgaccccgacgcccgcggcctgagcgaccccgggcgcatccggcgcctgcggtcccaggtccaggtgagcctcgaggactacatcaacgaccgccagtacgactcccggggccgcttcggggagctgctgctcctgctgcccacgctccagagcatcacctggcagatgatcgagcagatccagttcatcaagctgttcggcatggcgaagatcgacaacctgctccaggagatgctgctgggcgggtccccgagcgacgcgccccacgcccaccaccccctccacccccacctgatgcaggagcacatgggcaccaacgtgatcgtcgccaacaccatgccgacgcacctgtccaacgggcagatgtgcgagtggccccggccccgcggccaggccgccacccccgagaccccgcagcccagcccgcccgggggctccggcagcgagccctacaagctgctccccggggccgtggccaccatcgtgaagcccctgtccgccatcccccagccgacgatcaccaagcaggaggtcatctga

SEQ ID NO: 1203 - RNA, 1314 nt, synthetic construct
  misc_feature 1..1314: note = CDS (opt1) from Homo sapiens__NP_000448.3__HNF4A(39-474)(K447R_K470R)
  source 1..1314: mol_type = other RNA
atggacaccagcccgtccgaggggaccaacctgaacgcccccaacagcctgggcgtgtccgccctctgcgccatctgcggggaccgggcgacgggcaagcactacggggccagctcctgcgacggctgcaagggcttcttccgccggagcgtccgcaagaaccacatgtactcctgccggttcagccgccagtgcgtggtggacaaggacaagcggaaccagtgccgctactgccggctgaagaagtgcttccgcgccgggatgaagaaggaggccgtccagaacgagcgggaccgcatctccacccggcgcagctcctacgaggacagctccctgcccagcatcaacgcgctcctgcaggccgaggtgctgtcccggcagatcaccagccccgtgtccggcatcaacggggacatccgcgccaagaagatcgccagcatcgccgacgtctgcgagagcatgaaggagcagctcctggtgctggtggagtgggcgaagtacatcccggccttctgcgagctccccctggacgaccaggtcgccctgctccgggcccacgccggcgagcacctcctgctgggggcgaccaagcgctccatggtgttcaaggacgtgctgctgctcggcaacgactacatcgtcccccggcactgccccgagctggccgagatgagccgcgtgtccatccggatcctggacgagctcgtgctgccgttccaggagctgcagatcgacgacaacgagtacgcctacctcaaggccatcatcttcttcgaccccgacgccaagggcctgagcgaccccgggaagatcaagcgcctgcgctcccaggtccaggtgagcctcgaggactacatcaacgaccggcagtacgactcccgcggccggttcggggagctgctgctcctgctgcccacgctccagagcatcacctggcagatgatcgagcagatccagttcatcaagctgttcggcatggcgaagatcgacaacctgctccaggagatgctgctgggcgggtccccgagcgacgcgccccacgcccaccaccccctccacccccacctgatgcaggagcacatgggcaccaacgtgatcgtcgccaacaccatgccgacgcacctgtccaacgggcagatgtgcgagtggccccgcccccggggccaggccgccacccccgagaccccgcagcccagcccgcccgggggctccggcagcgagccctaccgcctgctccccggggccgtggccaccatcgtgaagcccctgtccgccatcccccagccgacgatcacccggcaggaggtcatctga

SEQ ID NO: 1204 - RNA, 1314 nt, synthetic construct
  misc_feature 1..1314: note = CDS (opt1) from Homo sapiens__NP_000448.3__HNF4A(39-474)(K458R)
  source 1..1314: mol_type = other RNA
atggacaccagcccgtccgaggggaccaacctgaacgcccccaacagcctgggcgtgtccgccctctgcgccatctgcggggaccgggcgacgggcaagcactacggggccagctcctgcgacggctgcaagggcttcttccgccggagcgtccgcaagaaccacatgtactcctgccggttcagccgccagtgcgtggtggacaaggacaagcggaaccagtgccgctactgccggctgaagaagtgcttccgcgccgggatgaagaaggaggccgtccagaacgagcgggaccgcatctccacccggcgcagctcctacgaggacagctccctgcccagcatcaacgcgctcctgcaggccgaggtgctgtcccggcagatcaccagccccgtgtccggcatcaacggggacatccgcgccaagaagatcgccagcatcgccgacgtctgcgagagcatgaaggagcagctcctggtgctggtggagtgggcgaagtacatcccggccttctgcgagctccccctggacgaccaggtcgccctgctccgggcccacgccggcgagcacctcctgctgggggcgaccaagcgctccatggtgttcaaggacgtgctgctgctcggcaacgactacatcgtcccccggcactgccccgagctggccgagatgagccgcgtgtccatccggatcctggacgagctcgtgctgccgttccaggagctgcagatcgacgacaacgagtacgcctacctcaaggccatcatcttcttcgaccccgacgccaagggcctgagcgaccccgggaagatcaagcgcctgcgctcccaggtccaggtgagcctcgaggactacatcaacgaccggcagtacgactcccgcggccggttcggggagctgctgctcctgctgcccacgctccagagcatcacctggcagatgatcgagcagatccagttcatcaagctgttcggcatggcgaagatcgacaacctgctccaggagatgctgctgggcgggtccccgagcgacgcgccccacgcccaccaccccctccacccccacctgatgcaggagcacatgggcaccaacgtgatcgtcgccaacaccatgccgacgcacctgtccaacgggcagatgtgcgagtggccccgcccccggggccaggccgccacccccgagaccccgcagcccagcccgcccgggggctccggcagcgagccctacaagctgctccccggggccgtggccaccatcgtgcgccccctgtccgccatcccccagccgacgatcaccaagcaggaggtcatctga

SEQ ID NO: 1205 - RNA, 1314 nt, synthetic construct
  misc_feature 1..1314: note = CDS (opt1) from Homo sapiens__NP_000448.3__HNF4A(39-474)(K106R_K108R_K126R_K127R )
  source 1..1314: mol_type = other RNA
atggacaccagcccgtccgaggggaccaacctgaacgcccccaacagcctgggcgtgtccgccctctgcgccatctgcggggaccgggcgacgggcaagcactacggggccagctcctgcgacggctgcaagggcttcttccgccggagcgtccgcaagaaccacatgtactcctgccggttcagccgccagtgcgtggtggaccgggaccgccggaaccagtgccgctactgccggctgaagaagtgcttccgcgccgggatgcggcgcgaggccgtccagaacgagcgggaccgcatctccacccggcgcagctcctacgaggacagctccctgcccagcatcaacgcgctcctgcaggccgaggtgctgtcccggcagatcaccagccccgtgtccggcatcaacggggacatccgcgccaagaagatcgccagcatcgccgacgtctgcgagagcatgaaggagcagctcctggtgctggtggagtgggcgaagtacatcccggccttctgcgagctccccctggacgaccaggtcgccctgctccgggcccacgccggcgagcacctcctgctgggggcgaccaagcgctccatggtgttcaaggacgtgctgctgctcggcaacgactacatcgtcccccgccactgccccgagctggccgagatgagccgggtgtccatccgcatcctggacgagctcgtgctgccgttccaggagctgcagatcgacgacaacgagtacgcctacctcaaggccatcatcttcttcgaccccgacgccaagggcctgagcgaccccgggaagatcaagcggctgcgctcccaggtccaggtgagcctcgaggactacatcaacgaccggcagtacgactcccgcggccggttcggggagctgctgctcctgctgcccacgctccagagcatcacctggcagatgatcgagcagatccagttcatcaagctgttcggcatggcgaagatcgacaacctgctccaggagatgctgctgggcgggtccccgagcgacgcgccccacgcccaccaccccctccacccccacctgatgcaggagcacatgggcaccaacgtgatcgtcgccaacaccatgccgacgcacctgtccaacgggcagatgtgcgagtggccccgcccccggggccaggccgccacccccgagaccccgcagcccagcccgcccgggggctccggcagcgagccctacaagctgctccccggggccgtggccaccatcgtgaagcccctgtccgccatcccccagccgacgatcaccaagcaggaggtcatctga

SEQ ID NO: 1206 - RNA, 1314 nt, synthetic construct; identical to SEQ ID NO: 1157
  misc_feature 1..1314: note = CDS (opt1) from Homo sapiens__NP_000448.3__HNF4A(39-474)(E285Q)
  source 1..1314: mol_type = other RNA

SEQ ID NO: 1207 - RNA, 1314 nt, synthetic construct
  misc_feature 1..1314: note = CDS (opt1) from Homo sapiens__NP_000448.3__HNF4A(39-474)(T166E)
  source 1..1314: mol_type = other RNA
atggacaccagcccgtccgaggggaccaacctgaacgcccccaacagcctgggcgtgtccgccctctgcgccatctgcggggaccgggcgacgggcaagcactacggggccagctcctgcgacggctgcaagggcttcttccgccggagcgtccgcaagaaccacatgtactcctgccggttcagccgccagtgcgtggtggacaaggacaagcggaaccagtgccgctactgccggctgaagaagtgcttccgcgccgggatgaagaaggaggccgtccagaacgagcgggaccgcatctccacccggcgcagctcctacgaggacagctccctgcccagcatcaacgcgctcctgcaggccgaggtgctgtcccggcagatcgagagccccgtgtccggcatcaacggggacatccgcgccaagaagatcgccagcatcgccgacgtctgcgagagcatgaaggagcagctcctggtgctggtggagtgggcgaagtacatcccggccttctgcgagctccccctggacgaccaggtcgccctgctccgggcccacgccggcgagcacctcctgctgggggcgaccaagcgctccatggtgttcaaggacgtgctgctgctcggcaacgactacatcgtcccccggcactgccccgagctggccgagatgagccgcgtgtccatccggatcctggacgagctcgtgctgccgttccaggagctgcagatcgacgacaacgagtacgcctacctcaaggccatcatcttcttcgaccccgacgccaagggcctgagcgaccccgggaagatcaagcgcctgcgctcccaggtccaggtgagcctcgaggactacatcaacgaccggcagtacgactcccgcggccggttcggggagctgctgctcctgctgcccaccctccagagcatcacgtggcagatgatcgagcagatccagttcatcaagctgttcggcatggcgaagatcgacaacctgctccaggagatgctgctgggcgggtccccgagcgacgcgccccacgcccaccaccccctccacccccacctgatgcaggagcacatgggcaccaacgtgatcgtcgccaacaccatgccgacccacctgtccaacgggcagatgtgcgagtggccccgcccccggggccaggccgccacgcccgagaccccgcagcccagcccgcccgggggctccggcagcgagccctacaagctgctccccggggccgtggccaccatcgtgaagcccctgtccgccatcccccagccgaccatcacgaagcaggaggtcatctga

SEQ ID NO: 1208 - RNA, 1314 nt, synthetic construct
  misc_feature 1..1314: note = CDS (opt1) from Homo sapiens__NP_000448.3__HNF4A(39-474)(S148A)
  source 1..1314: mol_type = other RNA
atggacaccagcccgtccgaggggaccaacctgaacgcccccaacagcctgggcgtgtccgccctctgcgccatctgcggggaccgggcgacgggcaagcactacggggccagctcctgcgacggctgcaagggcttcttccgccggagcgtccgcaagaaccacatgtactcctgccggttcagccgccagtgcgtggtggacaaggacaagcggaaccagtgccgctactgccggctgaagaagtgcttccgcgccgggatgaagaaggaggccgtccagaacgagcgggaccgcatctccacccggcgcagctcctacgaggacagcgcgctgccctccatcaacgccctcctgcaggccgaggtgctgagccggcagatcacctcccccgtgagcggcatcaacggggacatccgcgccaagaagatcgcctccatcgcggacgtctgcgagagcatgaaggagcagctcctggtgctggtggagtgggccaagtacatcccggccttctgcgagctccccctggacgaccaggtcgccctgctccgggcccacgcgggcgagcacctcctgctgggggccaccaagcgcagcatggtgttcaaggacgtgctgctgctcggcaacgactacatcgtcccccggcactgccccgagctggccgagatgtcccgcgtgagcatccggatcctggacgagctcgtgctgccgttccaggagctgcagatcgacgacaacgagtacgcctacctcaaggccatcatcttcttcgaccccgacgcgaagggcctgtccgaccccgggaagatcaagcgcctgcgcagccaggtccaggtgtccctcgaggactacatcaacgaccggcagtacgacagccgcggccggttcggggagctgctgctcctgctgcccacgctccagtccatcacctggcagatgatcgagcagatccagttcatcaagctgttcggcatggccaagatcgacaacctgctccaggagatgctgctgggcgggagcccgtccgacgcgccccacgcccaccaccccctccacccccacctgatgcaggagcacatgggcaccaacgtgatcgtcgccaacaccatgccgacgcacctgagcaacgggcagatgtgcgagtggccccgcccccggggccaggccgccacccccgagaccccgcagccctccccgcccgggggcagcggctccgagccctacaagctgctccccggggccgtggccaccatcgtgaagcccctgagcgcgatcccccagccgacgatcaccaagcaggaggtcatctga

SEQ ID NO: 1209 - RNA, 1314 nt, synthetic construct
  misc_feature 1..1314: note = CDS (opt1) from Homo sapiens__NP_000448.3__HNF4A(39-474)(S148E)
  source 1..1314: mol_type = other RNA
atggacaccagcccgtccgaggggaccaacctgaacgcccccaacagcctgggcgtgtccgccctctgcgccatctgcggggaccgggcgacgggcaagcactacggggccagctcctgcgacggctgcaagggcttcttccgccggagcgtccgcaagaaccacatgtactcctgccggttcagccgccagtgcgtggtggacaaggacaagcggaaccagtgccgctactgccggctgaagaagtgcttccgcgccgggatgaagaaggaggccgtccagaacgagcgggaccgcatctccacccggcgcagctcctacgaggacagcgagctgccctccatcaacgcgctcctgcaggccgaggtgctgagccggcagatcacctcccccgtgagcggcatcaacggggacatccgcgccaagaagatcgcctccatcgccgacgtctgcgagagcatgaaggagcagctcctggtgctggtggagtgggcgaagtacatcccggccttctgcgagctccccctggacgaccaggtcgccctgctccgggcccacgccggcgagcacctcctgctgggggcgaccaagcgcagcatggtgttcaaggacgtgctgctgctcggcaacgactacatcgtcccccggcactgccccgagctggccgagatgtcccgcgtgagcatccggatcctggacgagctcgtgctgccgttccaggagctgcagatcgacgacaacgagtacgcctacctcaaggccatcatcttcttcgaccccgacgccaagggcctgtccgaccccgggaagatcaagcgcctgcgcagccaggtccaggtgtccctcgaggactacatcaacgaccggcagtacgacagccgcggccggttcggggagctgctgctcctgctgcccacgctccagtccatcacctggcagatgatcgagcagatccagttcatcaagctgttcggcatggcgaagatcgacaacctgctccaggagatgctgctgggcgggagcccgtccgacgcgccccacgcccaccaccccctccacccccacctgatgcaggagcacatgggcaccaacgtgatcgtcgccaacaccatgccgacgcacctgagcaacgggcagatgtgcgagtggccccgcccccggggccaggccgccacccccgagaccccgcagccctccccgcccgggggcagcggctccgagccctacaagctgctccccggggccgtggccaccatcgtgaagcccctgagcgccatcccccagccgacgatcaccaagcaggaggtcatctga

SEQ ID NO: 1210 - RNA, 1314 nt, synthetic construct
  misc_feature 1..1314: note = CDS (opt1) from Homo sapiens__NP_000448.3__HNF4A(39-474)(S183A)
  source 1..1314: mol_type = other RNA
atggacaccagcccgtccgaggggaccaacctgaacgcccccaacagcctgggcgtgtccgccctctgcgccatctgcggggaccgggcgacgggcaagcactacggggccagctcctgcgacggctgcaagggcttcttccgccggagcgtccgcaagaaccacatgtactcctgccggttcagccgccagtgcgtggtggacaaggacaagcggaaccagtgccgctactgccggctgaagaagtgcttccgcgccgggatgaagaaggaggccgtccagaacgagcgggaccgcatctccacccggcgcagctcctacgaggacagctccctgcccagcatcaacgcgctcctgcaggccgaggtgctgtcccggcagatcaccagccccgtgtccggcatcaacggggacatccgcgccaagaagatcgccgccatcgcggacgtctgcgagagcatgaaggagcagctcctggtgctggtggagtgggccaagtacatcccggccttctgcgagctccccctggacgaccaggtcgccctgctccgggcccacgcgggcgagcacctcctgctgggggccaccaagcgcagcatggtgttcaaggacgtgctgctgctcggcaacgactacatcgtcccccggcactgccccgagctggccgagatgtcccgcgtgagcatccggatcctggacgagctcgtgctgccgttccaggagctgcagatcgacgacaacgagtacgcctacctcaaggccatcatcttcttcgaccccgacgcgaagggcctgtccgaccccgggaagatcaagcgcctgcgcagccaggtccaggtgtccctcgaggactacatcaacgaccggcagtacgacagccgcggccggttcggggagctgctgctcctgctgcccacgctccagtccatcacctggcagatgatcgagcagatccagttcatcaagctgttcggcatggccaagatcgacaacctgctccaggagatgctgctgggcgggagcccgtccgacgcgccccacgcccaccaccccctccacccccacctgatgcaggagcacatgggcaccaacgtgatcgtcgccaacaccatgccgacgcacctgagcaacgggcagatgtgcgagtggccccgcccccggggccaggccgccacccccgagaccccgcagccctccccgcccgggggcagcggctccgagccctacaagctgctccccggggccgtggccaccatcgtgaagcccctgagcgcgatcccccagccgacgatcaccaagcaggaggtcatctga

SEQ ID NO: 1211 - RNA, 1314 nt, synthetic construct
  misc_feature 1..1314: note = CDS (opt1) from Homo sapiens__NP_000448.3__HNF4A(39-474)(S183E)
  source 1..1314: mol_type = other RNA
atggacaccagcccgtccgaggggaccaacctgaacgcccccaacagcctgggcgtgtccgccctctgcgccatctgcggggaccgggcgacgggcaagcactacggggccagctcctgcgacggctgcaagggcttcttccgccggagcgtccgcaagaaccacatgtactcctgccggttcagccgccagtgcgtggtggacaaggacaagcggaaccagtgccgctactgccggctgaagaagtgcttccgcgccgggatgaagaaggaggccgtccagaacgagcgggaccgcatctccacccggcgcagctcctacgaggacagctccctgcccagcatcaacgcgctcctgcaggccgaggtgctgtcccggcagatcaccagccccgtgtccggcatcaacggggacatccgcgccaagaagatcgccgagatcgccgacgtctgcgagagcatgaaggagcagctcctggtgctggtggagtgggcgaagtacatcccggccttctgcgagctccccctggacgaccaggtcgccctgctccgggcccacgccggcgagcacctcctgctgggggcgaccaagcgcagcatggtgttcaaggacgtgctgctgctcggcaacgactacatcgtcccccggcactgccccgagctggccgagatgtcccgcgtgagcatccggatcctggacgagctcgtgctgccgttccaggagctgcagatcgacgacaacgagtacgcctacctcaaggccatcatcttcttcgaccccgacgccaagggcctgtccgaccccgggaagatcaagcgcctgcgcagccaggtccaggtgtccctcgaggactacatcaacgaccggcagtacgacagccgcggccggttcggggagctgctgctcctgctgcccacgctccagtccatcacctggcagatgatcgagcagatccagttcatcaagctgttcggcatggcgaagatcgacaacctgctccaggagatgctgctgggcgggagcccgtccgacgcgccccacgcccaccaccccctccacccccacctgatgcaggagcacatgggcaccaacgtgatcgtcgccaacaccatgccgacgcacctgagcaacgggcagatgtgcgagtggccccgcccccggggccaggccgccacccccgagaccccgcagccctccccgcccgggggcagcggctccgagccctacaagctgctccccggggccgtggccaccatcgtgaagcccctgagcgccatcccccagccgacgatcaccaagcaggaggtcatctga

SEQ ID NO: 1212 - RNA, 1314 nt, synthetic construct
  misc_feature 1..1314: note = CDS (opt1) from Homo sapiens__NP_000448.3__HNF4A(39-474)(S461A)
  source 1..1314: mol_type = other RNA
atggacaccagcccgtccgaggggaccaacctgaacgcccccaacagcctgggcgtgtccgccctctgcgccatctgcggggaccgggcgacgggcaagcactacggggccagctcctgcgacggctgcaagggcttcttccgccggagcgtccgcaagaaccacatgtactcctgccggttcagccgccagtgcgtggtggacaaggacaagcggaaccagtgccgctactgccggctgaagaagtgcttccgcgccgggatgaagaaggaggccgtccagaacgagcgggaccgcatctccacccggcgcagctcctacgaggacagctccctgcccagcatcaacgcgctcctgcaggccgaggtgctgtcccggcagatcaccagccccgtgtccggcatcaacggggacatccgcgccaagaagatcgccagcatcgccgacgtctgcgagagcatgaaggagcagctcctggtgctggtggagtgggcgaagtacatcccggccttctgcgagctccccctggacgaccaggtcgccctgctccgggcccacgccggcgagcacctcctgctgggggcgaccaagcgctccatggtgttcaaggacgtgctgctgctcggcaacgactacatcgtcccccggcactgccccgagctggccgagatgagccgcgtgtccatccggatcctggacgagctcgtgctgccgttccaggagctgcagatcgacgacaacgagtacgcctacctcaaggccatcatcttcttcgaccccgacgccaagggcctgagcgaccccgggaagatcaagcgcctgcgctcccaggtccaggtgagcctcgaggactacatcaacgaccggcagtacgactcccgcggccggttcggggagctgctgctcctgctgcccacgctccagagcatcacctggcagatgatcgagcagatccagttcatcaagctgttcggcatggcgaagatcgacaacctgctccaggagatgctgctgggcgggtccccgagcgacgcgccccacgcccaccaccccctccacccccacctgatgcaggagcacatgggcaccaacgtgatcgtcgccaacaccatgccgacgcacctgtccaacgggcagatgtgcgagtggccccgcccccggggccaggccgccacccccgagaccccgcagcccagcccgcccgggggctccggcagcgagccctacaagctgctccccggggccgtggccaccatcgtgaagcccctggccgcgatcccccagccgacgatcaccaagcaggaggtcatctga

SEQ ID NO: 1213 - RNA, 1314 nt, synthetic construct; identical to SEQ ID NO: 1164
  misc_feature 1..1314: note = CDS (opt1) from Homo sapiens__NP_000448.3__HNF4A(39-474)(S461E)
  source 1..1314: mol_type = other RNA

SEQ ID NO: 1214 - RNA, 1314 nt, synthetic construct
  misc_feature 1..1314: note = CDS (opt1) from Homo sapiens__NP_000448.3__HNF4A(39-474)(S142A_S143A_S313A)
  source 1..1314: mol_type = other RNA
atggacaccagcccgtccgaggggaccaacctgaacgcccccaacagcctgggcgtgtccgccctctgcgccatctgcggggaccgggcgacgggcaagcactacggggccagctcctgcgacggctgcaagggcttcttccgccggagcgtccgcaagaaccacatgtactcctgccggttcagccgccagtgcgtggtggacaaggacaagcggaaccagtgccgctactgccggctgaagaagtgcttccgcgccgggatgaagaaggaggccgtccagaacgagcgggaccgcatctccacccggcgcgcggcctacgaggacagctccctgcccagcatcaacgccctcctgcaggccgaggtgctgtcccggcagatcaccagccccgtgtccggcatcaacggggacatccgcgccaagaagatcgcgagcatcgccgacgtctgcgagtccatgaaggagcagctcctggtgctggtggagtgggccaagtacatcccggccttctgcgagctccccctggacgaccaggtcgccctgctccgggcgcacgccggcgagcacctcctgctgggggccaccaagcgcagcatggtgttcaaggacgtgctgctgctcggcaacgactacatcgtcccccggcactgccccgagctggccgagatgagccgcgtgtccatccggatcctggacgagctcgtgctgccgttccaggagctgcagatcgacgacaacgagtacgcctacctcaaggcgatcatcttcttcgaccccgacgccaagggcctgagcgaccccgggaagatcaagcgcctgcgcgcccaggtccaggtgtccctcgaggactacatcaacgaccggcagtacgacagccgcggccggttcggggagctgctgctcctgctgcccacgctccagtccatcacctggcagatgatcgagcagatccagttcatcaagctgttcggcatggccaagatcgacaacctgctccaggagatgctgctgggcgggagcccgtccgacgcgccccacgcccaccaccccctccacccccacctgatgcaggagcacatgggcaccaacgtgatcgtcgccaacaccatgccgacgcacctgagcaacgggcagatgtgcgagtggccccgcccccggggccaggccgccacccccgagaccccgcagccctccccgcccgggggcagcggctccgagccctacaagctgctccccggggcggtggccaccatcgtgaagcccctgagcgccatcccccagccgacgatcaccaagcaggaggtcatctga

SEQ ID NO: 1215 - RNA, 1314 nt, synthetic construct
  misc_feature 1..1314: note = CDS (opt1) from Homo sapiens__NP_000448.3__HNF4A(39-474)(S142A_S143A_S313A_K458R )
  source 1..1314: mol_type = other RNA
atggacaccagcccgtccgaggggaccaacctgaacgcccccaacagcctgggcgtgtccgccctctgcgccatctgcggggaccgggcgacgggcaagcactacggggccagctcctgcgacggctgcaagggcttcttccgccggagcgtccgcaagaaccacatgtactcctgccggttcagccgccagtgcgtggtggacaaggacaagcggaaccagtgccgctactgccggctgaagaagtgcttccgcgccgggatgaagaaggaggccgtccagaacgagcgggaccgcatctccacccggcgcgcggcctacgaggacagctccctgcccagcatcaacgccctcctgcaggccgaggtgctgtcccggcagatcaccagccccgtgtccggcatcaacggggacatccgcgccaagaagatcgcgagcatcgccgacgtctgcgagtccatgaaggagcagctcctggtgctggtggagtgggccaagtacatcccggccttctgcgagctccccctggacgaccaggtcgccctgctccgggcgcacgccggcgagcacctcctgctgggggccaccaagcgcagcatggtgttcaaggacgtgctgctgctcggcaacgactacatcgtcccccggcactgccccgagctggccgagatgagccgcgtgtccatccggatcctggacgagctcgtgctgccgttccaggagctgcagatcgacgacaacgagtacgcctacctcaaggcgatcatcttcttcgaccccgacgccaagggcctgagcgaccccgggaagatcaagcgcctgcgcgcccaggtccaggtgtccctcgaggactacatcaacgaccggcagtacgacagccgcggccggttcggggagctgctgctcctgctgcccacgctccagtccatcacctggcagatgatcgagcagatccagttcatcaagctgttcggcatggccaagatcgacaacctgctccaggagatgctgctgggcgggagcccgtccgacgcgccccacgcccaccaccccctccacccccacctgatgcaggagcacatgggcaccaacgtgatcgtcgccaacaccatgccgacgcacctgagcaacgggcagatgtgcgagtggccccgcccccggggccaggccgccacccccgagaccccgcagccctccccgcccgggggcagcggctccgagccctacaagctgctccccggggcggtggccaccatcgtgcgccccctgagcgccatcccccagccgacgatcaccaagcaggaggtcatctga

SEQ ID NO: 1216 - RNA, 1314 nt, synthetic construct
  misc_feature 1..1314: note = CDS (opt1) from Homo sapiens__NP_000448.3__HNF4A(39-474)(S142A_S143A_S167A_S313A _S378A_T429A_T432A_S436A_K458R)
  source 1..1314: mol_type = other RNA
atggacaccagcccgtccgaggggaccaacctgaacgcccccaacagcctgggcgtgtccgccctctgcgccatctgcggggaccgggcgacgggcaagcactacggggccagctcctgcgacggctgcaagggcttcttccgccggagcgtccgcaagaaccacatgtactcctgccggttcagccgccagtgcgtggtggacaaggacaagcggaaccagtgccgctactgccggctgaagaagtgcttccgcgccgggatgaagaaggaggccgtccagaacgagcgggaccgcatctccacccggcgcgcggcctacgaggacagctccctgcccagcatcaacgccctcctgcaggccgaggtgctgtcccggcagatcaccgcccccgtgagcggcatcaacggggacatccgcgcgaagaagatcgcctccatcgccgacgtctgcgagagcatgaaggagcagctcctggtgctggtggagtgggccaagtacatcccggccttctgcgagctccccctggacgaccaggtcgcgctgctccgggcccacgccggcgagcacctcctgctgggggccaccaagcgctccatggtgttcaaggacgtgctgctgctcggcaacgactacatcgtcccccggcactgccccgagctggccgagatgagccgcgtgagcatccggatcctggacgagctcgtgctgccgttccaggagctgcagatcgacgacaacgagtacgcgtacctcaaggccatcatcttcttcgaccccgacgccaagggcctgtccgaccccgggaagatcaagcgcctgcgcgcccaggtccaggtgagcctcgaggactacatcaacgaccggcagtacgactcccgcggccggttcggggagctgctgctcctgctgcccacgctccagagcatcacctggcagatgatcgagcagatccagttcatcaagctgttcggcatggccaagatcgacaacctgctccaggagatgctgctgggcggggcgccgtccgacgcgccccacgcccaccaccccctccacccccacctgatgcaggagcacatgggcaccaacgtgatcgtcgccaacaccatgccgacgcacctgagcaacgggcagatgtgcgagtggccccgcccccggggccaggccgccgcccccgaggccccgcagcccgccccgcccgggggctccggcagcgagccctacaagctgctccccggggcggtggccaccatcgtgcgccccctgtccgccatcccccagccgaccatcaccaagcaggaggtcatctga

SEQ ID NO: 1217 - RNA, 1314 nt, synthetic construct
  misc_feature 1..1314: note = CDS (opt1) from Homo sapiens__NP_000448.3__HNF4A(39-474)(S142A_S143A_S148A_S167A _S313A_S378A_T429A_T432A_S436A_K458R)
  source 1..1314: mol_type = other RNA
atggacaccagcccgtccgaggggaccaacctgaacgcccccaacagcctgggcgtgtccgccctctgcgccatctgcggggaccgggcgacgggcaagcactacggggccagctcctgcgacggctgcaagggcttcttccgccggagcgtccgcaagaaccacatgtactcctgccggttcagccgccagtgcgtggtggacaaggacaagcggaaccagtgccgctactgccggctgaagaagtgcttccgcgccgggatgaagaaggaggccgtccagaacgagcgggaccgcatctccacccggcgcgcggcctacgaggacagcgccctgccctccatcaacgccctcctgcaggccgaggtgctgagccggcagatcaccgcgcccgtgtccggcatcaacggggacatccgcgccaagaagatcgccagcatcgccgacgtctgcgagtccatgaaggagcagctcctggtgctggtggagtgggccaagtacatcccggcgttctgcgagctccccctggacgaccaggtcgccctgctccgggcccacgccggcgagcacctcctgctgggggccaccaagcgcagcatggtgttcaaggacgtgctgctgctcggcaacgactacatcgtcccccggcactgccccgagctggcggagatgtcccgcgtgagcatccggatcctggacgagctcgtgctgccgttccaggagctgcagatcgacgacaacgagtacgcctacctcaaggccatcatcttcttcgaccccgacgccaagggcctgagcgaccccgggaagatcaagcgcctgcgcgcccaggtccaggtgtccctcgaggactacatcaacgaccggcagtacgacagccgcggccggttcggggagctgctgctcctgctgcccacgctccagtccatcacctggcagatgatcgagcagatccagttcatcaagctgttcggcatggcgaagatcgacaacctgctccaggagatgctgctgggcggggccccgagcgacgcgccccacgcccaccaccccctccacccccacctgatgcaggagcacatgggcaccaacgtgatcgtcgccaacaccatgccgacgcacctgtccaacgggcagatgtgcgagtggccccgcccccggggccaggccgccgcccccgaggccccgcagcccgcgccgcccgggggcagcggctccgagccctacaagctgctccccggggccgtggccaccatcgtgcgccccctgagcgccatcccccagccgaccatcaccaagcaggaggtcatctga

SEQ ID NO: 1218 - RNA, 1314 nt, synthetic construct
  misc_feature 1..1314: note = CDS (opt1) from Homo sapiens__NP_000448.3__HNF4A(39-474)(K106R_K108R_K126R_K127R _S142A_S143A_S148A_S167A_S313A_S378A_T429A_T432A_S436A_K458 R)
  source 1..1314: mol_type = other RNA
atggacaccagcccgtccgaggggaccaacctgaacgcccccaacagcctgggcgtgtccgccctctgcgccatctgcggggaccgggcgacgggcaagcactacggggccagctcctgcgacggctgcaagggcttcttccgccggagcgtccgcaagaaccacatgtactcctgccggttcagccgccagtgcgtggtggaccgggaccgccggaaccagtgccgctactgccggctgaagaagtgcttccgcgccgggatgcggcgcgaggccgtccagaacgagcgggaccgcatctccacccggcgcgcggcctacgaggacagcgccctgccctccatcaacgccctcctgcaggccgaggtgctgagccggcagatcaccgcgcccgtgtccggcatcaacggggacatccgcgccaagaagatcgccagcatcgccgacgtctgcgagtccatgaaggagcagctcctggtgctggtggagtgggccaagtacatcccggcgttctgcgagctccccctggacgaccaggtcgccctgctccgggcccacgccggcgagcacctcctgctgggggccaccaagcgcagcatggtgttcaaggacgtgctgctgctcggcaacgactacatcgtcccccgccactgccccgagctggcggagatgtcccgggtgagcatccgcatcctggacgagctcgtgctgccgttccaggagctgcagatcgacgacaacgagtacgcctacctcaaggccatcatcttcttcgaccccgacgccaagggcctgagcgaccccgggaagatcaagcggctgcgcgcccaggtccaggtgtccctcgaggactacatcaacgaccggcagtacgacagccgcggccggttcggggagctgctgctcctgctgcccacgctccagtccatcacctggcagatgatcgagcagatccagttcatcaagctgttcggcatggcgaagatcgacaacctgctccaggagatgctgctgggcggggccccgagcgacgcgccccacgcccaccaccccctccacccccacctgatgcaggagcacatgggcaccaacgtgatcgtcgccaacaccatgccgacgcacctgtccaacgggcagatgtgcgagtggccccgcccccggggccaggccgccgcccccgaggccccgcagcccgcgccgcccgggggcagcggctccgagccctacaagctgctccccggggccgtggccaccatcgtgcgccccctgagcgccatcccccagccgaccatcaccaagcaggaggtcatctga

SEQ ID NO: 1219 - RNA, 1314 nt, synthetic construct
  misc_feature 1..1314: note = CDS (opt1) from Homo sapiens__NP_000448.3__HNF4A(39-474)(S142A_S143A_S148A_T166A _S167A_S313A_S378A_T429A_T432A_S436A_K458R)
  source 1..1314: mol_type = other RNA
atggacaccagcccgtccgaggggaccaacctgaacgcccccaacagcctgggcgtgtccgccctctgcgccatctgcggggaccgggcgacgggcaagcactacggggccagctcctgcgacggctgcaagggcttcttccgccggagcgtccgcaagaaccacatgtactcctgccggttcagccgccagtgcgtggtggacaaggacaagcggaaccagtgccgctactgccggctgaagaagtgcttccgcgccgggatgaagaaggaggccgtccagaacgagcgggaccgcatctccacccggcgcgcggcctacgaggacagcgccctgccctccatcaacgccctcctgcaggccgaggtgctgagccggcagatcgcggcccccgtgtccggcatcaacggggacatccgcgccaagaagatcgccagcatcgccgacgtctgcgagtccatgaaggagcagctcctggtgctggtggagtgggcgaagtacatcccggccttctgcgagctccccctggacgaccaggtcgccctgctccgggcccacgccggcgagcacctcctgctgggggcgaccaagcgcagcatggtgttcaaggacgtgctgctgctcggcaacgactacatcgtcccccggcactgccccgagctggccgagatgtcccgcgtgagcatccggatcctggacgagctcgtgctgccgttccaggagctgcagatcgacgacaacgagtacgcctacctcaaggccatcatcttcttcgaccccgacgccaagggcctgagcgaccccgggaagatcaagcgcctgcgcgcgcaggtccaggtgtccctcgaggactacatcaacgaccggcagtacgacagccgcggccggttcggggagctgctgctcctgctgcccaccctccagtccatcacgtggcagatgatcgagcagatccagttcatcaagctgttcggcatggccaagatcgacaacctgctccaggagatgctgctgggcggggccccgagcgacgcgccccacgcccaccaccccctccacccccacctgatgcaggagcacatgggcaccaacgtgatcgtcgccaacaccatgccgacccacctgtccaacgggcagatgtgcgagtggccccgcccccggggccaggccgccgcccccgaggcgccgcagcccgccccgcccgggggcagcggctccgagccctacaagctgctccccggggccgtggccacgatcgtgcgccccctgagcgccatcccccagccgaccatcaccaagcaggaggtcatctga

SEQ ID NO: 1220 - RNA, 1314 nt, synthetic construct
  misc_feature 1..1314: note = CDS (opt1) from Homo sapiens__NP_000448.3__HNF4A(39-474)(S87A_S142A_S143A_S148A_ T166A_S167A_S313A_S378A_T429A_T432A_S436A_K458R)
  source 1..1314: mol_type = other RNA
atggacaccagcccgtccgaggggaccaacctgaacgcccccaacagcctgggcgtgtccgccctctgcgccatctgcggggaccgggcgacgggcaagcactacggggccagctcctgcgacggctgcaagggcttcttccgccgggccgtccgcaagaaccacatgtacagctgccggttctcccgccagtgcgtggtggacaaggacaagcggaaccagtgccgctactgccggctgaagaagtgcttccgcgccgggatgaagaaggaggcggtccagaacgagcgggaccgcatcagcacccggcgcgccgcctacgaggactccgccctgcccagcatcaacgccctcctgcaggcggaggtgctgtcccggcagatcgccgcccccgtgagcggcatcaacggggacatccgcgccaagaagatcgcctccatcgcggacgtctgcgagagcatgaaggagcagctcctggtgctggtggagtgggccaagtacatcccggccttctgcgagctccccctggacgaccaggtcgccctgctccgggcccacgcgggcgagcacctcctgctgggggccaccaagcgctccatggtgttcaaggacgtgctgctgctcggcaacgactacatcgtcccccggcactgccccgagctggccgagatgagccgcgtgtccatccggatcctggacgagctcgtgctgccgttccaggagctgcagatcgacgacaacgagtacgcctacctcaaggccatcatcttcttcgaccccgacgcgaagggcctgagcgaccccgggaagatcaagcgcctgcgcgcccaggtccaggtgagcctcgaggactacatcaacgaccggcagtacgactcccgcggccggttcggggagctgctgctcctgctgcccaccctccagagcatcacgtggcagatgatcgagcagatccagttcatcaagctgttcggcatggccaagatcgacaacctgctccaggagatgctgctgggcggggccccgtccgacgcgccccacgcccaccaccccctccacccccacctgatgcaggagcacatgggcaccaacgtgatcgtcgccaacaccatgccgacccacctgagcaacgggcagatgtgcgagtggccccgcccccggggccaggccgccgcgcccgaggccccgcagcccgccccgcccgggggctccggcagcgagccctacaagctgctccccggggccgtggccacgatcgtgcgccccctgtccgcgatcccccagccgaccatcaccaagcaggaggtcatctga

SEQ ID NO: 1221 - RNA, 1314 nt, synthetic construct
  misc_feature 1..1314: note = CDS (opt1) from Homo sapiens__NP_000448.3__HNF4A(39-474)(S87A_K106R_K108R_K126R_ K127R_S142A_S143A_S148A_T166A_S167A_S313A_S378A_T429A_T432A _S436A_K458R)
  source 1..1314: mol_type = other RNA
atggacaccagcccgtccgaggggaccaacctgaacgcccccaacagcctgggcgtgtccgccctctgcgccatctgcggggaccgggcgacgggcaagcactacggggccagctcctgcgacggctgcaagggcttcttccgccgggccgtccgcaagaaccacatgtacagctgccggttctcccgccagtgcgtggtggaccgggaccgccggaaccagtgccgctactgccggctgaagaagtgcttccgcgccgggatgcggcgcgaggcggtccagaacgagcgggaccgcatcagcacccggcgcgccgcctacgaggactccgccctgcccagcatcaacgccctcctgcaggcggaggtgctgtcccggcagatcgccgcccccgtgagcggcatcaacggggacatccgcgccaagaagatcgcctccatcgcggacgtctgcgagagcatgaaggagcagctcctggtgctggtggagtgggccaagtacatcccggccttctgcgagctccccctggacgaccaggtcgccctgctccgggcccacgcgggcgagcacctcctgctgggggccaccaagcgctccatggtgttcaaggacgtgctgctgctcggcaacgactacatcgtcccccgccactgccccgagctggccgagatgagccgggtgtccatccgcatcctggacgagctcgtgctgccgttccaggagctgcagatcgacgacaacgagtacgcctacctcaaggccatcatcttcttcgaccccgacgcgaagggcctgagcgaccccgggaagatcaagcggctgcgcgcccaggtccaggtgagcctcgaggactacatcaacgaccggcagtacgactcccgcggccggttcggggagctgctgctcctgctgcccaccctccagagcatcacgtggcagatgatcgagcagatccagttcatcaagctgttcggcatggccaagatcgacaacctgctccaggagatgctgctgggcggggccccgtccgacgcgccccacgcccaccaccccctccacccccacctgatgcaggagcacatgggcaccaacgtgatcgtcgccaacaccatgccgacccacctgagcaacgggcagatgtgcgagtggccccgcccccggggccaggccgccgcgcccgaggccccgcagcccgccccgcccgggggctccggcagcgagccctacaagctgctccccggggccgtggccacgatcgtgcgccccctgtccgcgatcccccagccgaccatcaccaagcaggaggtcatctga

SEQ ID NO: 1222 - RNA, 1314 nt, synthetic construct
  misc_feature 1..1314: note = CDS (opt1) from Homo sapiens__NP_000448.3__HNF4A(39-474)(S87A_K106R_K108R_K126R_ K127R)
  source 1..1314: mol_type = other RNA
atggacaccagcccgtccgaggggaccaacctgaacgcccccaacagcctgggcgtgtccgccctctgcgccatctgcggggaccgggcgacgggcaagcactacggggccagctcctgcgacggctgcaagggcttcttccgccgggccgtccgcaagaaccacatgtacagctgccggttctcccgccagtgcgtggtggaccgggaccgccggaaccagtgccgctactgccggctgaagaagtgcttccgcgccgggatgcggcgcgaggcggtccagaacgagcgggaccgcatcagcacccggcgctccagctacgaggactccagcctgccctccatcaacgccctcctgcaggccgaggtgctgagccggcagatcacctcccccgtgagcggcatcaacggggacatccgcgccaagaagatcgcctccatcgcggacgtctgcgagagcatgaaggagcagctcctggtgctggtggagtgggccaagtacatcccggccttctgcgagctccccctggacgaccaggtcgccctgctccgggcccacgcgggcgagcacctcctgctgggggccaccaagcgcagcatggtgttcaaggacgtgctgctgctcggcaacgactacatcgtcccccgccactgccccgagctggccgagatgtcccgggtgagcatccgcatcctggacgagctcgtgctgccgttccaggagctgcagatcgacgacaacgagtacgcctacctcaaggccatcatcttcttcgaccccgacgcgaagggcctgtccgaccccgggaagatcaagcggctgcgcagccaggtccaggtgtccctcgaggactacatcaacgaccggcagtacgacagccgcggccggttcggggagctgctgctcctgctgcccacgctccagtccatcacctggcagatgatcgagcagatccagttcatcaagctgttcggcatggccaagatcgacaacctgctccaggagatgctgctgggcgggagcccgtccgacgcgccccacgcccaccaccccctccacccccacctgatgcaggagcacatgggcaccaacgtgatcgtcgccaacaccatgccgacgcacctgagcaacgggcagatgtgcgagtggccccgcccccggggccaggccgccacccccgagaccccgcagccctccccgcccgggggcagcggctccgagccctacaagctgctccccggggccgtggccaccatcgtgaagcccctgagcgcgatcccccagccgacgatcaccaagcaggaggtcatctga

SEQ ID NO: 1223 - RNA, 1314 nt, synthetic construct
  misc_feature 1..1314: note = CDS (opt1) from Homo sapiens__NP_000448.3__HNF4A(39-474)(S87A_K106R_K108R_K126R_ K127R_S142A_S143A_S148A_T166A_S167A_S313A_S378A_T429A_T432A _S436A_K458R_S461A)
  source 1..1314: mol_type = other RNA
atggacaccagcccgtccgaggggaccaacctgaacgcccccaacagcctgggcgtgtccgccctctgcgccatctgcggggaccgggcgacgggcaagcactacggggccagctcctgcgacggctgcaagggcttcttccgccgggccgtccgcaagaaccacatgtacagctgccggttctcccgccagtgcgtggtggaccgggaccgccggaaccagtgccgctactgccggctgaagaagtgcttccgcgccgggatgcggcgcgaggcggtccagaacgagcgggaccgcatcagcacccggcgcgccgcctacgaggactccgccctgcccagcatcaacgccctcctgcaggcggaggtgctgtcccggcagatcgccgcccccgtgagcggcatcaacggggacatccgcgccaagaagatcgcctccatcgcggacgtctgcgagagcatgaaggagcagctcctggtgctggtggagtgggccaagtacatcccggccttctgcgagctccccctggacgaccaggtcgccctgctccgggcccacgcgggcgagcacctcctgctgggggccaccaagcgctccatggtgttcaaggacgtgctgctgctcggcaacgactacatcgtcccccgccactgccccgagctggccgagatgagccgggtgtccatccgcatcctggacgagctcgtgctgccgttccaggagctgcagatcgacgacaacgagtacgcctacctcaaggccatcatcttcttcgaccccgacgcgaagggcctgagcgaccccgggaagatcaagcggctgcgcgcccaggtccaggtgagcctcgaggactacatcaacgaccggcagtacgactcccgcggccggttcggggagctgctgctcctgctgcccaccctccagagcatcacgtggcagatgatcgagcagatccagttcatcaagctgttcggcatggccaagatcgacaacctgctccaggagatgctgctgggcggggccccgtccgacgcgccccacgcccaccaccccctccacccccacctgatgcaggagcacatgggcaccaacgtgatcgtcgccaacaccatgccgacccacctgagcaacgggcagatgtgcgagtggccccgcccccggggccaggccgccgcgcccgaggccccgcagcccgccccgcccgggggctccggcagcgagccctacaagctgctccccggggccgtggccacgatcgtgcgccccctggcggccatcccccagccgaccatcaccaagcaggaggtcatctga

SEQ ID NO: 1224 - RNA, 1314 nt, synthetic construct
  misc_feature 1..1314: note = CDS (opt1) from Homo sapiens__NP_000448.3__HNF4A(39-474)(S87A_K106R_K108R_K126R_ K127R_S142A_S143A_S148A_T166A_S167A_S313A_S378A_T429A_T432A _S436A_K458R_S461E)
  source 1..1314: mol_type = other RNA
atggacaccagcccgtccgaggggaccaacctgaacgcccccaacagcctgggcgtgtccgccctctgcgccatctgcggggaccgggcgacgggcaagcactacggggccagctcctgcgacggctgcaagggcttcttccgccgggccgtccgcaagaaccacatgtacagctgccggttctcccgccagtgcgtggtggaccgggaccgccggaaccagtgccgctactgccggctgaagaagtgcttccgcgccgggatgcggcgcgaggcggtccagaacgagcgggaccgcatcagcacccggcgcgccgcctacgaggactccgccctgcccagcatcaacgccctcctgcaggcggaggtgctgtcccggcagatcgccgcccccgtgagcggcatcaacggggacatccgcgccaagaagatcgcctccatcgcggacgtctgcgagagcatgaaggagcagctcctggtgctggtggagtgggccaagtacatcccggccttctgcgagctccccctggacgaccaggtcgccctgctccgggcccacgcgggcgagcacctcctgctgggggccaccaagcgctccatggtgttcaaggacgtgctgctgctcggcaacgactacatcgtcccccgccactgccccgagctggccgagatgagccgggtgtccatccgcatcctggacgagctcgtgctgccgttccaggagctgcagatcgacgacaacgagtacgcctacctcaaggccatcatcttcttcgaccccgacgcgaagggcctgagcgaccccgggaagatcaagcggctgcgcgcccaggtccaggtgagcctcgaggactacatcaacgaccggcagtacgactcccgcggccggttcggggagctgctgctcctgctgcccaccctccagagcatcacgtggcagatgatcgagcagatccagttcatcaagctgttcggcatggccaagatcgacaacctgctccaggagatgctgctgggcggggccccgtccgacgcgccccacgcccaccaccccctccacccccacctgatgcaggagcacatgggcaccaacgtgatcgtcgccaacaccatgccgacccacctgagcaacgggcagatgtgcgagtggccccgcccccggggccaggccgccgcgcccgaggccccgcagcccgccccgcccgggggctccggcagcgagccctacaagctgctccccggggccgtggccacgatcgtgcgccccctggaggcgatcccccagccgaccatcaccaagcaggaggtcatctga

SEQ ID NO: 1225 - RNA, 1314 nt, synthetic construct
  misc_feature 1..1314: note = CDS (opt1) from Homo sapiens__NP_000448.3__HNF4A(39-474)(S87A_K106R_K108R_K126R_ K127R_S142A_S143A_S148E_T166A_S167E_S313A_S378E_T429E_T432E _S436E_K458R_S461E)
  source 1..1314: mol_type = other RNA
atggacaccagcccgtccgaggggaccaacctgaacgcccccaacagcctgggcgtgtccgccctctgcgccatctgcggggaccgggcgacgggcaagcactacggggccagctcctgcgacggctgcaagggcttcttccgccgggccgtccgcaagaaccacatgtacagctgccggttctcccgccagtgcgtggtggaccgggaccgccggaaccagtgccgctactgccggctgaagaagtgcttccgcgccgggatgcggcgcgaggcggtccagaacgagcgggaccgcatcagcacccggcgcgccgcctacgaggactccgagctgcccagcatcaacgccctcctgcaggccgaggtgctgtcccggcagatcgcggagcccgtgagcggcatcaacggggacatccgcgccaagaagatcgcctccatcgccgacgtctgcgagagcatgaaggagcagctcctggtgctggtggagtgggccaagtacatcccggcgttctgcgagctccccctggacgaccaggtcgccctgctccgggcccacgccggcgagcacctcctgctgggggccaccaagcgctccatggtgttcaaggacgtgctgctgctcggcaacgactacatcgtcccccgccactgccccgagctggcggagatgagccgggtgtccatccgcatcctggacgagctcgtgctgccgttccaggagctgcagatcgacgacaacgagtacgcctacctcaaggccatcatcttcttcgaccccgacgccaagggcctgagcgaccccgggaagatcaagcggctgcgcgcccaggtccaggtgagcctcgaggactacatcaacgaccggcagtacgactcccgcggccggttcggggagctgctgctcctgctgcccaccctccagagcatcacgtggcagatgatcgagcagatccagttcatcaagctgttcggcatggcgaagatcgacaacctgctccaggagatgctgctgggcggggagccgtccgacgcgccccacgcccaccaccccctccacccccacctgatgcaggagcacatgggcaccaacgtgatcgtcgccaacaccatgccgacccacctgagcaacgggcagatgtgcgagtggccccgcccccggggccaggccgccgagcccgaggagccgcagcccgagccgcccgggggctccggcagcgagccctacaagctgctccccggggccgtggccacgatcgtgcgccccctggaggccatcccccagccgaccatcaccaagcaggaggtcatctga

SEQ ID NO: 1226 - RNA, 1314 nt, synthetic construct
  misc_feature 1..1314: note = CDS (opt1) from Homo sapiens__NP_000448.3__HNF4A(39-474)(S87A_K106R_K108R_K126R_ K127R_S142A_S143A_S148A_T166A_S167A_K179R_K180R_S313A_S378A _T429A_T432A_S436A_K458R_S461E)
  source 1..1314: mol_type = other RNA
atggacaccagcccgtccgaggggaccaacctgaacgcccccaacagcctgggcgtgtccgccctctgcgccatctgcggggaccgggcgacgggcaagcactacggggccagctcctgcgacggctgcaagggcttcttccgccgggccgtccgcaagaaccacatgtacagctgccggttctcccgccagtgcgtggtggaccgggaccgccggaaccagtgccgctactgccggctgaagaagtgcttccgcgccgggatgcggcgcgaggcggtccagaacgagcgggaccgcatcagcacccggcgcgccgcctacgaggactccgccctgcccagcatcaacgccctcctgcaggcggaggtgctgtcccggcagatcgccgcccccgtgagcggcatcaacggggacatccgcgcccggcgcatcgcctccatcgcggacgtctgcgagagcatgaaggagcagctcctggtgctggtggagtgggccaagtacatcccggccttctgcgagctccccctggacgaccaggtcgccctgctccgcgcccacgcgggcgagcacctcctgctgggggccaccaagcggtccatggtgttcaaggacgtgctgctgctcggcaacgactacatcgtcccccgccactgccccgagctggccgagatgagccgggtgtccatccgcatcctggacgagctcgtgctgccgttccaggagctgcagatcgacgacaacgagtacgcctacctcaaggccatcatcttcttcgaccccgacgcgaagggcctgagcgaccccgggaagatcaagcggctgcgcgcccaggtccaggtgagcctcgaggactacatcaacgaccggcagtacgactcccgcggccggttcggggagctgctgctcctgctgcccaccctccagagcatcacgtggcagatgatcgagcagatccagttcatcaagctgttcggcatggccaagatcgacaacctgctccaggagatgctgctgggcggggccccgtccgacgcgccccacgcccaccaccccctccacccccacctgatgcaggagcacatgggcaccaacgtgatcgtcgccaacaccatgccgacccacctgagcaacgggcagatgtgcgagtggccccgcccccggggccaggccgccgcgcccgaggccccgcagcccgccccgcccgggggctccggcagcgagccctacaagctgctccccggggccgtggccacgatcgtgcgccccctggaggcgatcccccagccgaccatcaccaagcaggaggtcatctga

SEQ ID NO: 1227 - RNA, 1314 nt, synthetic construct
  misc_feature 1..1314: note = CDS (opt1) from Homo sapiens__NP_000448.3__HNF4A(39-474)(S87A_K106R_K108R_K126R_ K127R_S142A_S143A_S148A_T166A_S167A_K300R_K307R_K309R_S313A _S378A_T429A_T432A_S436A_K458R_S461E)
  source 1..1314: mol_type = other RNA
atggacaccagcccgtccgaggggaccaacctgaacgcccccaacagcctgggcgtgtccgccctctgcgccatctgcggggaccgggcgacgggcaagcactacggggccagctcctgcgacggctgcaagggcttcttccgccgggccgtccgcaagaaccacatgtacagctgccggttctcccgccagtgcgtggtggaccgggaccgccggaaccagtgccgctactgccggctgaagaagtgcttccgcgccgggatgcggcgcgaggcggtccagaacgagcgggaccgcatcagcacccggcgcgccgcctacgaggactccgccctgcccagcatcaacgccctcctgcaggcggaggtgctgtcccggcagatcgccgcccccgtgagcggcatcaacggggacatccgcgccaagaagatcgcctccatcgcggacgtctgcgagagcatgaaggagcagctcctggtgctggtggagtgggccaagtacatcccggccttctgcgagctccccctggacgaccaggtcgccctgctccgggcccacgcgggcgagcacctcctgctgggggccaccaagcgctccatggtgttcaaggacgtgctgctgctcggcaacgactacatcgtcccccgccactgccccgagctggccgagatgagccgggtgtccatccgcatcctggacgagctcgtgctgccgttccaggagctgcagatcgacgacaacgagtacgcctacctcaaggccatcatcttcttcgaccccgacgcgcggggcctgagcgaccccgggcgcatccggcgcctgcgggcccaggtccaggtgagcctcgaggactacatcaacgaccgccagtacgactcccggggccgcttcggggagctgctgctcctgctgcccaccctccagagcatcacgtggcagatgatcgagcagatccagttcatcaagctgttcggcatggccaagatcgacaacctgctccaggagatgctgctgggcggggccccgtccgacgcgccccacgcccaccaccccctccacccccacctgatgcaggagcacatgggcaccaacgtgatcgtcgccaacaccatgccgacccacctgagcaacgggcagatgtgcgagtggccccggccccgcggccaggccgccgcgcccgaggccccgcagcccgccccgcccgggggctccggcagcgagccctacaagctgctccccggggccgtggccacgatcgtgcggcccctggaggcgatcccccagccgaccatcaccaagcaggaggtcatctga

SEQ ID NO: 1228 - RNA, 1314 nt, synthetic construct
  misc_feature 1..1314: note = CDS (opt1) from Homo sapiens__NP_000448.3__HNF4A(39-474)(S87A_K106R_K108R_K126R_ K127R_S142A_S143A_S148A_T166A_S167A_S313A_S378A_T429A_T432A _S436A_K447R_K458R_S461E_K470R)
  source 1..1314: mol_type = other RNA
atggacaccagcccgtccgaggggaccaacctgaacgcccccaacagcctgggcgtgtccgccctctgcgccatctgcggggaccgggcgacgggcaagcactacggggccagctcctgcgacggctgcaagggcttcttccgccgggccgtccgcaagaaccacatgtacagctgccggttctcccgccagtgcgtggtggaccgggaccgccggaaccagtgccgctactgccggctgaagaagtgcttccgcgccgggatgcggcgcgaggcggtccagaacgagcgggaccgcatcagcacccggcgcgccgcctacgaggactccgccctgcccagcatcaacgccctcctgcaggcggaggtgctgtcccggcagatcgccgcccccgtgagcggcatcaacggggacatccgcgccaagaagatcgcctccatcgcggacgtctgcgagagcatgaaggagcagctcctggtgctggtggagtgggccaagtacatcccggccttctgcgagctccccctggacgaccaggtcgccctgctccgggcccacgcgggcgagcacctcctgctgggggccaccaagcgctccatggtgttcaaggacgtgctgctgctcggcaacgactacatcgtcccccgccactgccccgagctggccgagatgagccgggtgtccatccgcatcctggacgagctcgtgctgccgttccaggagctgcagatcgacgacaacgagtacgcctacctcaaggccatcatcttcttcgaccccgacgcgaagggcctgagcgaccccgggaagatcaagcggctgcgcgcccaggtccaggtgagcctcgaggactacatcaacgaccggcagtacgactcccgcggccggttcggggagctgctgctcctgctgcccaccctccagagcatcacgtggcagatgatcgagcagatccagttcatcaagctgttcggcatggccaagatcgacaacctgctccaggagatgctgctgggcggggccccgtccgacgcgccccacgcccaccaccccctccacccccacctgatgcaggagcacatgggcaccaacgtgatcgtcgccaacaccatgccgacccacctgagcaacgggcagatgtgcgagtggccccgcccccggggccaggccgccgcgcccgaggccccgcagcccgccccgcccgggggctccggcagcgagccctaccgcctgctccccggggccgtggccacgatcgtgcggcccctggaggcgatcccccagccgaccatcacccgccaggaggtcatctga

SEQ ID NO: 1229 - RNA, 1314 nt, synthetic construct
  misc_feature 1..1314: note = CDS (opt1) from Homo sapiens__NP_000448.3__HNF4A(39-474)(S87A_K106R_K108R_K126R_ K127R_S142A_S143A_S148A_T166A_S167A_K179R_K180R_K234R_K300R _K307R_K309R_S313A_S378A_T429A_T432A_S436A_K447R_K458R_S461 E_K470R)
  source 1..1314: mol_type = other RNA
atggacaccagcccgtccgaggggaccaacctgaacgcccccaacagcctgggcgtgtccgccctctgcgccatctgcggggaccgggcgacgggcaagcactacggggccagctcctgcgacggctgcaagggcttcttccgccgggccgtccgcaagaaccacatgtacagctgccggttctcccgccagtgcgtggtggaccgggaccgccggaaccagtgccgctactgccggctgaagaagtgcttccgcgccgggatgcggcgcgaggcggtccagaacgagcgggaccgcatcagcacccggcgcgccgcctacgaggactccgccctgcccagcatcaacgccctcctgcaggcggaggtgctgtcccggcagatcgccgcccccgtgagcggcatcaacggggacatccgcgcccggcgcatcgcctccatcgcggacgtctgcgagagcatgaaggagcagctcctggtgctggtggagtgggccaagtacatcccggccttctgcgagctccccctggacgaccaggtcgccctgctccgcgcccacgcgggcgagcacctcctgctgggggccacccggcgctccatggtgttcaaggacgtgctgctgctcggcaacgactacatcgtcccccggcactgccccgagctggccgagatgagccgcgtgtccatccggatcctggacgagctcgtgctgccgttccaggagctgcagatcgacgacaacgagtacgcctacctcaaggccatcatcttcttcgaccccgacgcgcgcggcctgagcgaccccgggcggatccgccggctgcgcgcccaggtccaggtgagcctcgaggactacatcaacgaccggcagtacgactcccgcggccggttcggggagctgctgctcctgctgcccaccctccagagcatcacgtggcagatgatcgagcagatccagttcatcaagctgttcggcatggccaagatcgacaacctgctccaggagatgctgctgggcggggccccgtccgacgcgccccacgcccaccaccccctccacccccacctgatgcaggagcacatgggcaccaacgtgatcgtcgccaacaccatgccgacccacctgagcaacgggcagatgtgcgagtggccccgcccccggggccaggccgccgcgcccgaggccccgcagcccgccccgcccgggggctccggcagcgagccctaccgcctgctccccggggccgtggccacgatcgtgcggcccctggaggcgatcccccagccgaccatcacccgccaggaggtcatctga

SEQ ID NO: 1230 - RNA, 1314 nt, synthetic construct
  misc_feature 1..1314: note = CDS (opt1) from Homo sapiens__NP_000448.3__HNF4A(39-474)(S87A_S95A_S99A_K106R_K1 08R_K126R_K127R_S142A_S143A_S148A_T166A_S167A_S313A_S378A_T 429A_T432A_S436A_K458R_S461E)
  source 1..1314: mol_type = other RNA
atggacaccagcccgtccgaggggaccaacctgaacgcccccaacagcctgggcgtgtccgccctctgcgccatctgcggggaccgggcgacgggcaagcactacggggccagctcctgcgacggctgcaagggcttcttccgccgggccgtccgcaagaaccacatgtacgcctgccggttcgcgcgccagtgcgtggtggaccgggaccgccggaaccagtgccgctactgccggctgaagaagtgcttccgcgccgggatgcggcgcgaggccgtccagaacgagcgggaccgcatcagcacccggcgcgccgcctacgaggactccgcgctgcccagcatcaacgccctcctgcaggccgaggtgctgtcccggcagatcgccgcccccgtgagcggcatcaacggggacatccgcgcgaagaagatcgcctccatcgccgacgtctgcgagagcatgaaggagcagctcctggtgctggtggagtgggccaagtacatcccggccttctgcgagctccccctggacgaccaggtcgcgctgctccgggcccacgccggcgagcacctcctgctgggggccaccaagcgctccatggtgttcaaggacgtgctgctgctcggcaacgactacatcgtcccccgccactgccccgagctggccgagatgagccgggtgtccatccgcatcctggacgagctcgtgctgccgttccaggagctgcagatcgacgacaacgagtacgcgtacctcaaggccatcatcttcttcgaccccgacgccaagggcctgagcgaccccgggaagatcaagcggctgcgcgcccaggtccaggtgtccctcgaggactacatcaacgaccggcagtacgacagccgcggccggttcggggagctgctgctcctgctgcccaccctccagagcatcacgtggcagatgatcgagcagatccagttcatcaagctgttcggcatggcgaagatcgacaacctgctccaggagatgctgctgggcggggccccgtccgacgcgccccacgcccaccaccccctccacccccacctgatgcaggagcacatgggcaccaacgtgatcgtcgccaacaccatgccgacccacctgagcaacgggcagatgtgcgagtggccccgcccccggggccaggccgccgcccccgaggccccgcagcccgccccgcccgggggctccggcagcgagccctacaagctgctccccggggcggtggccacgatcgtgcgccccctggaggccatcccccagccgaccatcaccaagcaggaggtcatctga

SEQ ID NO: 1231 - RNA, 1314 nt, synthetic construct
  misc_feature 1..1314: note = CDS (opt1) from Homo sapiens__NP_000448.3__HNF4A(39-474)(S87A_K106R_K108R_K126R_ K127R_S138A_T139A_S142A_S143A_S148A_T166A_S167A_S313A_S378A _T429A_T432A_S436A_K458R_S461E)
  source 1..1314: mol_type = other RNA
atggacaccagcccgtccgaggggaccaacctgaacgcccccaacagcctgggcgtgtccgccctctgcgccatctgcggggaccgggcgacgggcaagcactacggggccagctcctgcgacggctgcaagggcttcttccgccgggccgtccgcaagaaccacatgtacagctgccggttctcccgccagtgcgtggtggaccgggaccgccggaaccagtgccgctactgccggctgaagaagtgcttccgcgccgggatgcggcgcgaggcggtccagaacgagcgggaccgcatcgccgcccggcgcgccgcctacgaggacagcgcgctgccctccatcaacgccctcctgcaggccgaggtgctgagccggcagatcgccgcccccgtgtccggcatcaacggggacatccgcgcgaagaagatcgccagcatcgccgacgtctgcgagtccatgaaggagcagctcctggtgctggtggagtgggccaagtacatcccggccttctgcgagctccccctggacgaccaggtcgcgctgctccgggcccacgccggcgagcacctcctgctgggggccaccaagcgcagcatggtgttcaaggacgtgctgctgctcggcaacgactacatcgtcccccgccactgccccgagctggccgagatgtcccgggtgagcatccgcatcctggacgagctcgtgctgccgttccaggagctgcagatcgacgacaacgagtacgcgtacctcaaggccatcatcttcttcgaccccgacgccaagggcctgtccgaccccgggaagatcaagcggctgcgcgcccaggtccaggtgagcctcgaggactacatcaacgaccggcagtacgacagccgcggccggttcggggagctgctgctcctgctgcccaccctccagtccatcacctggcagatgatcgagcagatccagttcatcaagctgttcggcatggcgaagatcgacaacctgctccaggagatgctgctgggcggggccccgagcgacgcgccccacgcccaccaccccctccacccccacctgatgcaggagcacatgggcacgaacgtgatcgtcgccaacaccatgccgacccacctgtccaacgggcagatgtgcgagtggccccgcccccggggccaggccgccgcccccgaggccccgcagcccgccccgcccgggggcagcggctccgagccctacaagctgctccccggggcggtggccaccatcgtgcgccccctggaggccatcccccagccgacgatcaccaagcaggaggtcatctga

SEQ ID NO: 1232 - RNA, 1314 nt, synthetic construct
  misc_feature 1..1314: note = CDS (opt1) from Homo sapiens__NP_000448.3__HNF4A(39-474)(S87A_S95A_S99A_K106R_K1 08R_K126R_K127R_S138A_T139A_S142A_S143A_S148A_T166A_S167A_S 313A_S378A_T429A_T432A_S436A_K458R_S461E)
  source 1..1314: mol_type = other RNA
atggacaccagcccgtccgaggggaccaacctgaacgcccccaacagcctgggcgtgtccgccctctgcgccatctgcggggaccgggcgacgggcaagcactacggggccagctcctgcgacggctgcaagggcttcttccgccgggccgtccgcaagaaccacatgtacgcctgccggttcgcgcgccagtgcgtggtggaccgggaccgccggaaccagtgccgctactgccggctgaagaagtgcttccgcgccgggatgcggcgcgaggccgtccagaacgagcgggaccgcatcgccgcccggcgcgcggcctacgaggacagcgccctgccctccatcaacgccctcctgcaggccgaggtgctgagccggcagatcgcggcccccgtgtccggcatcaacggggacatccgcgccaagaagatcgccagcatcgccgacgtctgcgagtccatgaaggagcagctcctggtgctggtggagtgggcgaagtacatcccggccttctgcgagctccccctggacgaccaggtcgccctgctccgggcccacgccggcgagcacctcctgctgggggcgaccaagcgcagcatggtgttcaaggacgtgctgctgctcggcaacgactacatcgtcccccgccactgccccgagctggccgagatgtcccgggtgagcatccgcatcctggacgagctcgtgctgccgttccaggagctgcagatcgacgacaacgagtacgcctacctcaaggccatcatcttcttcgaccccgacgcgaagggcctgtccgaccccgggaagatcaagcggctgcgcgcccaggtccaggtgagcctcgaggactacatcaacgaccggcagtacgactcccgcggccggttcggggagctgctgctcctgctgcccaccctccagagcatcacctggcagatgatcgagcagatccagttcatcaagctgttcggcatggccaagatcgacaacctgctccaggagatgctgctgggcggggccccgagcgacgcgccccacgcccaccaccccctccacccccacctgatgcaggagcacatgggcacgaacgtgatcgtcgccaacaccatgccgacccacctgtccaacgggcagatgtgcgagtggccccgcccccggggccaggccgccgcccccgaggcgccgcagcccgccccgcccgggggcagcggctccgagccctacaagctgctccccggggccgtggccaccatcgtgcgccccctggaggccatcccccagccgacgatcaccaagcaggaggtcatctga

SEQ ID NO: 1233 - RNA, 1314 nt, synthetic construct
  misc_feature 1..1314: note = CDS (opt2) from Homo sapiens__NP_000448.3__HNF4A(39-474)
  source 1..1314: mol_type = other RNA
atggacacctccccctccgagggcaccaacctcaacgcccccaactccctcggcgtctccgccctctgcgccatctgcggcgaccgcgccaccggcaagcactacggcgcctcctcctgcgacggctgcaagggcttcttccgccgctccgtccgcaagaaccacatgtactcctgccgcttctcccgccagtgcgtcgtcgacaaggacaagcgcaaccagtgccgctactgccgcctcaagaagtgcttccgcgccggcatgaagaaggaggccgtccagaacgagcgcgaccgcatctccacccgccgctcctcctacgaggactcctccctcccctccatcaacgccctcctccaggccgaggtcctctcccgccagatcacctcccccgtctccggcatcaacggcgacatccgcgccaagaagatcgcctccatcgccgacgtctgcgagtccatgaaggagcagctcctcgtcctcgtcgagtgggccaagtacatccccgccttctgcgagctccccctcgacgaccaggtcgccctcctccgcgcccacgccggcgagcacctcctcctcggcgccaccaagcgctccatggtcttcaaggacgtcctcctcctcggcaacgactacatcgtcccccgccactgccccgagctcgccgagatgtcccgcgtctccatccgcatcctcgacgagctcgtcctccccttccaggagctccagatcgacgacaacgagtacgcctacctcaaggccatcatcttcttcgaccccgacgccaagggcctctccgaccccggcaagatcaagcgcctccgctcccaggtccaggtctccctcgaggactacatcaacgaccgccagtacgactcgcgcgggcgcttcggcgagctcctcctcctcctccccaccctccagtccatcacctggcagatgatcgagcagatccagttcatcaagctgttcggcatggccaagatcgacaacctcctccaggagatgctcctcggcggctccccctccgacgccccccacgcccaccaccccctccacccccacctcatgcaggagcacatgggcaccaacgtcatcgtcgccaacaccatgcccacccacctctccaacggccagatgtgcgagtggccccgcccgcgcggccaggccgccacccccgagaccccccagccctccccccccggcggctccggctccgagccctacaagctcctccccggcgccgtcgccaccatcgtcaagcccctctccgccatcccccagcccaccatcaccaagcaggaggtcatctga

SEQ ID NO: 1234 - RNA, 1314 nt, synthetic construct
  misc_feature 1..1314: note = CDS (opt2) from Homo sapiens__NP_000448.3__HNF4A(39-474)(S313A)
  source 1..1314: mol_type = other RNA
atggacacctccccctccgagggcaccaacctcaacgcccccaactccctcggcgtctccgccctctgcgccatctgcggcgaccgcgccaccggcaagcactacggcgcctcctcctgcgacggctgcaagggcttcttccgccgctccgtccgcaagaaccacatgtactcctgccgcttctcccgccagtgcgtcgtcgacaaggacaagcgcaaccagtgccgctactgccgcctcaagaagtgcttccgcgccggcatgaagaaggaggccgtccagaacgagcgcgaccgcatctccacccgccgctcctcctacgaggactcctccctcccctccatcaacgccctcctccaggccgaggtcctctcccgccagatcacctcccccgtctccggcatcaacggcgacatccgcgccaagaagatcgcctccatcgccgacgtctgcgagtccatgaaggagcagctcctcgtcctcgtcgagtgggccaagtacatccccgccttctgcgagctccccctcgacgaccaggtcgccctcctccgcgcccacgccggcgagcacctcctcctcggcgccaccaagcgctccatggtcttcaaggacgtcctcctcctcggcaacgactacatcgtcccccgccactgccccgagctcgccgagatgtcccgcgtctccatccgcatcctcgacgagctcgtcctccccttccaggagctccagatcgacgacaacgagtacgcctacctcaaggccatcatcttcttcgaccccgacgccaagggcctctccgaccccggcaagatcaagcgcctccgcgcccaggtccaggtctccctcgaggactacatcaacgaccgccagtacgactcccgcggccgcttcggcgagctcctcctcctcctccccaccctccagtccatcacctggcagatgatcgagcagatccagttcatcaagctcttcggcatggccaagatcgacaacctcctccaggagatgctcctcggcggctccccctccgacgccccccacgcccaccaccccctccacccccacctcatgcaggagcacatgggcaccaacgtcatcgtcgccaacaccatgcccacccacctctccaacggccagatgtgcgagtggccccgcccccgcggccaggccgccacccccgagaccccccagccctccccccccggcggctccggctccgagccctacaagctcctccccggcgccgtcgccaccatcgtcaagcccctctccgccatcccccagcccaccatcaccaagcaggaggtcatctga

SEQ ID NO: 1235 - RNA, 1314 nt, synthetic construct
  misc_feature 1..1314: note = CDS (opt2) from Homo sapiens__NP_000448.3__HNF4A(39-474)(S313E)
  source 1..1314: mol_type = other RNA
atggacacctccccctccgagggcaccaacctcaacgcccccaactccctcggcgtctccgccctctgcgccatctgcggcgaccgcgccaccggcaagcactacggcgcctcctcctgcgacggctgcaagggcttcttccgccgctccgtccgcaagaaccacatgtactcctgccgcttctcccgccagtgcgtcgtcgacaaggacaagcgcaaccagtgccgctactgccgcctcaagaagtgcttccgcgccggcatgaagaaggaggccgtccagaacgagcgcgaccgcatctccacccgccgctcctcctacgaggactcctccctcccctccatcaacgccctcctccaggccgaggtcctctcccgccagatcacctcccccgtctccggcatcaacggcgacatccgcgccaagaagatcgcctccatcgccgacgtctgcgagtccatgaaggagcagctcctcgtcctcgtcgagtgggccaagtacatccccgccttctgcgagctccccctcgacgaccaggtcgccctcctccgcgcccacgccggcgagcacctcctcctcggcgccaccaagcgctccatggtcttcaaggacgtcctcctcctcggcaacgactacatcgtcccccgccactgccccgagctcgccgagatgtcccgcgtctccatccgcatcctcgacgagctcgtcctccccttccaggagctccagatcgacgacaacgagtacgcctacctcaaggccatcatcttcttcgaccccgacgccaagggcctctccgaccccggcaagatcaagcgcctccgcgagcaggtccaggtctccctcgaggactacatcaacgaccgccagtacgactcccgcggccgcttcggcgagctcctcctcctcctccccaccctccagtccatcacctggcagatgatcgagcagatccagttcatcaagctcttcggcatggccaagatcgacaacctcctccaggagatgctcctcggcggctccccctccgacgccccccacgcccaccaccccctccacccccacctcatgcaggagcacatgggcaccaacgtcatcgtcgccaacaccatgcccacccacctctccaacggccagatgtgcgagtggccccgcccccgcggccaggccgccacccccgagaccccccagccctccccccccggcggctccggctccgagccctacaagctcctccccggcgccgtcgccaccatcgtcaagcccctctccgccatcccccagcccaccatcaccaagcaggaggtcatctga

SEQ ID NO: 1236 - RNA, 1314 nt, synthetic construct
  misc_feature 1..1314: note = CDS (opt2) from Homo sapiens__NP_000448.3__HNF4A(39-474)(S142A_S143A)
  source 1..1314: mol_type = other RNA
atggacacctccccctccgagggcaccaacctcaacgcccccaactccctcggcgtctccgccctctgcgccatctgcggcgaccgcgccaccggcaagcactacggcgcctcctcctgcgacggctgcaagggcttcttccgccgctccgtccgcaagaaccacatgtactcctgccgcttctcccgccagtgcgtcgtcgacaaggacaagcgcaaccagtgccgctactgccgcctcaagaagtgcttccgcgccggcatgaagaaggaggccgtccagaacgagcgcgaccgcatctccacccgccgcgccgcctacgaggactcctccctcccctccatcaacgccctcctccaggccgaggtcctctcccgccagatcacctcccccgtctccggcatcaacggcgacatccgcgccaagaagatcgcctccatcgccgacgtctgcgagtccatgaaggagcagctcctcgtcctcgtcgagtgggccaagtacatccccgccttctgcgagctccccctcgacgaccaggtcgccctcctccgcgcccacgccggcgagcacctcctcctcggcgccaccaagcgctccatggtcttcaaggacgtcctcctcctcggcaacgactacatcgtcccccgccactgccccgagctcgccgagatgtcccgcgtctccatccgcatcctcgacgagctcgtcctccccttccaggagctccagatcgacgacaacgagtacgcctacctcaaggccatcatcttcttcgaccccgacgccaagggcctctccgaccccggcaagatcaagcgcctccgctcccaggtccaggtctccctcgaggactacatcaacgaccgccagtacgactcccgcggccgcttcggcgagctcctcctcctcctccccaccctccagtccatcacctggcagatgatcgagcagatccagttcatcaagctcttcggcatggccaagatcgacaacctcctccaggagatgctcctcggcggctccccctccgacgccccccacgcccaccaccccctccacccccacctcatgcaggagcacatgggcaccaacgtcatcgtcgccaacaccatgcccacccacctctccaacggccagatgtgcgagtggccccgcccccgcggccaggccgccacccccgagaccccccagccctccccccccggcggctccggctccgagccctacaagctcctccccggcgccgtcgccaccatcgtcaagcccctctccgccatcccccagcccaccatcaccaagcaggaggtcatctga

SEQ ID NO: 1237 - RNA, 1314 nt, synthetic construct
  misc_feature 1..1314: note = CDS (opt2) from Homo sapiens__NP_000448.3__HNF4A(39-474)(S142E_S143E)
  source 1..1314: mol_type = other RNA
atggacacctccccctccgagggcaccaacctcaacgcccccaactccctcggcgtctccgccctctgcgccatctgcggcgaccgcgccaccggcaagcactacggcgcctcctcctgcgacggctgcaagggcttcttccgccgctccgtccgcaagaaccacatgtactcctgccgcttctcccgccagtgcgtcgtcgacaaggacaagcgcaaccagtgccgctactgccgcctcaagaagtgcttccgcgccggcatgaagaaggaggccgtccagaacgagcgcgaccgcatctccacccgccgcgaggagtacgaggactcctccctcccctccatcaacgccctcctccaggccgaggtcctctcccgccagatcacctcccccgtctccggcatcaacggcgacatccgcgccaagaagatcgcctccatcgccgacgtctgcgagtccatgaaggagcagctcctcgtcctcgtcgagtgggccaagtacatccccgccttctgcgagctccccctcgacgaccaggtcgccctcctccgcgcccacgccggcgagcacctcctcctcggcgccaccaagcgctccatggtcttcaaggacgtcctcctcctcggcaacgactacatcgtcccccgccactgccccgagctcgccgagatgtcccgcgtctccatccgcatcctcgacgagctcgtcctccccttccaggagctccagatcgacgacaacgagtacgcctacctcaaggccatcatcttcttcgaccccgacgccaagggcctctccgaccccggcaagatcaagcgcctccgctcccaggtccaggtctccctcgaggactacatcaacgaccgccagtacgactcccgcggccgcttcggcgagctcctcctcctcctccccaccctccagtccatcacctggcagatgatcgagcagatccagttcatcaagctcttcggcatggccaagatcgacaacctcctccaggagatgctcctcggcggctccccctccgacgccccccacgcccaccaccccctccacccccacctcatgcaggagcacatgggcaccaacgtcatcgtcgccaacaccatgcccacccacctctccaacggccagatgtgcgagtggccccgcccccgcggccaggccgccacccccgagaccccccagccctccccccccggcggctccggctccgagccctacaagctcctccccggcgccgtcgccaccatcgtcaagcccctctccgccatcccccagcccaccatcaccaagcaggaggtcatctga

SEQ ID NO: 1238 - RNA, 1314 nt, synthetic construct
  misc_feature 1..1314: note = CDS (opt2) from Homo sapiens__NP_000448.3__HNF4A(39-474)(S143A)
  source 1..1314: mol_type = other RNA
atggacacctccccctccgagggcaccaacctcaacgcccccaactccctcggcgtctccgccctctgcgccatctgcggcgaccgcgccaccggcaagcactacggcgcctcctcctgcgacggctgcaagggcttcttccgccgctccgtccgcaagaaccacatgtactcctgccgcttctcccgccagtgcgtcgtcgacaaggacaagcgcaaccagtgccgctactgccgcctcaagaagtgcttccgcgccggcatgaagaaggaggccgtccagaacgagcgcgaccgcatctccacccgccgctccgcctacgaggactcctccctcccctccatcaacgccctcctccaggccgaggtcctctcccgccagatcacctcccccgtctccggcatcaacggcgacatccgcgccaagaagatcgcctccatcgccgacgtctgcgagtccatgaaggagcagctcctcgtcctcgtcgagtgggccaagtacatccccgccttctgcgagctccccctcgacgaccaggtcgccctcctccgcgcccacgccggcgagcacctcctcctcggcgccaccaagcgctccatggtcttcaaggacgtcctcctcctcggcaacgactacatcgtcccccgccactgccccgagctcgccgagatgtcccgcgtctccatccgcatcctcgacgagctcgtcctccccttccaggagctccagatcgacgacaacgagtacgcctacctcaaggccatcatcttcttcgaccccgacgccaagggcctctccgaccccggcaagatcaagcgcctccgctcccaggtccaggtctccctcgaggactacatcaacgaccgccagtacgactcccgcggccgcttcggcgagctcctcctcctcctccccaccctccagtccatcacctggcagatgatcgagcagatccagttcatcaagctcttcggcatggccaagatcgacaacctcctccaggagatgctcctcggcggctccccctccgacgccccccacgcccaccaccccctccacccccacctcatgcaggagcacatgggcaccaacgtcatcgtcgccaacaccatgcccacccacctctccaacggccagatgtgcgagtggccccgcccccgcggccaggccgccacccccgagaccccccagccctccccccccggcggctccggctccgagccctacaagctcctccccggcgccgtcgccaccatcgtcaagcccctctccgccatcccccagcccaccatcaccaagcaggaggtcatctga

SEQ ID NO: 1239 - RNA, 1314 nt, synthetic construct
  misc_feature 1..1314: note = CDS (opt2) from Homo sapiens__NP_000448.3__HNF4A(39-474)(T166A)
  source 1..1314: mol_type = other RNA
atggacacctccccctccgagggcaccaacctcaacgcccccaactccctcggcgtctccgccctctgcgccatctgcggcgaccgcgccaccggcaagcactacggcgcctcctcctgcgacggctgcaagggcttcttccgccgctccgtccgcaagaaccacatgtactcctgccgcttctcccgccagtgcgtcgtcgacaaggacaagcgcaaccagtgccgctactgccgcctcaagaagtgcttccgcgccggcatgaagaaggaggccgtccagaacgagcgcgaccgcatctccacccgccgctcctcctacgaggactcctccctcccctccatcaacgccctcctccaggccgaggtcctctcccgccagatcgcctcccccgtctccggcatcaacggcgacatccgcgccaagaagatcgcctccatcgccgacgtctgcgagtccatgaaggagcagctcctcgtcctcgtcgagtgggccaagtacatccccgccttctgcgagctccccctcgacgaccaggtcgccctcctccgcgcccacgccggcgagcacctcctcctcggcgccaccaagcgctccatggtcttcaaggacgtcctcctcctcggcaacgactacatcgtcccccgccactgccccgagctcgccgagatgtcccgcgtctccatccgcatcctcgacgagctcgtcctccccttccaggagctccagatcgacgacaacgagtacgcctacctcaaggccatcatcttcttcgaccccgacgccaagggcctctccgaccccggcaagatcaagcgcctccgctcccaggtccaggtctccctcgaggactacatcaacgaccgccagtacgactcccgcggccgcttcggcgagctcctcctcctcctccccaccctccagtccatcacctggcagatgatcgagcagatccagttcatcaagctcttcggcatggccaagatcgacaacctcctccaggagatgctcctcggcggctccccctccgacgccccccacgcccaccaccccctccacccccacctcatgcaggagcacatgggcaccaacgtcatcgtcgccaacaccatgcccacccacctctccaacggccagatgtgcgagtggccccgcccccgcggccaggccgccacccccgagaccccccagccctccccccccggcggctccggctccgagccctacaagctcctccccggcgccgtcgccaccatcgtcaagcccctctccgccatcccccagcccaccatcaccaagcaggaggtcatctga

SEQ ID NO: 1240 - RNA, 1314 nt, synthetic construct
  misc_feature 1..1314: note = CDS (opt2) from Homo sapiens__NP_000448.3__HNF4A(39-474)(S167E)
  source 1..1314: mol_type = other RNA
atggacacctccccctccgagggcaccaacctcaacgcccccaactccctcggcgtctccgccctctgcgccatctgcggcgaccgcgccaccggcaagcactacggcgcctcctcctgcgacggctgcaagggcttcttccgccgctccgtccgcaagaaccacatgtactcctgccgcttctcccgccagtgcgtcgtcgacaaggacaagcgcaaccagtgccgctactgccgcctcaagaagtgcttccgcgccggcatgaagaaggaggccgtccagaacgagcgcgaccgcatctccacccgccgctcctcctacgaggactcctccctcccctccatcaacgccctcctccaggccgaggtcctctcccgccagatcaccgagcccgtctccggcatcaacggcgacatccgcgccaagaagatcgcctccatcgccgacgtctgcgagtccatgaaggagcagctcctcgtcctcgtcgagtgggccaagtacatccccgccttctgcgagctccccctcgacgaccaggtcgccctcctccgcgcccacgccggcgagcacctcctcctcggcgccaccaagcgctccatggtcttcaaggacgtcctcctcctcggcaacgactacatcgtcccccgccactgccccgagctcgccgagatgtcccgcgtctccatccgcatcctcgacgagctcgtcctccccttccaggagctccagatcgacgacaacgagtacgcctacctcaaggccatcatcttcttcgaccccgacgccaagggcctctccgaccccggcaagatcaagcgcctccgctcccaggtccaggtctccctcgaggactacatcaacgaccgccagtacgactcccgcggccgcttcggcgagctcctcctcctcctccccaccctccagtccatcacctggcagatgatcgagcagatccagttcatcaagctcttcggcatggccaagatcgacaacctcctccaggagatgctcctcggcggctccccctccgacgccccccacgcccaccaccccctccacccccacctcatgcaggagcacatgggcaccaacgtcatcgtcgccaacaccatgcccacccacctctccaacggccagatgtgcgagtggccccgcccccgcggccaggccgccacccccgagaccccccagccctccccccccggcggctccggctccgagccctacaagctcctccccggcgccgtcgccaccatcgtcaagcccctctccgccatcccccagcccaccatcaccaagcaggaggtcatctga

SEQ ID NO: 1241 - RNA, 1314 nt, synthetic construct
  misc_feature 1..1314: note = CDS (opt2) from Homo sapiens__NP_000448.3__HNF4A(39-474)(S167A)
  source 1..1314: mol_type = other RNA
atggacacctccccctccgagggcaccaacctcaacgcccccaactccctcggcgtctccgccctctgcgccatctgcggcgaccgcgccaccggcaagcactacggcgcctcctcctgcgacggctgcaagggcttcttccgccgctccgtccgcaagaaccacatgtactcctgccgcttctcccgccagtgcgtcgtcgacaaggacaagcgcaaccagtgccgctactgccgcctcaagaagtgcttccgcgccggcatgaagaaggaggccgtccagaacgagcgcgaccgcatctccacccgccgctcctcctacgaggactcctccctcccctccatcaacgccctcctccaggccgaggtcctctcccgccagatcaccgcccccgtctccggcatcaacggcgacatccgcgccaagaagatcgcctccatcgccgacgtctgcgagtccatgaaggagcagctcctcgtcctcgtcgagtgggccaagtacatccccgccttctgcgagctccccctcgacgaccaggtcgccctcctccgcgcccacgccggcgagcacctcctcctcggcgccaccaagcgctccatggtcttcaaggacgtcctcctcctcggcaacgactacatcgtcccccgccactgccccgagctcgccgagatgtcccgcgtctccatccgcatcctcgacgagctcgtcctccccttccaggagctccagatcgacgacaacgagtacgcctacctcaaggccatcatcttcttcgaccccgacgccaagggcctctccgaccccggcaagatcaagcgcctccgctcccaggtccaggtctccctcgaggactacatcaacgaccgccagtacgactcccgcggccgcttcggcgagctcctcctcctcctccccaccctccagtccatcacctggcagatgatcgagcagatccagttcatcaagctcttcggcatggccaagatcgacaacctcctccaggagatgctcctcggcggctccccctccgacgccccccacgcccaccaccccctccacccccacctcatgcaggagcacatgggcaccaacgtcatcgtcgccaacaccatgcccacccacctctccaacggccagatgtgcgagtggccccgcccccgcggccaggccgccacccccgagaccccccagccctccccccccggcggctccggctccgagccctacaagctcctccccggcgccgtcgccaccatcgtcaagcccctctccgccatcccccagcccaccatcaccaagcaggaggtcatctga

SEQ ID NO: 1242 - RNA, 1314 nt, synthetic construct
  misc_feature 1..1314: note = CDS (opt2) from Homo sapiens__NP_000448.3__HNF4A(39-474)(S167A_S378A_T429A_T432A _S436A)
  source 1..1314: mol_type = other RNA
atggacacctccccctccgagggcaccaacctcaacgcccccaactccctcggcgtctccgccctctgcgccatctgcggcgaccgcgccaccggcaagcactacggcgcctcctcctgcgacggctgcaagggcttcttccgccgctccgtccgcaagaaccacatgtactcctgccgcttctcccgccagtgcgtcgtcgacaaggacaagcgcaaccagtgccgctactgccgcctcaagaagtgcttccgcgccggcatgaagaaggaggccgtccagaacgagcgcgaccgcatctccacccgccgctcctcctacgaggactcctccctcccctccatcaacgccctcctccaggccgaggtcctctcccgccagatcaccgcccccgtctccggcatcaacggcgacatccgcgccaagaagatcgcctccatcgccgacgtctgcgagtccatgaaggagcagctcctcgtcctcgtcgagtgggccaagtacatccccgccttctgcgagctccccctcgacgaccaggtcgccctcctccgcgcccacgccggcgagcacctcctcctcggcgccaccaagcgctccatggtcttcaaggacgtcctcctcctcggcaacgactacatcgtcccccgccactgccccgagctcgccgagatgtcccgcgtctccatccgcatcctcgacgagctcgtcctccccttccaggagctccagatcgacgacaacgagtacgcctacctcaaggccatcatcttcttcgaccccgacgccaagggcctctccgaccccggcaagatcaagcgcctccgctcccaggtccaggtctccctcgaggactacatcaacgaccgccagtacgactcccgcggccgcttcggcgagctcctcctcctcctccccaccctccagtccatcacctggcagatgatcgagcagatccagttcatcaagctcttcggcatggccaagatcgacaacctcctccaggagatgctcctcggcggcgccccctccgacgccccccacgcccaccaccccctccacccccacctcatgcaggagcacatgggcaccaacgtcatcgtcgccaacaccatgcccacccacctctccaacggccagatgtgcgagtggccccgcccccgcggccaggccgccgcccccgaggccccccagcccgccccccccggcggctccggctccgagccctacaagctcctccccggcgccgtcgccaccatcgtcaagcccctctccgccatcccccagcccaccatcaccaagcaggaggtcatctga

SEQ ID NO: 1243 - RNA, 1314 nt, synthetic construct
  misc_feature 1..1314: note = CDS (opt2) from Homo sapiens__NP_000448.3__HNF4A(39-474)(S167E_S378E_T429E_T432E _S436E)
  source 1..1314: mol_type = other RNA
atggacacctccccctccgagggcaccaacctcaacgcccccaactccctcggcgtctccgccctctgcgccatctgcggcgaccgcgccaccggcaagcactacggcgcctcctcctgcgacggctgcaagggcttcttccgccgctccgtccgcaagaaccacatgtactcctgccgcttctcccgccagtgcgtcgtcgacaaggacaagcgcaaccagtgccgctactgccgcctcaagaagtgcttccgcgccggcatgaagaaggaggccgtccagaacgagcgcgaccgcatctccacccgccgctcctcctacgaggactcctccctcccctccatcaacgccctcctccaggccgaggtcctctcccgccagatcaccgagcccgtctccggcatcaacggcgacatccgcgccaagaagatcgcctccatcgccgacgtctgcgagtccatgaaggagcagctcctcgtcctcgtcgagtgggccaagtacatccccgccttctgcgagctccccctcgacgaccaggtcgccctcctccgcgcccacgccggcgagcacctcctcctcggcgccaccaagcgctccatggtcttcaaggacgtcctcctcctcggcaacgactacatcgtcccccgccactgccccgagctcgccgagatgtcccgcgtctccatccgcatcctcgacgagctcgtcctccccttccaggagctccagatcgacgacaacgagtacgcctacctcaaggccatcatcttcttcgaccccgacgccaagggcctctccgaccccggcaagatcaagcgcctccgctcccaggtccaggtctccctcgaggactacatcaacgaccgccagtacgactcccgcggccgcttcggcgagctcctcctcctcctccccaccctccagtccatcacctggcagatgatcgagcagatccagttcatcaagctcttcggcatggccaagatcgacaacctcctccaggagatgctcctcggcggcgagccctccgacgccccccacgcccaccaccccctccacccccacctcatgcaggagcacatgggcaccaacgtcatcgtcgccaacaccatgcccacccacctctccaacggccagatgtgcgagtggccccgcccccgcggccaggccgccgagcccgaggagccccagcccgagccccccggcggctccggctccgagccctacaagctcctccccggcgccgtcgccaccatcgtcaagcccctctccgccatcccccagcccaccatcaccaagcaggaggtcatctga

SEQ ID NO: 1244 - RNA, 1314 nt, synthetic construct
  misc_feature 1..1314: note = CDS (opt2) from Homo sapiens__NP_000448.3__HNF4A(39-474)(S87A)
  source 1..1314: mol_type = other RNA
atggacacctccccctccgagggcaccaacctcaacgcccccaactccctcggcgtctccgccctctgcgccatctgcggcgaccgcgccaccggcaagcactacggcgcctcctcctgcgacggctgcaagggcttcttccgccgcgccgtccgcaagaaccacatgtactcctgccgcttctcccgccagtgcgtcgtcgacaaggacaagcgcaaccagtgccgctactgccgcctcaagaagtgcttccgcgccggcatgaagaaggaggccgtccagaacgagcgcgaccgcatctccacccgccgctcctcctacgaggactcctccctcccctccatcaacgccctcctccaggccgaggtcctctcccgccagatcacctcccccgtctccggcatcaacggcgacatccgcgccaagaagatcgcctccatcgccgacgtctgcgagtccatgaaggagcagctcctcgtcctcgtcgagtgggccaagtacatccccgccttctgcgagctccccctcgacgaccaggtcgccctcctccgcgcccacgccggcgagcacctcctcctcggcgccaccaagcgctccatggtcttcaaggacgtcctcctcctcggcaacgactacatcgtcccccgccactgccccgagctcgccgagatgtcccgcgtctccatccgcatcctcgacgagctcgtcctccccttccaggagctccagatcgacgacaacgagtacgcctacctcaaggccatcatcttcttcgaccccgacgccaagggcctctccgaccccggcaagatcaagcgcctccgctcccaggtccaggtctccctcgaggactacatcaacgaccgccagtacgactcccgcggccgcttcggcgagctcctcctcctcctccccaccctccagtccatcacctggcagatgatcgagcagatccagttcatcaagctcttcggcatggccaagatcgacaacctcctccaggagatgctcctcggcggctccccctccgacgccccccacgcccaccaccccctccacccccacctcatgcaggagcacatgggcaccaacgtcatcgtcgccaacaccatgcccacccacctctccaacggccagatgtgcgagtggccccgcccccgcggccaggccgccacccccgagaccccccagccctccccccccggcggctccggctccgagccctacaagctcctccccggcgccgtcgccaccatcgtcaagcccctctccgccatcccccagcccaccatcaccaagcaggaggtcatctga

SEQ ID NO: 1245 - RNA, 1314 nt, synthetic construct
  misc_feature 1..1314: note = CDS (opt2) from Homo sapiens__NP_000448.3__HNF4A(39-474)(S87E)
  source 1..1314: mol_type = other RNA
atggacacctccccctccgagggcaccaacctcaacgcccccaactccctcggcgtctccgccctctgcgccatctgcggcgaccgcgccaccggcaagcactacggcgcctcctcctgcgacggctgcaagggcttcttccgccgcgaggtccgcaagaaccacatgtactcctgccgcttctcccgccagtgcgtcgtcgacaaggacaagcgcaaccagtgccgctactgccgcctcaagaagtgcttccgcgccggcatgaagaaggaggccgtccagaacgagcgcgaccgcatctccacccgccgctcctcctacgaggactcctccctcccctccatcaacgccctcctccaggccgaggtcctctcccgccagatcacctcccccgtctccggcatcaacggcgacatccgcgccaagaagatcgcctccatcgccgacgtctgcgagtccatgaaggagcagctcctcgtcctcgtcgagtgggccaagtacatccccgccttctgcgagctccccctcgacgaccaggtcgccctcctccgcgcccacgccggcgagcacctcctcctcggcgccaccaagcgctccatggtcttcaaggacgtcctcctcctcggcaacgactacatcgtcccccgccactgccccgagctcgccgagatgtcccgcgtctccatccgcatcctcgacgagctcgtcctccccttccaggagctccagatcgacgacaacgagtacgcctacctcaaggccatcatcttcttcgaccccgacgccaagggcctctccgaccccggcaagatcaagcgcctccgctcccaggtccaggtctccctcgaggactacatcaacgaccgccagtacgactcccgcggccgcttcggcgagctcctcctcctcctccccaccctccagtccatcacctggcagatgatcgagcagatccagttcatcaagctcttcggcatggccaagatcgacaacctcctccaggagatgctcctcggcggctccccctccgacgccccccacgcccaccaccccctccacccccacctcatgcaggagcacatgggcaccaacgtcatcgtcgccaacaccatgcccacccacctctccaacggccagatgtgcgagtggccccgcccccgcggccaggccgccacccccgagaccccccagccctccccccccggcggctccggctccgagccctacaagctcctccccggcgccgtcgccaccatcgtcaagcccctctccgccatcccccagcccaccatcaccaagcaggaggtcatctga

SEQ ID NO: 1246 - RNA, 1314 nt, synthetic construct
  misc_feature 1..1314: note = CDS (opt2) from Homo sapiens__NP_000448.3__HNF4A(39-474)(R2V)
  source 1..1314: mol_type = other RNA
atggacacctccccctccgagggcaccaacctcaacgcccccaactccctcggcgtctccgccctctgcgccatctgcggcgaccgcgccaccggcaagcactacggcgcctcctcctgcgacggctgcaagggcttcttccgccgctccgtccgcaagaaccacatgtactcctgccgcttctcccgccagtgcgtcgtcgacaaggacaagcgcaaccagtgccgctactgccgcctcaagaagtgcttccgcgccggcatgaagaaggaggccgtccagaacgagcgcgaccgcatctccacccgccgctcctcctacgaggactcctccctcccctccatcaacgccctcctccaggccgaggtcctctcccgccagatcacctcccccgtctccggcatcaacggcgacatccgcgccaagaagatcgcctccatcgccgacgtctgcgagtccatgaaggagcagctcctcgtcctcgtcgagtgggccaagtacatccccgccttctgcgagctccccctcgacgaccaggtcgccctcctccgcgcccacgccggcgagcacctcctcctcggcgccaccaagcgctccatggtcttcaaggacgtcctcctcctcggcaacgactacatcgtcccccgccactgccccgagctcgccgagatgtcccgcgtctccatccgcatcctcgacgagctcgtcctccccttccaggagctccagatcgacgacaacgagtacgcctacctcaaggccatcatcttcttcgaccccgacgccaagggcctctccgaccccggcaagatcaagcgcctccgctcccaggtccaggtctccctcgaggactacatcaacgaccgccagtacgactcccgcggccgcttcggcgagctcctcctcctcctccccaccctccagtccatcacctggcagatgatcgagcagatccagttcatcaagctcttcggcatggccaagatcgacaacctcctccaggagatgctcctcggcggctccccctccgacgccccccacgcccaccaccccctccacccccacctcatgcaggagcacatgggcaccaacgtcatcgtcgccaacaccatgcccacccacctctccaacggccagatgtgcgagtggccccgcccccgcggccaggccgccacccccgagaccccccagccctccccccccggcggctccggctccgagccctacaagctcctccccggcgccgtcgccaccatcgtcaagcccctctccgccatcccccagcccaccatcaccaagcaggaggtcatctga

SEQ ID NO: 1247 - RNA, 1314 nt, synthetic construct; identical to SEQ ID NO: 1246
  misc_feature 1..1314: note = CDS (opt2) from Homo sapiens__NP_000448.3__HNF4A(39-474)(R2V_K5V)
  source 1..1314: mol_type = other RNA

SEQ ID NO: 1248 - RNA, 1314 nt, synthetic construct
  misc_feature 1..1314: note = CDS (opt2) from Homo sapiens__NP_000448.3__HNF4A(39-474)(K179R_K180R)
  source 1..1314: mol_type = other RNA
atggacacctccccctccgagggcaccaacctcaacgcccccaactccctcggcgtctccgccctctgcgccatctgcggcgaccgcgccaccggcaagcactacggcgcctcctcctgcgacggctgcaagggcttcttccgccgctccgtccgcaagaaccacatgtactcctgccgcttctcccgccagtgcgtcgtcgacaaggacaagcgcaaccagtgccgctactgccgcctcaagaagtgcttccgcgccggcatgaagaaggaggccgtccagaacgagcgcgaccgcatctccacccgccgctcctcctacgaggactcctccctcccctccatcaacgccctcctccaggccgaggtcctctcccgccagatcacctcccccgtctccggcatcaacggcgacatccgcgcccgccgcatcgcctccatcgccgacgtctgcgagtccatgaaggagcagctcctcgtcctcgtcgagtgggccaagtacatccccgccttctgcgagctccccctcgacgaccaggtcgccctcctccgcgcccacgccggcgagcacctcctcctcggcgccaccaagcgctccatggtcttcaaggacgtcctcctcctcggcaacgactacatcgtcccccgccactgccccgagctcgccgagatgtcccgcgtctccatccgcatcctcgacgagctcgtcctccccttccaggagctccagatcgacgacaacgagtacgcctacctcaaggccatcatcttcttcgaccccgacgccaagggcctctccgaccccggcaagatcaagcgcctccgctcccaggtccaggtctccctcgaggactacatcaacgaccgccagtacgactcccgcggccgcttcggcgagctcctcctcctcctccccaccctccagtccatcacctggcagatgatcgagcagatccagttcatcaagctcttcggcatggccaagatcgacaacctcctccaggagatgctcctcggcggctccccctccgacgccccccacgcccaccaccccctccacccccacctcatgcaggagcacatgggcaccaacgtcatcgtcgccaacaccatgcccacccacctctccaacggccagatgtgcgagtggccccgcccccgcggccaggccgccacccccgagaccccccagccctccccccccggcggctccggctccgagccctacaagctcctccccggcgccgtcgccaccatcgtcaagcccctctccgccatcccccagcccaccatcaccaagcaggaggtcatctga

SEQ ID NO: 1249 - RNA, 1314 nt, synthetic construct
  misc_feature 1..1314: note = CDS (opt2) from Homo sapiens__NP_000448.3__HNF4A(39-474)(K234R)
  source 1..1314: mol_type = other RNA
atggacacctccccctccgagggcaccaacctcaacgcccccaactccctcggcgtctccgccctctgcgccatctgcggcgaccgcgccaccggcaagcactacggcgcctcctcctgcgacggctgcaagggcttcttccgccgctccgtccgcaagaaccacatgtactcctgccgcttctcccgccagtgcgtcgtcgacaaggacaagcgcaaccagtgccgctactgccgcctcaagaagtgcttccgcgccggcatgaagaaggaggccgtccagaacgagcgcgaccgcatctccacccgccgctcctcctacgaggactcctccctcccctccatcaacgccctcctccaggccgaggtcctctcccgccagatcacctcccccgtctccggcatcaacggcgacatccgcgccaagaagatcgcctccatcgccgacgtctgcgagtccatgaaggagcagctcctcgtcctcgtcgagtgggccaagtacatccccgccttctgcgagctccccctcgacgaccaggtcgccctcctccgcgcccacgccggcgagcacctcctcctcggcgccacccgccgctccatggtcttcaaggacgtcctcctcctcggcaacgactacatcgtcccccgccactgccccgagctcgccgagatgtcccgcgtctccatccgcatcctcgacgagctcgtcctccccttccaggagctccagatcgacgacaacgagtacgcctacctcaaggccatcatcttcttcgaccccgacgccaagggcctctccgaccccggcaagatcaagcgcctccgctcccaggtccaggtctccctcgaggactacatcaacgaccgccagtacgactcccgcggccgcttcggcgagctcctcctcctcctccccaccctccagtccatcacctggcagatgatcgagcagatccagttcatcaagctcttcggcatggccaagatcgacaacctcctccaggagatgctcctcggcggctccccctccgacgccccccacgcccaccaccccctccacccccacctcatgcaggagcacatgggcaccaacgtcatcgtcgccaacaccatgcccacccacctctccaacggccagatgtgcgagtggccccgcccccgcggccaggccgccacccccgagaccccccagccctccccccccggcggctccggctccgagccctacaagctcctccccggcgccgtcgccaccatcgtcaagcccctctccgccatcccccagcccaccatcaccaagcaggaggtcatctga

SEQ ID NO: 1250 - RNA, 1314 nt, synthetic construct
  misc_feature 1..1314: note = CDS (opt2) from Homo sapiens__NP_000448.3__HNF4A(39-474)(K300R)
  source 1..1314: mol_type = other RNA
atggacacctccccctccgagggcaccaacctcaacgcccccaactccctcggcgtctccgccctctgcgccatctgcggcgaccgcgccaccggcaagcactacggcgcctcctcctgcgacggctgcaagggcttcttccgccgctccgtccgcaagaaccacatgtactcctgccgcttctcccgccagtgcgtcgtcgacaaggacaagcgcaaccagtgccgctactgccgcctcaagaagtgcttccgcgccggcatgaagaaggaggccgtccagaacgagcgcgaccgcatctccacccgccgctcctcctacgaggactcctccctcccctccatcaacgccctcctccaggccgaggtcctctcccgccagatcacctcccccgtctccggcatcaacggcgacatccgcgccaagaagatcgcctccatcgccgacgtctgcgagtccatgaaggagcagctcctcgtcctcgtcgagtgggccaagtacatccccgccttctgcgagctccccctcgacgaccaggtcgccctcctccgcgcccacgccggcgagcacctcctcctcggcgccaccaagcgctccatggtcttcaaggacgtcctcctcctcggcaacgactacatcgtcccccgccactgccccgagctcgccgagatgtcccgcgtctccatccgcatcctcgacgagctcgtcctccccttccaggagctccagatcgacgacaacgagtacgcctacctcaaggccatcatcttcttcgaccccgacgcccgcggcctctccgaccccggcaagatcaagcgcctccgctcccaggtccaggtctccctcgaggactacatcaacgaccgccagtacgactcccgcggccgcttcggcgagctcctcctcctcctccccaccctccagtccatcacctggcagatgatcgagcagatccagttcatcaagctcttcggcatggccaagatcgacaacctcctccaggagatgctcctcggcggctccccctccgacgccccccacgcccaccaccccctccacccccacctcatgcaggagcacatgggcaccaacgtcatcgtcgccaacaccatgcccacccacctctccaacggccagatgtgcgagtggccccgcccccgcggccaggccgccacccccgagaccccccagccctccccccccggcggctccggctccgagccctacaagctcctccccggcgccgtcgccaccatcgtcaagcccctctccgccatcccccagcccaccatcaccaagcaggaggtcatctga

SEQ ID NO: 1251 - RNA, 1314 nt, synthetic construct
  misc_feature 1..1314: note = CDS (opt2) from Homo sapiens__NP_000448.3__HNF4A(39-474)(K300R_K307R_K309R)
  source 1..1314: mol_type = other RNA
atggacacctccccctccgagggcaccaacctcaacgcccccaactccctcggcgtctccgccctctgcgccatctgcggcgaccgcgccaccggcaagcactacggcgcctcctcctgcgacggctgcaagggcttcttccgccgctccgtccgcaagaaccacatgtactcctgccgcttctcccgccagtgcgtcgtcgacaaggacaagcgcaaccagtgccgctactgccgcctcaagaagtgcttccgcgccggcatgaagaaggaggccgtccagaacgagcgcgaccgcatctccacccgccgctcctcctacgaggactcctccctcccctccatcaacgccctcctccaggccgaggtcctctcccgccagatcacctcccccgtctccggcatcaacggcgacatccgcgccaagaagatcgcctccatcgccgacgtctgcgagtccatgaaggagcagctcctcgtcctcgtcgagtgggccaagtacatccccgccttctgcgagctccccctcgacgaccaggtcgccctcctccgcgcccacgccggcgagcacctcctcctcggcgccaccaagcgctccatggtcttcaaggacgtcctcctcctcggcaacgactacatcgtcccccgccactgccccgagctcgccgagatgtcccgcgtctccatccgcatcctcgacgagctcgtcctccccttccaggagctccagatcgacgacaacgagtacgcctacctcaaggccatcatcttcttcgaccccgacgcccgcggcctctccgaccccggccgcatccgccgcctccgctcccaggtccaggtctccctcgaggactacatcaacgaccgccagtacgactcccgcggccgcttcggcgagctcctcctcctcctccccaccctccagtccatcacctggcagatgatcgagcagatccagttcatcaagctcttcggcatggccaagatcgacaacctcctccaggagatgctcctcggcggctccccctccgacgccccccacgcccaccaccccctccacccccacctcatgcaggagcacatgggcaccaacgtcatcgtcgccaacaccatgcccacccacctctccaacggccagatgtgcgagtggccccgcccccgcggccaggccgccacccccgagaccccccagccctccccccccggcggctccggctccgagccctacaagctcctccccggcgccgtcgccaccatcgtcaagcccctctccgccatcccccagcccaccatcaccaagcaggaggtcatctga

SEQ ID NO: 1252 - RNA, 1314 nt, synthetic construct
  misc_feature 1..1314: note = CDS (opt2) from Homo sapiens__NP_000448.3__HNF4A(39-474)(K447R_K470R)
  source 1..1314: mol_type = other RNA
atggacacctccccctccgagggcaccaacctcaacgcccccaactccctcggcgtctccgccctctgcgccatctgcggcgaccgcgccaccggcaagcactacggcgcctcctcctgcgacggctgcaagggcttcttccgccgctccgtccgcaagaaccacatgtactcctgccgcttctcccgccagtgcgtcgtcgacaaggacaagcgcaaccagtgccgctactgccgcctcaagaagtgcttccgcgccggcatgaagaaggaggccgtccagaacgagcgcgaccgcatctccacccgccgctcctcctacgaggactcctccctcccctccatcaacgccctcctccaggccgaggtcctctcccgccagatcacctcccccgtctccggcatcaacggcgacatccgcgccaagaagatcgcctccatcgccgacgtctgcgagtccatgaaggagcagctcctcgtcctcgtcgagtgggccaagtacatccccgccttctgcgagctccccctcgacgaccaggtcgccctcctccgcgcccacgccggcgagcacctcctcctcggcgccaccaagcgctccatggtcttcaaggacgtcctcctcctcggcaacgactacatcgtcccccgccactgccccgagctcgccgagatgtcccgcgtctccatccgcatcctcgacgagctcgtcctccccttccaggagctccagatcgacgacaacgagtacgcctacctcaaggccatcatcttcttcgaccccgacgccaagggcctctccgaccccggcaagatcaagcgcctccgctcccaggtccaggtctccctcgaggactacatcaacgaccgccagtacgactcccgcggccgcttcggcgagctcctcctcctcctccccaccctccagtccatcacctggcagatgatcgagcagatccagttcatcaagctcttcggcatggccaagatcgacaacctcctccaggagatgctcctcggcggctccccctccgacgccccccacgcccaccaccccctccacccccacctcatgcaggagcacatgggcaccaacgtcatcgtcgccaacaccatgcccacccacctctccaacggccagatgtgcgagtggccccgcccccgcggccaggccgccacccccgagaccccccagccctccccccccggcggctccggctccgagccctaccgcctcctccccggcgccgtcgccaccatcgtcaagcccctctccgccatcccccagcccaccatcacccgccaggaggtcatctga

SEQ ID NO: 1253 - RNA, 1314 nt, synthetic construct
  misc_feature 1..1314: note = CDS (opt2) from Homo sapiens__NP_000448.3__HNF4A(39-474)(K458R)
  source 1..1314: mol_type = other RNA
atggacacctccccctccgagggcaccaacctcaacgcccccaactccctcggcgtctccgccctctgcgccatctgcggcgaccgcgccaccggcaagcactacggcgcctcctcctgcgacggctgcaagggcttcttccgccgctccgtccgcaagaaccacatgtactcctgccgcttctcccgccagtgcgtcgtcgacaaggacaagcgcaaccagtgccgctactgccgcctcaagaagtgcttccgcgccggcatgaagaaggaggccgtccagaacgagcgcgaccgcatctccacccgccgctcctcctacgaggactcctccctcccctccatcaacgccctcctccaggccgaggtcctctcccgccagatcacctcccccgtctccggcatcaacggcgacatccgcgccaagaagatcgcctccatcgccgacgtctgcgagtccatgaaggagcagctcctcgtcctcgtcgagtgggccaagtacatccccgccttctgcgagctccccctcgacgaccaggtcgccctcctccgcgcccacgccggcgagcacctcctcctcggcgccaccaagcgctccatggtcttcaaggacgtcctcctcctcggcaacgactacatcgtcccccgccactgccccgagctcgccgagatgtcccgcgtctccatccgcatcctcgacgagctcgtcctccccttccaggagctccagatcgacgacaacgagtacgcctacctcaaggccatcatcttcttcgaccccgacgccaagggcctctccgaccccggcaagatcaagcgcctccgctcccaggtccaggtctccctcgaggactacatcaacgaccgccagtacgactcccgcggccgcttcggcgagctcctcctcctcctccccaccctccagtccatcacctggcagatgatcgagcagatccagttcatcaagctcttcggcatggccaagatcgacaacctcctccaggagatgctcctcggcggctccccctccgacgccccccacgcccaccaccccctccacccccacctcatgcaggagcacatgggcaccaacgtcatcgtcgccaacaccatgcccacccacctctccaacggccagatgtgcgagtggccccgcccccgcggccaggccgccacccccgagaccccccagccctccccccccggcggctccggctccgagccctacaagctcctccccggcgccgtcgccaccatcgtccgccccctctccgccatcccccagcccaccatcaccaagcaggaggtcatctga

SEQ ID NO: 1254 - RNA, 1314 nt, synthetic construct
  misc_feature 1..1314: note = CDS (opt2) from Homo sapiens__NP_000448.3__HNF4A(39-474)(K106R_K108R_K126R_K127R )
  source 1..1314: mol_type = other RNA
atggacacctccccctccgagggcaccaacctcaacgcccccaactccctcggcgtctccgccctctgcgccatctgcggcgaccgcgccaccggcaagcactacggcgcctcctcctgcgacggctgcaagggcttcttccgccgctccgtccgcaagaaccacatgtactcctgccgcttctcccgccagtgcgtcgtcgaccgcgaccgccgcaaccagtgccgctactgccgcctcaagaagtgcttccgcgccggcatgcgccgcgaggccgtccagaacgagcgcgaccgcatctccacccgccgctcctcctacgaggactcctccctcccctccatcaacgccctcctccaggccgaggtcctctcccgccagatcacctcccccgtctccggcatcaacggcgacatccgcgccaagaagatcgcctccatcgccgacgtctgcgagtccatgaaggagcagctcctcgtcctcgtcgagtgggccaagtacatccccgccttctgcgagctccccctcgacgaccaggtcgccctcctccgcgcccacgccggcgagcacctcctcctcggcgccaccaagcgctccatggtcttcaaggacgtcctcctcctcggcaacgactacatcgtcccccgccactgccccgagctcgccgagatgtcccgcgtctccatccgcatcctcgacgagctcgtcctccccttccaggagctccagatcgacgacaacgagtacgcctacctcaaggccatcatcttcttcgaccccgacgccaagggcctctccgaccccggcaagatcaagcgcctccgctcccaggtccaggtctccctcgaggactacatcaacgaccgccagtacgactcccgcggccgcttcggcgagctcctcctcctcctccccaccctccagtccatcacctggcagatgatcgagcagatccagttcatcaagctcttcggcatggccaagatcgacaacctcctccaggagatgctcctcggcggctccccctccgacgccccccacgcccaccaccccctccacccccacctcatgcaggagcacatgggcaccaacgtcatcgtcgccaacaccatgcccacccacctctccaacggccagatgtgcgagtggccccgcccccgcggccaggccgccacccccgagaccccccagccctccccccccggcggctccggctccgagccctacaagctcctccccggcgccgtcgccaccatcgtcaagcccctctccgccatcccccagcccaccatcaccaagcaggaggtcatctga

SEQ ID NO: 1255 - RNA, 1314 nt, synthetic construct
  misc_feature 1..1314: note = CDS (opt2) from Homo sapiens__NP_000448.3__HNF4A(39-474)(E285Q)
  source 1..1314: mol_type = other RNA
atggacacctccccctccgagggcaccaacctcaacgcccccaactccctcggcgtctccgccctctgcgccatctgcggcgaccgcgccaccggcaagcactacggcgcctcctcctgcgacggctgcaagggcttcttccgccgctccgtccgcaagaaccacatgtactcctgccgcttctcccgccagtgcgtcgtcgacaaggacaagcgcaaccagtgccgctactgccgcctcaagaagtgcttccgcgccggcatgaagaaggaggccgtccagaacgagcgcgaccgcatctccacccgccgctcctcctacgaggactcctccctcccctccatcaacgccctcctccaggccgaggtcctctcccgccagatcacctcccccgtctccggcatcaacggcgacatccgcgccaagaagatcgcctccatcgccgacgtctgcgagtccatgaaggagcagctcctcgtcctcgtcgagtgggccaagtacatccccgccttctgcgagctccccctcgacgaccaggtcgccctcctccgcgcccacgccggcgagcacctcctcctcggcgccaccaagcgctccatggtcttcaaggacgtcctcctcctcggcaacgactacatcgtcccccgccactgccccgagctcgccgagatgtcccgcgtctccatccgcatcctcgacgagctcgtcctccccttccaggagctccagatcgacgacaaccagtacgcctacctcaaggccatcatcttcttcgaccccgacgccaagggcctctccgaccccggcaagatcaagcgcctccgctcccaggtccaggtctccctcgaggactacatcaacgaccgccagtacgactcccgcggccgcttcggcgagctcctcctcctcctccccaccctccagtccatcacctggcagatgatcgagcagatccagttcatcaagctcttcggcatggccaagatcgacaacctcctccaggagatgctcctcggcggctccccctccgacgccccccacgcccaccaccccctccacccccacctcatgcaggagcacatgggcaccaacgtcatcgtcgccaacaccatgcccacccacctctccaacggccagatgtgcgagtggccccgcccccgcggccaggccgccacccccgagaccccccagccctccccccccggcggctccggctccgagccctacaagctcctccccggcgccgtcgccaccatcgtcaagcccctctccgccatcccccagcccaccatcaccaagcaggaggtcatctga

SEQ ID NO: 1256 - RNA, 1314 nt, synthetic construct
  misc_feature 1..1314: note = CDS (opt2) from Homo sapiens__NP_000448.3__HNF4A(39-474)(T166E)
  source 1..1314: mol_type = other RNA
atggacacctccccctccgagggcaccaacctcaacgcccccaactccctcggcgtctccgccctctgcgccatctgcggcgaccgcgccaccggcaagcactacggcgcctcctcctgcgacggctgcaagggcttcttccgccgctccgtccgcaagaaccacatgtactcctgccgcttctcccgccagtgcgtcgtcgacaaggacaagcgcaaccagtgccgctactgccgcctcaagaagtgcttccgcgccggcatgaagaaggaggccgtccagaacgagcgcgaccgcatctccacccgccgctcctcctacgaggactcctccctcccctccatcaacgccctcctccaggccgaggtcctctcccgccagatcgagtcccccgtctccggcatcaacggcgacatccgcgccaagaagatcgcctccatcgccgacgtctgcgagtccatgaaggagcagctcctcgtcctcgtcgagtgggccaagtacatccccgccttctgcgagctccccctcgacgaccaggtcgccctcctccgcgcccacgccggcgagcacctcctcctcggcgccaccaagcgctccatggtcttcaaggacgtcctcctcctcggcaacgactacatcgtcccccgccactgccccgagctcgccgagatgtcccgcgtctccatccgcatcctcgacgagctcgtcctccccttccaggagctccagatcgacgacaacgagtacgcctacctcaaggccatcatcttcttcgaccccgacgccaagggcctctccgaccccggcaagatcaagcgcctccgctcccaggtccaggtctccctcgaggactacatcaacgaccgccagtacgactcccgcggccgcttcggcgagctcctcctcctcctccccaccctccagtccatcacctggcagatgatcgagcagatccagttcatcaagctcttcggcatggccaagatcgacaacctcctccaggagatgctcctcggcggctccccctccgacgccccccacgcccaccaccccctccacccccacctcatgcaggagcacatgggcaccaacgtcatcgtcgccaacaccatgcccacccacctctccaacggccagatgtgcgagtggccccgcccccgcggccaggccgccacccccgagaccccccagccctccccccccggcggctccggctccgagccctacaagctcctccccggcgccgtcgccaccatcgtcaagcccctctccgccatcccccagcccaccatcaccaagcaggaggtcatctga

SEQ ID NO: 1257 - RNA, 1314 nt, synthetic construct
  misc_feature 1..1314: note = CDS (opt2) from Homo sapiens__NP_000448.3__HNF4A(39-474)(S148A)
  source 1..1314: mol_type = other RNA
atggacacctccccctccgagggcaccaacctcaacgcccccaactccctcggcgtctccgccctctgcgccatctgcggcgaccgcgccaccggcaagcactacggcgcctcctcctgcgacggctgcaagggcttcttccgccgctccgtccgcaagaaccacatgtactcctgccgcttctcccgccagtgcgtcgtcgacaaggacaagcgcaaccagtgccgctactgccgcctcaagaagtgcttccgcgccggcatgaagaaggaggccgtccagaacgagcgcgaccgcatctccacccgccgctcctcctacgaggactccgccctcccctccatcaacgccctcctccaggccgaggtcctctcccgccagatcacctcccccgtctccggcatcaacggcgacatccgcgccaagaagatcgcctccatcgccgacgtctgcgagtccatgaaggagcagctcctcgtcctcgtcgagtgggccaagtacatccccgccttctgcgagctccccctcgacgaccaggtcgccctcctccgcgcccacgccggcgagcacctcctcctcggcgccaccaagcgctccatggtcttcaaggacgtcctcctcctcggcaacgactacatcgtcccccgccactgccccgagctcgccgagatgtcccgcgtctccatccgcatcctcgacgagctcgtcctccccttccaggagctccagatcgacgacaacgagtacgcctacctcaaggccatcatcttcttcgaccccgacgccaagggcctctccgaccccggcaagatcaagcgcctccgctcccaggtccaggtctccctcgaggactacatcaacgaccgccagtacgactcccgcggccgcttcggcgagctcctcctcctcctccccaccctccagtccatcacctggcagatgatcgagcagatccagttcatcaagctcttcggcatggccaagatcgacaacctcctccaggagatgctcctcggcggctccccctccgacgccccccacgcccaccaccccctccacccccacctcatgcaggagcacatgggcaccaacgtcatcgtcgccaacaccatgcccacccacctctccaacggccagatgtgcgagtggccccgcccccgcggccaggccgccacccccgagaccccccagccctccccccccggcggctccggctccgagccctacaagctcctccccggcgccgtcgccaccatcgtcaagcccctctccgccatcccccagcccaccatcaccaagcaggaggtcatctga

SEQ ID NO: 1258 - RNA, 1314 nt, synthetic construct
  misc_feature 1..1314: note = CDS (opt2) from Homo sapiens__NP_000448.3__HNF4A(39-474)(S148E)
  source 1..1314: mol_type = other RNA
atggacacctccccctccgagggcaccaacctcaacgcccccaactccctcggcgtctccgccctctgcgccatctgcggcgaccgcgccaccggcaagcactacggcgcctcctcctgcgacggctgcaagggcttcttccgccgctccgtccgcaagaaccacatgtactcctgccgcttctcccgccagtgcgtcgtcgacaaggacaagcgcaaccagtgccgctactgccgcctcaagaagtgcttccgcgccggcatgaagaaggaggccgtccagaacgagcgcgaccgcatctccacccgccgctcctcctacgaggactccgagctcccctccatcaacgccctcctccaggccgaggtcctctcccgccagatcacctcccccgtctccggcatcaacggcgacatccgcgccaagaagatcgcctccatcgccgacgtctgcgagtccatgaaggagcagctcctcgtcctcgtcgagtgggccaagtacatccccgccttctgcgagctccccctcgacgaccaggtcgccctcctccgcgcccacgccggcgagcacctcctcctcggcgccaccaagcgctccatggtcttcaaggacgtcctcctcctcggcaacgactacatcgtcccccgccactgccccgagctcgccgagatgtcccgcgtctccatccgcatcctcgacgagctcgtcctccccttccaggagctccagatcgacgacaacgagtacgcctacctcaaggccatcatcttcttcgaccccgacgccaagggcctctccgaccccggcaagatcaagcgcctccgctcccaggtccaggtctccctcgaggactacatcaacgaccgccagtacgactcccgcggccgcttcggcgagctcctcctcctcctccccaccctccagtccatcacctggcagatgatcgagcagatccagttcatcaagctcttcggcatggccaagatcgacaacctcctccaggagatgctcctcggcggctccccctccgacgccccccacgcccaccaccccctccacccccacctcatgcaggagcacatgggcaccaacgtcatcgtcgccaacaccatgcccacccacctctccaacggccagatgtgcgagtggccccgcccccgcggccaggccgccacccccgagaccccccagccctccccccccggcggctccggctccgagccctacaagctcctccccggcgccgtcgccaccatcgtcaagcccctctccgccatcccccagcccaccatcaccaagcaggaggtcatctga

SEQ ID NO: 1259 - RNA, 1314 nt, synthetic construct
  misc_feature 1..1314: note = CDS (opt2) from Homo sapiens__NP_000448.3__HNF4A(39-474)(S183A)
  source 1..1314: mol_type = other RNA
atggacacctccccctccgagggcaccaacctcaacgcccccaactccctcggcgtctccgccctctgcgccatctgcggcgaccgcgccaccggcaagcactacggcgcctcctcctgcgacggctgcaagggcttcttccgccgctccgtccgcaagaaccacatgtactcctgccgcttctcccgccagtgcgtcgtcgacaaggacaagcgcaaccagtgccgctactgccgcctcaagaagtgcttccgcgccggcatgaagaaggaggccgtccagaacgagcgcgaccgcatctccacccgccgctcctcctacgaggactcctccctcccctccatcaacgccctcctccaggccgaggtcctctcccgccagatcacctcccccgtctccggcatcaacggcgacatccgcgccaagaagatcgccgccatcgccgacgtctgcgagtccatgaaggagcagctcctcgtcctcgtcgagtgggccaagtacatccccgccttctgcgagctccccctcgacgaccaggtcgccctcctccgcgcccacgccggcgagcacctcctcctcggcgccaccaagcgctccatggtcttcaaggacgtcctcctcctcggcaacgactacatcgtcccccgccactgccccgagctcgccgagatgtcccgcgtctccatccgcatcctcgacgagctcgtcctccccttccaggagctccagatcgacgacaacgagtacgcctacctcaaggccatcatcttcttcgaccccgacgccaagggcctctccgaccccggcaagatcaagcgcctccgctcccaggtccaggtctccctcgaggactacatcaacgaccgccagtacgactcccgcggccgcttcggcgagctcctcctcctcctccccaccctccagtccatcacctggcagatgatcgagcagatccagttcatcaagctcttcggcatggccaagatcgacaacctcctccaggagatgctcctcggcggctccccctccgacgccccccacgcccaccaccccctccacccccacctcatgcaggagcacatgggcaccaacgtcatcgtcgccaacaccatgcccacccacctctccaacggccagatgtgcgagtggccccgcccccgcggccaggccgccacccccgagaccccccagccctccccccccggcggctccggctccgagccctacaagctcctccccggcgccgtcgccaccatcgtcaagcccctctccgccatcccccagcccaccatcaccaagcaggaggtcatctga

SEQ ID NO: 1260 - RNA, 1314 nt, synthetic construct
  misc_feature 1..1314: note = CDS (opt2) from Homo sapiens__NP_000448.3__HNF4A(39-474)(S183E)
  source 1..1314: mol_type = other RNA
atggacacctccccctccgagggcaccaacctcaacgcccccaactccctcggcgtctccgccctctgcgccatctgcggcgaccgcgccaccggcaagcactacggcgcctcctcctgcgacggctgcaagggcttcttccgccgctccgtccgcaagaaccacatgtactcctgccgcttctcccgccagtgcgtcgtcgacaaggacaagcgcaaccagtgccgctactgccgcctcaagaagtgcttccgcgccggcatgaagaaggaggccgtccagaacgagcgcgaccgcatctccacccgccgctcctcctacgaggactcctccctcccctccatcaacgccctcctccaggccgaggtcctctcccgccagatcacctcccccgtctccggcatcaacggcgacatccgcgccaagaagatcgccgagatcgccgacgtctgcgagtccatgaaggagcagctcctcgtcctcgtcgagtgggccaagtacatccccgccttctgcgagctccccctcgacgaccaggtcgccctcctccgcgcccacgccggcgagcacctcctcctcggcgccaccaagcgctccatggtcttcaaggacgtcctcctcctcggcaacgactacatcgtcccccgccactgccccgagctcgccgagatgtcccgcgtctccatccgcatcctcgacgagctcgtcctccccttccaggagctccagatcgacgacaacgagtacgcctacctcaaggccatcatcttcttcgaccccgacgccaagggcctctccgaccccggcaagatcaagcgcctccgctcccaggtccaggtctccctcgaggactacatcaacgaccgccagtacgactcccgcggccgcttcggcgagctcctcctcctcctccccaccctccagtccatcacctggcagatgatcgagcagatccagttcatcaagctcttcggcatggccaagatcgacaacctcctccaggagatgctcctcggcggctccccctccgacgccccccacgcccaccaccccctccacccccacctcatgcaggagcacatgggcaccaacgtcatcgtcgccaacaccatgcccacccacctctccaacggccagatgtgcgagtggccccgcccccgcggccaggccgccacccccgagaccccccagccctccccccccggcggctccggctccgagccctacaagctcctccccggcgccgtcgccaccatcgtcaagcccctctccgccatcccccagcccaccatcaccaagcaggaggtcatctga

SEQ ID NO: 1261 - RNA, 1314 nt, synthetic construct
  misc_feature 1..1314: note = CDS (opt2) from Homo sapiens__NP_000448.3__HNF4A(39-474)(S461A)
  source 1..1314: mol_type = other RNA
atggacacctccccctccgagggcaccaacctcaacgcccccaactccctcggcgtctccgccctctgcgccatctgcggcgaccgcgccaccggcaagcactacggcgcctcctcctgcgacggctgcaagggcttcttccgccgctccgtccgcaagaaccacatgtactcctgccgcttctcccgccagtgcgtcgtcgacaaggacaagcgcaaccagtgccgctactgccgcctcaagaagtgcttccgcgccggcatgaagaaggaggccgtccagaacgagcgcgaccgcatctccacccgccgctcctcctacgaggactcctccctcccctccatcaacgccctcctccaggccgaggtcctctcccgccagatcacctcccccgtctccggcatcaacggcgacatccgcgccaagaagatcgcctccatcgccgacgtctgcgagtccatgaaggagcagctcctcgtcctcgtcgagtgggccaagtacatccccgccttctgcgagctccccctcgacgaccaggtcgccctcctccgcgcccacgccggcgagcacctcctcctcggcgccaccaagcgctccatggtcttcaaggacgtcctcctcctcggcaacgactacatcgtcccccgccactgccccgagctcgccgagatgtcccgcgtctccatccgcatcctcgacgagctcgtcctccccttccaggagctccagatcgacgacaacgagtacgcctacctcaaggccatcatcttcttcgaccccgacgccaagggcctctccgaccccggcaagatcaagcgcctccgctcccaggtccaggtctccctcgaggactacatcaacgaccgccagtacgactcccgcggccgcttcggcgagctcctcctcctcctccccaccctccagtccatcacctggcagatgatcgagcagatccagttcatcaagctcttcggcatggccaagatcgacaacctcctccaggagatgctcctcggcggctccccctccgacgccccccacgcccaccaccccctccacccccacctcatgcaggagcacatgggcaccaacgtcatcgtcgccaacaccatgcccacccacctctccaacggccagatgtgcgagtggccccgcccccgcggccaggccgccacccccgagaccccccagccctccccccccggcggctccggctccgagccctacaagctcctccccggcgccgtcgccaccatcgtcaagcccctcgccgccatcccccagcccaccatcaccaagcaggaggtcatctga

SEQ ID NO: 1262 - RNA, 1314 nt, synthetic construct
  misc_feature 1..1314: note = CDS (opt2) from Homo sapiens__NP_000448.3__HNF4A(39-474)(S461E)
  source 1..1314: mol_type = other RNA
atggacacctccccctccgagggcaccaacctcaacgcccccaactccctcggcgtctccgccctctgcgccatctgcggcgaccgcgccaccggcaagcactacggcgcctcctcctgcgacggctgcaagggcttcttccgccgctccgtccgcaagaaccacatgtactcctgccgcttctcccgccagtgcgtcgtcgacaaggacaagcgcaaccagtgccgctactgccgcctcaagaagtgcttccgcgccggcatgaagaaggaggccgtccagaacgagcgcgaccgcatctccacccgccgctcctcctacgaggactcctccctcccctccatcaacgccctcctccaggccgaggtcctctcccgccagatcacctcccccgtctccggcatcaacggcgacatccgcgccaagaagatcgcctccatcgccgacgtctgcgagtccatgaaggagcagctcctcgtcctcgtcgagtgggccaagtacatccccgccttctgcgagctccccctcgacgaccaggtcgccctcctccgcgcccacgccggcgagcacctcctcctcggcgccaccaagcgctccatggtcttcaaggacgtcctcctcctcggcaacgactacatcgtcccccgccactgccccgagctcgccgagatgtcccgcgtctccatccgcatcctcgacgagctcgtcctccccttccaggagctccagatcgacgacaacgagtacgcctacctcaaggccatcatcttcttcgaccccgacgccaagggcctctccgaccccggcaagatcaagcgcctccgctcccaggtccaggtctccctcgaggactacatcaacgaccgccagtacgactcccgcggccgcttcggcgagctcctcctcctcctccccaccctccagtccatcacctggcagatgatcgagcagatccagttcatcaagctcttcggcatggccaagatcgacaacctcctccaggagatgctcctcggcggctccccctccgacgccccccacgcccaccaccccctccacccccacctcatgcaggagcacatgggcaccaacgtcatcgtcgccaacaccatgcccacccacctctccaacggccagatgtgcgagtggccccgcccccgcggccaggccgccacccccgagaccccccagccctccccccccggcggctccggctccgagccctacaagctcctccccggcgccgtcgccaccatcgtcaagcccctcgaggccatcccccagcccaccatcaccaagcaggaggtcatctga

SEQ ID NO: 1263 - RNA, 1314 nt, synthetic construct
  misc_feature 1..1314: note = CDS (opt2) from Homo sapiens__NP_000448.3__HNF4A(39-474)(S142A_S143A_S313A)
  source 1..1314: mol_type = other RNA
atggacacctccccctccgagggcaccaacctcaacgcccccaactccctcggcgtctccgccctctgcgccatctgcggcgaccgcgccaccggcaagcactacggcgcctcctcctgcgacggctgcaagggcttcttccgccgctccgtccgcaagaaccacatgtactcctgccgcttctcccgccagtgcgtcgtcgacaaggacaagcgcaaccagtgccgctactgccgcctcaagaagtgcttccgcgccggcatgaagaaggaggccgtccagaacgagcgcgaccgcatctccacccgccgcgccgcctacgaggactcctccctcccctccatcaacgccctcctccaggccgaggtcctctcccgccagatcacctcccccgtctccggcatcaacggcgacatccgcgccaagaagatcgcctccatcgccgacgtctgcgagtccatgaaggagcagctcctcgtcctcgtcgagtgggccaagtacatccccgccttctgcgagctccccctcgacgaccaggtcgccctcctccgcgcccacgccggcgagcacctcctcctcggcgccaccaagcgctccatggtcttcaaggacgtcctcctcctcggcaacgactacatcgtcccccgccactgccccgagctcgccgagatgtcccgcgtctccatccgcatcctcgacgagctcgtcctccccttccaggagctccagatcgacgacaacgagtacgcctacctcaaggccatcatcttcttcgaccccgacgccaagggcctctccgaccccggcaagatcaagcgcctccgcgcccaggtccaggtctccctcgaggactacatcaacgaccgccagtacgactcccgcggccgcttcggcgagctcctcctcctcctccccaccctccagtccatcacctggcagatgatcgagcagatccagttcatcaagctcttcggcatggccaagatcgacaacctcctccaggagatgctcctcggcggctccccctccgacgccccccacgcccaccaccccctccacccccacctcatgcaggagcacatgggcaccaacgtcatcgtcgccaacaccatgcccacccacctctccaacggccagatgtgcgagtggccccgcccccgcggccaggccgccacccccgagaccccccagccctccccccccggcggctccggctccgagccctacaagctcctccccggcgccgtcgccaccatcgtcaagcccctctccgccatcccccagcccaccatcaccaagcaggaggtcatctga

SEQ ID NO: 1264 - RNA, 1314 nt, synthetic construct
  misc_feature 1..1314: note = CDS (opt2) from Homo sapiens__NP_000448.3__HNF4A(39-474)(S142A_S143A_S313A_K458R )
  source 1..1314: mol_type = other RNA
atggacacctccccctccgagggcaccaacctcaacgcccccaactccctcggcgtctccgccctctgcgccatctgcggcgaccgcgccaccggcaagcactacggcgcctcctcctgcgacggctgcaagggcttcttccgccgctccgtccgcaagaaccacatgtactcctgccgcttctcccgccagtgcgtcgtcgacaaggacaagcgcaaccagtgccgctactgccgcctcaagaagtgcttccgcgccggcatgaagaaggaggccgtccagaacgagcgcgaccgcatctccacccgccgcgccgcctacgaggactcctccctcccctccatcaacgccctcctccaggccgaggtcctctcccgccagatcacctcccccgtctccggcatcaacggcgacatccgcgccaagaagatcgcctccatcgccgacgtctgcgagtccatgaaggagcagctcctcgtcctcgtcgagtgggccaagtacatccccgccttctgcgagctccccctcgacgaccaggtcgccctcctccgcgcccacgccggcgagcacctcctcctcggcgccaccaagcgctccatggtcttcaaggacgtcctcctcctcggcaacgactacatcgtcccccgccactgccccgagctcgccgagatgtcccgcgtctccatccgcatcctcgacgagctcgtcctccccttccaggagctccagatcgacgacaacgagtacgcctacctcaaggccatcatcttcttcgaccccgacgccaagggcctctccgaccccggcaagatcaagcgcctccgcgcccaggtccaggtctccctcgaggactacatcaacgaccgccagtacgactcccgcggccgcttcggcgagctcctcctcctcctccccaccctccagtccatcacctggcagatgatcgagcagatccagttcatcaagctcttcggcatggccaagatcgacaacctcctccaggagatgctcctcggcggctccccctccgacgccccccacgcccaccaccccctccacccccacctcatgcaggagcacatgggcaccaacgtcatcgtcgccaacaccatgcccacccacctctccaacggccagatgtgcgagtggccccgcccccgcggccaggccgccacccccgagaccccccagccctccccccccggcggctccggctccgagccctacaagctcctccccggcgccgtcgccaccatcgtccgccccctctccgccatcccccagcccaccatcaccaagcaggaggtcatctga

SEQ ID NO: 1265 - RNA, 1314 nt, synthetic construct
  misc_feature 1..1314: note = CDS (opt2) from Homo sapiens__NP_000448.3__HNF4A(39-474)(S142A_S143A_S167A_S313A _S378A_T429A_T432A_S436A_K458R)
  source 1..1314: mol_type = other RNA
atggacacctccccctccgagggcaccaacctcaacgcccccaactccctcggcgtctccgccctctgcgccatctgcggcgaccgcgccaccggcaagcactacggcgcctcctcctgcgacggctgcaagggcttcttccgccgctccgtccgcaagaaccacatgtactcctgccgcttctcccgccagtgcgtcgtcgacaaggacaagcgcaaccagtgccgctactgccgcctcaagaagtgcttccgcgccggcatgaagaaggaggccgtccagaacgagcgcgaccgcatctccacccgccgcgccgcctacgaggactcctccctcccctccatcaacgccctcctccaggccgaggtcctctcccgccagatcaccgcccccgtctccggcatcaacggcgacatccgcgccaagaagatcgcctccatcgccgacgtctgcgagtccatgaaggagcagctcctcgtcctcgtcgagtgggccaagtacatccccgccttctgcgagctccccctcgacgaccaggtcgccctcctccgcgcccacgccggcgagcacctcctcctcggcgccaccaagcgctccatggtcttcaaggacgtcctcctcctcggcaacgactacatcgtcccccgccactgccccgagctcgccgagatgtcccgcgtctccatccgcatcctcgacgagctcgtcctccccttccaggagctccagatcgacgacaacgagtacgcctacctcaaggccatcatcttcttcgaccccgacgccaagggcctctccgaccccggcaagatcaagcgcctccgcgcccaggtccaggtctccctcgaggactacatcaacgaccgccagtacgactcccgcggccgcttcggcgagctcctcctcctcctccccaccctccagtccatcacctggcagatgatcgagcagatccagttcatcaagctcttcggcatggccaagatcgacaacctcctccaggagatgctcctcggcggcgccccctccgacgccccccacgcccaccaccccctccacccccacctcatgcaggagcacatgggcaccaacgtcatcgtcgccaacaccatgcccacccacctctccaacggccagatgtgcgagtggccccgcccccgcggccaggccgccgcccccgaggccccccagcccgccccccccggcggctccggctccgagccctacaagctcctccccggcgccgtcgccaccatcgtccgccccctctccgccatcccccagcccaccatcaccaagcaggaggtcatctga

SEQ ID NO: 1266 - RNA, 1314 nt, synthetic construct
  misc_feature 1..1314: note = CDS (opt2) from Homo sapiens__NP_000448.3__HNF4A(39-474)(S142A_S143A_S148A_S167A _S313A_S378A_T429A_T432A_S436A_K458R)
  source 1..1314: mol_type = other RNA
atggacacctccccctccgagggcaccaacctcaacgcccccaactccctcggcgtctccgccctctgcgccatctgcggcgaccgcgccaccggcaagcactacggcgcctcctcctgcgacggctgcaagggcttcttccgccgctccgtccgcaagaaccacatgtactcctgccgcttctcccgccagtgcgtcgtcgacaaggacaagcgcaaccagtgccgctactgccgcctcaagaagtgcttccgcgccggcatgaagaaggaggccgtccagaacgagcgcgaccgcatctccacccgccgcgccgcctacgaggactccgccctcccctccatcaacgccctcctccaggccgaggtcctctcccgccagatcaccgcccccgtctccggcatcaacggcgacatccgcgccaagaagatcgcctccatcgccgacgtctgcgagtccatgaaggagcagctcctcgtcctcgtcgagtgggccaagtacatccccgccttctgcgagctccccctcgacgaccaggtcgccctcctccgcgcccacgccggcgagcacctcctcctcggcgccaccaagcgctccatggtcttcaaggacgtcctcctcctcggcaacgactacatcgtcccccgccactgccccgagctcgccgagatgtcccgcgtctccatccgcatcctcgacgagctcgtcctccccttccaggagctccagatcgacgacaacgagtacgcctacctcaaggccatcatcttcttcgaccccgacgccaagggcctctccgaccccggcaagatcaagcgcctccgcgcccaggtccaggtctccctcgaggactacatcaacgaccgccagtacgactcccgcggccgcttcggcgagctcctcctcctcctccccaccctccagtccatcacctggcagatgatcgagcagatccagttcatcaagctcttcggcatggccaagatcgacaacctcctccaggagatgctcctcggcggcgccccctccgacgccccccacgcccaccaccccctccacccccacctcatgcaggagcacatgggcaccaacgtcatcgtcgccaacaccatgcccacccacctctccaacggccagatgtgcgagtggccccgcccccgcggccaggccgccgcccccgaggccccccagcccgccccccccggcggctccggctccgagccctacaagctcctccccggcgccgtcgccaccatcgtccgccccctctccgccatcccccagcccaccatcaccaagcaggaggtcatctga

SEQ ID NO: 1267 - RNA, 1314 nt, synthetic construct
  misc_feature 1..1314: note = CDS (opt2) from Homo sapiens__NP_000448.3__HNF4A(39-474)(K106R_K108R_K126R_K127R _S142A_S143A_S148A_S167A_S313A_S378A_T429A_T432A_S436A_K458 R)
  source 1..1314: mol_type = other RNA
atggacacctccccctccgagggcaccaacctcaacgcccccaactccctcggcgtctccgccctctgcgccatctgcggcgaccgcgccaccggcaagcactacggcgcctcctcctgcgacggctgcaagggcttcttccgccgctccgtccgcaagaaccacatgtactcctgccgcttctcccgccagtgcgtcgtcgaccgcgaccgccgcaaccagtgccgctactgccgcctcaagaagtgcttccgcgccggcatgcgccgcgaggccgtccagaacgagcgcgaccgcatctccacccgccgcgccgcctacgaggactccgccctcccctccatcaacgccctcctccaggccgaggtcctctcccgccagatcaccgcccccgtctccggcatcaacggcgacatccgcgccaagaagatcgcctccatcgccgacgtctgcgagtccatgaaggagcagctcctcgtcctcgtcgagtgggccaagtacatccccgccttctgcgagctccccctcgacgaccaggtcgccctcctccgcgcccacgccggcgagcacctcctcctcggcgccaccaagcgctccatggtcttcaaggacgtcctcctcctcggcaacgactacatcgtcccccgccactgccccgagctcgccgagatgtcccgcgtctccatccgcatcctcgacgagctcgtcctccccttccaggagctccagatcgacgacaacgagtacgcctacctcaaggccatcatcttcttcgaccccgacgccaagggcctctccgaccccggcaagatcaagcgcctccgcgcccaggtccaggtctccctcgaggactacatcaacgaccgccagtacgactcccgcggccgcttcggcgagctcctcctcctcctccccaccctccagtccatcacctggcagatgatcgagcagatccagttcatcaagctcttcggcatggccaagatcgacaacctcctccaggagatgctcctcggcggcgccccctccgacgccccccacgcccaccaccccctccacccccacctcatgcaggagcacatgggcaccaacgtcatcgtcgccaacaccatgcccacccacctctccaacggccagatgtgcgagtggccccgcccccgcggccaggccgccgcccccgaggccccccagcccgccccccccggcggctccggctccgagccctacaagctcctccccggcgccgtcgccaccatcgtccgccccctctccgccatcccccagcccaccatcaccaagcaggaggtcatctga

SEQ ID NO: 1268 - RNA, 1314 nt, synthetic construct
  misc_feature 1..1314: note = CDS (opt2) from Homo sapiens__NP_000448.3__HNF4A(39-474)(S142A_S143A_S148A_T166A _S167A_S313A_S378A_T429A_T432A_S436A_K458R)
  source 1..1314: mol_type = other RNA
atggacacctccccctccgagggcaccaacctcaacgcccccaactccctcggcgtctccgccctctgcgccatctgcggcgaccgcgccaccggcaagcactacggcgcctcctcctgcgacggctgcaagggcttcttccgccgctccgtccgcaagaaccacatgtactcctgccgcttctcccgccagtgcgtcgtcgacaaggacaagcgcaaccagtgccgctactgccgcctcaagaagtgcttccgcgccggcatgaagaaggaggccgtccagaacgagcgcgaccgcatctccacccgccgcgccgcctacgaggactccgccctcccctccatcaacgccctcctccaggccgaggtcctctcccgccagatcgccgcccccgtctccggcatcaacggcgacatccgcgccaagaagatcgcctccatcgccgacgtctgcgagtccatgaaggagcagctcctcgtcctcgtcgagtgggccaagtacatccccgccttctgcgagctccccctcgacgaccaggtcgccctcctccgcgcccacgccggcgagcacctcctcctcggcgccaccaagcgctccatggtcttcaaggacgtcctcctcctcggcaacgactacatcgtcccccgccactgccccgagctcgccgagatgtcccgcgtctccatccgcatcctcgacgagctcgtcctccccttccaggagctccagatcgacgacaacgagtacgcctacctcaaggccatcatcttcttcgaccccgacgccaagggcctctccgaccccggcaagatcaagcgcctccgcgcccaggtccaggtctccctcgaggactacatcaacgaccgccagtacgactcccgcggccgcttcggcgagctcctcctcctcctccccaccctccagtccatcacctggcagatgatcgagcagatccagttcatcaagctcttcggcatggccaagatcgacaacctcctccaggagatgctcctcggcggcgccccctccgacgccccccacgcccaccaccccctccacccccacctcatgcaggagcacatgggcaccaacgtcatcgtcgccaacaccatgcccacccacctctccaacggccagatgtgcgagtggccccgcccccgcggccaggccgccgcccccgaggccccccagcccgccccccccggcggctccggctccgagccctacaagctcctccccggcgccgtcgccaccatcgtccgccccctctccgccatcccccagcccaccatcaccaagcaggaggtcatctga

SEQ ID NO: 1269 - RNA, 1314 nt, synthetic construct
  misc_feature 1..1314: note = CDS (opt2) from Homo sapiens__NP_000448.3__HNF4A(39-474)(S87A_S142A_S143A_S148A_ T166A_S167A_S313A_S378A_T429A_T432A_S436A_K458R)
  source 1..1314: mol_type = other RNA
atggacacctccccctccgagggcaccaacctcaacgcccccaactccctcggcgtctccgccctctgcgccatctgcggcgaccgcgccaccggcaagcactacggcgcctcctcctgcgacggctgcaagggcttcttccgccgcgccgtccgcaagaaccacatgtactcctgccgcttctcccgccagtgcgtcgtcgacaaggacaagcgcaaccagtgccgctactgccgcctcaagaagtgcttccgcgccggcatgaagaaggaggccgtccagaacgagcgcgaccgcatctccacccgccgcgccgcctacgaggactccgccctcccctccatcaacgccctcctccaggccgaggtcctctcccgccagatcgccgcccccgtctccggcatcaacggcgacatccgcgccaagaagatcgcctccatcgccgacgtctgcgagtccatgaaggagcagctcctcgtcctcgtcgagtgggccaagtacatccccgccttctgcgagctccccctcgacgaccaggtcgccctcctccgcgcccacgccggcgagcacctcctcctcggcgccaccaagcgctccatggtcttcaaggacgtcctcctcctcggcaacgactacatcgtcccccgccactgccccgagctcgccgagatgtcccgcgtctccatccgcatcctcgacgagctcgtcctccccttccaggagctccagatcgacgacaacgagtacgcctacctcaaggccatcatcttcttcgaccccgacgccaagggcctctccgaccccggcaagatcaagcgcctccgcgcccaggtccaggtctccctcgaggactacatcaacgaccgccagtacgactcccgcggccgcttcggcgagctcctcctcctcctccccaccctccagtccatcacctggcagatgatcgagcagatccagttcatcaagctcttcggcatggccaagatcgacaacctcctccaggagatgctcctcggcggcgccccctccgacgccccccacgcccaccaccccctccacccccacctcatgcaggagcacatgggcaccaacgtcatcgtcgccaacaccatgcccacccacctctccaacggccagatgtgcgagtggccccgcccccgcggccaggccgccgcccccgaggccccccagcccgccccccccggcggctccggctccgagccctacaagctcctccccggcgccgtcgccaccatcgtccgccccctctccgccatcccccagcccaccatcaccaagcaggaggtcatctga

SEQ ID NO: 1270 - RNA, 1314 nt, synthetic construct
  misc_feature 1..1314: note = CDS (opt2) from Homo sapiens__NP_000448.3__HNF4A(39-474)(S87A_K106R_K108R_K126R_ K127R_S142A_S143A_S148A_T166A_S167A_S313A_S378A_T429A_T432A _S436A_K458R)
  source 1..1314: mol_type = other RNA
atggacacctccccctccgagggcaccaacctcaacgcccccaactccctcggcgtctccgccctctgcgccatctgcggcgaccgcgccaccggcaagcactacggcgcctcctcctgcgacggctgcaagggcttcttccgccgcgccgtccgcaagaaccacatgtactcctgccgcttctcccgccagtgcgtcgtcgaccgcgaccgccgcaaccagtgccgctactgccgcctcaagaagtgcttccgcgccggcatgcgccgcgaggccgtccagaacgagcgcgaccgcatctccacccgccgcgccgcctacgaggactccgccctcccctccatcaacgccctcctccaggccgaggtcctctcccgccagatcgccgcccccgtctccggcatcaacggcgacatccgcgccaagaagatcgcctccatcgccgacgtctgcgagtccatgaaggagcagctcctcgtcctcgtcgagtgggccaagtacatccccgccttctgcgagctccccctcgacgaccaggtcgccctcctccgcgcccacgccggcgagcacctcctcctcggcgccaccaagcgctccatggtcttcaaggacgtcctcctcctcggcaacgactacatcgtcccccgccactgccccgagctcgccgagatgtcccgcgtctccatccgcatcctcgacgagctcgtcctccccttccaggagctccagatcgacgacaacgagtacgcctacctcaaggccatcatcttcttcgaccccgacgccaagggcctctccgaccccggcaagatcaagcgcctccgcgcccaggtccaggtctccctcgaggactacatcaacgaccgccagtacgactcccgcggccgcttcggcgagctcctcctcctcctccccaccctccagtccatcacctggcagatgatcgagcagatccagttcatcaagctcttcggcatggccaagatcgacaacctcctccaggagatgctcctcggcggcgccccctccgacgccccccacgcccaccaccccctccacccccacctcatgcaggagcacatgggcaccaacgtcatcgtcgccaacaccatgcccacccacctctccaacggccagatgtgcgagtggccccgcccccgcggccaggccgccgcccccgaggccccccagcccgccccccccggcggctccggctccgagccctacaagctcctccccggcgccgtcgccaccatcgtccgccccctctccgccatcccccagcccaccatcaccaagcaggaggtcatctga

SEQ ID NO: 1271 - RNA, 1314 nt, synthetic construct
  misc_feature 1..1314: note = CDS (opt2) from Homo sapiens__NP_000448.3__HNF4A(39-474)(S87A_K106R_K108R_K126R_ K127R)
  source 1..1314: mol_type = other RNA
atggacacctccccctccgagggcaccaacctcaacgcccccaactccctcggcgtctccgccctctgcgccatctgcggcgaccgcgccaccggcaagcactacggcgcctcctcctgcgacggctgcaagggcttcttccgccgcgccgtccgcaagaaccacatgtactcctgccgcttctcccgccagtgcgtcgtcgaccgcgaccgccgcaaccagtgccgctactgccgcctcaagaagtgcttccgcgccggcatgcgccgcgaggccgtccagaacgagcgcgaccgcatctccacccgccgctcctcctacgaggactcctccctcccctccatcaacgccctcctccaggccgaggtcctctcccgccagatcacctcccccgtctccggcatcaacggcgacatccgcgccaagaagatcgcctccatcgccgacgtctgcgagtccatgaaggagcagctcctcgtcctcgtcgagtgggccaagtacatccccgccttctgcgagctccccctcgacgaccaggtcgccctcctccgcgcccacgccggcgagcacctcctcctcggcgccaccaagcgctccatggtcttcaaggacgtcctcctcctcggcaacgactacatcgtcccccgccactgccccgagctcgccgagatgtcccgcgtctccatccgcatcctcgacgagctcgtcctccccttccaggagctccagatcgacgacaacgagtacgcctacctcaaggccatcatcttcttcgaccccgacgccaagggcctctccgaccccggcaagatcaagcgcctccgctcccaggtccaggtctccctcgaggactacatcaacgaccgccagtacgactcccgcggccgcttcggcgagctcctcctcctcctccccaccctccagtccatcacctggcagatgatcgagcagatccagttcatcaagctcttcggcatggccaagatcgacaacctcctccaggagatgctcctcggcggctccccctccgacgccccccacgcccaccaccccctccacccccacctcatgcaggagcacatgggcaccaacgtcatcgtcgccaacaccatgcccacccacctctccaacggccagatgtgcgagtggccccgcccccgcggccaggccgccacccccgagaccccccagccctccccccccggcggctccggctccgagccctacaagctcctccccggcgccgtcgccaccatcgtcaagcccctctccgccatcccccagcccaccatcaccaagcaggaggtcatctga

SEQ ID NO: 1272 - RNA, 1314 nt, synthetic construct
  misc_feature 1..1314: note = CDS (opt2) from Homo sapiens__NP_000448.3__HNF4A(39-474)(S87A_K106R_K108R_K126R_ K127R_S142A_S143A_S148A_T166A_S167A_S313A_S378A_T429A_T432A _S436A_K458R_S461A)
  source 1..1314: mol_type = other RNA
atggacacctccccctccgagggcaccaacctcaacgcccccaactccctcggcgtctccgccctctgcgccatctgcggcgaccgcgccaccggcaagcactacggcgcctcctcctgcgacggctgcaagggcttcttccgccgcgccgtccgcaagaaccacatgtactcctgccgcttctcccgccagtgcgtcgtcgaccgcgaccgccgcaaccagtgccgctactgccgcctcaagaagtgcttccgcgccggcatgcgccgcgaggccgtccagaacgagcgcgaccgcatctccacccgccgcgccgcctacgaggactccgccctcccctccatcaacgccctcctccaggccgaggtcctctcccgccagatcgccgcccccgtctccggcatcaacggcgacatccgcgccaagaagatcgcctccatcgccgacgtctgcgagtccatgaaggagcagctcctcgtcctcgtcgagtgggccaagtacatccccgccttctgcgagctccccctcgacgaccaggtcgccctcctccgcgcccacgccggcgagcacctcctcctcggcgccaccaagcgctccatggtcttcaaggacgtcctcctcctcggcaacgactacatcgtcccccgccactgccccgagctcgccgagatgtcccgcgtctccatccgcatcctcgacgagctcgtcctccccttccaggagctccagatcgacgacaacgagtacgcctacctcaaggccatcatcttcttcgaccccgacgccaagggcctctccgaccccggcaagatcaagcgcctccgcgcccaggtccaggtctccctcgaggactacatcaacgaccgccagtacgactcccgcggccgcttcggcgagctcctcctcctcctccccaccctccagtccatcacctggcagatgatcgagcagatccagttcatcaagctcttcggcatggccaagatcgacaacctcctccaggagatgctcctcggcggcgccccctccgacgccccccacgcccaccaccccctccacccccacctcatgcaggagcacatgggcaccaacgtcatcgtcgccaacaccatgcccacccacctctccaacggccagatgtgcgagtggccccgcccccgcggccaggccgccgcccccgaggccccccagcccgccccccccggcggctccggctccgagccctacaagctcctccccggcgccgtcgccaccatcgtccgccccctcgccgccatcccccagcccaccatcaccaagcaggaggtcatctga

SEQ ID NO: 1273 - RNA, 1314 nt, synthetic construct
  misc_feature 1..1314: note = CDS (opt2) from Homo sapiens__NP_000448.3__HNF4A(39-474)(S87A_K106R_K108R_K126R_ K127R_S142A_S143A_S148A_T166A_S167A_S313A_S378A_T429A_T432A _S436A_K458R_S461E)
  source 1..1314: mol_type = other RNA
atggacacctccccctccgagggcaccaacctcaacgcccccaactccctcggcgtctccgccctctgcgccatctgcggcgaccgcgccaccggcaagcactacggcgcctcctcctgcgacggctgcaagggcttcttccgccgcgccgtccgcaagaaccacatgtactcctgccgcttctcccgccagtgcgtcgtcgaccgcgaccgccgcaaccagtgccgctactgccgcctcaagaagtgcttccgcgccggcatgcgccgcgaggccgtccagaacgagcgcgaccgcatctccacccgccgcgccgcctacgaggactccgccctcccctccatcaacgccctcctccaggccgaggtcctctcccgccagatcgccgcccccgtctccggcatcaacggcgacatccgcgccaagaagatcgcctccatcgccgacgtctgcgagtccatgaaggagcagctcctcgtcctcgtcgagtgggccaagtacatccccgccttctgcgagctccccctcgacgaccaggtcgccctcctccgcgcccacgccggcgagcacctcctcctcggcgccaccaagcgctccatggtcttcaaggacgtcctcctcctcggcaacgactacatcgtcccccgccactgccccgagctcgccgagatgtcccgcgtctccatccgcatcctcgacgagctcgtcctccccttccaggagctccagatcgacgacaacgagtacgcctacctcaaggccatcatcttcttcgaccccgacgccaagggcctctccgaccccggcaagatcaagcgcctccgcgcccaggtccaggtctccctcgaggactacatcaacgaccgccagtacgactcccgcggccgcttcggcgagctcctcctcctcctccccaccctccagtccatcacctggcagatgatcgagcagatccagttcatcaagctcttcggcatggccaagatcgacaacctcctccaggagatgctcctcggcggcgccccctccgacgccccccacgcccaccaccccctccacccccacctcatgcaggagcacatgggcaccaacgtcatcgtcgccaacaccatgcccacccacctctccaacggccagatgtgcgagtggccccgcccccgcggccaggccgccgcccccgaggccccccagcccgccccccccggcggctccggctccgagccctacaagctcctccccggcgccgtcgccaccatcgtccgccccctcgaggccatcccccagcccaccatcaccaagcaggaggtcatctga

SEQ ID NO: 1274 - RNA, 1314 nt, synthetic construct
  misc_feature 1..1314: note = CDS (opt2) from Homo sapiens__NP_000448.3__HNF4A(39-474)(S87A_K106R_K108R_K126R_ K127R_S142A_S143A_S148E_T166A_S167E_S313A_S378E_T429E_T432E _S436E_K458R_S461E)
  source 1..1314: mol_type = other RNA
atggacacctccccctccgagggcaccaacctcaacgcccccaactccctcggcgtctccgccctctgcgccatctgcggcgaccgcgccaccggcaagcactacggcgcctcctcctgcgacggctgcaagggcttcttccgccgcgccgtccgcaagaaccacatgtactcctgccgcttctcccgccagtgcgtcgtcgaccgcgaccgccgcaaccagtgccgctactgccgcctcaagaagtgcttccgcgccggcatgcgccgcgaggccgtccagaacgagcgcgaccgcatctccacccgccgcgccgcctacgaggactccgagctcccctccatcaacgccctcctccaggccgaggtcctctcccgccagatcgccgagcccgtctccggcatcaacggcgacatccgcgccaagaagatcgcctccatcgccgacgtctgcgagtccatgaaggagcagctcctcgtcctcgtcgagtgggccaagtacatccccgccttctgcgagctccccctcgacgaccaggtcgccctcctccgcgcccacgccggcgagcacctcctcctcggcgccaccaagcgctccatggtcttcaaggacgtcctcctcctcggcaacgactacatcgtcccccgccactgccccgagctcgccgagatgtcccgcgtctccatccgcatcctcgacgagctcgtcctccccttccaggagctccagatcgacgacaacgagtacgcctacctcaaggccatcatcttcttcgaccccgacgccaagggcctctccgaccccggcaagatcaagcgcctccgcgcccaggtccaggtctccctcgaggactacatcaacgaccgccagtacgactcccgcggccgcttcggcgagctcctcctcctcctccccaccctccagtccatcacctggcagatgatcgagcagatccagttcatcaagctcttcggcatggccaagatcgacaacctcctccaggagatgctcctcggcggcgagccctccgacgccccccacgcccaccaccccctccacccccacctcatgcaggagcacatgggcaccaacgtcatcgtcgccaacaccatgcccacccacctctccaacggccagatgtgcgagtggccccgcccccgcggccaggccgccgagcccgaggagccccagcccgagccccccggcggctccggctccgagccctacaagctcctccccggcgccgtcgccaccatcgtccgccccctcgaggccatcccccagcccaccatcaccaagcaggaggtcatctga

SEQ ID NO: 1275 - RNA, 1314 nt, synthetic construct
  misc_feature 1..1314: note = CDS (opt2) from Homo sapiens__NP_000448.3__HNF4A(39-474)(S87A_K106R_K108R_K126R_ K127R_S142A_S143A_S148A_T166A_S167A_K179R_K180R_S313A_S378A _T429A_T432A_S436A_K458R_S461E)
  source 1..1314: mol_type = other RNA
atggacacctccccctccgagggcaccaacctcaacgcccccaactccctcggcgtctccgccctctgcgccatctgcggcgaccgcgccaccggcaagcactacggcgcctcctcctgcgacggctgcaagggcttcttccgccgcgccgtccgcaagaaccacatgtactcctgccgcttctcccgccagtgcgtcgtcgaccgcgaccgccgcaaccagtgccgctactgccgcctcaagaagtgcttccgcgccggcatgcgccgcgaggccgtccagaacgagcgcgaccgcatctccacccgccgcgccgcctacgaggactccgccctcccctccatcaacgccctcctccaggccgaggtcctctcccgccagatcgccgcccccgtctccggcatcaacggcgacatccgcgcccgccgcatcgcctccatcgccgacgtctgcgagtccatgaaggagcagctcctcgtcctcgtcgagtgggccaagtacatccccgccttctgcgagctccccctcgacgaccaggtcgccctcctccgcgcccacgccggcgagcacctcctcctcggcgccaccaagcgctccatggtcttcaaggacgtcctcctcctcggcaacgactacatcgtcccccgccactgccccgagctcgccgagatgtcccgcgtctccatccgcatcctcgacgagctcgtcctccccttccaggagctccagatcgacgacaacgagtacgcctacctcaaggccatcatcttcttcgaccccgacgccaagggcctctccgaccccggcaagatcaagcgcctccgcgcccaggtccaggtctccctcgaggactacatcaacgaccgccagtacgactcccgcggccgcttcggcgagctcctcctcctcctccccaccctccagtccatcacctggcagatgatcgagcagatccagttcatcaagctcttcggcatggccaagatcgacaacctcctccaggagatgctcctcggcggcgccccctccgacgccccccacgcccaccaccccctccacccccacctcatgcaggagcacatgggcaccaacgtcatcgtcgccaacaccatgcccacccacctctccaacggccagatgtgcgagtggccccgcccccgcggccaggccgccgcccccgaggccccccagcccgccccccccggcggctccggctccgagccctacaagctcctccccggcgccgtcgccaccatcgtccgccccctcgaggccatcccccagcccaccatcaccaagcaggaggtcatctga

SEQ ID NO: 1276 - RNA, 1314 nt, synthetic construct
  misc_feature 1..1314: note = CDS (opt2) from Homo sapiens__NP_000448.3__HNF4A(39-474)(S87A_K106R_K108R_K126R_ K127R_S142A_S143A_S148A_T166A_S167A_K300R_K307R_K309R_S313A _S378A_T429A_T432A_S436A_K458R_S461E)
  source 1..1314: mol_type = other RNA
atggacacctccccctccgagggcaccaacctcaacgcccccaactccctcggcgtctccgccctctgcgccatctgcggcgaccgcgccaccggcaagcactacggcgcctcctcctgcgacggctgcaagggcttcttccgccgcgccgtccgcaagaaccacatgtactcctgccgcttctcccgccagtgcgtcgtcgaccgcgaccgccgcaaccagtgccgctactgccgcctcaagaagtgcttccgcgccggcatgcgccgcgaggccgtccagaacgagcgcgaccgcatctccacccgccgcgccgcctacgaggactccgccctcccctccatcaacgccctcctccaggccgaggtcctctcccgccagatcgccgcccccgtctccggcatcaacggcgacatccgcgccaagaagatcgcctccatcgccgacgtctgcgagtccatgaaggagcagctcctcgtcctcgtcgagtgggccaagtacatccccgccttctgcgagctccccctcgacgaccaggtcgccctcctccgcgcccacgccggcgagcacctcctcctcggcgccaccaagcgctccatggtcttcaaggacgtcctcctcctcggcaacgactacatcgtcccccgccactgccccgagctcgccgagatgtcccgcgtctccatccgcatcctcgacgagctcgtcctccccttccaggagctccagatcgacgacaacgagtacgcctacctcaaggccatcatcttcttcgaccccgacgcccgcggcctctccgaccccggccgcatccgccgcctccgcgcccaggtccaggtctccctcgaggactacatcaacgaccgccagtacgactcccgcggccgcttcggcgagctcctcctcctcctccccaccctccagtccatcacctggcagatgatcgagcagatccagttcatcaagctcttcggcatggccaagatcgacaacctcctccaggagatgctcctcggcggcgccccctccgacgccccccacgcccaccaccccctccacccccacctcatgcaggagcacatgggcaccaacgtcatcgtcgccaacaccatgcccacccacctctccaacggccagatgtgcgagtggccccgcccccgcggccaggccgccgcccccgaggccccccagcccgccccccccggcggctccggctccgagccctacaagctcctccccggcgccgtcgccaccatcgtccgccccctcgaggccatcccccagcccaccatcaccaagcaggaggtcatctga

SEQ ID NO: 1277 - RNA, 1314 nt, synthetic construct
  misc_feature 1..1314: note = CDS (opt2) from Homo sapiens__NP_000448.3__HNF4A(39-474)(S87A_K106R_K108R_K126R_ K127R_S142A_S143A_S148A_T166A_S167A_S313A_S378A_T429A_T432A _S436A_K447R_K458R_S461E_K470R)
  source 1..1314: mol_type = other RNA
atggacacctccccctccgagggcaccaacctcaacgcccccaactccctcggcgtctccgccctctgcgccatctgcggcgaccgcgccaccggcaagcactacggcgcctcctcctgcgacggctgcaagggcttcttccgccgcgccgtccgcaagaaccacatgtactcctgccgcttctcccgccagtgcgtcgtcgaccgcgaccgccgcaaccagtgccgctactgccgcctcaagaagtgcttccgcgccggcatgcgccgcgaggccgtccagaacgagcgcgaccgcatctccacccgccgcgccgcctacgaggactccgccctcccctccatcaacgccctcctccaggccgaggtcctctcccgccagatcgccgcccccgtctccggcatcaacggcgacatccgcgccaagaagatcgcctccatcgccgacgtctgcgagtccatgaaggagcagctcctcgtcctcgtcgagtgggccaagtacatccccgccttctgcgagctccccctcgacgaccaggtcgccctcctccgcgcccacgccggcgagcacctcctcctcggcgccaccaagcgctccatggtcttcaaggacgtcctcctcctcggcaacgactacatcgtcccccgccactgccccgagctcgccgagatgtcccgcgtctccatccgcatcctcgacgagctcgtcctccccttccaggagctccagatcgacgacaacgagtacgcctacctcaaggccatcatcttcttcgaccccgacgccaagggcctctccgaccccggcaagatcaagcgcctccgcgcccaggtccaggtctccctcgaggactacatcaacgaccgccagtacgactcccgcggccgcttcggcgagctcctcctcctcctccccaccctccagtccatcacctggcagatgatcgagcagatccagttcatcaagctcttcggcatggccaagatcgacaacctcctccaggagatgctcctcggcggcgccccctccgacgccccccacgcccaccaccccctccacccccacctcatgcaggagcacatgggcaccaacgtcatcgtcgccaacaccatgcccacccacctctccaacggccagatgtgcgagtggccccgcccccgcggccaggccgccgcccccgaggccccccagcccgccccccccggcggctccggctccgagccctaccgcctcctccccggcgccgtcgccaccatcgtccgccccctcgaggccatcccccagcccaccatcacccgccaggaggtcatctga

SEQ ID NO: 1278 - RNA, 1314 nt, synthetic construct
  misc_feature 1..1314: note = CDS (opt2) from Homo sapiens__NP_000448.3__HNF4A(39-474)(S87A_K106R_K108R_K126R_ K127R_S142A_S143A_S148A_T166A_S167A_K179R_K180R_K234R_K300R _K307R_K309R_S313A_S378A_T429A_T432A_S436A_K447R_K458R_S461 E_K470R)
  source 1..1314: mol_type = other RNA
atggacacctccccctccgagggcaccaacctcaacgcccccaactccctcggcgtctccgccctctgcgccatctgcggcgaccgcgccaccggcaagcactacggcgcctcctcctgcgacggctgcaagggcttcttccgccgcgccgtccgcaagaaccacatgtactcctgccgcttctcccgccagtgcgtcgtcgaccgcgaccgccgcaaccagtgccgctactgccgcctcaagaagtgcttccgcgccggcatgcgccgcgaggccgtccagaacgagcgcgaccgcatctccacccgccgcgccgcctacgaggactccgccctcccctccatcaacgccctcctccaggccgaggtcctctcccgccagatcgccgcccccgtctccggcatcaacggcgacatccgcgcccgccgcatcgcctccatcgccgacgtctgcgagtccatgaaggagcagctcctcgtcctcgtcgagtgggccaagtacatccccgccttctgcgagctccccctcgacgaccaggtcgccctcctccgcgcccacgccggcgagcacctcctcctcggcgccacccgccgctccatggtcttcaaggacgtcctcctcctcggcaacgactacatcgtcccccgccactgccccgagctcgccgagatgtcccgcgtctccatccgcatcctcgacgagctcgtcctccccttccaggagctccagatcgacgacaacgagtacgcctacctcaaggccatcatcttcttcgaccccgacgcccgcggcctctccgaccccggccgcatccgccgcctccgcgcccaggtccaggtctccctcgaggactacatcaacgaccgccagtacgactcccgcggccgcttcggcgagctcctcctcctcctccccaccctccagtccatcacctggcagatgatcgagcagatccagttcatcaagctcttcggcatggccaagatcgacaacctcctccaggagatgctcctcggcggcgccccctccgacgccccccacgcccaccaccccctccacccccacctcatgcaggagcacatgggcaccaacgtcatcgtcgccaacaccatgcccacccacctctccaacggccagatgtgcgagtggccccgcccccgcggccaggccgccgcccccgaggccccccagcccgccccccccggcggctccggctccgagccctaccgcctcctccccggcgccgtcgccaccatcgtccgccccctcgaggccatcccccagcccaccatcacccgccaggaggtcatctga

SEQ ID NO: 1279 - RNA, 1314 nt, synthetic construct
  misc_feature 1..1314: note = CDS (opt2) from Homo sapiens__NP_000448.3__HNF4A(39-474)(S87A_S95A_S99A_K106R_K1 08R_K126R_K127R_S142A_S143A_S148A_T166A_S167A_S313A_S378A_T 429A_T432A_S436A_K458R_S461E)
  source 1..1314: mol_type = other RNA
atggacacctccccctccgagggcaccaacctcaacgcccccaactccctcggcgtctccgccctctgcgccatctgcggcgaccgcgccaccggcaagcactacggcgcctcctcctgcgacggctgcaagggcttcttccgccgcgccgtccgcaagaaccacatgtacgcctgccgcttcgcccgccagtgcgtcgtcgaccgcgaccgccgcaaccagtgccgctactgccgcctcaagaagtgcttccgcgccggcatgcgccgcgaggccgtccagaacgagcgcgaccgcatctccacccgccgcgccgcctacgaggactccgccctcccctccatcaacgccctcctccaggccgaggtcctctcccgccagatcgccgcccccgtctccggcatcaacggcgacatccgcgccaagaagatcgcctccatcgccgacgtctgcgagtccatgaaggagcagctcctcgtcctcgtcgagtgggccaagtacatccccgccttctgcgagctccccctcgacgaccaggtcgccctcctccgcgcccacgccggcgagcacctcctcctcggcgccaccaagcgctccatggtcttcaaggacgtcctcctcctcggcaacgactacatcgtcccccgccactgccccgagctcgccgagatgtcccgcgtctccatccgcatcctcgacgagctcgtcctccccttccaggagctccagatcgacgacaacgagtacgcctacctcaaggccatcatcttcttcgaccccgacgccaagggcctctccgaccccggcaagatcaagcgcctccgcgcccaggtccaggtctccctcgaggactacatcaacgaccgccagtacgactcccgcggccgcttcggcgagctcctcctcctcctccccaccctccagtccatcacctggcagatgatcgagcagatccagttcatcaagctcttcggcatggccaagatcgacaacctcctccaggagatgctcctcggcggcgccccctccgacgccccccacgcccaccaccccctccacccccacctcatgcaggagcacatgggcaccaacgtcatcgtcgccaacaccatgcccacccacctctccaacggccagatgtgcgagtggccccgcccccgcggccaggccgccgcccccgaggccccccagcccgccccccccggcggctccggctccgagccctacaagctcctccccggcgccgtcgccaccatcgtccgccccctcgaggccatcccccagcccaccatcaccaagcaggaggtcatctga

SEQ ID NO: 1280 - RNA, 1314 nt, synthetic construct
  misc_feature 1..1314: note = CDS (opt2) from Homo sapiens__NP_000448.3__HNF4A(39-474)(S87A_K106R_K108R_K126R_ K127R_S138A_T139A_S142A_S143A_S148A_T166A_S167A_S313A_S378A _T429A_T432A_S436A_K458R_S461E)
  source 1..1314: mol_type = other RNA
atggacacctccccctccgagggcaccaacctcaacgcccccaactccctcggcgtctccgccctctgcgccatctgcggcgaccgcgccaccggcaagcactacggcgcctcctcctgcgacggctgcaagggcttcttccgccgcgccgtccgcaagaaccacatgtactcctgccgcttctcccgccagtgcgtcgtcgaccgcgaccgccgcaaccagtgccgctactgccgcctcaagaagtgcttccgcgccggcatgcgccgcgaggccgtccagaacgagcgcgaccgcatcgccgcccgccgcgccgcctacgaggactccgccctcccctccatcaacgccctcctccaggccgaggtcctctcccgccagatcgccgcccccgtctccggcatcaacggcgacatccgcgccaagaagatcgcctccatcgccgacgtctgcgagtccatgaaggagcagctcctcgtcctcgtcgagtgggccaagtacatccccgccttctgcgagctccccctcgacgaccaggtcgccctcctccgcgcccacgccggcgagcacctcctcctcggcgccaccaagcgctccatggtcttcaaggacgtcctcctcctcggcaacgactacatcgtcccccgccactgccccgagctcgccgagatgtcccgcgtctccatccgcatcctcgacgagctcgtcctccccttccaggagctccagatcgacgacaacgagtacgcctacctcaaggccatcatcttcttcgaccccgacgccaagggcctctccgaccccggcaagatcaagcgcctccgcgcccaggtccaggtctccctcgaggactacatcaacgaccgccagtacgactcccgcggccgcttcggcgagctcctcctcctcctccccaccctccagtccatcacctggcagatgatcgagcagatccagttcatcaagctcttcggcatggccaagatcgacaacctcctccaggagatgctcctcggcggcgccccctccgacgccccccacgcccaccaccccctccacccccacctcatgcaggagcacatgggcaccaacgtcatcgtcgccaacaccatgcccacccacctctccaacggccagatgtgcgagtggccccgcccccgcggccaggccgccgcccccgaggccccccagcccgccccccccggcggctccggctccgagccctacaagctcctccccggcgccgtcgccaccatcgtccgccccctcgaggccatcccccagcccaccatcaccaagcaggaggtcatctga

SEQ ID NO: 1281 - RNA, 1314 nt, synthetic construct
  misc_feature 1..1314: note = CDS (opt2) from Homo sapiens__NP_000448.3__HNF4A(39-474)(S87A_S95A_S99A_K106R_K1 08R_K126R_K127R_S138A_T139A_S142A_S143A_S148A_T166A_S167A_S 313A_S378A_T429A_T432A_S436A_K458R_S461E)
  source 1..1314: mol_type = other RNA
atggacacctccccctccgagggcaccaacctcaacgcccccaactccctcggcgtctccgccctctgcgccatctgcggcgaccgcgccaccggcaagcactacggcgcctcctcctgcgacggctgcaagggcttcttccgccgcgccgtccgcaagaaccacatgtacgcctgccgcttcgcccgccagtgcgtcgtcgaccgcgaccgccgcaaccagtgccgctactgccgcctcaagaagtgcttccgcgccggcatgcgccgcgaggccgtccagaacgagcgcgaccgcatcgccgcccgccgcgccgcctacgaggactccgccctcccctccatcaacgccctcctccaggccgaggtcctctcccgccagatcgccgcccccgtctccggcatcaacggcgacatccgcgccaagaagatcgcctccatcgccgacgtctgcgagtccatgaaggagcagctcctcgtcctcgtcgagtgggccaagtacatccccgccttctgcgagctccccctcgacgaccaggtcgccctcctccgcgcccacgccggcgagcacctcctcctcggcgccaccaagcgctccatggtcttcaaggacgtcctcctcctcggcaacgactacatcgtcccccgccactgccccgagctcgccgagatgtcccgcgtctccatccgcatcctcgacgagctcgtcctccccttccaggagctccagatcgacgacaacgagtacgcctacctcaaggccatcatcttcttcgaccccgacgccaagggcctctccgaccccggcaagatcaagcgcctccgcgcccaggtccaggtctccctcgaggactacatcaacgaccgccagtacgactcccgcggccgcttcggcgagctcctcctcctcctccccaccctccagtccatcacctggcagatgatcgagcagatccagttcatcaagctcttcggcatggccaagatcgacaacctcctccaggagatgctcctcggcggcgccccctccgacgccccccacgcccaccaccccctccacccccacctcatgcaggagcacatgggcaccaacgtcatcgtcgccaacaccatgcccacccacctctccaacggccagatgtgcgagtggccccgcccccgcggccaggccgccgcccccgaggccccccagcccgccccccccggcggctccggctccgagccctacaagctcctccccggcgccgtcgccaccatcgtccgccccctcgaggccatcccccagcccaccatcaccaagcaggaggtcatctga

SEQ ID NO: 1282 - RNA, 1314 nt, synthetic construct
  misc_feature 1..1314: note = CDS (opt3) from Homo sapiens__NP_000448.3__HNF4A(39-474)
  source 1..1314: mol_type = other RNA
atggacacctctccttcagaggggacaaacttaaatgcgccaaacagtctgggagtgagcgctctatgcgccatctgtggtgatagggcaactggcaaacactacggggcctcctcttgcgacggatgtaagggctttttccggcgctcggtacgtaaaaatcatatgtattcatgccgatttagcagacaatgtgtggtcgataaggacaaaaggaaccagtgccggtactgtcgcctcaagaagtgcttcagagctggtatgaaaaaggaagcagtgcagaatgagagggatcggattagtacccgccgatcctcttatgaagacagctccctgccgtcaataaacgcccttctgcaggctgaggttttgagtagacaaatcacaagccccgtgtctgggattaatggagatatcagggccaaaaagattgcgtccatcgcagacgtctgtgagtcaatgaaagaacagctcctggtgctggtagagtgggccaagtacatacctgctttttgcgaactcccattagatgaccaggttgccctgcttcgggcacacgctggcgagcatttgctgctaggcgccaccaagcgtagcatggtgttcaaagacgtcctcctgcttgggaacgattatatcgtgccccgccactgtcctgagctggcggaaatgagtagagtgtctattaggatcttggacgagctcgtcctgccatttcaggaattacaaattgatgacaatgagtacgcctacctgaaggcaatcatattctttgatcccgacgctaaaggactctccgatcctggtaagattaaacggcttcgaagccaggttcaggtgtcgctggaagactatatcaacgatcgccagtacgactctagaggcaggttcggggagttgctactgctcctgccaactcttcaatccattacatggcagatgatcgagcagatccaatttattaagctgttcggaatggccaaaatagataatttgctccaggaaatgctgttaggcggttcaccgagtgacgctccccatgcccaccaccctctgcatccacacctaatgcaggagcatatggggaccaacgtaatcgtggcaaatacgatgcccactcacctcagcaacggacagatgtgcgaatggcctcggccacgcggccaagccgctacccccgagacaccgcagccttctcccccaggcgggtccggaagcgaaccttataagctgcttcccggtgcggtcgcaactattgtgaagccattgtcagccatcccccagcctaccataacaaaacaggaggttatttga

SEQ ID NO: 1283 - RNA, 1314 nt, synthetic construct
  misc_feature 1..1314: note = CDS (opt3) from Homo sapiens__NP_000448.3__HNF4A(39-474)(S313A)
  source 1..1314: mol_type = other RNA
atggacacctctccttcagaggggacaaacttaaatgcgccaaacagtctgggagtgagcgctctatgcgccatctgtggtgatagggcaactggcaaacactacggggcctcctcttgcgacggatgtaagggctttttccggcgctcggtacgtaaaaatcatatgtattcatgccgatttagcagacaatgtgtggtcgataaggacaaaaggaaccagtgccggtactgtcgcctcaagaagtgcttcagagctggtatgaaaaaggaagcagtgcagaatgagagggatcggattagtacccgccgatcctcttatgaagacagctccctgccgtcaataaacgcccttctgcaggctgaggttttgagtagacaaatcacaagccccgtgtctgggattaatggagatatcagggccaaaaagattgcgtccatcgcagacgtctgtgagtcaatgaaagaacagctcctggtgctggtagagtgggccaagtacatacctgctttttgcgaactcccattagatgaccaggttgccctgcttcgggcacacgctggcgagcatttgctgctaggcgccaccaagcgtagcatggtgttcaaagacgtcctcctgcttgggaacgattatatcgtgccccgccactgtcctgagctggcggaaatgagtagagtgtctattaggatcttggacgagctcgtcctgccatttcaggaattacaaattgatgacaatgagtacgcctacctgaaggcaatcatattctttgatcccgacgctaaaggactctccgatcctggtaagattaaacggcttcgagcccaggttcaggtgagcctggaagactatatcaacgatcgccagtacgactcgagaggcaggttcggggagttgctactgctcctgccaactcttcaatctattacatggcagatgatcgagcagatccaatttattaagctgttcggaatggctaaaatagataatttgctccaggaaatgctgttaggcggttccccgtcagacgcaccccatgcccaccaccctctgcatccacacctaatgcaggagcatatggggaccaacgtaatcgtggccaatacgatgcccactcacctcagtaacggacagatgtgcgaatggcctcggccacgcggccaagctgcgacccccgagacaccgcagcctagcccacccggcgggtccggatctgaaccttataagctgcttcccggtgcagtcgccactattgtgaagccattgagcgctatcccccagcctaccataacaaaacaggaggttatttga

SEQ ID NO: 1284 - RNA, 1314 nt, synthetic construct
  misc_feature 1..1314: note = CDS (opt3) from Homo sapiens__NP_000448.3__HNF4A(39-474)(S313E)
  source 1..1314: mol_type = other RNA
atggacacctctccttcagaggggacaaacttaaatgcgccaaacagtctgggagtgagcgctctatgcgccatctgtggtgatagggcaactggcaaacactacggggcctcctcttgcgacggatgtaagggctttttccggcgctcggtacgtaaaaatcatatgtattcatgccgatttagcagacaatgtgtggtcgataaggacaaaaggaaccagtgccggtactgtcgcctcaagaagtgcttcagagctggtatgaaaaaggaagcagtgcagaatgagagggatcggattagtacccgccgatcctcttatgaagacagctccctgccgtcaataaacgcccttctgcaggctgaggttttgagtagacaaatcacaagccccgtgtctgggattaatggagatatcagggccaaaaagattgcgtccatcgcagacgtctgtgagtcaatgaaagaacagctcctggtgctggtagagtgggccaagtacatacctgctttttgcgaactcccattagatgaccaggttgccctgcttcgggcacacgctggcgagcatttgctgctaggcgccaccaagcgtagcatggtgttcaaagacgtcctcctgcttgggaacgattatatcgtgccccgccactgtcctgagctggcggaaatgagtagagtgtctattaggatcttggacgagctcgtcctgccatttcaggaattacaaattgatgacaatgagtacgcctacctgaaggcaatcatattctttgatcccgacgctaaaggactctccgatcctggtaagattaaacggcttcgagaacaggttcaggtgagcctggaggactatatcaacgatcgccagtacgactcgagaggcaggttcggggagttgctactgctcctgccaactcttcaatctattacatggcagatgatcgaacagatccaatttattaagctgttcggaatggccaaaatagataatttgctccaggagatgctgttaggcggttccccgtcagacgctccccatgcccaccaccctctgcatccacacctaatgcaggaacatatggggaccaacgtaatcgtggcaaatacgatgcccactcacctcagtaacggacagatgtgcgagtggcctcggccacgcggccaagccgctacccccgaaacaccgcagcctagcccacccggcgggtccggatctgagccttataagctgcttcccggtgcggtcgcaactattgtgaagccattgagcgccatcccccagcctaccataacaaaacaggaggttatttga

SEQ ID NO: 1285 - RNA, 1314 nt, synthetic construct
  misc_feature 1..1314: note = CDS (opt3) from Homo sapiens__NP_000448.3__HNF4A(39-474)(S142A_S143A)
  source 1..1314: mol_type = other RNA
atggacacctctccttcagaggggacaaacttaaatgcgccaaacagtctgggagtgagcgctctatgcgccatctgtggtgatagggcaactggcaaacactacggggcctcctcttgcgacggatgtaagggctttttccggcgctcggtacgtaaaaatcatatgtattcatgccgatttagcagacaatgtgtggtcgataaggacaaaaggaaccagtgccggtactgtcgcctcaagaagtgcttcagagctggtatgaaaaaggaagcagtgcagaatgagagggatcggattagtacccgccgagccgcttatgaagactcctctctgccgagcataaacgcccttctgcaggcggaggttttgtccagacaaatcacatcacccgtgagtgggattaatggagatatcagggccaaaaagattgcaagcatcgctgacgtctgtgagtctatgaaagaacagctcctggtgctggtagagtgggccaagtacatacctgcattttgcgaactcccattagatgaccaggttgctctgcttcgggcccacgcgggcgagcatttgctgctaggcgccaccaagcgttccatggtgttcaaagacgtcctcctgcttgggaacgattatatcgtgccccgccactgtcctgagctggcagaaatgtcaagagtgagcattaggatcttggacgagctcgtcctgccatttcaggaattacaaattgatgacaatgagtacgcttacctgaaggccatcatattctttgatcccgacgctaaaggactcagtgatcctggtaagattaaacggcttcgatctcaggttcaggtgtccctggaagactatatcaacgatcgccagtacgacagcagaggcaggttcggggagttgctactgctcctgccaactcttcaatcgattacatggcagatgatcgagcagatccaatttattaagctgttcggaatggccaaaatagataatttgctccaggaaatgctgttaggcggttctccgtccgacgcaccccatgcccaccaccctctgcatccacacctaatgcaggagcatatggggaccaacgtaatcgtggctaatacgatgcccactcacctctcaaacggacagatgtgcgaatggcctcggccacgcggccaagcggcaacccccgagacaccgcagcctagtcccccaggcgggagcggatccgaaccttataagctgcttcccggtgccgtcgctactattgtgaagccattgtctgccatcccccagcctaccataacaaaacaggaggttatttga

SEQ ID NO: 1286 - RNA, 1314 nt, synthetic construct
  misc_feature 1..1314: note = CDS (opt3) from Homo sapiens__NP_000448.3__HNF4A(39-474)(S142E_S143E)
  source 1..1314: mol_type = other RNA
atggacacctctccttcagaggggacaaacttaaatgcgccaaacagtctgggagtgagcgctctatgcgccatctgtggtgatagggcaactggcaaacactacggggcctcctcttgcgacggatgtaagggctttttccggcgctcggtacgtaaaaatcatatgtattcatgccgatttagcagacaatgtgtggtcgataaggacaaaaggaaccagtgccggtactgtcgcctcaagaagtgcttcagagctggtatgaaaaaggaagcagtgcagaatgagagggatcggattagtacccgccgagaagagtatgaggactcctctctgccgagcataaacgcccttctgcaggctgaagttttgtccagacaaatcacatcacccgtgagtgggattaatggagatatcagggccaaaaagattgcgagcatcgcagacgtctgtgagtctatgaaagaacagctcctggtgctggtagagtgggccaagtacatacctgctttttgcgagctcccattagatgaccaggttgccctgcttcgggcacacgctggcgaacatttgctgctaggcgccaccaagcgttccatggtgttcaaagacgtcctcctgcttgggaacgattatatcgtgccccgccactgtcctgagctggcggaaatgtcaagagtgagcattaggatcttggacgagctcgtcctgccatttcaggaattacaaattgatgacaatgagtacgcctacctgaaggcaatcatattctttgatcccgacgctaaaggactcagtgatcctggtaagattaaacggcttcgatctcaggttcaggtgtccctggaggactatatcaacgatcgccagtacgacagcagaggcaggttcggggaattgctactgctcctgccaactcttcaatcgattacatggcagatgatcgagcagatccaatttattaagctgttcggaatggccaaaatagataatttgctccaggaaatgctgttaggcggttctccgtccgacgctccccatgcccaccaccctctgcatccacacctaatgcaggagcatatggggaccaacgtaatcgtggcaaatacgatgcccactcacctctcaaacggacagatgtgcgaatggcctcggccacgcggccaagccgctacccccgagacaccgcagcctagtcccccaggcgggagcggatccgagccttataagctgcttcccggtgcggtcgcaactattgtgaagccattgtctgccatcccccagcctaccataacaaaacaggaagttatttga

SEQ ID NO: 1287 - RNA, 1314 nt, synthetic construct
  misc_feature 1..1314: note = CDS (opt3) from Homo sapiens__NP_000448.3__HNF4A(39-474)(S143A)
  source 1..1314: mol_type = other RNA
atggacacctctccttcagaggggacaaacttaaatgcgccaaacagtctgggagtgagcgctctatgcgccatctgtggtgatagggcaactggcaaacactacggggcctcctcttgcgacggatgtaagggctttttccggcgctcggtacgtaaaaatcatatgtattcatgccgatttagcagacaatgtgtggtcgataaggacaaaaggaaccagtgccggtactgtcgcctcaagaagtgcttcagagctggtatgaaaaaggaagcagtgcagaatgagagggatcggattagtacccgccgatccgcctatgaagactctagcctgccgtccataaacgcccttctgcaggccgaggttttgtcaagacaaatcacaagtcccgtgagcgggattaatggagatatcagggcgaaaaagattgcatctatcgccgacgtctgtgagtccatgaaagaacagctcctggtgctggtagagtgggctaagtacatacctgccttttgcgaactcccattagatgaccaggttgcactgcttcgggctcacgccggcgagcatttgctgctaggcgcgaccaagcgttcaatggtgttcaaagacgtcctcctgcttgggaacgattatatcgtgccccgccactgtcctgagctggccgaaatgagcagagtgagtattaggatcttggacgagctcgtcctgccatttcaggaattacaaattgatgacaatgagtacgcatacctgaaggctatcatattctttgatcccgacgccaaaggactctctgatcctggtaagattaaacggcttcgatcccaggttcaggtgagcctggaagactatatcaacgatcgccagtacgactcgagaggcaggttcggggagttgctactgctcctgccaactcttcaatctattacatggcagatgatcgagcagatccaatttattaagctgttcggaatggctaaaatagataatttgctccaggaaatgctgttaggcggttccccgtcagacgctccccatgcacaccaccctctgcatccacacctaatgcaggagcatatggggaccaacgtaatcgtggccaatacgatgcccactcacctcagtaacggacagatgtgcgaatggcctcggccacgcggccaagctgcgacccccgagacaccgcagcctagcccacccggcgggtccggatctgaaccttataagctgcttcccggtgcagtcgccactattgtgaagccattgagcgctatcccccagcctaccataacaaaacaggaggttatttga

SEQ ID NO: 1288 - RNA, 1314 nt, synthetic construct
  misc_feature 1..1314: note = CDS (opt3) from Homo sapiens__NP_000448.3__HNF4A(39-474)(T166A)
  source 1..1314: mol_type = other RNA
atggacacctctccttcagaggggacaaacttaaatgcgccaaacagtctgggagtgagcgctctatgcgccatctgtggtgatagggcaactggcaaacactacggggcctcctcttgcgacggatgtaagggctttttccggcgctcggtacgtaaaaatcatatgtattcatgccgatttagcagacaatgtgtggtcgataaggacaaaaggaaccagtgccggtactgtcgcctcaagaagtgcttcagagctggtatgaaaaaggaagcagtgcagaatgagagggatcggattagtacccgccgatcctcttatgaagacagctccctgccgtcaataaacgcccttctgcaggctgaggttttgagtagacaaatcgccagccccgtgtctgggattaatggagatatcagggcgaaaaagattgcatccatcgccgacgtctgtgagtcaatgaaagaacagctcctggtgctggtagagtgggctaagtacatacctgccttttgcgaactcccattagatgaccaggttgcactgcttcgggctcacgccggcgagcatttgctgctaggcgcgacaaagcgtagcatggtgttcaaagacgtcctcctgcttgggaacgattatatcgtgccccgccactgtcctgagctggccgaaatgagtagagtgtctattaggatcttggacgagctcgtcctgccatttcaggaattacaaattgatgacaatgagtacgcatacctgaaggctatcatattctttgatcccgacgccaaaggactctccgatcctggtaagattaaacggcttcgaagccaggttcaggtgtcgctggaagactatatcaacgatcgccagtacgactctagaggcaggttcggggagttgctactgctcctgccaacccttcaatccattacttggcagatgatcgagcagatccaatttattaagctgttcggaatggctaaaatagataatttgctccaggaaatgctgttaggcggttcaccgagtgacgcaccccatgcccaccaccctctgcatccacacctaatgcaggagcatatggggacaaacgtaatcgtggccaataccatgcccacgcacctcagcaacggacagatgtgcgaatggcctcggccacgcggccaagctgcgactcccgagaccccgcagccttctcccccaggcgggtccggaagcgaaccttataagctgcttcccggtgcagtcgccacaattgtgaagccattgtcagctatcccccagcctactataaccaaacaggaggttatttga

SEQ ID NO: 1289 - RNA, 1314 nt, synthetic construct
  misc_feature 1..1314: note = CDS (opt3) from Homo sapiens__NP_000448.3__HNF4A(39-474)(S167E)
  source 1..1314: mol_type = other RNA
atggacacctctccttcagaggggacaaacttaaatgcgccaaacagtctgggagtgagcgctctatgcgccatctgtggtgatagggcaactggcaaacactacggggcctcctcttgcgacggatgtaagggctttttccggcgctcggtacgtaaaaatcatatgtattcatgccgatttagcagacaatgtgtggtcgataaggacaaaaggaaccagtgccggtactgtcgcctcaagaagtgcttcagagctggtatgaaaaaggaagcagtgcagaatgagagggatcggattagtacccgccgatcctcttatgaagacagctccctgccgtcaataaacgcccttctgcaggctgaggttttgagtagacaaatcacagagcccgtgagcgggattaatggagatatcagggccaaaaagattgcgtctatcgcagacgtctgtgaatccatgaaagagcagctcctggtgctggtagaatgggccaagtacatacctgctttttgcgagctcccattagatgaccaggttgccctgcttcgggcacacgctggcgagcatttgctgctaggcgccaccaagcgttcaatggtgttcaaagacgtcctcctgcttgggaacgattatatcgtgccccgccactgtcctgaactggcggagatgagcagagtgagtattaggatcttggacgaactcgtcctgccatttcaggagttacaaattgatgacaatgaatacgcctacctgaaggcaatcatattctttgatcccgacgctaaaggactctctgatcctggtaagattaaacggcttcgatcccaggttcaggtgagcctggaggactatatcaacgatcgccagtacgactcgagaggcaggttcggggagttgctactgctcctgccaactcttcaatctattacatggcagatgatcgaacagatccaatttattaagctgttcggaatggccaaaatagataatttgctccaggagatgctgttaggcggttccccgtcagacgctccccatgcccaccaccctctgcatccacacctaatgcaggaacatatggggaccaacgtaatcgtggcaaatacgatgcccactcacctcagtaacggacagatgtgcgagtggcctcggccacgcggccaagccgctacccccgaaacaccgcagcctagcccacccggcgggtccggatctgagccttataagctgcttcccggtgcggtcgcaactattgtgaagccattgagcgccatcccccagcctaccataacaaaacaggaggttatttga

SEQ ID NO: 1290 - RNA, 1314 nt, synthetic construct
  misc_feature 1..1314: note = CDS (opt3) from Homo sapiens__NP_000448.3__HNF4A(39-474)(S167A)
  source 1..1314: mol_type = other RNA
atggacacctctccttcagaggggacaaacttaaatgcgccaaacagtctgggagtgagcgctctatgcgccatctgtggtgatagggcaactggcaaacactacggggcctcctcttgcgacggatgtaagggctttttccggcgctcggtacgtaaaaatcatatgtattcatgccgatttagcagacaatgtgtggtcgataaggacaaaaggaaccagtgccggtactgtcgcctcaagaagtgcttcagagctggtatgaaaaaggaagcagtgcagaatgagagggatcggattagtacccgccgatcctcttatgaagacagctccctgccgtcaataaacgcccttctgcaggctgaggttttgagtagacaaatcacagcccccgtgagcgggattaatggagatatcagggcgaaaaagattgcatctatcgccgacgtctgtgagtccatgaaagaacagctcctggtgctggtagagtgggctaagtacatacctgccttttgcgaactcccattagatgaccaggttgcactgcttcgggctcacgccggcgagcatttgctgctaggcgcgaccaagcgttcaatggtgttcaaagacgtcctcctgcttgggaacgattatatcgtgccccgccactgtcctgagctggccgaaatgagcagagtgagtattaggatcttggacgagctcgtcctgccatttcaggaattacaaattgatgacaatgagtacgcatacctgaaggctatcatattctttgatcccgacgccaaaggactctctgatcctggtaagattaaacggcttcgatcccaggttcaggtgagcctggaagactatatcaacgatcgccagtacgactcgagaggcaggttcggggagttgctactgctcctgccaactcttcaatctattacatggcagatgatcgagcagatccaatttattaagctgttcggaatggctaaaatagataatttgctccaggaaatgctgttaggcggttccccgtcagacgcaccccatgcccaccaccctctgcatccacacctaatgcaggagcatatggggaccaacgtaatcgtggccaatacgatgcccactcacctcagtaacggacagatgtgcgaatggcctcggccacgcggccaagctgcgacccccgagacaccgcagcctagcccacccggcgggtccggatctgaaccttataagctgcttcccggtgcagtcgccactattgtgaagccattgagcgctatcccccagcctaccataacaaaacaggaggttatttga

SEQ ID NO: 1291 - RNA, 1314 nt, synthetic construct
  misc_feature 1..1314: note = CDS (opt3) from Homo sapiens__NP_000448.3__HNF4A(39-474)(S167A_S378A_T429A_T432A _S436A)
  source 1..1314: mol_type = other RNA
atggacacctctccttcagaggggacaaacttaaatgcgccaaacagtctgggagtgagcgctctatgcgccatctgtggtgatagggcaactggcaaacactacggggcctcctcttgcgacggatgtaagggctttttccggcgctcggtacgtaaaaatcatatgtattcatgccgatttagcagacaatgtgtggtcgataaggacaaaaggaaccagtgccggtactgtcgcctcaagaagtgcttcagagctggtatgaaaaaggaagcagtgcagaatgagagggatcggattagtacccgccgatcctcttatgaagacagctccctgccgtcaataaacgcccttctgcaggctgaggttttgagtagacaaatcacagcccccgtgagcgggattaatggagatatcagggcgaaaaagattgcatctatcgccgacgtctgtgagtccatgaaagaacagctcctggtgctggtagagtgggctaagtacatacctgccttttgcgaactcccattagatgaccaggttgcactgcttcgggctcacgccggcgagcatttgctgctaggcgcgaccaagcgttcaatggtgttcaaagacgtcctcctgcttgggaacgattatatcgtgccccgccactgtcctgagctggccgaaatgagcagagtgagtattaggatcttggacgagctcgtcctgccatttcaggaattacaaattgatgacaatgagtacgcatacctgaaggctatcatattctttgatcccgacgccaaaggactctctgatcctggtaagattaaacggcttcgatcccaggttcaggtgagcctggaagactatatcaacgatcgccagtacgactcgagaggcaggttcggggagttgctactgctcctgccaactcttcaatctattacatggcagatgatcgagcagatccaatttattaagctgttcggaatggctaaaatagataatttgctccaggaaatgctgttaggcggtgccccgtccgacgcaccccatgcccaccaccctctgcatccacacctaatgcaggagcatatggggaccaacgtaatcgtggctaatacgatgcccactcacctctcaaacggacagatgtgcgaatggcctcggccacgcggccaagcggcagcccccgaggctccgcagcctgcacccccaggcgggagtggaagcgaaccttataagctgcttcccggtgccgtcgccaccattgtgaagccattgtccgctatcccccagcctacaataactaaacaggaggttatttga

SEQ ID NO: 1292 - RNA, 1314 nt, synthetic construct
  misc_feature 1..1314: note = CDS (opt3) from Homo sapiens__NP_000448.3__HNF4A(39-474)(S167E_S378E_T429E_T432E _S436E)
  source 1..1314: mol_type = other RNA
atggacacctctccttcagaggggacaaacttaaatgcgccaaacagtctgggagtgagcgctctatgcgccatctgtggtgatagggcaactggcaaacactacggggcctcctcttgcgacggatgtaagggctttttccggcgctcggtacgtaaaaatcatatgtattcatgccgatttagcagacaatgtgtggtcgataaggacaaaaggaaccagtgccggtactgtcgcctcaagaagtgcttcagagctggtatgaaaaaggaagcagtgcagaatgagagggatcggattagtacccgccgatcctcttatgaagacagctccctgccgtcaataaacgcccttctgcaggctgaggttttgagtagacaaatcacagagcccgtgagcgggattaatggagatatcagggccaaaaagattgcgtctatcgcagacgtctgtgaatccatgaaagagcagctcctggtgctggtagaatgggccaagtacatacctgctttttgcgagctcccattagatgaccaggttgccctgcttcgggcacacgctggcgagcatttgctgctaggcgccaccaagcgttcaatggtgttcaaagacgtcctcctgcttgggaacgattatatcgtgccccgccactgtcctgaactggcggagatgagcagagtgagtattaggatcttggacgaactcgtcctgccatttcaggagttacaaattgatgacaatgaatacgcctacctgaaggcaatcatattctttgatcccgacgctaaaggactctctgatcctggtaagattaaacggcttcgatcccaggttcaggtgagcctggaggactatatcaacgatcgccagtacgactcgagaggcaggttcggggagttgctactgctcctgccaactcttcaatctattacatggcagatgatcgaacagatccaatttattaagctgttcggaatggccaaaatagataatttgctccaggagatgctgttaggcggtgaaccgtccgacgctccccatgcccaccaccctctgcatccacacctaatgcaggagcatatggggaccaacgtaatcgtggcaaatacgatgcccactcacctctcaaacggacagatgtgcgaatggcctcggccacgcggccaagccgctgagcccgaggaaccgcagcctgagcccccaggcgggagtggaagcgaaccttataagctgcttcccggtgcggtcgcaaccattgtgaagccattgtccgccatcccccagcctacaataactaaacaggaggttatttga

SEQ ID NO: 1293 - RNA, 1314 nt, synthetic construct
  misc_feature 1..1314: note = CDS (opt3) from Homo sapiens__NP_000448.3__HNF4A(39-474)(S87A)
  source 1..1314: mol_type = other RNA
atggacacctctccttcagaggggacaaacttaaatgcgccaaacagtctgggagtgagcgctctatgcgccatctgtggtgatagggcaactggcaaacactacggggcctcctcttgcgacggatgtaagggctttttccggcgcgctgtacgtaaaaatcatatgtattcgtgccgattttcaagacaatgtgtggtcgataaggacaaaaggaaccagtgccggtactgtcgcctcaagaagtgcttcagagcaggtatgaaaaaggaagccgtgcagaatgagagggatcggattagcacccgccgaagttcctatgaagactctagcctgccgtccataaacgcccttctgcaggccgaggttttgtcaagacaaatcacaagtcccgtgagcgggattaatggagatatcagggcgaaaaagattgcatctatcgccgacgtctgtgagtccatgaaagaacagctcctggtgctggtagagtgggctaagtacatacctgccttttgcgaactcccattagatgaccaggttgcactgcttcgggctcacgccggcgagcatttgctgctaggcgcgaccaagcgttcaatggtgttcaaagacgtcctcctgcttgggaacgattatatcgtgccccgccactgtcctgagctggccgaaatgagcagagtgagtattaggatcttggacgagctcgtcctgccatttcaggaattacaaattgatgacaatgagtacgcatacctgaaggctatcatattctttgatcccgacgccaaaggactctctgatcctggtaagattaaacggcttcgatcccaggttcaggtgagcctggaagactatatcaacgatcgccagtacgactcgagaggcaggttcggggagttgctactgctcctgccaactcttcaatctattacatggcagatgatcgagcagatccaatttattaagctgttcggaatggctaaaatagataatttgctccaggaaatgctgttaggcggttccccgtcagacgctccccatgcacaccaccctctgcatccacacctaatgcaggagcatatggggaccaacgtaatcgtggccaatacgatgcccactcacctcagtaacggacagatgtgcgaatggcctcggccacgcggccaagctgcgacccccgagacaccgcagcctagcccacccggcgggtccggatctgaaccttataagctgcttcccggtgcagtcgccactattgtgaagccattgagcgctatcccccagcctaccataacaaaacaggaggttatttga

SEQ ID NO: 1294 - RNA, 1314 nt, synthetic construct
  misc_feature 1..1314: note = CDS (opt3) from Homo sapiens__NP_000448.3__HNF4A(39-474)(S87E)
  source 1..1314: mol_type = other RNA
atggacacctctccttcagaggggacaaacttaaatgcgccaaacagtctgggagtgagcgctctatgcgccatctgtggtgatagggcaactggcaaacactacggggcctcctcttgcgacggatgtaagggctttttccggcgcgaagtacgtaaaaatcatatgtattcgtgccgattttcaagacaatgtgtggtcgataaggacaaaaggaaccagtgccggtactgtcgcctcaagaagtgcttcagagctggtatgaaaaaggaggcagtgcagaatgaaagggatcggattagcacccgccgaagttcctatgaggactctagcctgccgtccataaacgcccttctgcaggctgaggttttgtcaagacaaatcacaagtcccgtgagcgggattaatggagatatcagggccaaaaagattgcgtctatcgcagacgtctgtgaatccatgaaagagcagctcctggtgctggtagaatgggccaagtacatacctgctttttgcgagctcccattagatgaccaggttgccctgcttcgggcacacgctggcgagcatttgctgctaggcgccaccaagcgttcaatggtgttcaaagacgtcctcctgcttgggaacgattatatcgtgccccgccactgtcctgaactggcggagatgagcagagtgagtattaggatcttggacgaactcgtcctgccatttcaggagttacaaattgatgacaatgaatacgcctacctgaaggcaatcatattctttgatcccgacgctaaaggactctctgatcctggtaagattaaacggcttcgatcccaggttcaggtgagcctggaggactatatcaacgatcgccagtacgactcgagaggcaggttcggggagttgctactgctcctgccaactcttcaatctattacatggcagatgatcgaacagatccaatttattaagctgttcggaatggccaaaatagataatttgctccaggagatgctgttaggcggttccccgtcagacgctccccatgcccaccaccctctgcatccacacctaatgcaggaacatatggggaccaacgtaatcgtggcaaatacgatgcccactcacctcagtaacggacagatgtgcgagtggcctcggccacgcggccaagccgctacccccgaaacaccgcagcctagcccacccggcgggtccggatctgagccttataagctgcttcccggtgcggtcgcaactattgtgaagccattgagcgccatcccccagcctaccataacaaaacaggaggttatttga

SEQ ID NO: 1295 - RNA, 1314 nt, synthetic construct
  misc_feature 1..1314: note = CDS (opt3) from Homo sapiens__NP_000448.3__HNF4A(39-474)(R2V)
  source 1..1314: mol_type = other RNA
atggacacctctccttcagaggggacaaacttaaatgcgccaaacagtctgggagtaagcgctctatgcgccatctgtggtgatagagcaactggcaaacactacggggcctcctcttgcgacggatgtaagggctttttcaggcggtcggtgcgcaaaaatcatatgtattcatgccgatttagccgtcaatgtgtcgtggataaggacaaaagaaaccagtgcaggtactgtcggctcaagaagtgcttccgcgctggtatgaaaaaggaagcagttcagaatgagagagataggattagtacccggcgctcctcttatgaagacagctccctgccgtcaataaacgcccttctgcaggctgaggtgttgagtcgacaaatcacaagccccgtctctgggattaatggagatatcagagccaaaaagattgcgtccatcgcagacgtgtgtgagtcaatgaaagaacagctcctggtactggttgagtgggccaagtacatacctgctttttgcgaactcccattagatgaccaggtggccctgcttagggcacacgctggcgagcatttgctgctaggcgccaccaagcggagcatggtcttcaaagacgtgctcctgcttgggaacgattatatcgtgccccgtcactgtcctgagctggcggaaatgagtcgcgtctctattagaatcttggacgagctcgttctgccatttcaggaattacaaattgatgacaatgagtacgcctacctgaaggcaatcatattctttgatcccgacgctaaaggactctccgatcctggtaagattaaaaggcttcggagccaggtgcaggtatcgctggaagactatatcaacgatcgacagtacgactctcgcggcagattcggggagttgctactgctcctgccaactcttcaatccattacatggcagatgatcgagcagatccaatttattaagctgttcggaatggccaaaatagataatttgctccaggaaatgctgttaggcggttcaccgagtgacgctccccatgcccaccaccctctgcatccacacctaatgcaggagcatatggggaccaacgtgatcgtcgcaaatacgatgcccactcacctcagcaacggacagatgtgcgaatggcctaggccacggggccaagccgctacccccgagacaccgcagccttctcccccaggcgggtccggaagcgaaccttataagctgcttcccggtgcggtggcaactattgttaagccattgtcagccatcccccagcctaccataacaaaacaggaggtgatttga

SEQ ID NO: 1296 - RNA, 1314 nt, synthetic construct
  misc_feature 1..1314: note = CDS (opt3) from Homo sapiens__NP_000448.3__HNF4A(39-474)(R2V_K5V)
  source 1..1314: mol_type = other RNA
atggacacctctccttcagaggggacaaacttaaatgcgccaaacagtctgggagtgagcgctctatgcgccatctgtggtgatagagcaactggcaagcactacggggcctcctcttgcgacggatgtaaaggctttttcaggcggtcggtccgcaagaatcatatgtattcatgccgatttagccgtcaatgtgtggttgataaagacaagagaaaccagtgcaggtactgtcggctcaaaaagtgcttccgcgctggtatgaagaaagaagcagtgcagaatgagagagataggattagtacccggcgctcctcttatgaagacagctccctgccgtcaataaacgcccttctgcaggctgaggtcttgagtcgacaaatcacaagccccgtgtctgggattaatggagatatcagagccaagaaaattgcgtccatcgcagacgtatgtgagtcaatgaaggaacagctcctggttctggtggagtgggccaaatacatacctgctttttgcgaactcccattagatgaccaggtcgccctgcttagggcacacgctggcgagcatttgctgctaggcgccaccaagcggagcatggtgttcaaggacgtgctcctgcttgggaacgattatatcgtcccccgtcactgtcctgagctggcggaaatgagtcgcgtttctattagaatcttggacgagctcgtgctgccatttcaggaattacaaattgatgacaatgagtacgcctacctgaaagcaatcatattctttgatcccgacgctaagggactctccgatcctggtaaaattaagaggcttcggagccaggtacaggtgtcgctggaagactatatcaacgatcgacagtacgactctcgcggcagattcggggagttgctactgctcctgccaactcttcaatccattacatggcagatgatcgagcagatccaatttattaaactgttcggaatggccaagatagataatttgctccaggaaatgctgttaggcggttcaccgagtgacgctccccatgcccaccaccctctgcatccacacctaatgcaggagcatatggggaccaacgtcatcgtggcaaatacgatgcccactcacctcagcaacggacagatgtgcgaatggcctaggccacggggccaagccgctacccccgagacaccgcagccttctcccccaggcgggtccggaagcgaaccttataaactgcttcccggtgcggttgcaactattgtgaagccattgtcagccatcccccagcctaccataacaaagcaggaggtcatttga

SEQ ID NO: 1297 - RNA, 1314 nt, synthetic construct
  misc_feature 1..1314: note = CDS (opt3) from Homo sapiens__NP_000448.3__HNF4A(39-474)(K179R_K180R)
  source 1..1314: mol_type = other RNA
atggacacctctccttcagaggggacaaacttaaatgcgccaaacagtctgggagtgagcgctctatgcgccatctgtggtgatagggcaactggcaaacactacggggcctcctcttgcgacggatgtaagggctttttccggcgctcggtacgtaaaaatcatatgtattcatgccgatttagcagacaatgtgtggtcgataaggacaaaaggaaccagtgccggtactgtcgcctcaagaagtgcttcagagctggtatgaaaaaggaagcagtgcagaatgagagggatcggattagtacccgccgatcctcttatgaagacagctccctgccgtcaataaacgcccttctgcaggctgaggttttgagtagacaaatcacaagccccgtgtctgggattaatggagatatcagggcccggcgtattgcgtccatcgcagacgtctgtgagtcaatgaaagaacagctcctggtgctggtagagtgggccaagtacatacctgctttttgcgaactcccattagatgaccaggttgccctgcttcgcgcacacgctggcgagcatttgctgctaggcgccaccaaaagaagcatggtgttcaaggacgtcctcctgcttgggaacgattatatcgtgcccaggcactgtcctgagctggcggaaatgagtcgggtgtctattcgaatcttggacgagctcgtcctgccatttcaggaattacaaattgatgacaatgagtacgcctacctgaaggcaatcatattctttgatcccgacgctaaaggactctccgatcctggtaagattaaacgccttagaagccaggttcaggtgtcgctggaagactatatcaacgataggcagtacgactctcggggccgcttcggggagttgctactgctcctgccaactcttcaatccattacatggcagatgatcgagcagatccaatttattaagctgttcggaatggccaaaatagataatttgctccaggaaatgctgttaggcggttcaccgagtgacgctccccatgcccaccaccctctgcatccacacctaatgcaggagcatatggggaccaacgtaatcgtggcaaatacgatgcccactcacctcagcaacggacagatgtgcgaatggcctagaccaaggggccaagccgctacccccgagacaccgcagccttctcccccaggcgggtccggaagcgaaccttataagctgcttcccggtgcggtcgcaactattgtgaaaccattgtcagccatcccccagcctaccataacaaagcaggaggttatttga

SEQ ID NO: 1298 - RNA, 1314 nt, synthetic construct
  misc_feature 1..1314: note = CDS (opt3) from Homo sapiens__NP_000448.3__HNF4A(39-474)(K234R)
  source 1..1314: mol_type = other RNA
atggacacctctccttcagaggggacaaacttaaatgcgccaaacagtctgggagtgagcgctctatgcgccatctgtggtgatagggcaactggcaaacactacggggcctcctcttgcgacggatgtaagggctttttccggcgctcggtacgtaaaaatcatatgtattcatgccgatttagcagacaatgtgtggtcgataaggacaaaaggaaccagtgccggtactgtcgcctcaagaagtgcttcagagctggtatgaaaaaggaagcagtgcagaatgagagggatcggattagtacccgccgatcctcttatgaagacagctccctgccgtcaataaacgcccttctgcaggctgaggttttgagtagacaaatcacaagccccgtgtctgggattaatggagatatcagggccaaaaagattgcgtccatcgcagacgtctgtgagtcaatgaaagaacagctcctggtgctggtagagtgggccaagtacatacctgctttttgcgaactcccattagatgaccaggttgccctgcttcgggcacacgctggcgagcatttgctgctaggcgccacccgtcgcagcatggtgttcaaggacgtcctcctgcttgggaacgattatatcgtgcccagacactgtcctgagctggcggaaatgagtagggtgtctattcggatcttggacgagctcgtcctgccatttcaggaattacaaattgatgacaatgagtacgcctacctgaaagcaatcatattctttgatcccgacgctaagggactctccgatcctggtaaaattaagcgacttcgcagccaggttcaggtgtcgctggaagactatatcaacgatagacagtacgactctaggggccggttcggggagttgctactgctcctgccaactcttcaatccattacatggcagatgatcgagcagatccaatttattaaactgttcggaatggccaagatagataatttgctccaggaaatgctgttaggcggttcaccgagtgacgctccccatgcccaccaccctctgcatccacacctaatgcaggagcatatggggaccaacgtaatcgtggcaaatacgatgcccactcacctcagcaacggacagatgtgcgaatggcctcgcccaagaggccaagccgctacccccgagacaccgcagccttctcccccaggcgggtccggaagcgaaccttataaactgcttcccggtgcggtcgcaactattgtgaagccattgtcagccatcccccagcctaccataacaaagcaggaggttatttga

SEQ ID NO: 1299 - RNA, 1314 nt, synthetic construct
  misc_feature 1..1314: note = CDS (opt3) from Homo sapiens__NP_000448.3__HNF4A(39-474)(K300R)
  source 1..1314: mol_type = other RNA
atggacacctctccttcagaggggacaaacttaaatgcgccaaacagtctgggagtgagcgctctatgcgccatctgtggtgatagggcaactggcaaacactacggggcctcctcttgcgacggatgtaagggctttttccggcgctcggtacgtaaaaatcatatgtattcatgccgatttagcagacaatgtgtggtcgataaggacaaaaggaaccagtgccggtactgtcgcctcaagaagtgcttcagagctggtatgaaaaaggaagcagtgcagaatgagagggatcggattagtacccgccgatcctcttatgaagacagctccctgccgtcaataaacgcccttctgcaggctgaggttttgagtagacaaatcacaagccccgtgtctgggattaatggagatatcagggccaaaaagattgcgtccatcgcagacgtctgtgagtcaatgaaagaacagctcctggtgctggtagagtgggccaagtacatacctgctttttgcgaactcccattagatgaccaggttgccctgcttcgggcacacgctggcgagcatttgctgctaggcgccaccaagcgtagcatggtgttcaaagacgtcctcctgcttgggaacgattatatcgtgccccgccactgtcctgagctggcggaaatgagtagagtgtctattaggatcttggacgagctcgtcctgccatttcaggaattacaaattgatgacaatgagtacgcctacctgaaggcaatcatattctttgatcccgacgctcggggactctccgatcctggtaaaattaagcgacttcgcagccaggttcaggtgtcgctggaagactatatcaacgatagacagtacgactctaggggccggttcggggagttgctactgctcctgccaactcttcaatccattacatggcagatgatcgagcagatccaatttattaaactgttcggaatggccaagatagataatttgctccaggaaatgctgttaggcggttcaccgagtgacgctccccatgcccaccaccctctgcatccacacctaatgcaggagcatatggggaccaacgtaatcgtggcaaatacgatgcccactcacctcagcaacggacagatgtgcgaatggcctcgcccaagaggccaagccgctacccccgagacaccgcagccttctcccccaggcgggtccggaagcgaaccttataaactgcttcccggtgcggtcgcaactattgtgaagccattgtcagccatcccccagcctaccataacaaagcaggaggttatttga

SEQ ID NO: 1300 - RNA, 1314 nt, synthetic construct
  misc_feature 1..1314: note = CDS (opt3) from Homo sapiens__NP_000448.3__HNF4A(39-474)(K300R_K307R_K309R)
  source 1..1314: mol_type = other RNA
atggacacctctccttcagaggggacaaacttaaatgcgccaaacagtctgggagtgagcgctctatgcgccatctgtggtgatagggcaactggcaaacactacggggcctcctcttgcgacggatgtaagggctttttccggcgctcggtacgtaaaaatcatatgtattcatgccgatttagcagacaatgtgtggtcgataaggacaaaaggaaccagtgccggtactgtcgcctcaagaagtgcttcagagctggtatgaaaaaggaagcagtgcagaatgagagggatcggattagtacccgccgatcctcttatgaagacagctccctgccgtcaataaacgcccttctgcaggctgaggttttgagtagacaaatcacaagccccgtgtctgggattaatggagatatcagggccaaaaagattgcgtccatcgcagacgtctgtgagtcaatgaaagaacagctcctggtgctggtagagtgggccaagtacatacctgctttttgcgaactcccattagatgaccaggttgccctgcttcgggcacacgctggcgagcatttgctgctaggcgccaccaagcgtagcatggtgttcaaagacgtcctcctgcttgggaacgattatatcgtgccccgccactgtcctgagctggcggaaatgagtagagtgtctattaggatcttggacgagctcgtcctgccatttcaggaattacaaattgatgacaatgagtacgcctacctgaaggcaatcatattctttgatcccgacgctcggggactctccgatcctggtcgcattcgaagacttaggagccaggttcaggtgtcgctggaagactatatcaacgatcggcagtacgactctcgcggcagattcggggagttgctactgctcctgccaactcttcaatccattacatggcagatgatcgagcagatccaatttattaaactgttcggaatggccaagatagataatttgctccaggaaatgctgttaggcggttcaccgagtgacgctccccatgcccaccaccctctgcatccacacctaatgcaggagcatatggggaccaacgtaatcgtggcaaatacgatgcccactcacctcagcaacggacagatgtgcgaatggcctaggccacgtggccaagccgctacccccgagacaccgcagccttctcccccaggcgggtccggaagcgaaccttataaactgcttcccggtgcggtcgcaactattgtgaagccattgtcagccatcccccagcctaccataacaaaacaggaggttatttga

SEQ ID NO: 1301 - RNA, 1314 nt, synthetic construct
  misc_feature 1..1314: note = CDS (opt3) from Homo sapiens__NP_000448.3__HNF4A(39-474)(K447R_K470R)
  source 1..1314: mol_type = other RNA
atggacacctctccttcagaggggacaaacttaaatgcgccaaacagtctgggagtgagcgctctatgcgccatctgtggtgatagggcaactggcaaacactacggggcctcctcttgcgacggatgtaagggctttttccggcgctcggtacgtaaaaatcatatgtattcatgccgatttagcagacaatgtgtggtcgataaggacaaaaggaaccagtgccggtactgtcgcctcaagaagtgcttcagagctggtatgaaaaaggaagcagtgcagaatgagagggatcggattagtacccgccgatcctcttatgaagacagctccctgccgtcaataaacgcccttctgcaggctgaggttttgagtagacaaatcacaagccccgtgtctgggattaatggagatatcagggccaaaaagattgcgtccatcgcagacgtctgtgagtcaatgaaagaacagctcctggtgctggtagagtgggccaagtacatacctgctttttgcgaactcccattagatgaccaggttgccctgcttcgggcacacgctggcgagcatttgctgctaggcgccaccaagcgtagcatggtgttcaaagacgtcctcctgcttgggaacgattatatcgtgccccgccactgtcctgagctggcggaaatgagtagagtgtctattaggatcttggacgagctcgtcctgccatttcaggaattacaaattgatgacaatgagtacgcctacctgaaggcaatcatattctttgatcccgacgctaaaggactctccgatcctggtaagattaaacggcttcgaagccaggttcaggtgtcgctggaagactatatcaacgatcgccagtacgactctagaggcaggttcggggagttgctactgctcctgccaactcttcaatccattacatggcagatgatcgagcagatccaatttattaagctgttcggaatggccaaaatagataatttgctccaggaaatgctgttaggcggttcaccgagtgacgctccccatgcccaccaccctctgcatccacacctaatgcaggagcatatggggaccaacgtaatcgtggcaaatacgatgcccactcacctcagcaacggacagatgtgcgaatggcctcggccacgcggccaagccgctacccccgagacaccgcagccttctcccccaggcgggtccggaagcgaaccttatagactgcttcccggtgcggtcgcaactattgtgaagccattgtcagccatcccccagcctaccataacaaggcaggaggttatttga

SEQ ID NO: 1302 - RNA, 1314 nt, synthetic construct
  misc_feature 1..1314: note = CDS (opt3) from Homo sapiens__NP_000448.3__HNF4A(39-474)(K458R)
  source 1..1314: mol_type = other RNA
atggacacctctccttcagaggggacaaacttaaatgcgccaaacagtctgggagtgagcgctctatgcgccatctgtggtgatagggcaactggcaaacactacggggcctcctcttgcgacggatgtaagggctttttccggcgctcggtacgtaaaaatcatatgtattcatgccgatttagcagacaatgtgtggtcgataaggacaaaaggaaccagtgccggtactgtcgcctcaagaagtgcttcagagctggtatgaaaaaggaagcagtgcagaatgagagggatcggattagtacccgccgatcctcttatgaagacagctccctgccgtcaataaacgcccttctgcaggctgaggttttgagtagacaaatcacaagccccgtgtctgggattaatggagatatcagggccaaaaagattgcgtccatcgcagacgtctgtgagtcaatgaaagaacagctcctggtgctggtagagtgggccaagtacatacctgctttttgcgaactcccattagatgaccaggttgccctgcttcgggcacacgctggcgagcatttgctgctaggcgccaccaagcgtagcatggtgttcaaagacgtcctcctgcttgggaacgattatatcgtgccccgccactgtcctgagctggcggaaatgagtagagtgtctattaggatcttggacgagctcgtcctgccatttcaggaattacaaattgatgacaatgagtacgcctacctgaaggcaatcatattctttgatcccgacgctaaaggactctccgatcctggtaagattaaacggcttcgaagccaggttcaggtgtcgctggaagactatatcaacgatcgccagtacgactctagaggcaggttcggggagttgctactgctcctgccaactcttcaatccattacatggcagatgatcgagcagatccaatttattaagctgttcggaatggccaaaatagataatttgctccaggaaatgctgttaggcggttcaccgagtgacgctccccatgcccaccaccctctgcatccacacctaatgcaggagcatatggggaccaacgtaatcgtggcaaatacgatgcccactcacctcagcaacggacagatgtgcgaatggcctcggccacgcggccaagccgctacccccgagacaccgcagccttctcccccaggcgggtccggaagcgaaccttataagctgcttcccggtgcggtcgcaactattgtgagaccattgtcagccatcccccagcctaccataacaaagcaggaggttatttga

SEQ ID NO: 1303 - RNA, 1314 nt, synthetic construct
  misc_feature 1..1314: note = CDS (opt3) from Homo sapiens__NP_000448.3__HNF4A(39-474)(K106R_K108R_K126R_K127R )
  source 1..1314: mol_type = other RNA
atggacacctctccttcagaggggacaaacttaaatgcgccaaacagtctgggagtgagcgctctatgcgccatctgtggtgatagggcaactggcaaacactacggggcctcctcttgcgacggatgtaagggctttttccggcgctcggtacgtaaaaatcatatgtattcatgccgatttagcagacaatgtgtggtcgatagggaccggcgcaaccagtgcagatactgtaggctcaagaaatgcttccgggctggtatgcgccgagaagcagtgcagaatgagagagataggattagtacccggcgttcctcttatgaagacagctccctgccgtcaataaacgcccttctgcaggctgaggttttgagtcgccaaatcacaagccccgtgtctgggattaatggagatatcagagccaagaagattgcgtccatcgcagacgtctgtgagtcaatgaaagaacagctcctggtgctggtagagtgggccaagtacatacctgctttttgcgaactcccattagatgaccaggttgccctgcttagggcacacgctggcgagcatttgctgctaggcgccaccaaacggagcatggtgttcaaggacgtcctcctgcttgggaacgattatatcgtgccccgacactgtcctgagctggcggaaatgagtcgcgtgtctattagaatcttggacgagctcgtcctgccatttcaggaattacaaattgatgacaatgagtacgcctacctgaaagcaatcatattctttgatcccgacgctaagggactctccgatcctggtaagattaaaaggcttcggagccaggttcaggtgtcgctggaagactatatcaacgatcgccagtacgactctagaggcaggttcggggagttgctactgctcctgccaactcttcaatccattacatggcagatgatcgagcagatccaatttattaagctgttcggaatggccaaaatagataatttgctccaggaaatgctgttaggcggttcaccgagtgacgctccccatgcccaccaccctctgcatccacacctaatgcaggagcatatggggaccaacgtaatcgtggcaaatacgatgcccactcacctcagcaacggacagatgtgcgaatggcctcgtccacggggccaagccgctacccccgagacaccgcagccttctcccccaggcgggtccggaagcgaaccttataagctgcttcccggtgcggtcgcaactattgtgaaaccattgtcagccatcccccagcctaccataacaaagcaggaggttatttga

SEQ ID NO: 1304 - RNA, 1314 nt, synthetic construct
  misc_feature 1..1314: note = CDS (opt3) from Homo sapiens__NP_000448.3__HNF4A(39-474)(E285Q)
  source 1..1314: mol_type = other RNA
atggacacctctccttcagaggggacaaacttaaatgcgccaaacagtctgggagtgagcgctctatgcgccatctgtggtgatagggcaactggcaaacactacggggcctcctcttgcgacggatgtaagggctttttccggcgctcggtacgtaaaaatcatatgtattcatgccgatttagcagacaatgtgtggtcgataaggacaaaaggaaccagtgccggtactgtcgcctcaagaagtgcttcagagctggtatgaaaaaggaagcagtgcagaatgagagggatcggattagtacccgccgatcctcttatgaagacagctccctgccgtcaataaacgcccttctgcaggctgaggttttgagtagacaaatcacaagccccgtgtctgggattaatggagatatcagggccaaaaagattgcgtccatcgcagacgtctgtgagtcaatgaaagaacagctcctggtgctggtagagtgggccaagtacatacctgctttttgcgaactcccattagatgaccaggttgccctgcttcgggcacacgctggcgagcatttgctgctaggcgccaccaagcgtagcatggtgttcaaagacgtcctcctgcttgggaacgattatatcgtgccccgccactgtcctgagctggcggaaatgagtagagtgtctattaggatcttggacgagctcgtcctgccatttcaggaattacaaattgatgacaatcagtacgcctacctgaaggcaatcatattctttgatcccgacgctaaaggactctccgatcctggtaagattaaacggcttcgaagccaggttcaggtgtcgctggaggactatatcaacgatcgccaatacgactctagaggcaggttcggggaattgctactgctcctgccaactcttcagtccattacatggcagatgatcgagcaaatccagtttattaagctgttcggaatggccaaaatagataatttgctccaggagatgctgttaggcggttcaccgagtgacgctccccatgcccaccaccctctgcatccacacctaatgcaggaacatatggggaccaacgtaatcgtggcaaatacgatgcccactcacctcagcaacggacaaatgtgcgagtggcctcggccacgcggccaggccgctacccccgaaacaccgcagccttctcccccaggcgggtccggaagcgagccttataagctgcttcccggtgcggtcgcaactattgtgaagccattgtcagccatcccccagcctaccataacaaaacaagaagttatttga

SEQ ID NO: 1305 - RNA, 1314 nt, synthetic construct
  misc_feature 1..1314: note = CDS (opt3) from Homo sapiens__NP_000448.3__HNF4A(39-474)(T166E)
  source 1..1314: mol_type = other RNA
atggacacctctccttcagaggggacaaacttaaatgcgccaaacagtctgggagtgagcgctctatgcgccatctgtggtgatagggcaactggcaaacactacggggcctcctcttgcgacggatgtaagggctttttccggcgctcggtacgtaaaaatcatatgtattcatgccgatttagcagacaatgtgtggtcgataaggacaaaaggaaccagtgccggtactgtcgcctcaagaagtgcttcagagctggtatgaaaaaggaagcagtgcagaatgagagggatcggattagtacccgccgatcctcttatgaagacagctccctgccgtcaataaacgcccttctgcaggctgaggttttgagtagacaaatcgagagccccgtgtctgggattaatggagatatcagggccaaaaagattgcgtccatcgcagacgtctgtgaatcaatgaaagagcagctcctggtgctggtagaatgggccaagtacatacctgctttttgcgagctcccattagatgaccaggttgccctgcttcgggcacacgctggcgagcatttgctgctaggcgccacaaagcgtagcatggtgttcaaagacgtcctcctgcttgggaacgattatatcgtgccccgccactgtcctgaactggcggagatgagtagagtgtctattaggatcttggacgaactcgtcctgccatttcaggagttacaaattgatgacaatgaatacgcctacctgaaggcaatcatattctttgatcccgacgctaaaggactctccgatcctggtaagattaaacggcttcgaagccaggttcaggtgtcgctggaggactatatcaacgatcgccagtacgactctagaggcaggttcggggagttgctactgctcctgccaacccttcaatccattacttggcagatgatcgaacagatccaatttattaagctgttcggaatggccaaaatagataatttgctccaggagatgctgttaggcggttcaccgagtgacgctccccatgcccaccaccctctgcatccacacctaatgcaggaacatatggggacaaacgtaatcgtggcaaataccatgcccacgcacctcagcaacggacagatgtgcgagtggcctcggccacgcggccaagccgctactcccgaaaccccgcagccttctcccccaggcgggtccggaagcgagccttataagctgcttcccggtgcggtcgcaacaattgtgaagccattgtcagccatcccccagcctactataaccaaacaggaggttatttga

SEQ ID NO: 1306 - RNA, 1314 nt, synthetic construct
  misc_feature 1..1314: note = CDS (opt3) from Homo sapiens__NP_000448.3__HNF4A(39-474)(S148A)
  source 1..1314: mol_type = other RNA
atggacacctctccttcagaggggacaaacttaaatgcgccaaacagtctgggagtgagcgctctatgcgccatctgtggtgatagggcaactggcaaacactacggggcctcctcttgcgacggatgtaagggctttttccggcgctcggtacgtaaaaatcatatgtattcatgccgatttagcagacaatgtgtggtcgataaggacaaaaggaaccagtgccggtactgtcgcctcaagaagtgcttcagagctggtatgaaaaaggaagcagtgcagaatgagagggatcggattagtacccgccgatcctcttatgaagacagcgccctgccgtccataaacgcccttctgcaggccgaggttttgtcaagacaaatcacaagtcccgtgagcgggattaatggagatatcagggcgaaaaagattgcatctatcgccgacgtctgtgagtccatgaaagaacagctcctggtgctggtagagtgggctaagtacatacctgccttttgcgaactcccattagatgaccaggttgcactgcttcgggctcacgccggcgagcatttgctgctaggcgcgaccaagcgttcaatggtgttcaaagacgtcctcctgcttgggaacgattatatcgtgccccgccactgtcctgagctggccgaaatgagcagagtgagtattaggatcttggacgagctcgtcctgccatttcaggaattacaaattgatgacaatgagtacgcatacctgaaggctatcatattctttgatcccgacgccaaaggactctctgatcctggtaagattaaacggcttcgatcccaggttcaggtgagcctggaagactatatcaacgatcgccagtacgactcgagaggcaggttcggggagttgctactgctcctgccaactcttcaatctattacatggcagatgatcgagcagatccaatttattaagctgttcggaatggctaaaatagataatttgctccaggaaatgctgttaggcggttccccgtcagacgctccccatgcacaccaccctctgcatccacacctaatgcaggagcatatggggaccaacgtaatcgtggccaatacgatgcccactcacctcagtaacggacagatgtgcgaatggcctcggccacgcggccaagctgcgacccccgagacaccgcagcctagcccacccggcgggtccggatctgaaccttataagctgcttcccggtgcagtcgccactattgtgaagccattgagcgctatcccccagcctaccataacaaaacaggaggttatttga

SEQ ID NO: 1307 - RNA, 1314 nt, synthetic construct
  misc_feature 1..1314: note = CDS (opt3) from Homo sapiens__NP_000448.3__HNF4A(39-474)(S148E)
  source 1..1314: mol_type = other RNA
atggacacctctccttcagaggggacaaacttaaatgcgccaaacagtctgggagtgagcgctctatgcgccatctgtggtgatagggcaactggcaaacactacggggcctcctcttgcgacggatgtaagggctttttccggcgctcggtacgtaaaaatcatatgtattcatgccgatttagcagacaatgtgtggtcgataaggacaaaaggaaccagtgccggtactgtcgcctcaagaagtgcttcagagctggtatgaaaaaggaagcagtgcagaatgagagggatcggattagtacccgccgatcctcttatgaagacagcgagctgccgtccataaacgcccttctgcaggctgaggttttgtcaagacaaatcacaagtcccgtgagcgggattaatggagatatcagggccaaaaagattgcgtctatcgcagacgtctgtgaatccatgaaagagcagctcctggtgctggtagaatgggccaagtacatacctgctttttgcgagctcccattagatgaccaggttgccctgcttcgggcacacgctggcgagcatttgctgctaggcgccaccaagcgttcaatggtgttcaaagacgtcctcctgcttgggaacgattatatcgtgccccgccactgtcctgaactggcggagatgagcagagtgagtattaggatcttggacgaactcgtcctgccatttcaggagttacaaattgatgacaatgaatacgcctacctgaaggcaatcatattctttgatcccgacgctaaaggactctctgatcctggtaagattaaacggcttcgatcccaggttcaggtgagcctggaggactatatcaacgatcgccagtacgactcgagaggcaggttcggggagttgctactgctcctgccaactcttcaatctattacatggcagatgatcgaacagatccaatttattaagctgttcggaatggccaaaatagataatttgctccaggagatgctgttaggcggttccccgtcagacgctccccatgcccaccaccctctgcatccacacctaatgcaggaacatatggggaccaacgtaatcgtggcaaatacgatgcccactcacctcagtaacggacagatgtgcgagtggcctcggccacgcggccaagccgctacccccgaaacaccgcagcctagcccacccggcgggtccggatctgagccttataagctgcttcccggtgcggtcgcaactattgtgaagccattgagcgccatcccccagcctaccataacaaaacaggaggttatttga

SEQ ID NO: 1308 - RNA, 1314 nt, synthetic construct
  misc_feature 1..1314: note = CDS (opt3) from Homo sapiens__NP_000448.3__HNF4A(39-474)(S183A)
  source 1..1314: mol_type = other RNA
atggacacctctccttcagaggggacaaacttaaatgcgccaaacagtctgggagtgagcgctctatgcgccatctgtggtgatagggcaactggcaaacactacggggcctcctcttgcgacggatgtaagggctttttccggcgctcggtacgtaaaaatcatatgtattcatgccgatttagcagacaatgtgtggtcgataaggacaaaaggaaccagtgccggtactgtcgcctcaagaagtgcttcagagctggtatgaaaaaggaagcagtgcagaatgagagggatcggattagtacccgccgatcctcttatgaagacagctccctgccgtcaataaacgcccttctgcaggctgaggttttgagtagacaaatcacaagccccgtgtctgggattaatggagatatcagggccaaaaagattgcggcaatcgccgacgtctgtgagtccatgaaagaacagctcctggtgctggtagagtgggctaagtacatacctgccttttgcgaactcccattagatgaccaggttgcactgcttcgggctcacgccggcgagcatttgctgctaggcgcgaccaagcgttcaatggtgttcaaagacgtcctcctgcttgggaacgattatatcgtgccccgccactgtcctgagctggccgaaatgagcagagtgagtattaggatcttggacgagctcgtcctgccatttcaggaattacaaattgatgacaatgagtacgcatacctgaaggctatcatattctttgatcccgacgccaaaggactctctgatcctggtaagattaaacggcttcgatcccaggttcaggtgagcctggaagactatatcaacgatcgccagtacgactcgagaggcaggttcggggagttgctactgctcctgccaactcttcaatctattacatggcagatgatcgagcagatccaatttattaagctgttcggaatggctaaaatagataatttgctccaggaaatgctgttaggcggttccccgtcagacgcaccccatgcccaccaccctctgcatccacacctaatgcaggagcatatggggaccaacgtaatcgtggccaatacgatgcccactcacctcagtaacggacagatgtgcgaatggcctcggccacgcggccaagctgcgacccccgagacaccgcagcctagcccacccggcgggtccggatctgaaccttataagctgcttcccggtgcagtcgccactattgtgaagccattgagcgctatcccccagcctaccataacaaaacaggaggttatttga

SEQ ID NO: 1309 - RNA, 1314 nt, synthetic construct
  misc_feature 1..1314: note = CDS (opt3) from Homo sapiens__NP_000448.3__HNF4A(39-474)(S183E)
  source 1..1314: mol_type = other RNA
atggacacctctccttcagaggggacaaacttaaatgcgccaaacagtctgggagtgagcgctctatgcgccatctgtggtgatagggcaactggcaaacactacggggcctcctcttgcgacggatgtaagggctttttccggcgctcggtacgtaaaaatcatatgtattcatgccgatttagcagacaatgtgtggtcgataaggacaaaaggaaccagtgccggtactgtcgcctcaagaagtgcttcagagctggtatgaaaaaggaagcagtgcagaatgagagggatcggattagtacccgccgatcctcttatgaagacagctccctgccgtcaataaacgcccttctgcaggctgaggttttgagtagacaaatcacaagccccgtgtctgggattaatggagatatcagggccaaaaagattgcggagatcgcagacgtctgtgaatccatgaaagagcagctcctggtgctggtagaatgggccaagtacatacctgctttttgcgagctcccattagatgaccaggttgccctgcttcgggcacacgctggcgagcatttgctgctaggcgccaccaagcgttcaatggtgttcaaagacgtcctcctgcttgggaacgattatatcgtgccccgccactgtcctgaactggcggagatgagcagagtgagtattaggatcttggacgaactcgtcctgccatttcaggagttacaaattgatgacaatgaatacgcctacctgaaggcaatcatattctttgatcccgacgctaaaggactctctgatcctggtaagattaaacggcttcgatcccaggttcaggtgagcctggaggactatatcaacgatcgccagtacgactcgagaggcaggttcggggagttgctactgctcctgccaactcttcaatctattacatggcagatgatcgaacagatccaatttattaagctgttcggaatggccaaaatagataatttgctccaggagatgctgttaggcggttccccgtcagacgctccccatgcccaccaccctctgcatccacacctaatgcaggaacatatggggaccaacgtaatcgtggcaaatacgatgcccactcacctcagtaacggacagatgtgcgagtggcctcggccacgcggccaagccgctacccccgaaacaccgcagcctagcccacccggcgggtccggatctgagccttataagctgcttcccggtgcggtcgcaactattgtgaagccattgagcgccatcccccagcctaccataacaaaacaggaggttatttga

SEQ ID NO: 1310 - RNA, 1314 nt, synthetic construct
  misc_feature 1..1314: note = CDS (opt3) from Homo sapiens__NP_000448.3__HNF4A(39-474)(S461A)
  source 1..1314: mol_type = other RNA
atggacacctctccttcagaggggacaaacttaaatgcgccaaacagtctgggagtgagcgctctatgcgccatctgtggtgatagggcaactggcaaacactacggggcctcctcttgcgacggatgtaagggctttttccggcgctcggtacgtaaaaatcatatgtattcatgccgatttagcagacaatgtgtggtcgataaggacaaaaggaaccagtgccggtactgtcgcctcaagaagtgcttcagagctggtatgaaaaaggaagcagtgcagaatgagagggatcggattagtacccgccgatcctcttatgaagacagctccctgccgtcaataaacgcccttctgcaggctgaggttttgagtagacaaatcacaagccccgtgtctgggattaatggagatatcagggccaaaaagattgcgtccatcgcagacgtctgtgagtcaatgaaagaacagctcctggtgctggtagagtgggccaagtacatacctgctttttgcgaactcccattagatgaccaggttgccctgcttcgggcacacgctggcgagcatttgctgctaggcgccaccaagcgtagcatggtgttcaaagacgtcctcctgcttgggaacgattatatcgtgccccgccactgtcctgagctggcggaaatgagtagagtgtctattaggatcttggacgagctcgtcctgccatttcaggaattacaaattgatgacaatgagtacgcctacctgaaggcaatcatattctttgatcccgacgctaaaggactctccgatcctggtaagattaaacggcttcgaagccaggttcaggtgtcgctggaagactatatcaacgatcgccagtacgactctagaggcaggttcggggagttgctactgctcctgccaactcttcaatccattacatggcagatgatcgagcagatccaatttattaagctgttcggaatggccaaaatagataatttgctccaggaaatgctgttaggcggttcaccgagtgacgctccccatgcccaccaccctctgcatccacacctaatgcaggagcatatggggaccaacgtaatcgtggcaaatacgatgcccactcacctcagcaacggacagatgtgcgaatggcctcggccacgcggccaagccgctacccccgagacaccgcagccttctcccccaggcgggtccggaagcgaaccttataagctgcttcccggtgcggtcgcaactattgtgaagccattggccgctatcccccagcctaccataacaaaacaggaggttatttga

SEQ ID NO: 1311 - RNA, 1314 nt, synthetic construct
  misc_feature 1..1314: note = CDS (opt3) from Homo sapiens__NP_000448.3__HNF4A(39-474)(S461E)
  source 1..1314: mol_type = other RNA
atggacacctctccttcagaggggacaaacttaaatgcgccaaacagtctgggagtgagcgctctatgcgccatctgtggtgatagggcaactggcaaacactacggggcctcctcttgcgacggatgtaagggctttttccggcgctcggtacgtaaaaatcatatgtattcatgccgatttagcagacaatgtgtggtcgataaggacaaaaggaaccagtgccggtactgtcgcctcaagaagtgcttcagagctggtatgaaaaaggaagcagtgcagaatgagagggatcggattagtacccgccgatcctcttatgaagacagctccctgccgtcaataaacgcccttctgcaggctgaggttttgagtagacaaatcacaagccccgtgtctgggattaatggagatatcagggccaaaaagattgcgtccatcgcagacgtctgtgagtcaatgaaagaacagctcctggtgctggtagagtgggccaagtacatacctgctttttgcgaactcccattagatgaccaggttgccctgcttcgggcacacgctggcgagcatttgctgctaggcgccaccaagcgtagcatggtgttcaaagacgtcctcctgcttgggaacgattatatcgtgccccgccactgtcctgagctggcggaaatgagtagagtgtctattaggatcttggacgagctcgtcctgccatttcaggaattacaaattgatgacaatgagtacgcctacctgaaggcaatcatattctttgatcccgacgctaaaggactctccgatcctggtaagattaaacggcttcgaagccaggttcaggtgtcgctggaagactatatcaacgatcgccagtacgactctagaggcaggttcggggagttgctactgctcctgccaactcttcaatccattacatggcagatgatcgagcagatccaatttattaagctgttcggaatggccaaaatagataatttgctccaggaaatgctgttaggcggttcaccgagtgacgctccccatgcccaccaccctctgcatccacacctaatgcaggagcatatggggaccaacgtaatcgtggcaaatacgatgcccactcacctcagcaacggacagatgtgcgaatggcctcggccacgcggccaagccgctacccccgagacaccgcagccttctcccccaggcgggtccggaagcgaaccttataagctgcttcccggtgcggtcgcaactattgtgaagccattggaggccatcccccagcctaccataacaaaacaggaggttatttga

SEQ ID NO: 1312 - RNA, 1314 nt, synthetic construct
  misc_feature 1..1314: note = CDS (opt3) from Homo sapiens__NP_000448.3__HNF4A(39-474)(S142A_S143A_S313A)
  source 1..1314: mol_type = other RNA
atggacacctctccttcagaggggacaaacttaaatgcgccaaacagtctgggagtgagcgctctatgcgccatctgtggtgatagggcaactggcaaacactacggggcctcctcttgcgacggatgtaagggctttttccggcgctcggtacgtaaaaatcatatgtattcatgccgatttagcagacaatgtgtggtcgataaggacaaaaggaaccagtgccggtactgtcgcctcaagaagtgcttcagagctggtatgaaaaaggaagcagtgcagaatgagagggatcggattagtacccgccgagccgcttatgaagactcctctctgccgagcataaacgcccttctgcaggcggaggttttgtccagacaaatcacatcacccgtgagtgggattaatggagatatcagggccaaaaagattgccagcatcgctgacgtctgtgagtctatgaaagaacagctcctggtgctggtagagtgggccaagtacatacctgcattttgcgaactcccattagatgaccaggttgctctgcttcgggcccacgcgggcgagcatttgctgctaggcgccaccaagcgttccatggtgttcaaagacgtcctcctgcttgggaacgattatatcgtgccccgccactgtcctgagctggcagaaatgtcaagagtgagcattaggatcttggacgagctcgtcctgccatttcaggaattacaaattgatgacaatgagtacgcttacctgaaggccatcatattctttgatcccgacgctaaaggactcagtgatcctggtaagattaaacggcttcgagcccaggttcaggtgtctctggaagactatatcaacgatcgccagtacgactccagaggcaggttcggggagttgctactgctcctgccaactcttcaaagcattacatggcagatgatcgagcagatccaatttattaagctgttcggaatggcaaaaatagataatttgctccaggaaatgctgttaggcggttcgccgtctgacgcaccccatgctcaccaccctctgcatccacacctaatgcaggagcatatggggaccaacgtaatcgtggcgaatacgatgcccactcacctctccaacggacagatgtgcgaatggcctcggccacgcggccaagcagccacccccgagacaccgcagccttcacccccaggcgggagtggaagcgaaccttataagctgcttcccggtgctgtcgccactattgtgaagccattgtccgcaatcccccagcctaccataacaaaacaggaggttatttga

SEQ ID NO: 1313 - RNA, 1314 nt, synthetic construct
  misc_feature 1..1314: note = CDS (opt3) from Homo sapiens__NP_000448.3__HNF4A(39-474)(S142A_S143A_S313A_K458R )
  source 1..1314: mol_type = other RNA
atggacacctctccttcagaggggacaaacttaaatgcgccaaacagtctgggagtgagcgctctatgcgccatctgtggtgatagggcaactggcaaacactacggggcctcctcttgcgacggatgtaagggctttttccggcgctcggtacgtaaaaatcatatgtattcatgccgatttagcagacaatgtgtggtcgataaggacaaaaggaaccagtgccggtactgtcgcctcaagaagtgcttcagagctggtatgaaaaaggaagcagtgcagaatgagagggatcggattagtacccgccgagccgcttatgaagactcctctctgccgagcataaacgcccttctgcaggcggaggttttgtccagacaaatcacatcacccgtgagtgggattaatggagatatcagggccaaaaagattgccagcatcgctgacgtctgtgagtctatgaaagaacagctcctggtgctggtagagtgggccaagtacatacctgcattttgcgaactcccattagatgaccaggttgctctgcttcgggcccacgcgggcgagcatttgctgctaggcgccaccaagcgttccatggtgttcaaagacgtcctcctgcttgggaacgattatatcgtgccccgccactgtcctgagctggcagaaatgtcaagagtgagcattaggatcttggacgagctcgtcctgccatttcaggaattacaaattgatgacaatgagtacgcttacctgaaggccatcatattctttgatcccgacgctaaaggactcagtgatcctggtaagattaaacggcttcgagcccaggttcaggtgtctctggaagactatatcaacgatcgccagtacgactccagaggcaggttcggggagttgctactgctcctgccaactcttcaaagcattacatggcagatgatcgagcagatccaatttattaagctgttcggaatggcaaaaatagataatttgctccaggaaatgctgttaggcggttcgccgtctgacgcaccccatgctcaccaccctctgcatccacacctaatgcaggagcatatggggaccaacgtaatcgtggcgaatacgatgcccactcacctctccaacggacagatgtgcgaatggcctcggccacgcggccaagcagccacccccgagacaccgcagccttcacccccaggcgggagtggaagcgaaccttataagctgcttcccggtgctgtcgccactattgtgagaccattgtccgcaatcccccagcctaccataacaaagcaggaggttatttga

SEQ ID NO: 1314 - RNA, 1314 nt, synthetic construct
  misc_feature 1..1314: note = CDS (opt3) from Homo sapiens__NP_000448.3__HNF4A(39-474)(S142A_S143A_S167A_S313A _S378A_T429A_T432A_S436A_K458R)
  source 1..1314: mol_type = other RNA
atggacacctctccttcagaggggacaaacttaaatgcgccaaacagtctgggagtgagcgctctatgcgccatctgtggtgatagggcaactggcaaacactacggggcctcctcttgcgacggatgtaagggctttttccggcgctcggtacgtaaaaatcatatgtattcatgccgatttagcagacaatgtgtggtcgataaggacaaaaggaaccagtgccggtactgtcgcctcaagaagtgcttcagagctggtatgaaaaaggaagcagtgcagaatgagagggatcggattagtacccgccgagccgcttatgaagactcctctctgccgagcataaacgcccttctgcaggcggaggttttgtccagacaaatcacagcacccgtgtcagggattaatggagatatcagggccaaaaagattgctagtatcgccgacgtctgtgagagcatgaaagaacagctcctggtgctggtagagtgggcaaagtacatacctgctttttgcgaactcccattagatgaccaggttgccctgcttcgggcgcacgccggcgagcatttgctgctaggcgcaaccaagcgttctatggtgttcaaagacgtcctcctgcttgggaacgattatatcgtgccccgccactgtcctgagctggctgaaatgtccagagtgtcaattaggatcttggacgagctcgtcctgccatttcaggaattacaaattgatgacaatgagtacgcctacctgaaggctatcatattctttgatcccgacgccaaaggactcagcgatcctggtaagattaaacggcttcgagcacaggttcaggtgagtctggaagactatatcaacgatcgccagtacgactctagaggcaggttcggggagttgctactgctcctgccaactcttcaatccattacatggcagatgatcgagcagatccaatttattaagctgttcggaatggccaaaatagataatttgctccaggaaatgctgttaggcggtgctccgagcgacgcgccccatgcacaccaccctctgcatccacacctaatgcaggagcatatggggaccaacgtaatcgtggccaatacgatgcccactcacctctcgaacggacagatgtgcgaatggcctcggccacgcggccaagctgccgcacccgaggccccgcagcctgctcccccaggcgggtctggatccgaaccttataagctgcttcccggtgccgtcgcaaccattgtgagaccattgtcagcgatcccccagcctacaataactaagcaggaggttatttga

SEQ ID NO: 1315 - RNA, 1314 nt, synthetic construct
  misc_feature 1..1314: note = CDS (opt3) from Homo sapiens__NP_000448.3__HNF4A(39-474)(S142A_S143A_S148A_S167A _S313A_S378A_T429A_T432A_S436A_K458R)
  source 1..1314: mol_type = other RNA
atggacacctctccttcagaggggacaaacttaaatgcgccaaacagtctgggagtgagcgctctatgcgccatctgtggtgatagggcaactggcaaacactacggggcctcctcttgcgacggatgtaagggctttttccggcgctcggtacgtaaaaatcatatgtattcatgccgatttagcagacaatgtgtggtcgataaggacaaaaggaaccagtgccggtactgtcgcctcaagaagtgcttcagagctggtatgaaaaaggaagcagtgcagaatgagagggatcggattagtacccgccgagccgcttatgaagactccgccctgccgtctataaacgcgcttctgcaggcagaggttttgagcagacaaatcacagcccccgtgtccgggattaatggagatatcagggctaaaaagattgcctcaatcgcagacgtctgtgagagtatgaaagaacagctcctggtgctggtagagtgggctaagtacatacctgccttttgcgaactcccattagatgaccaggttgcgctgcttcgggcccacgcaggcgagcatttgctgctaggcgctaccaagcgtagcatggtgttcaaagacgtcctcctgcttgggaacgattatatcgtgccccgccactgtcctgagctggccgaaatgtctagagtgtccattaggatcttggacgagctcgtcctgccatttcaggaattacaaattgatgacaatgagtacgcttacctgaaggccatcatattctttgatcccgacgcaaaaggactctcagatcctggtaagattaaacggcttcgagcccaggttcaggtgagcctggaagactatatcaacgatcgccagtacgacagtagaggcaggttcggggagttgctactgctcctgccaactcttcaatctattacatggcagatgatcgagcagatccaatttattaagctgttcggaatggctaaaatagataatttgctccaggaaatgctgttaggcggtgcgccgtccgacgcaccccatgcccaccaccctctgcatccacacctaatgcaggagcatatggggaccaacgtaatcgtggctaatacgatgcccactcacctcagcaacggacagatgtgcgaatggcctcggccacgcggccaagccgcagcccccgaggctccgcagcctgcacccccaggcgggtcgggatctgaaccttataagctgcttcccggtgccgtcgcgaccattgtgagaccattgtccgctatcccccagcctacaataactaagcaggaggttatttga

SEQ ID NO: 1316 - RNA, 1314 nt, synthetic construct
  misc_feature 1..1314: note = CDS (opt3) from Homo sapiens__NP_000448.3__HNF4A(39-474)(K106R_K108R_K126R_K127R _S142A_S143A_S148A_S167A_S313A_S378A_T429A_T432A_S436A_K458 R)
  source 1..1314: mol_type = other RNA
atggacacctctccttcagaggggacaaacttaaatgcgccaaacagtctgggagtgagcgctctatgcgccatctgtggtgatagggcaactggcaaacactacggggcctcctcttgcgacggatgtaagggctttttccggcgctcggtacgtaaaaatcatatgtattcatgccgatttagcagacaatgtgtggtcgatagggaccggcgcaaccagtgcagatactgtaggctcaagaaatgcttccgggctggtatgcgccgagaagcagtgcagaatgagagagataggattagtacccggcgtgccgcttatgaagactccgccctgccgtctataaacgcgcttctgcaggcagaggttttgagccgccaaatcacagcccccgtgtccgggattaatggagatatcagagctaagaagattgcctcaatcgcagacgtctgtgagagtatgaaagaacagctcctggtgctggtagagtgggctaagtacatacctgccttttgcgaactcccattagatgaccaggttgcgctgcttagggcccacgcaggcgagcatttgctgctaggcgctaccaaacggagcatggtgttcaaggacgtcctcctgcttgggaacgattatatcgtgccccgacactgtcctgagctggccgaaatgtctcgcgtgtccattagaatcttggacgagctcgtcctgccatttcaggaattacaaattgatgacaatgagtacgcttacctgaaagccatcatattctttgatcccgacgcaaagggactctcagatcctggtaagattaaaaggcttcgggcccaggttcaggtgagcctggaagactatatcaacgatcgccagtacgacagtagaggcaggttcggggagttgctactgctcctgccaactcttcaatctattacatggcagatgatcgagcagatccaatttattaagctgttcggaatggctaaaatagataatttgctccaggaaatgctgttaggcggtgcgccgtccgacgcaccccatgcccaccaccctctgcatccacacctaatgcaggagcatatggggaccaacgtaatcgtggctaatacgatgcccactcacctcagcaacggacagatgtgcgaatggcctcgtccacggggccaagccgcagcccccgaggctccgcagcctgcacccccaggcgggtcgggatctgaaccttataagctgcttcccggtgccgtcgcgaccattgtgcgaccattgtccgctatcccccagcctacaataactaaacaggaggttatttga

SEQ ID NO: 1317 - RNA, 1314 nt, synthetic construct
  misc_feature 1..1314: note = CDS (opt3) from Homo sapiens__NP_000448.3__HNF4A(39-474)(S142A_S143A_S148A_T166A _S167A_S313A_S378A_T429A_T432A_S436A_K458R)
  source 1..1314: mol_type = other RNA
atggacacctctccttcagaggggacaaacttaaatgcgccaaacagtctgggagtgagcgctctatgcgccatctgtggtgatagggcaactggcaaacactacggggcctcctcttgcgacggatgtaagggctttttccggcgctcggtacgtaaaaatcatatgtattcatgccgatttagcagacaatgtgtggtcgataaggacaaaaggaaccagtgccggtactgtcgcctcaagaagtgcttcagagctggtatgaaaaaggaagcagtgcagaatgagagggatcggattagtacccgccgagccgcttatgaagactccgccctgccgtctataaacgcgcttctgcaggcagaggttttgagcagacaaatcgccgctcccgtgtccgggattaatggagatatcagggccaaaaagattgcatcaatcgctgacgtctgtgagagtatgaaagaacagctcctggtgctggtagagtgggccaagtacatacctgcgttttgcgaactcccattagatgaccaggttgccctgcttcgggcacacgctggcgagcatttgctgctaggcgccacaaagcgtagcatggtgttcaaagacgtcctcctgcttgggaacgattatatcgtgccccgccactgtcctgagctggctgaaatgtctagagtgtccattaggatcttggacgagctcgtcctgccatttcaggaattacaaattgatgacaatgagtacgcctacctgaaggcaatcatattctttgatcccgacgccaaaggactctcagatcctggtaagattaaacggcttcgagctcaggttcaggtgagcctggaagactatatcaacgatcgccagtacgacagtagaggcaggttcggggagttgctactgctcctgccaacccttcaatctattacttggcagatgatcgagcagatccaatttattaagctgttcggaatggcgaaaatagataatttgctccaggaaatgctgttaggcggtgcaccgtccgacgctccccatgcccaccaccctctgcatccacacctaatgcaggagcatatggggacaaacgtaatcgtggccaataccatgcccacgcacctcagcaacggacagatgtgcgaatggcctcggccacgcggccaagcagccgctcccgaggccccgcagcctgcacccccaggcgggtcgggatctgaaccttataagctgcttcccggtgcggtcgctactattgtgagaccattgtccgccatcccccagcctaccataacaaagcaggaggttatttga

SEQ ID NO: 1318 - RNA, 1314 nt, synthetic construct
  misc_feature 1..1314: note = CDS (opt3) from Homo sapiens__NP_000448.3__HNF4A(39-474)(S87A_S142A_S143A_S148A_ T166A_S167A_S313A_S378A_T429A_T432A_S436A_K458R)
  source 1..1314: mol_type = other RNA
atggacacctctccttcagaggggacaaacttaaatgcgccaaacagtctgggagtgagcgctctatgcgccatctgtggtgatagggcaactggcaaacactacggggcctcctcttgcgacggatgtaagggctttttccggcgcgctgtacgtaaaaatcatatgtattcgtgccgattttcaagacaatgtgtggtcgataaggacaaaaggaaccagtgccggtactgtcgcctcaagaagtgcttcagagcaggtatgaaaaaggaagccgtgcagaatgagagggatcggattagcacccgccgagctgcctatgaagacagtgcgctgccgtccataaacgcacttctgcaggccgaggttttgtctagacaaatcgctgcccccgtgagcgggattaatggagatatcagggctaaaaagattgcatccatcgccgacgtctgtgagtcaatgaaagaacagctcctggtgctggtagagtgggcgaagtacatacctgccttttgcgaactcccattagatgaccaggttgcactgcttcgggctcacgccggcgagcatttgctgctaggcgctacaaagcgtagtatggtgttcaaagacgtcctcctgcttgggaacgattatatcgtgccccgccactgtcctgagctggccgaaatgagcagagtgtctattaggatcttggacgagctcgtcctgccatttcaggaattacaaattgatgacaatgagtacgcatacctgaaggccatcatattctttgatcccgacgctaaaggactctccgatcctggtaagattaaacggcttcgagcgcaggttcaggtgtcactggaagactatatcaacgatcgccagtacgacagcagaggcaggttcggggagttgctactgctcctgccaacccttcaaagtattacttggcagatgatcgagcagatccaatttattaagctgttcggaatggcaaaaatagataatttgctccaggaaatgctgttaggcggtgccccgtctgacgctccccatgcccaccaccctctgcatccacacctaatgcaggagcatatggggacaaacgtaatcgtggcaaataccatgcccacgcacctctccaacggacagatgtgcgaatggcctcggccacgcggccaagccgctgcccccgaggcaccgcagcctgcgcccccaggcgggagcggatcggaaccttataagctgcttcccggtgctgtcgccactattgtgagaccattgtctgcaatcccccagcctaccataacaaagcaggaggttatttga

SEQ ID NO: 1319 - RNA, 1314 nt, synthetic construct
  misc_feature 1..1314: note = CDS (opt3) from Homo sapiens__NP_000448.3__HNF4A(39-474)(S87A_K106R_K108R_K126R_ K127R_S142A_S143A_S148A_T166A_S167A_S313A_S378A_T429A_T432A _S436A_K458R)
  source 1..1314: mol_type = other RNA
atggacacctctccttcagaggggacaaacttaaatgcgccaaacagtctgggagtgagcgctctatgcgccatctgtggtgatagggcaactggcaaacactacggggcctcctcttgcgacggatgtaagggctttttccggcgcgctgtacgtaaaaatcatatgtattcgtgccgattttcaagacaatgtgtggtcgatagggaccggcgcaaccagtgcagatactgtaggctcaagaaatgcttccgggcaggtatgcgccgagaagccgtgcagaatgagagagataggattagcacccggcgtgctgcctatgaagacagtgcgctgccgtccataaacgcacttctgcaggccgaggttttgtctcgccaaatcgctgcccccgtgagcgggattaatggagatatcagagcaaagaagattgcttccatcgccgacgtctgtgagtcaatgaaagaacagctcctggtgctggtagagtgggcgaagtacatacctgccttttgcgaactcccattagatgaccaggttgcactgcttagggctcacgccggcgagcatttgctgctaggcgctacaaaacggagtatggtgttcaaggacgtcctcctgcttgggaacgattatatcgtgccccgacactgtcctgagctggccgaaatgagccgcgtgtctattagaatcttggacgagctcgtcctgccatttcaggaattacaaattgatgacaatgagtacgcatacctgaaagccatcatattctttgatcccgacgctaagggactctccgatcctggtaagattaaaaggcttcgggcgcaggttcaggtgtcactggaagactatatcaacgatcgccagtacgacagcagaggcaggttcggggagttgctactgctcctgccaacccttcaaagtattacttggcagatgatcgagcagatccaatttattaagctgttcggaatggcaaaaatagataatttgctccaggaaatgctgttaggcggtgccccgtctgacgctccccatgcccaccaccctctgcatccacacctaatgcaggagcatatggggacaaacgtaatcgtggcaaataccatgcccacgcacctctccaacggacagatgtgcgaatggcctcgtccacggggccaagccgctgcccccgaggcaccgcagcctgcgcccccaggcgggagcggatcggaaccttataagctgcttcccggtgctgtcgccactattgtgcgaccattgtctgcaatcccccagcctaccataacaaaacaggaggttatttga

SEQ ID NO: 1320 - RNA, 1314 nt, synthetic construct
  misc_feature 1..1314: note = CDS (opt3) from Homo sapiens__NP_000448.3__HNF4A(39-474)(S87A_K106R_K108R_K126R_ K127R)
  source 1..1314: mol_type = other RNA
atggacacctctccttcagaggggacaaacttaaatgcgccaaacagtctgggagtgagcgctctatgcgccatctgtggtgatagggcaactggcaaacactacggggcctcctcttgcgacggatgtaagggctttttccggcgcgctgtacgtaaaaatcatatgtattcgtgccgattttcaagacaatgtgtggtcgatagggaccggcgcaaccagtgcagatactgtaggctcaagaaatgcttccgggcaggtatgcgccgagaagccgtgcagaatgagagagataggattagcacccggcgtagttcctatgaagactctagcctgccgtccataaacgcccttctgcaggccgaggttttgtcacgccaaatcacaagtcccgtgagcgggattaatggagatatcagagcgaagaagattgcatctatcgccgacgtctgtgagtccatgaaagaacagctcctggtgctggtagagtgggctaagtacatacctgccttttgcgaactcccattagatgaccaggttgcactgcttagggctcacgccggcgagcatttgctgctaggcgcgaccaaacggtcaatggtgttcaaggacgtcctcctgcttgggaacgattatatcgtgccccgacactgtcctgagctggccgaaatgagccgcgtgagtattagaatcttggacgagctcgtcctgccatttcaggaattacaaattgatgacaatgagtacgcatacctgaaagctatcatattctttgatcccgacgccaagggactctctgatcctggtaagattaaaaggcttcggtcccaggttcaggtgagcctggaagactatatcaacgatcgccagtacgactcgagaggcaggttcggggagttgctactgctcctgccaactcttcaatctattacatggcagatgatcgagcagatccaatttattaagctgttcggaatggctaaaatagataatttgctccaggaaatgctgttaggcggttccccgtcagacgctccccatgcacaccaccctctgcatccacacctaatgcaggagcatatggggaccaacgtaatcgtggccaatacgatgcccactcacctcagtaacggacagatgtgcgaatggcctcgtccacggggccaagctgcgacccccgagacaccgcagcctagcccacccggcgggtccggatctgaaccttataagctgcttcccggtgcagtcgccactattgtgaaaccattgagcgctatcccccagcctaccataacaaagcaggaggttatttga

SEQ ID NO: 1321 - RNA, 1314 nt, synthetic construct
  misc_feature 1..1314: note = CDS (opt3) from Homo sapiens__NP_000448.3__HNF4A(39-474)(S87A_K106R_K108R_K126R_ K127R_S142A_S143A_S148A_T166A_S167A_S313A_S378A_T429A_T432A _S436A_K458R_S461A)
  source 1..1314: mol_type = other RNA
atggacacctctccttcagaggggacaaacttaaatgcgccaaacagtctgggagtgagcgctctatgcgccatctgtggtgatagggcaactggcaaacactacggggcctcctcttgcgacggatgtaagggctttttccggcgcgctgtacgtaaaaatcatatgtattcgtgccgattttcaagacaatgtgtggtcgatagggaccggcgcaaccagtgcagatactgtaggctcaagaaatgcttccgggcaggtatgcgccgagaagccgtgcagaatgagagagataggattagcacccggcgtgctgcctatgaagacagtgcgctgccgtccataaacgcacttctgcaggccgaggttttgtctcgccaaatcgctgcccccgtgagcgggattaatggagatatcagagcaaagaagattgcttccatcgccgacgtctgtgagtcaatgaaagaacagctcctggtgctggtagagtgggcgaagtacatacctgccttttgcgaactcccattagatgaccaggttgcactgcttagggctcacgccggcgagcatttgctgctaggcgctacaaaacggagtatggtgttcaaggacgtcctcctgcttgggaacgattatatcgtgccccgacactgtcctgagctggccgaaatgagccgcgtgtctattagaatcttggacgagctcgtcctgccatttcaggaattacaaattgatgacaatgagtacgcatacctgaaagccatcatattctttgatcccgacgctaagggactctccgatcctggtaagattaaaaggcttcgggcgcaggttcaggtgtcactggaagactatatcaacgatcgccagtacgacagcagaggcaggttcggggagttgctactgctcctgccaacccttcaaagtattacttggcagatgatcgagcagatccaatttattaagctgttcggaatggcaaaaatagataatttgctccaggaaatgctgttaggcggtgccccgtctgacgctccccatgcccaccaccctctgcatccacacctaatgcaggagcatatggggacaaacgtaatcgtggcaaataccatgcccacgcacctctccaacggacagatgtgcgaatggcctcgtccacggggccaagccgctgcccccgaggcaccgcagcctgcgcccccaggcgggagcggatcggaaccttataagctgcttcccggtgctgtcgccactattgtgcgaccattggcagccatcccccagcctaccataacaaaacaggaggttatttga

SEQ ID NO: 1322 - RNA, 1314 nt, synthetic construct
  misc_feature 1..1314: note = CDS (opt3) from Homo sapiens__NP_000448.3__HNF4A(39-474)(S87A_K106R_K108R_K126R_ K127R_S142A_S143A_S148A_T166A_S167A_S313A_S378A_T429A_T432A _S436A_K458R_S461E)
  source 1..1314: mol_type = other RNA
atggacacctctccttcagaggggacaaacttaaatgcgccaaacagtctgggagtgagcgctctatgcgccatctgtggtgatagggcaactggcaaacactacggggcctcctcttgcgacggatgtaagggctttttccggcgcgctgtacgtaaaaatcatatgtattcgtgccgattttcaagacaatgtgtggtcgatagggaccggcgcaaccagtgcagatactgtaggctcaagaaatgcttccgggcaggtatgcgccgagaagccgtgcagaatgagagagataggattagcacccggcgtgctgcctatgaagacagtgcgctgccgtccataaacgcacttctgcaggccgaggttttgtctcgccaaatcgctgcccccgtgagcgggattaatggagatatcagagcaaagaagattgcttccatcgccgacgtctgtgagtcaatgaaagaacagctcctggtgctggtagagtgggcgaagtacatacctgccttttgcgaactcccattagatgaccaggttgcactgcttagggctcacgccggcgagcatttgctgctaggcgctacaaaacggagtatggtgttcaaggacgtcctcctgcttgggaacgattatatcgtgccccgacactgtcctgagctggccgaaatgagccgcgtgtctattagaatcttggacgagctcgtcctgccatttcaggaattacaaattgatgacaatgagtacgcatacctgaaagccatcatattctttgatcccgacgctaagggactctccgatcctggtaagattaaaaggcttcgggcgcaggttcaggtgtcactggaagactatatcaacgatcgccagtacgacagcagaggcaggttcggggagttgctactgctcctgccaacccttcaaagtattacttggcagatgatcgagcagatccaatttattaagctgttcggaatggcaaaaatagataatttgctccaggaaatgctgttaggcggtgccccgtctgacgctccccatgcccaccaccctctgcatccacacctaatgcaggagcatatggggacaaacgtaatcgtggcaaataccatgcccacgcacctctccaacggacagatgtgcgaatggcctcgtccacggggccaagccgctgcccccgaggcaccgcagcctgcgcccccaggcgggagcggatcggaaccttataagctgcttcccggtgctgtcgccactattgtgcgaccattggaggcaatcccccagcctaccataacaaaacaggaggttatttga

SEQ ID NO: 1323 - RNA, 1314 nt, synthetic construct
  misc_feature 1..1314: note = CDS (opt3) from Homo sapiens__NP_000448.3__HNF4A(39-474)(S87A_K106R_K108R_K126R_ K127R_S142A_S143A_S148E_T166A_S167E_S313A_S378E_T429E_T432E _S436E_K458R_S461E)
  source 1..1314: mol_type = other RNA
atggacacctctccttcagaggggacaaacttaaatgcgccaaacagtctgggagtgagcgctctatgcgccatctgtggtgatagggcaactggcaaacactacggggcctcctcttgcgacggatgtaagggctttttccggcgcgctgtacgtaaaaatcatatgtattcgtgccgattttcaagacaatgtgtggtcgatagggaccggcgcaaccagtgcagatactgtaggctcaagaaatgcttccgggcaggtatgcgccgagaagccgtgcagaatgagagagataggattagcacccggcgtgctgcctatgaagacagtgagctgccgtccataaacgcgcttctgcaggcagaggttttgtctcgccaaatcgccgaacccgtgagcgggattaatggagatatcagagctaagaagattgcctccatcgcagacgtctgtgagtcaatgaaagaacagctcctggtgctggtagagtgggctaagtacatacctgccttttgcgagctcccattagatgaccaggttgcgctgcttagggcccacgcaggcgaacatttgctgctaggcgctacaaaacggagtatggtgttcaaggacgtcctcctgcttgggaacgattatatcgtgccccgacactgtcctgagctggccgaaatgagccgcgtgtctattagaatcttggacgagctcgtcctgccatttcaggaattacaaattgatgacaatgagtacgcttacctgaaagccatcatattctttgatcccgacgcaaagggactctccgatcctggtaagattaaaaggcttcgggcccaggttcaggtgtcactggaggactatatcaacgatcgccagtacgacagcagaggcaggttcggggaattgctactgctcctgccaacccttcaaagtattacttggcagatgatcgagcagatccaatttattaagctgttcggaatggctaaaatagataatttgctccaggaaatgctgttaggcggtgagccgtctgacgcgccccatgcacaccaccctctgcatccacacctaatgcaggaacatatggggacaaacgtaatcgtggccaataccatgcccacgcacctctccaacggacagatgtgcgagtggcctcgtccacggggccaagctgccgagcccgaggaaccgcagcctgaacccccaggcgggagcggatcggagccttataagctgcttcccggtgcagtcgccactattgtgcgaccattggaagctatcccccagcctaccataacaaaacaggaggttatttga

SEQ ID NO: 1324 - RNA, 1314 nt, synthetic construct
  misc_feature 1..1314: note = CDS (opt3) from Homo sapiens__NP_000448.3__HNF4A(39-474)(S87A_K106R_K108R_K126R_ K127R_S142A_S143A_S148A_T166A_S167A_K179R_K180R_S313A_S378A _T429A_T432A_S436A_K458R_S461E)
  source 1..1314: mol_type = other RNA
atggacacctctccttcagaggggacaaacttaaatgcgccaaacagtctgggagtgagcgctctatgcgccatctgtggtgatagggcaactggcaaacactacggggcctcctcttgcgacggatgtaagggctttttccggcgcgctgtacgtaaaaatcatatgtattcgtgccgattttcaagacaatgtgtggtcgatagggaccggcgcaaccagtgcagatactgtaggctcaagaaatgcttccgggcaggtatgcgccgagaagccgtgcagaatgagagagataggattagcacccggcgtgctgcctatgaagacagtgcgctgccgtccataaacgcacttctgcaggccgaggttttgtctcgccaaatcgctgcccccgtgagcgggattaatggagatatcagagcaaggcggattgcttccatcgccgacgtctgtgagtcaatgaaggaacagctcctggtgctggtagagtgggcgaagtacatacctgccttttgcgaactcccattagatgaccaggttgcactgcttcgagctcacgccggcgagcatttgctgctaggcgctacaaaacgcagtatggtgttcaaggacgtcctcctgcttgggaacgattatatcgtgcccagacactgtcctgagctggccgaaatgagcagggtgtctattcggatcttggacgagctcgtcctgccatttcaggaattacaaattgatgacaatgagtacgcatacctgaaagccatcatattctttgatcccgacgctaagggactctccgatcctggtaaaattaagcgccttagagcgcaggttcaggtgtcactggaagactatatcaacgataggcagtacgacagccgtggccggttcggggagttgctactgctcctgccaacccttcaaagtattacttggcagatgatcgagcagatccaatttattaagctgttcggaatggcaaaaatagataatttgctccaggaaatgctgttaggcggtgccccgtctgacgctccccatgcccaccaccctctgcatccacacctaatgcaggagcatatggggacaaacgtaatcgtggcaaataccatgcccacgcacctctccaacggacagatgtgcgaatggcctcgaccaagaggccaagccgctgcccccgaggcaccgcagcctgcgcccccaggcgggagcggatcggaaccttataagctgcttcccggtgctgtcgccactattgtgaggccattggaggcaatcccccagcctaccataacaaaacaggaggttatttga

SEQ ID NO: 1325 - RNA, 1314 nt, synthetic construct
  misc_feature 1..1314: note = CDS (opt3) from Homo sapiens__NP_000448.3__HNF4A(39-474)(S87A_K106R_K108R_K126R_ K127R_S142A_S143A_S148A_T166A_S167A_K300R_K307R_K309R_S313A _S378A_T429A_T432A_S436A_K458R_S461E)
  source 1..1314: mol_type = other RNA
atggacacctctccttcagaggggacaaacttaaatgcgccaaacagtctgggagtgagcgctctatgcgccatctgtggtgatagggcaactggcaaacactacggggcctcctcttgcgacggatgtaagggctttttccggcgcgctgtacgtaaaaatcatatgtattcgtgccgattttcaagacaatgtgtggtcgatagggaccggcgcaaccagtgcagatactgtaggctcaagaaatgcttccgggcaggtatgcgccgagaagccgtgcagaatgagagagataggattagcacccggcgtgctgcctatgaagacagtgcgctgccgtccataaacgcacttctgcaggccgaggttttgtctcgccaaatcgctgcccccgtgagcgggattaatggagatatcagagcaaagaagattgcttccatcgccgacgtctgtgagtcaatgaaagaacagctcctggtgctggtagagtgggcgaagtacatacctgccttttgcgaactcccattagatgaccaggttgcactgcttagggctcacgccggcgagcatttgctgctaggcgctacaaaacggagtatggtgttcaaggacgtcctcctgcttgggaacgattatatcgtgccccgacactgtcctgagctggccgaaatgagccgcgtgtctattagaatcttggacgagctcgtcctgccatttcaggaattacaaattgatgacaatgagtacgcatacctgaaagccatcatattctttgatcccgacgctaggggactctccgatcctggtcggattcgcagacttagggcgcaggttcaggtgtcactggaagactatatcaacgatcgtcagtacgacagccggggccgattcggggagttgctactgctcctgccaacccttcaaagtattacttggcagatgatcgagcagatccaatttattaagctgttcggaatggcaaagatagataatttgctccaggaaatgctgttaggcggtgccccgtctgacgctccccatgcccaccaccctctgcatccacacctaatgcaggagcatatggggacaaacgtaatcgtggcaaataccatgcccacgcacctctccaacggacagatgtgcgaatggcctagaccaaggggccaagccgctgcccccgaggcaccgcagcctgcgcccccaggcgggagcggatcggaaccttataaactgcttcccggtgctgtcgccactattgtgcgcccattggaggcaatcccccagcctaccataacaaagcaggaggttatttga

SEQ ID NO: 1326 - RNA, 1314 nt, synthetic construct
  misc_feature 1..1314: note = CDS (opt3) from Homo sapiens__NP_000448.3__HNF4A(39-474)(S87A_K106R_K108R_K126R_ K127R_S142A_S143A_S148A_T166A_S167A_S313A_S378A_T429A_T432A _S436A_K447R_K458R_S461E_K470R)
  source 1..1314: mol_type = other RNA
atggacacctctccttcagaggggacaaacttaaatgcgccaaacagtctgggagtgagcgctctatgcgccatctgtggtgatagggcaactggcaaacactacggggcctcctcttgcgacggatgtaagggctttttccggcgcgctgtacgtaaaaatcatatgtattcgtgccgattttcaagacaatgtgtggtcgatagggaccggcgcaaccagtgcagatactgtaggctcaagaaatgcttccgggcaggtatgcgccgagaagccgtgcagaatgagagagataggattagcacccggcgtgctgcctatgaagacagtgcgctgccgtccataaacgcacttctgcaggccgaggttttgtctcgccaaatcgctgcccccgtgagcgggattaatggagatatcagagcaaagaagattgcttccatcgccgacgtctgtgagtcaatgaaagaacagctcctggtgctggtagagtgggcgaagtacatacctgccttttgcgaactcccattagatgaccaggttgcactgcttagggctcacgccggcgagcatttgctgctaggcgctacaaaacggagtatggtgttcaaggacgtcctcctgcttgggaacgattatatcgtgccccgacactgtcctgagctggccgaaatgagccgcgtgtctattagaatcttggacgagctcgtcctgccatttcaggaattacaaattgatgacaatgagtacgcatacctgaaagccatcatattctttgatcccgacgctaagggactctccgatcctggtaagattaaaaggcttcgggcgcaggttcaggtgtcactggaagactatatcaacgatcgccagtacgacagcagaggcaggttcggggagttgctactgctcctgccaacccttcaaagtattacttggcagatgatcgagcagatccaatttattaagctgttcggaatggcaaaaatagataatttgctccaggaaatgctgttaggcggtgccccgtctgacgctccccatgcccaccaccctctgcatccacacctaatgcaggagcatatggggacaaacgtaatcgtggcaaataccatgcccacgcacctctccaacggacagatgtgcgaatggcctcgtccacggggccaagccgctgcccccgaggcaccgcagcctgcgcccccaggcgggagcggatcggaaccttatcgactgcttcccggtgctgtcgccactattgtgagaccattggaggcaatcccccagcctaccataacaaggcaggaggttatttga

SEQ ID NO: 1327 - RNA, 1314 nt, synthetic construct
  misc_feature 1..1314: note = CDS (opt3) from Homo sapiens__NP_000448.3__HNF4A(39-474)(S87A_K106R_K108R_K126R_ K127R_S142A_S143A_S148A_T166A_S167A_K179R_K180R_K234R_K300R _K307R_K309R_S313A_S378A_T429A_T432A_S436A_K447R_K458R_S461 E_K470R)
  source 1..1314: mol_type = other RNA
atggacacctctccttcagaggggacaaacttaaatgcgccaaacagtctgggagtgagcgctctatgcgccatctgtggtgatagggcaactggcaaacactacggggcctcctcttgcgacggatgtaagggctttttccggcgcgctgtacgtaaaaatcatatgtattcgtgccgattttcaagacaatgtgtggtcgatagggaccggcgcaaccagtgcagatactgtaggctcaagaaatgcttccgggcaggtatgcgccgagaagccgtgcagaatgagagagataggattagcacccggcgtgctgcctatgaagacagtgcgctgccgtccataaacgcacttctgcaggccgaggttttgtctcgccaaatcgctgcccccgtgagcgggattaatggagatatcagagcaaggcggattgcttccatcgccgacgtctgtgagtcaatgaaggaacagctcctggtgctggtagagtgggcgaagtacatacctgccttttgcgaactcccattagatgaccaggttgcactgcttcgagctcacgccggcgagcatttgctgctaggcgctacacgcagaagtatggtgttcaaagacgtcctcctgcttgggaacgattatatcgtgcccaggcactgtcctgagctggccgaaatgagccgggtgtctattcgcatcttggacgagctcgtcctgccatttcaggaattacaaattgatgacaatgagtacgcatacctgaaggccatcatattctttgatcccgacgctagaggactctccgatcctggtaggattcgtcggcttcgagcgcaggttcaggtgtcactggaagactatatcaacgatagacagtacgacagcaggggccgcttcggggagttgctactgctcctgccaacccttcaaagtattacttggcagatgatcgagcagatccaatttattaaactgttcggaatggcaaagatagataatttgctccaggaaatgctgttaggcggtgccccgtctgacgctccccatgcccaccaccctctgcatccacacctaatgcaggagcatatggggacaaacgtaatcgtggcaaataccatgcccacgcacctctccaacggacagatgtgcgaatggcctcggccaagaggccaagccgctgcccccgaggcaccgcagcctgcgcccccaggcgggagcggatcggaaccttataggctgcttcccggtgctgtcgccactattgtgcgcccattggaggcaatcccccagcctaccataacacgacaggaggttatttga

SEQ ID NO: 1328 - RNA, 1314 nt, synthetic construct
  misc_feature 1..1314: note = CDS (opt3) from Homo sapiens__NP_000448.3__HNF4A(39-474)(S87A_S95A_S99A_K106R_K1 08R_K126R_K127R_S142A_S143A_S148A_T166A_S167A_S313A_S378A_T 429A_T432A_S436A_K458R_S461E)
  source 1..1314: mol_type = other RNA
atggacacctctccttcagaggggacaaacttaaatgcgccaaacagtctgggagtgagcgctctatgcgccatctgtggtgatagggcaactggcaaacactacggggcctcctcttgcgacggatgtaagggctttttccggcgcgctgtacgtaaaaatcatatgtatgcatgccgatttgccagacaatgtgtggtcgatagggaccggcgcaaccagtgcagatactgtaggctcaagaaatgcttccgggctggtatgcgccgagaagccgtgcagaatgagagagataggatttcgacccggcgtgcggcatatgaagactcagccctgccgagcataaacgcccttctgcaggccgaggttttgagtcgccaaatcgcagctcccgtgtccgggattaatggagatatcagagccaagaagattgcgtctatcgccgacgtctgtgagagcatgaaagaacagctcctggtgctggtagagtgggcaaagtacatacctgctttttgcgaactcccattagatgaccaggttgccctgcttagggctcacgccggcgagcatttgctgctaggcgcaacaaaacggtccatggtgttcaaggacgtcctcctgcttgggaacgattatatcgtgccccgacactgtcctgagctggccgaaatgtcacgcgtgagtattagaatcttggacgagctcgtcctgccatttcaggaattacaaattgatgacaatgagtacgcttacctgaaagcgatcatattctttgatcccgacgcaaagggactcagcgatcctggtaagattaaaaggcttcgggcccaggttcaggtgtctctggaagactatatcaacgatcgccagtacgactccagaggcaggttcggggagttgctactgctcctgccaacccttcaatcaattacttggcagatgatcgagcagatccaatttattaagctgttcggaatggctaaaatagataatttgctccaggaaatgctgttaggcggtgccccgagcgacgcaccccatgcccaccaccctctgcatccacacctaatgcaggagcatatggggacaaacgtaatcgtggctaataccatgcccacgcacctcagtaacggacagatgtgcgaatggcctcgtccacggggccaagccgcagcgcccgaggctccgcagcctgctcccccaggcgggtctggatccgaaccttataagctgcttcccggtgcagtcgccactattgtgcgaccattggaggctatcccccagcctaccataacaaaacaggaggttatttga

SEQ ID NO: 1329 - RNA, 1314 nt, synthetic construct
  misc_feature 1..1314: note = CDS (opt3) from Homo sapiens__NP_000448.3__HNF4A(39-474)(S87A_K106R_K108R_K126R_ K127R_S138A_T139A_S142A_S143A_S148A_T166A_S167A_S313A_S378A _T429A_T432A_S436A_K458R_S461E)
  source 1..1314: mol_type = other RNA
atggacacctctccttcagaggggacaaacttaaatgcgccaaacagtctgggagtgagcgctctatgcgccatctgtggtgatagggcaactggcaaacactacggggcctcctcttgcgacggatgtaagggctttttccggcgcgctgtacgtaaaaatcatatgtattcgtgccgattttcaagacaatgtgtggtcgatagggaccggcgcaaccagtgcagatactgtaggctcaagaaatgcttccgggcaggtatgcgccgagaagccgtgcagaatgagagagataggattgctgcccggcgtgcggcatatgaagacagcgccctgccgagtataaacgcccttctgcaggccgaggttttgtcccgccaaatcgcagctcccgtgtctgggattaatggagatatcagagccaagaagattgcgagcatcgccgacgtctgtgagtccatgaaagaacagctcctggtgctggtagagtgggcaaagtacatacctgctttttgcgaactcccattagatgaccaggttgccctgcttagggctcacgccggcgagcatttgctgctaggcgcaaccaaacggtcaatggtgttcaaggacgtcctcctgcttgggaacgattatatcgtgccccgacactgtcctgagctggccgaaatgagtcgcgtgagcattagaatcttggacgagctcgtcctgccatttcaggaattacaaattgatgacaatgagtacgcttacctgaaagcgatcatattctttgatcccgacgcaaagggactctctgatcctggtaagattaaaaggcttcgggcccaggttcaggtgtccctggaagactatatcaacgatcgccagtacgactcaagaggcaggttcggggagttgctactgctcctgccaacacttcaaagcattacctggcagatgatcgagcagatccaatttattaagctgttcggaatggctaaaatagataatttgctccaggaaatgctgttaggcggtgccccgagtgacgcaccccatgcccaccaccctctgcatccacacctaatgcaggagcatatggggactaacgtaatcgtggctaatacaatgcccacccacctctctaacggacagatgtgcgaatggcctcgtccacggggccaagccgcagcgcccgaggctccgcagcctgctcccccaggcgggtccggaagcgaaccttataagctgcttcccggtgcagtcgccacgattgtgcgaccattggaggctatcccccagcctactataaccaaacaggaggttatttga

SEQ ID NO: 1330 - RNA, 1314 nt, synthetic construct
  misc_feature 1..1314: note = CDS (opt3) from Homo sapiens__NP_000448.3__HNF4A(39-474)(S87A_S95A_S99A_K106R_K1 08R_K126R_K127R_S138A_T139A_S142A_S143A_S148A_T166A_S167A_S 313A_S378A_T429A_T432A_S436A_K458R_S461E)
  source 1..1314: mol_type = other RNA
atggacacctctccttcagaggggacaaacttaaatgcgccaaacagtctgggagtgagcgctctatgcgccatctgtggtgatagggcaactggcaaacactacggggcctcctcttgcgacggatgtaagggctttttccggcgcgctgtacgtaaaaatcatatgtatgcatgccgatttgccagacaatgtgtggtcgatagggaccggcgcaaccagtgcagatactgtaggctcaagaaatgcttccgggctggtatgcgccgagaagccgtgcagaatgagagagataggattgcggcacggcgtgccgcttatgaagactcggccctgccgtcaataaacgcacttctgcaggctgaggttttgagccgccaaatcgccgcgcccgtgagtgggattaatggagatatcagagccaagaagattgcatccatcgctgacgtctgtgagtctatgaaagaacagctcctggtgctggtagagtgggccaagtacatacctgctttttgcgaactcccattagatgaccaggttgccctgcttagggcacacgccggcgagcatttgctgctaggcgctaccaaacggagcatggtgttcaaggacgtcctcctgcttgggaacgattatatcgtgccccgacactgtcctgagctggcggaaatgtcccgcgtgtcaattagaatcttggacgagctcgtcctgccatttcaggaattacaaattgatgacaatgagtacgcatacctgaaagccatcatattctttgatcccgacgctaagggactcagtgatcctggtaagattaaaaggcttcgggcccaggttcaggtgagcctggaagactatatcaacgatcgccagtacgactctagaggcaggttcggggagttgctactgctcctgccaacacttcaatccattacctggcagatgatcgagcagatccaatttattaagctgttcggaatggcaaaaatagataatttgctccaggaaatgctgttaggcggtgccccgtcagacgctccccatgcccaccaccctctgcatccacacctaatgcaggagcatatggggactaacgtaatcgtggcaaatacaatgcccacccacctcagcaacggacagatgtgcgaatggcctcgtccacggggccaagcggctgcccccgaggcaccgcagcctgctcccccaggcgggagtggatctgaaccttataagctgcttcccggtgccgtcgccacgattgtgcgaccattggaggcaatcccccagcctactataaccaaacaggaggttatttga

SEQ ID NO: 1331 - RNA, 1314 nt, synthetic construct
  misc_feature 1..1314: note = CDS (opt4) from Homo sapiens__NP_000448.3__HNF4A(39-474)
  source 1..1314: mol_type = other RNA
atggacaccagccccagcgagggcaccaacctgaacgcccccaacagcctgggcgtgagcgccctgtgcgccatctgcggcgacagagccaccggcaagcactacggcgccagcagctgcgacggctgcaagggcttcttcagaagaagcgtgagaaagaaccacatgtacagctgcagattcagcagacagtgcgtggtggacaaggacaagagaaaccagtgcagatactgcagactgaagaagtgcttcagagccggcatgaagaaggaggccgtgcagaacgagagagacagaatcagcaccagaagaagcagctacgaggacagcagcctgcccagcatcaacgccctgctgcaggccgaggtgctgagcagacagatcaccagccccgtgagcggcatcaacggcgacatcagagccaagaagatcgccagcatcgccgacgtgtgcgagagcatgaaggagcagctgctggtgctggtggagtgggccaagtacatccccgccttctgcgagctgcccctggacgaccaggtggccctgctgagagcccacgccggcgagcacctgctgctgggcgccaccaagagaagcatggtgttcaaggacgtgctgctgctgggcaacgactacatcgtgcccagacactgccccgagctggccgagatgagcagagtgagcatcagaatcctggacgagctggtgctgcccttccaggagctgcagatcgacgacaacgagtacgcctacctgaaggccatcatcttcttcgaccccgacgccaagggcctgagcgaccccggcaagatcaagagactgagaagccaggtgcaggtgagcctggaggactacatcaacgacagacagtacgacagcagaggcagattcggcgagctgctgctgctgctgcccaccctgcagagcatcacctggcagatgatcgagcagatccagttcatcaagctgttcggcatggccaagatcgacaacctgctgcaggagatgctgctgggcggcagccccagcgacgccccccacgcccaccaccccctgcacccccacctgatgcaggagcacatgggcaccaacgtgatcgtggccaacaccatgcccacccacctgagcaacggccagatgtgcgagtggcccagacccagaggccaggccgccacccccgagaccccccagcccagcccccccggcggcagcggcagcgagccctacaagctgctgcccggcgccgtggccaccatcgtgaagcccctgagcgccatcccccagcccaccatcaccaagcaggaggtgatctga

SEQ ID NO: 1332 - RNA, 1314 nt, synthetic construct
  misc_feature 1..1314: note = CDS (opt4) from Homo sapiens__NP_000448.3__HNF4A(39-474)(S313A)
  source 1..1314: mol_type = other RNA
atggacaccagccccagcgagggcaccaacctgaacgcccccaacagcctgggcgtgagcgccctgtgcgccatctgcggcgacagagccaccggcaagcactacggcgccagcagctgcgacggctgcaagggcttcttcagaagaagcgtgagaaagaaccacatgtacagctgcagattcagcagacagtgcgtggtggacaaggacaagagaaaccagtgcagatactgcagactgaagaagtgcttcagagccggcatgaagaaggaggccgtgcagaacgagagagacagaatcagcaccagaagaagcagctacgaggacagcagcctgcccagcatcaacgccctgctgcaggccgaggtgctgagcagacagatcaccagccccgtgagcggcatcaacggcgacatcagagccaagaagatcgccagcatcgccgacgtgtgcgagagcatgaaggagcagctgctggtgctggtggagtgggccaagtacatccccgccttctgcgagctgcccctggacgaccaggtggccctgctgagagcccacgccggcgagcacctgctgctgggcgccaccaagagaagcatggtgttcaaggacgtgctgctgctgggcaacgactacatcgtgcccagacactgccccgagctggccgagatgagcagagtgagcatcagaatcctggacgagctggtgctgcccttccaggagctgcagatcgacgacaacgagtacgcctacctgaaggccatcatcttcttcgaccccgacgccaagggcctgagcgaccccggcaagatcaagagactgagagcccaggtgcaggtgagcctggaggactacatcaacgacagacagtacgacagcagaggcagattcggcgagctgctgctgctgctgcccaccctgcagagcatcacctggcagatgatcgagcagatccagttcatcaagctgttcggcatggccaagatcgacaacctgctgcaggagatgctgctgggcggcagccccagcgacgccccccacgcccaccaccccctgcacccccacctgatgcaggagcacatgggcaccaacgtgatcgtggccaacaccatgcccacccacctgagcaacggccagatgtgcgagtggcccagacccagaggccaggccgccacccccgagaccccccagcccagcccccccggcggcagcggcagcgagccctacaagctgctgcccggcgccgtggccaccatcgtgaagcccctgagcgccatcccccagcccaccatcaccaagcaggaggtgatctga

SEQ ID NO: 1333 - RNA, 1314 nt, synthetic construct
  misc_feature 1..1314: note = CDS (opt4) from Homo sapiens__NP_000448.3__HNF4A(39-474)(S313E)
  source 1..1314: mol_type = other RNA
atggacaccagccccagcgagggcaccaacctgaacgcccccaacagcctgggcgtgagcgccctgtgcgccatctgcggcgacagagccaccggcaagcactacggcgccagcagctgcgacggctgcaagggcttcttcagaagaagcgtgagaaagaaccacatgtacagctgcagattcagcagacagtgcgtggtggacaaggacaagagaaaccagtgcagatactgcagactgaagaagtgcttcagagccggcatgaagaaggaggccgtgcagaacgagagagacagaatcagcaccagaagaagcagctacgaggacagcagcctgcccagcatcaacgccctgctgcaggccgaggtgctgagcagacagatcaccagccccgtgagcggcatcaacggcgacatcagagccaagaagatcgccagcatcgccgacgtgtgcgagagcatgaaggagcagctgctggtgctggtggagtgggccaagtacatccccgccttctgcgagctgcccctggacgaccaggtggccctgctgagagcccacgccggcgagcacctgctgctgggcgccaccaagagaagcatggtgttcaaggacgtgctgctgctgggcaacgactacatcgtgcccagacactgccccgagctggccgagatgagcagagtgagcatcagaatcctggacgagctggtgctgcccttccaggagctgcagatcgacgacaacgagtacgcctacctgaaggccatcatcttcttcgaccccgacgccaagggcctgagcgaccccggcaagatcaagagactgagagagcaggtgcaggtgagcctggaggactacatcaacgacagacagtacgacagcagaggcagattcggcgagctgctgctgctgctgcccaccctgcagagcatcacctggcagatgatcgagcagatccagttcatcaagctgttcggcatggccaagatcgacaacctgctgcaggagatgctgctgggcggcagccccagcgacgccccccacgcccaccaccccctgcacccccacctgatgcaggagcacatgggcaccaacgtgatcgtggccaacaccatgcccacccacctgagcaacggccagatgtgcgagtggcccagacccagaggccaggccgccacccccgagaccccccagcccagcccccccggcggcagcggcagcgagccctacaagctgctgcccggcgccgtggccaccatcgtgaagcccctgagcgccatcccccagcccaccatcaccaagcaggaggtgatctga

SEQ ID NO: 1334 - RNA, 1314 nt, synthetic construct
  misc_feature 1..1314: note = CDS (opt4) from Homo sapiens__NP_000448.3__HNF4A(39-474)(S142A_S143A)
  source 1..1314: mol_type = other RNA
atggacaccagccccagcgagggcaccaacctgaacgcccccaacagcctgggcgtgagcgccctgtgcgccatctgcggcgacagagccaccggcaagcactacggcgccagcagctgcgacggctgcaagggcttcttcagaagaagcgtgagaaagaaccacatgtacagctgcagattcagcagacagtgcgtggtggacaaggacaagagaaaccagtgcagatactgcagactgaagaagtgcttcagagccggcatgaagaaggaggccgtgcagaacgagagagacagaatcagcaccagaagagccgcctacgaggacagcagcctgcccagcatcaacgccctgctgcaggccgaggtgctgagcagacagatcaccagccccgtgagcggcatcaacggcgacatcagagccaagaagatcgccagcatcgccgacgtgtgcgagagcatgaaggagcagctgctggtgctggtggagtgggccaagtacatccccgccttctgcgagctgcccctggacgaccaggtggccctgctgagagcccacgccggcgagcacctgctgctgggcgccaccaagagaagcatggtgttcaaggacgtgctgctgctgggcaacgactacatcgtgcccagacactgccccgagctggccgagatgagcagagtgagcatcagaatcctggacgagctggtgctgcccttccaggagctgcagatcgacgacaacgagtacgcctacctgaaggccatcatcttcttcgaccccgacgccaagggcctgagcgaccccggcaagatcaagagactgagaagccaggtgcaggtgagcctggaggactacatcaacgacagacagtacgacagcagaggcagattcggcgagctgctgctgctgctgcccaccctgcagagcatcacctggcagatgatcgagcagatccagttcatcaagctgttcggcatggccaagatcgacaacctgctgcaggagatgctgctgggcggcagccccagcgacgccccccacgcccaccaccccctgcacccccacctgatgcaggagcacatgggcaccaacgtgatcgtggccaacaccatgcccacccacctgagcaacggccagatgtgcgagtggcccagacccagaggccaggccgccacccccgagaccccccagcccagcccccccggcggcagcggcagcgagccctacaagctgctgcccggcgccgtggccaccatcgtgaagcccctgagcgccatcccccagcccaccatcaccaagcaggaggtgatctga

SEQ ID NO: 1335 - RNA, 1314 nt, synthetic construct
  misc_feature 1..1314: note = CDS (opt4) from Homo sapiens__NP_000448.3__HNF4A(39-474)(S142E_S143E)
  source 1..1314: mol_type = other RNA
atggacaccagccccagcgagggcaccaacctgaacgcccccaacagcctgggcgtgagcgccctgtgcgccatctgcggcgacagagccaccggcaagcactacggcgccagcagctgcgacggctgcaagggcttcttcagaagaagcgtgagaaagaaccacatgtacagctgcagattcagcagacagtgcgtggtggacaaggacaagagaaaccagtgcagatactgcagactgaagaagtgcttcagagccggcatgaagaaggaggccgtgcagaacgagagagacagaatcagcaccagaagagaggagtacgaggacagcagcctgcccagcatcaacgccctgctgcaggccgaggtgctgagcagacagatcaccagccccgtgagcggcatcaacggcgacatcagagccaagaagatcgccagcatcgccgacgtgtgcgagagcatgaaggagcagctgctggtgctggtggagtgggccaagtacatccccgccttctgcgagctgcccctggacgaccaggtggccctgctgagagcccacgccggcgagcacctgctgctgggcgccaccaagagaagcatggtgttcaaggacgtgctgctgctgggcaacgactacatcgtgcccagacactgccccgagctggccgagatgagcagagtgagcatcagaatcctggacgagctggtgctgcccttccaggagctgcagatcgacgacaacgagtacgcctacctgaaggccatcatcttcttcgaccccgacgccaagggcctgagcgaccccggcaagatcaagagactgagaagccaggtgcaggtgagcctggaggactacatcaacgacagacagtacgacagcagaggcagattcggcgagctgctgctgctgctgcccaccctgcagagcatcacctggcagatgatcgagcagatccagttcatcaagctgttcggcatggccaagatcgacaacctgctgcaggagatgctgctgggcggcagccccagcgacgccccccacgcccaccaccccctgcacccccacctgatgcaggagcacatgggcaccaacgtgatcgtggccaacaccatgcccacccacctgagcaacggccagatgtgcgagtggcccagacccagaggccaggccgccacccccgagaccccccagcccagcccccccggcggcagcggcagcgagccctacaagctgctgcccggcgccgtggccaccatcgtgaagcccctgagcgccatcccccagcccaccatcaccaagcaggaggtgatctga

SEQ ID NO: 1336 - RNA, 1314 nt, synthetic construct
  misc_feature 1..1314: note = CDS (opt4) from Homo sapiens__NP_000448.3__HNF4A(39-474)(S143A)
  source 1..1314: mol_type = other RNA
atggacaccagccccagcgagggcaccaacctgaacgcccccaacagcctgggcgtgagcgccctgtgcgccatctgcggcgacagagccaccggcaagcactacggcgccagcagctgcgacggctgcaagggcttcttcagaagaagcgtgagaaagaaccacatgtacagctgcagattcagcagacagtgcgtggtggacaaggacaagagaaaccagtgcagatactgcagactgaagaagtgcttcagagccggcatgaagaaggaggccgtgcagaacgagagagacagaatcagcaccagaagaagcgcctacgaggacagcagcctgcccagcatcaacgccctgctgcaggccgaggtgctgagcagacagatcaccagccccgtgagcggcatcaacggcgacatcagagccaagaagatcgccagcatcgccgacgtgtgcgagagcatgaaggagcagctgctggtgctggtggagtgggccaagtacatccccgccttctgcgagctgcccctggacgaccaggtggccctgctgagagcccacgccggcgagcacctgctgctgggcgccaccaagagaagcatggtgttcaaggacgtgctgctgctgggcaacgactacatcgtgcccagacactgccccgagctggccgagatgagcagagtgagcatcagaatcctggacgagctggtgctgcccttccaggagctgcagatcgacgacaacgagtacgcctacctgaaggccatcatcttcttcgaccccgacgccaagggcctgagcgaccccggcaagatcaagagactgagaagccaggtgcaggtgagcctggaggactacatcaacgacagacagtacgacagcagaggcagattcggcgagctgctgctgctgctgcccaccctgcagagcatcacctggcagatgatcgagcagatccagttcatcaagctgttcggcatggccaagatcgacaacctgctgcaggagatgctgctgggcggcagccccagcgacgccccccacgcccaccaccccctgcacccccacctgatgcaggagcacatgggcaccaacgtgatcgtggccaacaccatgcccacccacctgagcaacggccagatgtgcgagtggcccagacccagaggccaggccgccacccccgagaccccccagcccagcccccccggcggcagcggcagcgagccctacaagctgctgcccggcgccgtggccaccatcgtgaagcccctgagcgccatcccccagcccaccatcaccaagcaggaggtgatctga

SEQ ID NO: 1337 - RNA, 1314 nt, synthetic construct
  misc_feature 1..1314: note = CDS (opt4) from Homo sapiens__NP_000448.3__HNF4A(39-474)(T166A)
  source 1..1314: mol_type = other RNA
atggacaccagccccagcgagggcaccaacctgaacgcccccaacagcctgggcgtgagcgccctgtgcgccatctgcggcgacagagccaccggcaagcactacggcgccagcagctgcgacggctgcaagggcttcttcagaagaagcgtgagaaagaaccacatgtacagctgcagattcagcagacagtgcgtggtggacaaggacaagagaaaccagtgcagatactgcagactgaagaagtgcttcagagccggcatgaagaaggaggccgtgcagaacgagagagacagaatcagcaccagaagaagcagctacgaggacagcagcctgcccagcatcaacgccctgctgcaggccgaggtgctgagcagacagatcgccagccccgtgagcggcatcaacggcgacatcagagccaagaagatcgccagcatcgccgacgtgtgcgagagcatgaaggagcagctgctggtgctggtggagtgggccaagtacatccccgccttctgcgagctgcccctggacgaccaggtggccctgctgagagcccacgccggcgagcacctgctgctgggcgccaccaagagaagcatggtgttcaaggacgtgctgctgctgggcaacgactacatcgtgcccagacactgccccgagctggccgagatgagcagagtgagcatcagaatcctggacgagctggtgctgcccttccaggagctgcagatcgacgacaacgagtacgcctacctgaaggccatcatcttcttcgaccccgacgccaagggcctgagcgaccccggcaagatcaagagactgagaagccaggtgcaggtgagcctggaggactacatcaacgacagacagtacgacagcagaggcagattcggcgagctgctgctgctgctgcccaccctgcagagcatcacctggcagatgatcgagcagatccagttcatcaagctgttcggcatggccaagatcgacaacctgctgcaggagatgctgctgggcggcagccccagcgacgccccccacgcccaccaccccctgcacccccacctgatgcaggagcacatgggcaccaacgtgatcgtggccaacaccatgcccacccacctgagcaacggccagatgtgcgagtggcccagacccagaggccaggccgccacccccgagaccccccagcccagcccccccggcggcagcggcagcgagccctacaagctgctgcccggcgccgtggccaccatcgtgaagcccctgagcgccatcccccagcccaccatcaccaagcaggaggtgatctga

SEQ ID NO: 1338 - RNA, 1314 nt, synthetic construct
  misc_feature 1..1314: note = CDS (opt4) from Homo sapiens__NP_000448.3__HNF4A(39-474)(S167E)
  source 1..1314: mol_type = other RNA
atggacaccagccccagcgagggcaccaacctgaacgcccccaacagcctgggcgtgagcgccctgtgcgccatctgcggcgacagagccaccggcaagcactacggcgccagcagctgcgacggctgcaagggcttcttcagaagaagcgtgagaaagaaccacatgtacagctgcagattcagcagacagtgcgtggtggacaaggacaagagaaaccagtgcagatactgcagactgaagaagtgcttcagagccggcatgaagaaggaggccgtgcagaacgagagagacagaatcagcaccagaagaagcagctacgaggacagcagcctgcccagcatcaacgccctgctgcaggccgaggtgctgagcagacagatcaccgagcccgtgagcggcatcaacggcgacatcagagccaagaagatcgccagcatcgccgacgtgtgcgagagcatgaaggagcagctgctggtgctggtggagtgggccaagtacatccccgccttctgcgagctgcccctggacgaccaggtggccctgctgagagcccacgccggcgagcacctgctgctgggcgccaccaagagaagcatggtgttcaaggacgtgctgctgctgggcaacgactacatcgtgcccagacactgccccgagctggccgagatgagcagagtgagcatcagaatcctggacgagctggtgctgcccttccaggagctgcagatcgacgacaacgagtacgcctacctgaaggccatcatcttcttcgaccccgacgccaagggcctgagcgaccccggcaagatcaagagactgagaagccaggtgcaggtgagcctggaggactacatcaacgacagacagtacgacagcagaggcagattcggcgagctgctgctgctgctgcccaccctgcagagcatcacctggcagatgatcgagcagatccagttcatcaagctgttcggcatggccaagatcgacaacctgctgcaggagatgctgctgggcggcagccccagcgacgccccccacgcccaccaccccctgcacccccacctgatgcaggagcacatgggcaccaacgtgatcgtggccaacaccatgcccacccacctgagcaacggccagatgtgcgagtggcccagacccagaggccaggccgccacccccgagaccccccagcccagcccccccggcggcagcggcagcgagccctacaagctgctgcccggcgccgtggccaccatcgtgaagcccctgagcgccatcccccagcccaccatcaccaagcaggaggtgatctga

SEQ ID NO: 1339 - RNA, 1314 nt, synthetic construct
  misc_feature 1..1314: note = CDS (opt4) from Homo sapiens__NP_000448.3__HNF4A(39-474)(S167A)
  source 1..1314: mol_type = other RNA
atggacaccagccccagcgagggcaccaacctgaacgcccccaacagcctgggcgtgagcgccctgtgcgccatctgcggcgacagagccaccggcaagcactacggcgccagcagctgcgacggctgcaagggcttcttcagaagaagcgtgagaaagaaccacatgtacagctgcagattcagcagacagtgcgtggtggacaaggacaagagaaaccagtgcagatactgcagactgaagaagtgcttcagagccggcatgaagaaggaggccgtgcagaacgagagagacagaatcagcaccagaagaagcagctacgaggacagcagcctgcccagcatcaacgccctgctgcaggccgaggtgctgagcagacagatcaccgcccccgtgagcggcatcaacggcgacatcagagccaagaagatcgccagcatcgccgacgtgtgcgagagcatgaaggagcagctgctggtgctggtggagtgggccaagtacatccccgccttctgcgagctgcccctggacgaccaggtggccctgctgagagcccacgccggcgagcacctgctgctgggcgccaccaagagaagcatggtgttcaaggacgtgctgctgctgggcaacgactacatcgtgcccagacactgccccgagctggccgagatgagcagagtgagcatcagaatcctggacgagctggtgctgcccttccaggagctgcagatcgacgacaacgagtacgcctacctgaaggccatcatcttcttcgaccccgacgccaagggcctgagcgaccccggcaagatcaagagactgagaagccaggtgcaggtgagcctggaggactacatcaacgacagacagtacgacagcagaggcagattcggcgagctgctgctgctgctgcccaccctgcagagcatcacctggcagatgatcgagcagatccagttcatcaagctgttcggcatggccaagatcgacaacctgctgcaggagatgctgctgggcggcagccccagcgacgccccccacgcccaccaccccctgcacccccacctgatgcaggagcacatgggcaccaacgtgatcgtggccaacaccatgcccacccacctgagcaacggccagatgtgcgagtggcccagacccagaggccaggccgccacccccgagaccccccagcccagcccccccggcggcagcggcagcgagccctacaagctgctgcccggcgccgtggccaccatcgtgaagcccctgagcgccatcccccagcccaccatcaccaagcaggaggtgatctga

SEQ ID NO: 1340 - RNA, 1314 nt, synthetic construct
  misc_feature 1..1314: note = CDS (opt4) from Homo sapiens__NP_000448.3__HNF4A(39-474)(S167A_S378A_T429A_T432A _S436A)
  source 1..1314: mol_type = other RNA
atggacaccagccccagcgagggcaccaacctgaacgcccccaacagcctgggcgtgagcgccctgtgcgccatctgcggcgacagagccaccggcaagcactacggcgccagcagctgcgacggctgcaagggcttcttcagaagaagcgtgagaaagaaccacatgtacagctgcagattcagcagacagtgcgtggtggacaaggacaagagaaaccagtgcagatactgcagactgaagaagtgcttcagagccggcatgaagaaggaggccgtgcagaacgagagagacagaatcagcaccagaagaagcagctacgaggacagcagcctgcccagcatcaacgccctgctgcaggccgaggtgctgagcagacagatcaccgcccccgtgagcggcatcaacggcgacatcagagccaagaagatcgccagcatcgccgacgtgtgcgagagcatgaaggagcagctgctggtgctggtggagtgggccaagtacatccccgccttctgcgagctgcccctggacgaccaggtggccctgctgagagcccacgccggcgagcacctgctgctgggcgccaccaagagaagcatggtgttcaaggacgtgctgctgctgggcaacgactacatcgtgcccagacactgccccgagctggccgagatgagcagagtgagcatcagaatcctggacgagctggtgctgcccttccaggagctgcagatcgacgacaacgagtacgcctacctgaaggccatcatcttcttcgaccccgacgccaagggcctgagcgaccccggcaagatcaagagactgagaagccaggtgcaggtgagcctggaggactacatcaacgacagacagtacgacagcagaggcagattcggcgagctgctgctgctgctgcccaccctgcagagcatcacctggcagatgatcgagcagatccagttcatcaagctgttcggcatggccaagatcgacaacctgctgcaggagatgctgctgggcggcgcccccagcgacgccccccacgcccaccaccccctgcacccccacctgatgcaggagcacatgggcaccaacgtgatcgtggccaacaccatgcccacccacctgagcaacggccagatgtgcgagtggcccagacccagaggccaggccgccgcccccgaggccccccagcccgccccccccggcggcagcggcagcgagccctacaagctgctgcccggcgccgtggccaccatcgtgaagcccctgagcgccatcccccagcccaccatcaccaagcaggaggtgatctga

SEQ ID NO: 1341 - RNA, 1314 nt, synthetic construct
  misc_feature 1..1314: note = CDS (opt4) from Homo sapiens__NP_000448.3__HNF4A(39-474)(S167E_S378E_T429E_T432E _S436E)
  source 1..1314: mol_type = other RNA
atggacaccagccccagcgagggcaccaacctgaacgcccccaacagcctgggcgtgagcgccctgtgcgccatctgcggcgacagagccaccggcaagcactacggcgccagcagctgcgacggctgcaagggcttcttcagaagaagcgtgagaaagaaccacatgtacagctgcagattcagcagacagtgcgtggtggacaaggacaagagaaaccagtgcagatactgcagactgaagaagtgcttcagagccggcatgaagaaggaggccgtgcagaacgagagagacagaatcagcaccagaagaagcagctacgaggacagcagcctgcccagcatcaacgccctgctgcaggccgaggtgctgagcagacagatcaccgagcccgtgagcggcatcaacggcgacatcagagccaagaagatcgccagcatcgccgacgtgtgcgagagcatgaaggagcagctgctggtgctggtggagtgggccaagtacatccccgccttctgcgagctgcccctggacgaccaggtggccctgctgagagcccacgccggcgagcacctgctgctgggcgccaccaagagaagcatggtgttcaaggacgtgctgctgctgggcaacgactacatcgtgcccagacactgccccgagctggccgagatgagcagagtgagcatcagaatcctggacgagctggtgctgcccttccaggagctgcagatcgacgacaacgagtacgcctacctgaaggccatcatcttcttcgaccccgacgccaagggcctgagcgaccccggcaagatcaagagactgagaagccaggtgcaggtgagcctggaggactacatcaacgacagacagtacgacagcagaggcagattcggcgagctgctgctgctgctgcccaccctgcagagcatcacctggcagatgatcgagcagatccagttcatcaagctgttcggcatggccaagatcgacaacctgctgcaggagatgctgctgggcggcgagcccagcgacgccccccacgcccaccaccccctgcacccccacctgatgcaggagcacatgggcaccaacgtgatcgtggccaacaccatgcccacccacctgagcaacggccagatgtgcgagtggcccagacccagaggccaggccgccgagcccgaggagccccagcccgagccccccggcggcagcggcagcgagccctacaagctgctgcccggcgccgtggccaccatcgtgaagcccctgagcgccatcccccagcccaccatcaccaagcaggaggtgatctga

SEQ ID NO: 1342 - RNA, 1314 nt, synthetic construct
  misc_feature 1..1314: note = CDS (opt4) from Homo sapiens__NP_000448.3__HNF4A(39-474)(S87A)
  source 1..1314: mol_type = other RNA
atggacaccagccccagcgagggcaccaacctgaacgcccccaacagcctgggcgtgagcgccctgtgcgccatctgcggcgacagagccaccggcaagcactacggcgccagcagctgcgacggctgcaagggcttcttcagaagagccgtgagaaagaaccacatgtacagctgcagattcagcagacagtgcgtggtggacaaggacaagagaaaccagtgcagatactgcagactgaagaagtgcttcagagccggcatgaagaaggaggccgtgcagaacgagagagacagaatcagcaccagaagaagcagctacgaggacagcagcctgcccagcatcaacgccctgctgcaggccgaggtgctgagcagacagatcaccagccccgtgagcggcatcaacggcgacatcagagccaagaagatcgccagcatcgccgacgtgtgcgagagcatgaaggagcagctgctggtgctggtggagtgggccaagtacatccccgccttctgcgagctgcccctggacgaccaggtggccctgctgagagcccacgccggcgagcacctgctgctgggcgccaccaagagaagcatggtgttcaaggacgtgctgctgctgggcaacgactacatcgtgcccagacactgccccgagctggccgagatgagcagagtgagcatcagaatcctggacgagctggtgctgcccttccaggagctgcagatcgacgacaacgagtacgcctacctgaaggccatcatcttcttcgaccccgacgccaagggcctgagcgaccccggcaagatcaagagactgagaagccaggtgcaggtgagcctggaggactacatcaacgacagacagtacgacagcagaggcagattcggcgagctgctgctgctgctgcccaccctgcagagcatcacctggcagatgatcgagcagatccagttcatcaagctgttcggcatggccaagatcgacaacctgctgcaggagatgctgctgggcggcagccccagcgacgccccccacgcccaccaccccctgcacccccacctgatgcaggagcacatgggcaccaacgtgatcgtggccaacaccatgcccacccacctgagcaacggccagatgtgcgagtggcccagacccagaggccaggccgccacccccgagaccccccagcccagcccccccggcggcagcggcagcgagccctacaagctgctgcccggcgccgtggccaccatcgtgaagcccctgagcgccatcccccagcccaccatcaccaagcaggaggtgatctga

SEQ ID NO: 1343 - RNA, 1314 nt, synthetic construct
  misc_feature 1..1314: note = CDS (opt4) from Homo sapiens__NP_000448.3__HNF4A(39-474)(S87E)
  source 1..1314: mol_type = other RNA
atggacaccagccccagcgagggcaccaacctgaacgcccccaacagcctgggcgtgagcgccctgtgcgccatctgcggcgacagagccaccggcaagcactacggcgccagcagctgcgacggctgcaagggcttcttcagaagagaggtgagaaagaaccacatgtacagctgcagattcagcagacagtgcgtggtggacaaggacaagagaaaccagtgcagatactgcagactgaagaagtgcttcagagccggcatgaagaaggaggccgtgcagaacgagagagacagaatcagcaccagaagaagcagctacgaggacagcagcctgcccagcatcaacgccctgctgcaggccgaggtgctgagcagacagatcaccagccccgtgagcggcatcaacggcgacatcagagccaagaagatcgccagcatcgccgacgtgtgcgagagcatgaaggagcagctgctggtgctggtggagtgggccaagtacatccccgccttctgcgagctgcccctggacgaccaggtggccctgctgagagcccacgccggcgagcacctgctgctgggcgccaccaagagaagcatggtgttcaaggacgtgctgctgctgggcaacgactacatcgtgcccagacactgccccgagctggccgagatgagcagagtgagcatcagaatcctggacgagctggtgctgcccttccaggagctgcagatcgacgacaacgagtacgcctacctgaaggccatcatcttcttcgaccccgacgccaagggcctgagcgaccccggcaagatcaagagactgagaagccaggtgcaggtgagcctggaggactacatcaacgacagacagtacgacagcagaggcagattcggcgagctgctgctgctgctgcccaccctgcagagcatcacctggcagatgatcgagcagatccagttcatcaagctgttcggcatggccaagatcgacaacctgctgcaggagatgctgctgggcggcagccccagcgacgccccccacgcccaccaccccctgcacccccacctgatgcaggagcacatgggcaccaacgtgatcgtggccaacaccatgcccacccacctgagcaacggccagatgtgcgagtggcccagacccagaggccaggccgccacccccgagaccccccagcccagcccccccggcggcagcggcagcgagccctacaagctgctgcccggcgccgtggccaccatcgtgaagcccctgagcgccatcccccagcccaccatcaccaagcaggaggtgatctga

SEQ ID NO: 1344 - RNA, 1314 nt, synthetic construct; identical to SEQ ID NO: 1331
  misc_feature 1..1314: note = CDS (opt4) from Homo sapiens__NP_000448.3__HNF4A(39-474)(R2V)
  source 1..1314: mol_type = other RNA

SEQ ID NO: 1345 - RNA, 1314 nt, synthetic construct; identical to SEQ ID NO: 1331
  misc_feature 1..1314: note = CDS (opt4) from Homo sapiens__NP_000448.3__HNF4A(39-474)(R2V_K5V)
  source 1..1314: mol_type = other RNA

SEQ ID NO: 1346 - RNA, 1314 nt, synthetic construct
  misc_feature 1..1314: note = CDS (opt4) from Homo sapiens__NP_000448.3__HNF4A(39-474)(K179R_K180R)
  source 1..1314: mol_type = other RNA
atggacaccagccccagcgagggcaccaacctgaacgcccccaacagcctgggcgtgagcgccctgtgcgccatctgcggcgacagagccaccggcaagcactacggcgccagcagctgcgacggctgcaagggcttcttcagaagaagcgtgagaaagaaccacatgtacagctgcagattcagcagacagtgcgtggtggacaaggacaagagaaaccagtgcagatactgcagactgaagaagtgcttcagagccggcatgaagaaggaggccgtgcagaacgagagagacagaatcagcaccagaagaagcagctacgaggacagcagcctgcccagcatcaacgccctgctgcaggccgaggtgctgagcagacagatcaccagccccgtgagcggcatcaacggcgacatcagagccagaagaatcgccagcatcgccgacgtgtgcgagagcatgaaggagcagctgctggtgctggtggagtgggccaagtacatccccgccttctgcgagctgcccctggacgaccaggtggccctgctgagagcccacgccggcgagcacctgctgctgggcgccaccaagagaagcatggtgttcaaggacgtgctgctgctgggcaacgactacatcgtgcccagacactgccccgagctggccgagatgagcagagtgagcatcagaatcctggacgagctggtgctgcccttccaggagctgcagatcgacgacaacgagtacgcctacctgaaggccatcatcttcttcgaccccgacgccaagggcctgagcgaccccggcaagatcaagagactgagaagccaggtgcaggtgagcctggaggactacatcaacgacagacagtacgacagcagaggcagattcggcgagctgctgctgctgctgcccaccctgcagagcatcacctggcagatgatcgagcagatccagttcatcaagctgttcggcatggccaagatcgacaacctgctgcaggagatgctgctgggcggcagccccagcgacgccccccacgcccaccaccccctgcacccccacctgatgcaggagcacatgggcaccaacgtgatcgtggccaacaccatgcccacccacctgagcaacggccagatgtgcgagtggcccagacccagaggccaggccgccacccccgagaccccccagcccagcccccccggcggcagcggcagcgagccctacaagctgctgcccggcgccgtggccaccatcgtgaagcccctgagcgccatcccccagcccaccatcaccaagcaggaggtgatctga

SEQ ID NO: 1347 - RNA, 1314 nt, synthetic construct
  misc_feature 1..1314: note = CDS (opt4) from Homo sapiens__NP_000448.3__HNF4A(39-474)(K234R)
  source 1..1314: mol_type = other RNA
atggacaccagccccagcgagggcaccaacctgaacgcccccaacagcctgggcgtgagcgccctgtgcgccatctgcggcgacagagccaccggcaagcactacggcgccagcagctgcgacggctgcaagggcttcttcagaagaagcgtgagaaagaaccacatgtacagctgcagattcagcagacagtgcgtggtggacaaggacaagagaaaccagtgcagatactgcagactgaagaagtgcttcagagccggcatgaagaaggaggccgtgcagaacgagagagacagaatcagcaccagaagaagcagctacgaggacagcagcctgcccagcatcaacgccctgctgcaggccgaggtgctgagcagacagatcaccagccccgtgagcggcatcaacggcgacatcagagccaagaagatcgccagcatcgccgacgtgtgcgagagcatgaaggagcagctgctggtgctggtggagtgggccaagtacatccccgccttctgcgagctgcccctggacgaccaggtggccctgctgagagcccacgccggcgagcacctgctgctgggcgccaccagaagaagcatggtgttcaaggacgtgctgctgctgggcaacgactacatcgtgcccagacactgccccgagctggccgagatgagcagagtgagcatcagaatcctggacgagctggtgctgcccttccaggagctgcagatcgacgacaacgagtacgcctacctgaaggccatcatcttcttcgaccccgacgccaagggcctgagcgaccccggcaagatcaagagactgagaagccaggtgcaggtgagcctggaggactacatcaacgacagacagtacgacagcagaggcagattcggcgagctgctgctgctgctgcccaccctgcagagcatcacctggcagatgatcgagcagatccagttcatcaagctgttcggcatggccaagatcgacaacctgctgcaggagatgctgctgggcggcagccccagcgacgccccccacgcccaccaccccctgcacccccacctgatgcaggagcacatgggcaccaacgtgatcgtggccaacaccatgcccacccacctgagcaacggccagatgtgcgagtggcccagacccagaggccaggccgccacccccgagaccccccagcccagcccccccggcggcagcggcagcgagccctacaagctgctgcccggcgccgtggccaccatcgtgaagcccctgagcgccatcccccagcccaccatcaccaagcaggaggtgatctga

SEQ ID NO: 1348 - RNA, 1314 nt, synthetic construct
  misc_feature 1..1314: note = CDS (opt4) from Homo sapiens__NP_000448.3__HNF4A(39-474)(K300R)
  source 1..1314: mol_type = other RNA
atggacaccagccccagcgagggcaccaacctgaacgcccccaacagcctgggcgtgagcgccctgtgcgccatctgcggcgacagagccaccggcaagcactacggcgccagcagctgcgacggctgcaagggcttcttcagaagaagcgtgagaaagaaccacatgtacagctgcagattcagcagacagtgcgtggtggacaaggacaagagaaaccagtgcagatactgcagactgaagaagtgcttcagagccggcatgaagaaggaggccgtgcagaacgagagagacagaatcagcaccagaagaagcagctacgaggacagcagcctgcccagcatcaacgccctgctgcaggccgaggtgctgagcagacagatcaccagccccgtgagcggcatcaacggcgacatcagagccaagaagatcgccagcatcgccgacgtgtgcgagagcatgaaggagcagctgctggtgctggtggagtgggccaagtacatccccgccttctgcgagctgcccctggacgaccaggtggccctgctgagagcccacgccggcgagcacctgctgctgggcgccaccaagagaagcatggtgttcaaggacgtgctgctgctgggcaacgactacatcgtgcccagacactgccccgagctggccgagatgagcagagtgagcatcagaatcctggacgagctggtgctgcccttccaggagctgcagatcgacgacaacgagtacgcctacctgaaggccatcatcttcttcgaccccgacgccagaggcctgagcgaccccggcaagatcaagagactgagaagccaggtgcaggtgagcctggaggactacatcaacgacagacagtacgacagcagaggcagattcggcgagctgctgctgctgctgcccaccctgcagagcatcacctggcagatgatcgagcagatccagttcatcaagctgttcggcatggccaagatcgacaacctgctgcaggagatgctgctgggcggcagccccagcgacgccccccacgcccaccaccccctgcacccccacctgatgcaggagcacatgggcaccaacgtgatcgtggccaacaccatgcccacccacctgagcaacggccagatgtgcgagtggcccagacccagaggccaggccgccacccccgagaccccccagcccagcccccccggcggcagcggcagcgagccctacaagctgctgcccggcgccgtggccaccatcgtgaagcccctgagcgccatcccccagcccaccatcaccaagcaggaggtgatctga

SEQ ID NO: 1349 - RNA, 1314 nt, synthetic construct
  misc_feature 1..1314: note = CDS (opt4) from Homo sapiens__NP_000448.3__HNF4A(39-474)(K300R_K307R_K309R)
  source 1..1314: mol_type = other RNA
atggacaccagccccagcgagggcaccaacctgaacgcccccaacagcctgggcgtgagcgccctgtgcgccatctgcggcgacagagccaccggcaagcactacggcgccagcagctgcgacggctgcaagggcttcttcagaagaagcgtgagaaagaaccacatgtacagctgcagattcagcagacagtgcgtggtggacaaggacaagagaaaccagtgcagatactgcagactgaagaagtgcttcagagccggcatgaagaaggaggccgtgcagaacgagagagacagaatcagcaccagaagaagcagctacgaggacagcagcctgcccagcatcaacgccctgctgcaggccgaggtgctgagcagacagatcaccagccccgtgagcggcatcaacggcgacatcagagccaagaagatcgccagcatcgccgacgtgtgcgagagcatgaaggagcagctgctggtgctggtggagtgggccaagtacatccccgccttctgcgagctgcccctggacgaccaggtggccctgctgagagcccacgccggcgagcacctgctgctgggcgccaccaagagaagcatggtgttcaaggacgtgctgctgctgggcaacgactacatcgtgcccagacactgccccgagctggccgagatgagcagagtgagcatcagaatcctggacgagctggtgctgcccttccaggagctgcagatcgacgacaacgagtacgcctacctgaaggccatcatcttcttcgaccccgacgccagaggcctgagcgaccccggcagaatcagaagactgagaagccaggtgcaggtgagcctggaggactacatcaacgacagacagtacgacagcagaggcagattcggcgagctgctgctgctgctgcccaccctgcagagcatcacctggcagatgatcgagcagatccagttcatcaagctgttcggcatggccaagatcgacaacctgctgcaggagatgctgctgggcggcagccccagcgacgccccccacgcccaccaccccctgcacccccacctgatgcaggagcacatgggcaccaacgtgatcgtggccaacaccatgcccacccacctgagcaacggccagatgtgcgagtggcccagacccagaggccaggccgccacccccgagaccccccagcccagcccccccggcggcagcggcagcgagccctacaagctgctgcccggcgccgtggccaccatcgtgaagcccctgagcgccatcccccagcccaccatcaccaagcaggaggtgatctga

SEQ ID NO: 1350 - RNA, 1314 nt, synthetic construct
  misc_feature 1..1314: note = CDS (opt4) from Homo sapiens__NP_000448.3__HNF4A(39-474)(K447R_K470R)
  source 1..1314: mol_type = other RNA
atggacaccagccccagcgagggcaccaacctgaacgcccccaacagcctgggcgtgagcgccctgtgcgccatctgcggcgacagagccaccggcaagcactacggcgccagcagctgcgacggctgcaagggcttcttcagaagaagcgtgagaaagaaccacatgtacagctgcagattcagcagacagtgcgtggtggacaaggacaagagaaaccagtgcagatactgcagactgaagaagtgcttcagagccggcatgaagaaggaggccgtgcagaacgagagagacagaatcagcaccagaagaagcagctacgaggacagcagcctgcccagcatcaacgccctgctgcaggccgaggtgctgagcagacagatcaccagccccgtgagcggcatcaacggcgacatcagagccaagaagatcgccagcatcgccgacgtgtgcgagagcatgaaggagcagctgctggtgctggtggagtgggccaagtacatccccgccttctgcgagctgcccctggacgaccaggtggccctgctgagagcccacgccggcgagcacctgctgctgggcgccaccaagagaagcatggtgttcaaggacgtgctgctgctgggcaacgactacatcgtgcccagacactgccccgagctggccgagatgagcagagtgagcatcagaatcctggacgagctggtgctgcccttccaggagctgcagatcgacgacaacgagtacgcctacctgaaggccatcatcttcttcgaccccgacgccaagggcctgagcgaccccggcaagatcaagagactgagaagccaggtgcaggtgagcctggaggactacatcaacgacagacagtacgacagcagaggcagattcggcgagctgctgctgctgctgcccaccctgcagagcatcacctggcagatgatcgagcagatccagttcatcaagctgttcggcatggccaagatcgacaacctgctgcaggagatgctgctgggcggcagccccagcgacgccccccacgcccaccaccccctgcacccccacctgatgcaggagcacatgggcaccaacgtgatcgtggccaacaccatgcccacccacctgagcaacggccagatgtgcgagtggcccagacccagaggccaggccgccacccccgagaccccccagcccagcccccccggcggcagcggcagcgagccctacagactgctgcccggcgccgtggccaccatcgtgaagcccctgagcgccatcccccagcccaccatcaccagacaggaggtgatctga

SEQ ID NO: 1351 - RNA, 1314 nt, synthetic construct
  misc_feature 1..1314: note = CDS (opt4) from Homo sapiens__NP_000448.3__HNF4A(39-474)(K458R)
  source 1..1314: mol_type = other RNA
atggacaccagccccagcgagggcaccaacctgaacgcccccaacagcctgggcgtgagcgccctgtgcgccatctgcggcgacagagccaccggcaagcactacggcgccagcagctgcgacggctgcaagggcttcttcagaagaagcgtgagaaagaaccacatgtacagctgcagattcagcagacagtgcgtggtggacaaggacaagagaaaccagtgcagatactgcagactgaagaagtgcttcagagccggcatgaagaaggaggccgtgcagaacgagagagacagaatcagcaccagaagaagcagctacgaggacagcagcctgcccagcatcaacgccctgctgcaggccgaggtgctgagcagacagatcaccagccccgtgagcggcatcaacggcgacatcagagccaagaagatcgccagcatcgccgacgtgtgcgagagcatgaaggagcagctgctggtgctggtggagtgggccaagtacatccccgccttctgcgagctgcccctggacgaccaggtggccctgctgagagcccacgccggcgagcacctgctgctgggcgccaccaagagaagcatggtgttcaaggacgtgctgctgctgggcaacgactacatcgtgcccagacactgccccgagctggccgagatgagcagagtgagcatcagaatcctggacgagctggtgctgcccttccaggagctgcagatcgacgacaacgagtacgcctacctgaaggccatcatcttcttcgaccccgacgccaagggcctgagcgaccccggcaagatcaagagactgagaagccaggtgcaggtgagcctggaggactacatcaacgacagacagtacgacagcagaggcagattcggcgagctgctgctgctgctgcccaccctgcagagcatcacctggcagatgatcgagcagatccagttcatcaagctgttcggcatggccaagatcgacaacctgctgcaggagatgctgctgggcggcagccccagcgacgccccccacgcccaccaccccctgcacccccacctgatgcaggagcacatgggcaccaacgtgatcgtggccaacaccatgcccacccacctgagcaacggccagatgtgcgagtggcccagacccagaggccaggccgccacccccgagaccccccagcccagcccccccggcggcagcggcagcgagccctacaagctgctgcccggcgccgtggccaccatcgtgagacccctgagcgccatcccccagcccaccatcaccaagcaggaggtgatctga

SEQ ID NO: 1352 - RNA, 1314 nt, synthetic construct
  misc_feature 1..1314: note = CDS (opt4) from Homo sapiens__NP_000448.3__HNF4A(39-474)(K106R_K108R_K126R_K127R )
  source 1..1314: mol_type = other RNA
atggacaccagccccagcgagggcaccaacctgaacgcccccaacagcctgggcgtgagcgccctgtgcgccatctgcggcgacagagccaccggcaagcactacggcgccagcagctgcgacggctgcaagggcttcttcagaagaagcgtgagaaagaaccacatgtacagctgcagattcagcagacagtgcgtggtggacagagacagaagaaaccagtgcagatactgcagactgaagaagtgcttcagagccggcatgagaagagaggccgtgcagaacgagagagacagaatcagcaccagaagaagcagctacgaggacagcagcctgcccagcatcaacgccctgctgcaggccgaggtgctgagcagacagatcaccagccccgtgagcggcatcaacggcgacatcagagccaagaagatcgccagcatcgccgacgtgtgcgagagcatgaaggagcagctgctggtgctggtggagtgggccaagtacatccccgccttctgcgagctgcccctggacgaccaggtggccctgctgagagcccacgccggcgagcacctgctgctgggcgccaccaagagaagcatggtgttcaaggacgtgctgctgctgggcaacgactacatcgtgcccagacactgccccgagctggccgagatgagcagagtgagcatcagaatcctggacgagctggtgctgcccttccaggagctgcagatcgacgacaacgagtacgcctacctgaaggccatcatcttcttcgaccccgacgccaagggcctgagcgaccccggcaagatcaagagactgagaagccaggtgcaggtgagcctggaggactacatcaacgacagacagtacgacagcagaggcagattcggcgagctgctgctgctgctgcccaccctgcagagcatcacctggcagatgatcgagcagatccagttcatcaagctgttcggcatggccaagatcgacaacctgctgcaggagatgctgctgggcggcagccccagcgacgccccccacgcccaccaccccctgcacccccacctgatgcaggagcacatgggcaccaacgtgatcgtggccaacaccatgcccacccacctgagcaacggccagatgtgcgagtggcccagacccagaggccaggccgccacccccgagaccccccagcccagcccccccggcggcagcggcagcgagccctacaagctgctgcccggcgccgtggccaccatcgtgaagcccctgagcgccatcccccagcccaccatcaccaagcaggaggtgatctga

SEQ ID NO: 1353 - RNA, 1314 nt, synthetic construct
  misc_feature 1..1314: note = CDS (opt4) from Homo sapiens__NP_000448.3__HNF4A(39-474)(E285Q)
  source 1..1314: mol_type = other RNA
atggacaccagccccagcgagggcaccaacctgaacgcccccaacagcctgggcgtgagcgccctgtgcgccatctgcggcgacagagccaccggcaagcactacggcgccagcagctgcgacggctgcaagggcttcttcagaagaagcgtgagaaagaaccacatgtacagctgcagattcagcagacagtgcgtggtggacaaggacaagagaaaccagtgcagatactgcagactgaagaagtgcttcagagccggcatgaagaaggaggccgtgcagaacgagagagacagaatcagcaccagaagaagcagctacgaggacagcagcctgcccagcatcaacgccctgctgcaggccgaggtgctgagcagacagatcaccagccccgtgagcggcatcaacggcgacatcagagccaagaagatcgccagcatcgccgacgtgtgcgagagcatgaaggagcagctgctggtgctggtggagtgggccaagtacatccccgccttctgcgagctgcccctggacgaccaggtggccctgctgagagcccacgccggcgagcacctgctgctgggcgccaccaagagaagcatggtgttcaaggacgtgctgctgctgggcaacgactacatcgtgcccagacactgccccgagctggccgagatgagcagagtgagcatcagaatcctggacgagctggtgctgcccttccaggagctgcagatcgacgacaaccagtacgcctacctgaaggccatcatcttcttcgaccccgacgccaagggcctgagcgaccccggcaagatcaagagactgagaagccaggtgcaggtgagcctggaggactacatcaacgacagacagtacgacagcagaggcagattcggcgagctgctgctgctgctgcccaccctgcagagcatcacctggcagatgatcgagcagatccagttcatcaagctgttcggcatggccaagatcgacaacctgctgcaggagatgctgctgggcggcagccccagcgacgccccccacgcccaccaccccctgcacccccacctgatgcaggagcacatgggcaccaacgtgatcgtggccaacaccatgcccacccacctgagcaacggccagatgtgcgagtggcccagacccagaggccaggccgccacccccgagaccccccagcccagcccccccggcggcagcggcagcgagccctacaagctgctgcccggcgccgtggccaccatcgtgaagcccctgagcgccatcccccagcccaccatcaccaagcaggaggtgatctga

SEQ ID NO: 1354 - RNA, 1314 nt, synthetic construct
  misc_feature 1..1314: note = CDS (opt4) from Homo sapiens__NP_000448.3__HNF4A(39-474)(T166E)
  source 1..1314: mol_type = other RNA
atggacaccagccccagcgagggcaccaacctgaacgcccccaacagcctgggcgtgagcgccctgtgcgccatctgcggcgacagagccaccggcaagcactacggcgccagcagctgcgacggctgcaagggcttcttcagaagaagcgtgagaaagaaccacatgtacagctgcagattcagcagacagtgcgtggtggacaaggacaagagaaaccagtgcagatactgcagactgaagaagtgcttcagagccggcatgaagaaggaggccgtgcagaacgagagagacagaatcagcaccagaagaagcagctacgaggacagcagcctgcccagcatcaacgccctgctgcaggccgaggtgctgagcagacagatcgagagccccgtgagcggcatcaacggcgacatcagagccaagaagatcgccagcatcgccgacgtgtgcgagagcatgaaggagcagctgctggtgctggtggagtgggccaagtacatccccgccttctgcgagctgcccctggacgaccaggtggccctgctgagagcccacgccggcgagcacctgctgctgggcgccaccaagagaagcatggtgttcaaggacgtgctgctgctgggcaacgactacatcgtgcccagacactgccccgagctggccgagatgagcagagtgagcatcagaatcctggacgagctggtgctgcccttccaggagctgcagatcgacgacaacgagtacgcctacctgaaggccatcatcttcttcgaccccgacgccaagggcctgagcgaccccggcaagatcaagagactgagaagccaggtgcaggtgagcctggaggactacatcaacgacagacagtacgacagcagaggcagattcggcgagctgctgctgctgctgcccaccctgcagagcatcacctggcagatgatcgagcagatccagttcatcaagctgttcggcatggccaagatcgacaacctgctgcaggagatgctgctgggcggcagccccagcgacgccccccacgcccaccaccccctgcacccccacctgatgcaggagcacatgggcaccaacgtgatcgtggccaacaccatgcccacccacctgagcaacggccagatgtgcgagtggcccagacccagaggccaggccgccacccccgagaccccccagcccagcccccccggcggcagcggcagcgagccctacaagctgctgcccggcgccgtggccaccatcgtgaagcccctgagcgccatcccccagcccaccatcaccaagcaggaggtgatctga

SEQ ID NO: 1355 - RNA, 1314 nt, synthetic construct
  misc_feature 1..1314: note = CDS (opt4) from Homo sapiens__NP_000448.3__HNF4A(39-474)(S148A)
  source 1..1314: mol_type = other RNA
atggacaccagccccagcgagggcaccaacctgaacgcccccaacagcctgggcgtgagcgccctgtgcgccatctgcggcgacagagccaccggcaagcactacggcgccagcagctgcgacggctgcaagggcttcttcagaagaagcgtgagaaagaaccacatgtacagctgcagattcagcagacagtgcgtggtggacaaggacaagagaaaccagtgcagatactgcagactgaagaagtgcttcagagccggcatgaagaaggaggccgtgcagaacgagagagacagaatcagcaccagaagaagcagctacgaggacagcgccctgcccagcatcaacgccctgctgcaggccgaggtgctgagcagacagatcaccagccccgtgagcggcatcaacggcgacatcagagccaagaagatcgccagcatcgccgacgtgtgcgagagcatgaaggagcagctgctggtgctggtggagtgggccaagtacatccccgccttctgcgagctgcccctggacgaccaggtggccctgctgagagcccacgccggcgagcacctgctgctgggcgccaccaagagaagcatggtgttcaaggacgtgctgctgctgggcaacgactacatcgtgcccagacactgccccgagctggccgagatgagcagagtgagcatcagaatcctggacgagctggtgctgcccttccaggagctgcagatcgacgacaacgagtacgcctacctgaaggccatcatcttcttcgaccccgacgccaagggcctgagcgaccccggcaagatcaagagactgagaagccaggtgcaggtgagcctggaggactacatcaacgacagacagtacgacagcagaggcagattcggcgagctgctgctgctgctgcccaccctgcagagcatcacctggcagatgatcgagcagatccagttcatcaagctgttcggcatggccaagatcgacaacctgctgcaggagatgctgctgggcggcagccccagcgacgccccccacgcccaccaccccctgcacccccacctgatgcaggagcacatgggcaccaacgtgatcgtggccaacaccatgcccacccacctgagcaacggccagatgtgcgagtggcccagacccagaggccaggccgccacccccgagaccccccagcccagcccccccggcggcagcggcagcgagccctacaagctgctgcccggcgccgtggccaccatcgtgaagcccctgagcgccatcccccagcccaccatcaccaagcaggaggtgatctga

SEQ ID NO: 1356 - RNA, 1314 nt, synthetic construct
  misc_feature 1..1314: note = CDS (opt4) from Homo sapiens__NP_000448.3__HNF4A(39-474)(S148E)
  source 1..1314: mol_type = other RNA
atggacaccagccccagcgagggcaccaacctgaacgcccccaacagcctgggcgtgagcgccctgtgcgccatctgcggcgacagagccaccggcaagcactacggcgccagcagctgcgacggctgcaagggcttcttcagaagaagcgtgagaaagaaccacatgtacagctgcagattcagcagacagtgcgtggtggacaaggacaagagaaaccagtgcagatactgcagactgaagaagtgcttcagagccggcatgaagaaggaggccgtgcagaacgagagagacagaatcagcaccagaagaagcagctacgaggacagcgagctgcccagcatcaacgccctgctgcaggccgaggtgctgagcagacagatcaccagccccgtgagcggcatcaacggcgacatcagagccaagaagatcgccagcatcgccgacgtgtgcgagagcatgaaggagcagctgctggtgctggtggagtgggccaagtacatccccgccttctgcgagctgcccctggacgaccaggtggccctgctgagagcccacgccggcgagcacctgctgctgggcgccaccaagagaagcatggtgttcaaggacgtgctgctgctgggcaacgactacatcgtgcccagacactgccccgagctggccgagatgagcagagtgagcatcagaatcctggacgagctggtgctgcccttccaggagctgcagatcgacgacaacgagtacgcctacctgaaggccatcatcttcttcgaccccgacgccaagggcctgagcgaccccggcaagatcaagagactgagaagccaggtgcaggtgagcctggaggactacatcaacgacagacagtacgacagcagaggcagattcggcgagctgctgctgctgctgcccaccctgcagagcatcacctggcagatgatcgagcagatccagttcatcaagctgttcggcatggccaagatcgacaacctgctgcaggagatgctgctgggcggcagccccagcgacgccccccacgcccaccaccccctgcacccccacctgatgcaggagcacatgggcaccaacgtgatcgtggccaacaccatgcccacccacctgagcaacggccagatgtgcgagtggcccagacccagaggccaggccgccacccccgagaccccccagcccagcccccccggcggcagcggcagcgagccctacaagctgctgcccggcgccgtggccaccatcgtgaagcccctgagcgccatcccccagcccaccatcaccaagcaggaggtgatctga

SEQ ID NO: 1357 - RNA, 1314 nt, synthetic construct
  misc_feature 1..1314: note = CDS (opt4) from Homo sapiens__NP_000448.3__HNF4A(39-474)(S183A)
  source 1..1314: mol_type = other RNA
atggacaccagccccagcgagggcaccaacctgaacgcccccaacagcctgggcgtgagcgccctgtgcgccatctgcggcgacagagccaccggcaagcactacggcgccagcagctgcgacggctgcaagggcttcttcagaagaagcgtgagaaagaaccacatgtacagctgcagattcagcagacagtgcgtggtggacaaggacaagagaaaccagtgcagatactgcagactgaagaagtgcttcagagccggcatgaagaaggaggccgtgcagaacgagagagacagaatcagcaccagaagaagcagctacgaggacagcagcctgcccagcatcaacgccctgctgcaggccgaggtgctgagcagacagatcaccagccccgtgagcggcatcaacggcgacatcagagccaagaagatcgccgccatcgccgacgtgtgcgagagcatgaaggagcagctgctggtgctggtggagtgggccaagtacatccccgccttctgcgagctgcccctggacgaccaggtggccctgctgagagcccacgccggcgagcacctgctgctgggcgccaccaagagaagcatggtgttcaaggacgtgctgctgctgggcaacgactacatcgtgcccagacactgccccgagctggccgagatgagcagagtgagcatcagaatcctggacgagctggtgctgcccttccaggagctgcagatcgacgacaacgagtacgcctacctgaaggccatcatcttcttcgaccccgacgccaagggcctgagcgaccccggcaagatcaagagactgagaagccaggtgcaggtgagcctggaggactacatcaacgacagacagtacgacagcagaggcagattcggcgagctgctgctgctgctgcccaccctgcagagcatcacctggcagatgatcgagcagatccagttcatcaagctgttcggcatggccaagatcgacaacctgctgcaggagatgctgctgggcggcagccccagcgacgccccccacgcccaccaccccctgcacccccacctgatgcaggagcacatgggcaccaacgtgatcgtggccaacaccatgcccacccacctgagcaacggccagatgtgcgagtggcccagacccagaggccaggccgccacccccgagaccccccagcccagcccccccggcggcagcggcagcgagccctacaagctgctgcccggcgccgtggccaccatcgtgaagcccctgagcgccatcccccagcccaccatcaccaagcaggaggtgatctga

SEQ ID NO: 1358 - RNA, 1314 nt, synthetic construct
  misc_feature 1..1314: note = CDS (opt4) from Homo sapiens__NP_000448.3__HNF4A(39-474)(S183E)
  source 1..1314: mol_type = other RNA
atggacaccagccccagcgagggcaccaacctgaacgcccccaacagcctgggcgtgagcgccctgtgcgccatctgcggcgacagagccaccggcaagcactacggcgccagcagctgcgacggctgcaagggcttcttcagaagaagcgtgagaaagaaccacatgtacagctgcagattcagcagacagtgcgtggtggacaaggacaagagaaaccagtgcagatactgcagactgaagaagtgcttcagagccggcatgaagaaggaggccgtgcagaacgagagagacagaatcagcaccagaagaagcagctacgaggacagcagcctgcccagcatcaacgccctgctgcaggccgaggtgctgagcagacagatcaccagccccgtgagcggcatcaacggcgacatcagagccaagaagatcgccgagatcgccgacgtgtgcgagagcatgaaggagcagctgctggtgctggtggagtgggccaagtacatccccgccttctgcgagctgcccctggacgaccaggtggccctgctgagagcccacgccggcgagcacctgctgctgggcgccaccaagagaagcatggtgttcaaggacgtgctgctgctgggcaacgactacatcgtgcccagacactgccccgagctggccgagatgagcagagtgagcatcagaatcctggacgagctggtgctgcccttccaggagctgcagatcgacgacaacgagtacgcctacctgaaggccatcatcttcttcgaccccgacgccaagggcctgagcgaccccggcaagatcaagagactgagaagccaggtgcaggtgagcctggaggactacatcaacgacagacagtacgacagcagaggcagattcggcgagctgctgctgctgctgcccaccctgcagagcatcacctggcagatgatcgagcagatccagttcatcaagctgttcggcatggccaagatcgacaacctgctgcaggagatgctgctgggcggcagccccagcgacgccccccacgcccaccaccccctgcacccccacctgatgcaggagcacatgggcaccaacgtgatcgtggccaacaccatgcccacccacctgagcaacggccagatgtgcgagtggcccagacccagaggccaggccgccacccccgagaccccccagcccagcccccccggcggcagcggcagcgagccctacaagctgctgcccggcgccgtggccaccatcgtgaagcccctgagcgccatcccccagcccaccatcaccaagcaggaggtgatctga

SEQ ID NO: 1359 - RNA, 1314 nt, synthetic construct
  misc_feature 1..1314: note = CDS (opt4) from Homo sapiens__NP_000448.3__HNF4A(39-474)(S461A)
  source 1..1314: mol_type = other RNA
atggacaccagccccagcgagggcaccaacctgaacgcccccaacagcctgggcgtgagcgccctgtgcgccatctgcggcgacagagccaccggcaagcactacggcgccagcagctgcgacggctgcaagggcttcttcagaagaagcgtgagaaagaaccacatgtacagctgcagattcagcagacagtgcgtggtggacaaggacaagagaaaccagtgcagatactgcagactgaagaagtgcttcagagccggcatgaagaaggaggccgtgcagaacgagagagacagaatcagcaccagaagaagcagctacgaggacagcagcctgcccagcatcaacgccctgctgcaggccgaggtgctgagcagacagatcaccagccccgtgagcggcatcaacggcgacatcagagccaagaagatcgccagcatcgccgacgtgtgcgagagcatgaaggagcagctgctggtgctggtggagtgggccaagtacatccccgccttctgcgagctgcccctggacgaccaggtggccctgctgagagcccacgccggcgagcacctgctgctgggcgccaccaagagaagcatggtgttcaaggacgtgctgctgctgggcaacgactacatcgtgcccagacactgccccgagctggccgagatgagcagagtgagcatcagaatcctggacgagctggtgctgcccttccaggagctgcagatcgacgacaacgagtacgcctacctgaaggccatcatcttcttcgaccccgacgccaagggcctgagcgaccccggcaagatcaagagactgagaagccaggtgcaggtgagcctggaggactacatcaacgacagacagtacgacagcagaggcagattcggcgagctgctgctgctgctgcccaccctgcagagcatcacctggcagatgatcgagcagatccagttcatcaagctgttcggcatggccaagatcgacaacctgctgcaggagatgctgctgggcggcagccccagcgacgccccccacgcccaccaccccctgcacccccacctgatgcaggagcacatgggcaccaacgtgatcgtggccaacaccatgcccacccacctgagcaacggccagatgtgcgagtggcccagacccagaggccaggccgccacccccgagaccccccagcccagcccccccggcggcagcggcagcgagccctacaagctgctgcccggcgccgtggccaccatcgtgaagcccctggccgccatcccccagcccaccatcaccaagcaggaggtgatctga

SEQ ID NO: 1360 - RNA, 1314 nt, synthetic construct
  misc_feature 1..1314: note = CDS (opt4) from Homo sapiens__NP_000448.3__HNF4A(39-474)(S461E)
  source 1..1314: mol_type = other RNA
atggacaccagccccagcgagggcaccaacctgaacgcccccaacagcctgggcgtgagcgccctgtgcgccatctgcggcgacagagccaccggcaagcactacggcgccagcagctgcgacggctgcaagggcttcttcagaagaagcgtgagaaagaaccacatgtacagctgcagattcagcagacagtgcgtggtggacaaggacaagagaaaccagtgcagatactgcagactgaagaagtgcttcagagccggcatgaagaaggaggccgtgcagaacgagagagacagaatcagcaccagaagaagcagctacgaggacagcagcctgcccagcatcaacgccctgctgcaggccgaggtgctgagcagacagatcaccagccccgtgagcggcatcaacggcgacatcagagccaagaagatcgccagcatcgccgacgtgtgcgagagcatgaaggagcagctgctggtgctggtggagtgggccaagtacatccccgccttctgcgagctgcccctggacgaccaggtggccctgctgagagcccacgccggcgagcacctgctgctgggcgccaccaagagaagcatggtgttcaaggacgtgctgctgctgggcaacgactacatcgtgcccagacactgccccgagctggccgagatgagcagagtgagcatcagaatcctggacgagctggtgctgcccttccaggagctgcagatcgacgacaacgagtacgcctacctgaaggccatcatcttcttcgaccccgacgccaagggcctgagcgaccccggcaagatcaagagactgagaagccaggtgcaggtgagcctggaggactacatcaacgacagacagtacgacagcagaggcagattcggcgagctgctgctgctgctgcccaccctgcagagcatcacctggcagatgatcgagcagatccagttcatcaagctgttcggcatggccaagatcgacaacctgctgcaggagatgctgctgggcggcagccccagcgacgccccccacgcccaccaccccctgcacccccacctgatgcaggagcacatgggcaccaacgtgatcgtggccaacaccatgcccacccacctgagcaacggccagatgtgcgagtggcccagacccagaggccaggccgccacccccgagaccccccagcccagcccccccggcggcagcggcagcgagccctacaagctgctgcccggcgccgtggccaccatcgtgaagcccctggaggccatcccccagcccaccatcaccaagcaggaggtgatctga

SEQ ID NO: 1361 - RNA, 1314 nt, synthetic construct
  misc_feature 1..1314: note = CDS (opt4) from Homo sapiens__NP_000448.3__HNF4A(39-474)(S142A_S143A_S313A)
  source 1..1314: mol_type = other RNA
atggacaccagccccagcgagggcaccaacctgaacgcccccaacagcctgggcgtgagcgccctgtgcgccatctgcggcgacagagccaccggcaagcactacggcgccagcagctgcgacggctgcaagggcttcttcagaagaagcgtgagaaagaaccacatgtacagctgcagattcagcagacagtgcgtggtggacaaggacaagagaaaccagtgcagatactgcagactgaagaagtgcttcagagccggcatgaagaaggaggccgtgcagaacgagagagacagaatcagcaccagaagagccgcctacgaggacagcagcctgcccagcatcaacgccctgctgcaggccgaggtgctgagcagacagatcaccagccccgtgagcggcatcaacggcgacatcagagccaagaagatcgccagcatcgccgacgtgtgcgagagcatgaaggagcagctgctggtgctggtggagtgggccaagtacatccccgccttctgcgagctgcccctggacgaccaggtggccctgctgagagcccacgccggcgagcacctgctgctgggcgccaccaagagaagcatggtgttcaaggacgtgctgctgctgggcaacgactacatcgtgcccagacactgccccgagctggccgagatgagcagagtgagcatcagaatcctggacgagctggtgctgcccttccaggagctgcagatcgacgacaacgagtacgcctacctgaaggccatcatcttcttcgaccccgacgccaagggcctgagcgaccccggcaagatcaagagactgagagcccaggtgcaggtgagcctggaggactacatcaacgacagacagtacgacagcagaggcagattcggcgagctgctgctgctgctgcccaccctgcagagcatcacctggcagatgatcgagcagatccagttcatcaagctgttcggcatggccaagatcgacaacctgctgcaggagatgctgctgggcggcagccccagcgacgccccccacgcccaccaccccctgcacccccacctgatgcaggagcacatgggcaccaacgtgatcgtggccaacaccatgcccacccacctgagcaacggccagatgtgcgagtggcccagacccagaggccaggccgccacccccgagaccccccagcccagcccccccggcggcagcggcagcgagccctacaagctgctgcccggcgccgtggccaccatcgtgaagcccctgagcgccatcccccagcccaccatcaccaagcaggaggtgatctga

SEQ ID NO: 1362 - RNA, 1314 nt, synthetic construct
  misc_feature 1..1314: note = CDS (opt4) from Homo sapiens__NP_000448.3__HNF4A(39-474)(S142A_S143A_S313A_K458R )
  source 1..1314: mol_type = other RNA
atggacaccagccccagcgagggcaccaacctgaacgcccccaacagcctgggcgtgagcgccctgtgcgccatctgcggcgacagagccaccggcaagcactacggcgccagcagctgcgacggctgcaagggcttcttcagaagaagcgtgagaaagaaccacatgtacagctgcagattcagcagacagtgcgtggtggacaaggacaagagaaaccagtgcagatactgcagactgaagaagtgcttcagagccggcatgaagaaggaggccgtgcagaacgagagagacagaatcagcaccagaagagccgcctacgaggacagcagcctgcccagcatcaacgccctgctgcaggccgaggtgctgagcagacagatcaccagccccgtgagcggcatcaacggcgacatcagagccaagaagatcgccagcatcgccgacgtgtgcgagagcatgaaggagcagctgctggtgctggtggagtgggccaagtacatccccgccttctgcgagctgcccctggacgaccaggtggccctgctgagagcccacgccggcgagcacctgctgctgggcgccaccaagagaagcatggtgttcaaggacgtgctgctgctgggcaacgactacatcgtgcccagacactgccccgagctggccgagatgagcagagtgagcatcagaatcctggacgagctggtgctgcccttccaggagctgcagatcgacgacaacgagtacgcctacctgaaggccatcatcttcttcgaccccgacgccaagggcctgagcgaccccggcaagatcaagagactgagagcccaggtgcaggtgagcctggaggactacatcaacgacagacagtacgacagcagaggcagattcggcgagctgctgctgctgctgcccaccctgcagagcatcacctggcagatgatcgagcagatccagttcatcaagctgttcggcatggccaagatcgacaacctgctgcaggagatgctgctgggcggcagccccagcgacgccccccacgcccaccaccccctgcacccccacctgatgcaggagcacatgggcaccaacgtgatcgtggccaacaccatgcccacccacctgagcaacggccagatgtgcgagtggcccagacccagaggccaggccgccacccccgagaccccccagcccagcccccccggcggcagcggcagcgagccctacaagctgctgcccggcgccgtggccaccatcgtgagacccctgagcgccatcccccagcccaccatcaccaagcaggaggtgatctga

SEQ ID NO: 1363 - RNA, 1314 nt, synthetic construct
  misc_feature 1..1314: note = CDS (opt4) from Homo sapiens__NP_000448.3__HNF4A(39-474)(S142A_S143A_S167A_S313A _S378A_T429A_T432A_S436A_K458R)
  source 1..1314: mol_type = other RNA
atggacaccagccccagcgagggcaccaacctgaacgcccccaacagcctgggcgtgagcgccctgtgcgccatctgcggcgacagagccaccggcaagcactacggcgccagcagctgcgacggctgcaagggcttcttcagaagaagcgtgagaaagaaccacatgtacagctgcagattcagcagacagtgcgtggtggacaaggacaagagaaaccagtgcagatactgcagactgaagaagtgcttcagagccggcatgaagaaggaggccgtgcagaacgagagagacagaatcagcaccagaagagccgcctacgaggacagcagcctgcccagcatcaacgccctgctgcaggccgaggtgctgagcagacagatcaccgcccccgtgagcggcatcaacggcgacatcagagccaagaagatcgccagcatcgccgacgtgtgcgagagcatgaaggagcagctgctggtgctggtggagtgggccaagtacatccccgccttctgcgagctgcccctggacgaccaggtggccctgctgagagcccacgccggcgagcacctgctgctgggcgccaccaagagaagcatggtgttcaaggacgtgctgctgctgggcaacgactacatcgtgcccagacactgccccgagctggccgagatgagcagagtgagcatcagaatcctggacgagctggtgctgcccttccaggagctgcagatcgacgacaacgagtacgcctacctgaaggccatcatcttcttcgaccccgacgccaagggcctgagcgaccccggcaagatcaagagactgagagcccaggtgcaggtgagcctggaggactacatcaacgacagacagtacgacagcagaggcagattcggcgagctgctgctgctgctgcccaccctgcagagcatcacctggcagatgatcgagcagatccagttcatcaagctgttcggcatggccaagatcgacaacctgctgcaggagatgctgctgggcggcgcccccagcgacgccccccacgcccaccaccccctgcacccccacctgatgcaggagcacatgggcaccaacgtgatcgtggccaacaccatgcccacccacctgagcaacggccagatgtgcgagtggcccagacccagaggccaggccgccgcccccgaggccccccagcccgccccccccggcggcagcggcagcgagccctacaagctgctgcccggcgccgtggccaccatcgtgagacccctgagcgccatcccccagcccaccatcaccaagcaggaggtgatctga

SEQ ID NO: 1364 - RNA, 1314 nt, synthetic construct
  misc_feature 1..1314: note = CDS (opt4) from Homo sapiens__NP_000448.3__HNF4A(39-474)(S142A_S143A_S148A_S167A _S313A_S378A_T429A_T432A_S436A_K458R)
  source 1..1314: mol_type = other RNA
atggacaccagccccagcgagggcaccaacctgaacgcccccaacagcctgggcgtgagcgccctgtgcgccatctgcggcgacagagccaccggcaagcactacggcgccagcagctgcgacggctgcaagggcttcttcagaagaagcgtgagaaagaaccacatgtacagctgcagattcagcagacagtgcgtggtggacaaggacaagagaaaccagtgcagatactgcagactgaagaagtgcttcagagccggcatgaagaaggaggccgtgcagaacgagagagacagaatcagcaccagaagagccgcctacgaggacagcgccctgcccagcatcaacgccctgctgcaggccgaggtgctgagcagacagatcaccgcccccgtgagcggcatcaacggcgacatcagagccaagaagatcgccagcatcgccgacgtgtgcgagagcatgaaggagcagctgctggtgctggtggagtgggccaagtacatccccgccttctgcgagctgcccctggacgaccaggtggccctgctgagagcccacgccggcgagcacctgctgctgggcgccaccaagagaagcatggtgttcaaggacgtgctgctgctgggcaacgactacatcgtgcccagacactgccccgagctggccgagatgagcagagtgagcatcagaatcctggacgagctggtgctgcccttccaggagctgcagatcgacgacaacgagtacgcctacctgaaggccatcatcttcttcgaccccgacgccaagggcctgagcgaccccggcaagatcaagagactgagagcccaggtgcaggtgagcctggaggactacatcaacgacagacagtacgacagcagaggcagattcggcgagctgctgctgctgctgcccaccctgcagagcatcacctggcagatgatcgagcagatccagttcatcaagctgttcggcatggccaagatcgacaacctgctgcaggagatgctgctgggcggcgcccccagcgacgccccccacgcccaccaccccctgcacccccacctgatgcaggagcacatgggcaccaacgtgatcgtggccaacaccatgcccacccacctgagcaacggccagatgtgcgagtggcccagacccagaggccaggccgccgcccccgaggccccccagcccgccccccccggcggcagcggcagcgagccctacaagctgctgcccggcgccgtggccaccatcgtgagacccctgagcgccatcccccagcccaccatcaccaagcaggaggtgatctga

SEQ ID NO: 1365 - RNA, 1314 nt, synthetic construct
  misc_feature 1..1314: note = CDS (opt4) from Homo sapiens__NP_000448.3__HNF4A(39-474)(K106R_K108R_K126R_K127R _S142A_S143A_S148A_S167A_S313A_S378A_T429A_T432A_S436A_K458 R)
  source 1..1314: mol_type = other RNA
atggacaccagccccagcgagggcaccaacctgaacgcccccaacagcctgggcgtgagcgccctgtgcgccatctgcggcgacagagccaccggcaagcactacggcgccagcagctgcgacggctgcaagggcttcttcagaagaagcgtgagaaagaaccacatgtacagctgcagattcagcagacagtgcgtggtggacagagacagaagaaaccagtgcagatactgcagactgaagaagtgcttcagagccggcatgagaagagaggccgtgcagaacgagagagacagaatcagcaccagaagagccgcctacgaggacagcgccctgcccagcatcaacgccctgctgcaggccgaggtgctgagcagacagatcaccgcccccgtgagcggcatcaacggcgacatcagagccaagaagatcgccagcatcgccgacgtgtgcgagagcatgaaggagcagctgctggtgctggtggagtgggccaagtacatccccgccttctgcgagctgcccctggacgaccaggtggccctgctgagagcccacgccggcgagcacctgctgctgggcgccaccaagagaagcatggtgttcaaggacgtgctgctgctgggcaacgactacatcgtgcccagacactgccccgagctggccgagatgagcagagtgagcatcagaatcctggacgagctggtgctgcccttccaggagctgcagatcgacgacaacgagtacgcctacctgaaggccatcatcttcttcgaccccgacgccaagggcctgagcgaccccggcaagatcaagagactgagagcccaggtgcaggtgagcctggaggactacatcaacgacagacagtacgacagcagaggcagattcggcgagctgctgctgctgctgcccaccctgcagagcatcacctggcagatgatcgagcagatccagttcatcaagctgttcggcatggccaagatcgacaacctgctgcaggagatgctgctgggcggcgcccccagcgacgccccccacgcccaccaccccctgcacccccacctgatgcaggagcacatgggcaccaacgtgatcgtggccaacaccatgcccacccacctgagcaacggccagatgtgcgagtggcccagacccagaggccaggccgccgcccccgaggccccccagcccgccccccccggcggcagcggcagcgagccctacaagctgctgcccggcgccgtggccaccatcgtgagacccctgagcgccatcccccagcccaccatcaccaagcaggaggtgatctga

SEQ ID NO: 1366 - RNA, 1314 nt, synthetic construct
  misc_feature 1..1314: note = CDS (opt4) from Homo sapiens__NP_000448.3__HNF4A(39-474)(S142A_S143A_S148A_T166A _S167A_S313A_S378A_T429A_T432A_S436A_K458R)
  source 1..1314: mol_type = other RNA
atggacaccagccccagcgagggcaccaacctgaacgcccccaacagcctgggcgtgagcgccctgtgcgccatctgcggcgacagagccaccggcaagcactacggcgccagcagctgcgacggctgcaagggcttcttcagaagaagcgtgagaaagaaccacatgtacagctgcagattcagcagacagtgcgtggtggacaaggacaagagaaaccagtgcagatactgcagactgaagaagtgcttcagagccggcatgaagaaggaggccgtgcagaacgagagagacagaatcagcaccagaagagccgcctacgaggacagcgccctgcccagcatcaacgccctgctgcaggccgaggtgctgagcagacagatcgccgcccccgtgagcggcatcaacggcgacatcagagccaagaagatcgccagcatcgccgacgtgtgcgagagcatgaaggagcagctgctggtgctggtggagtgggccaagtacatccccgccttctgcgagctgcccctggacgaccaggtggccctgctgagagcccacgccggcgagcacctgctgctgggcgccaccaagagaagcatggtgttcaaggacgtgctgctgctgggcaacgactacatcgtgcccagacactgccccgagctggccgagatgagcagagtgagcatcagaatcctggacgagctggtgctgcccttccaggagctgcagatcgacgacaacgagtacgcctacctgaaggccatcatcttcttcgaccccgacgccaagggcctgagcgaccccggcaagatcaagagactgagagcccaggtgcaggtgagcctggaggactacatcaacgacagacagtacgacagcagaggcagattcggcgagctgctgctgctgctgcccaccctgcagagcatcacctggcagatgatcgagcagatccagttcatcaagctgttcggcatggccaagatcgacaacctgctgcaggagatgctgctgggcggcgcccccagcgacgccccccacgcccaccaccccctgcacccccacctgatgcaggagcacatgggcaccaacgtgatcgtggccaacaccatgcccacccacctgagcaacggccagatgtgcgagtggcccagacccagaggccaggccgccgcccccgaggccccccagcccgccccccccggcggcagcggcagcgagccctacaagctgctgcccggcgccgtggccaccatcgtgagacccctgagcgccatcccccagcccaccatcaccaagcaggaggtgatctga

SEQ ID NO: 1367 - RNA, 1314 nt, synthetic construct
  misc_feature 1..1314: note = CDS (opt4) from Homo sapiens__NP_000448.3__HNF4A(39-474)(S87A_S142A_S143A_S148A_ T166A_S167A_S313A_S378A_T429A_T432A_S436A_K458R)
  source 1..1314: mol_type = other RNA
atggacaccagccccagcgagggcaccaacctgaacgcccccaacagcctgggcgtgagcgccctgtgcgccatctgcggcgacagagccaccggcaagcactacggcgccagcagctgcgacggctgcaagggcttcttcagaagagccgtgagaaagaaccacatgtacagctgcagattcagcagacagtgcgtggtggacaaggacaagagaaaccagtgcagatactgcagactgaagaagtgcttcagagccggcatgaagaaggaggccgtgcagaacgagagagacagaatcagcaccagaagagccgcctacgaggacagcgccctgcccagcatcaacgccctgctgcaggccgaggtgctgagcagacagatcgccgcccccgtgagcggcatcaacggcgacatcagagccaagaagatcgccagcatcgccgacgtgtgcgagagcatgaaggagcagctgctggtgctggtggagtgggccaagtacatccccgccttctgcgagctgcccctggacgaccaggtggccctgctgagagcccacgccggcgagcacctgctgctgggcgccaccaagagaagcatggtgttcaaggacgtgctgctgctgggcaacgactacatcgtgcccagacactgccccgagctggccgagatgagcagagtgagcatcagaatcctggacgagctggtgctgcccttccaggagctgcagatcgacgacaacgagtacgcctacctgaaggccatcatcttcttcgaccccgacgccaagggcctgagcgaccccggcaagatcaagagactgagagcccaggtgcaggtgagcctggaggactacatcaacgacagacagtacgacagcagaggcagattcggcgagctgctgctgctgctgcccaccctgcagagcatcacctggcagatgatcgagcagatccagttcatcaagctgttcggcatggccaagatcgacaacctgctgcaggagatgctgctgggcggcgcccccagcgacgccccccacgcccaccaccccctgcacccccacctgatgcaggagcacatgggcaccaacgtgatcgtggccaacaccatgcccacccacctgagcaacggccagatgtgcgagtggcccagacccagaggccaggccgccgcccccgaggccccccagcccgccccccccggcggcagcggcagcgagccctacaagctgctgcccggcgccgtggccaccatcgtgagacccctgagcgccatcccccagcccaccatcaccaagcaggaggtgatctga

SEQ ID NO: 1368 - RNA, 1314 nt, synthetic construct
  misc_feature 1..1314: note = CDS (opt4) from Homo sapiens__NP_000448.3__HNF4A(39-474)(S87A_K106R_K108R_K126R_ K127R_S142A_S143A_S148A_T166A_S167A_S313A_S378A_T429A_T432A _S436A_K458R)
  source 1..1314: mol_type = other RNA
atggacaccagccccagcgagggcaccaacctgaacgcccccaacagcctgggcgtgagcgccctgtgcgccatctgcggcgacagagccaccggcaagcactacggcgccagcagctgcgacggctgcaagggcttcttcagaagagccgtgagaaagaaccacatgtacagctgcagattcagcagacagtgcgtggtggacagagacagaagaaaccagtgcagatactgcagactgaagaagtgcttcagagccggcatgagaagagaggccgtgcagaacgagagagacagaatcagcaccagaagagccgcctacgaggacagcgccctgcccagcatcaacgccctgctgcaggccgaggtgctgagcagacagatcgccgcccccgtgagcggcatcaacggcgacatcagagccaagaagatcgccagcatcgccgacgtgtgcgagagcatgaaggagcagctgctggtgctggtggagtgggccaagtacatccccgccttctgcgagctgcccctggacgaccaggtggccctgctgagagcccacgccggcgagcacctgctgctgggcgccaccaagagaagcatggtgttcaaggacgtgctgctgctgggcaacgactacatcgtgcccagacactgccccgagctggccgagatgagcagagtgagcatcagaatcctggacgagctggtgctgcccttccaggagctgcagatcgacgacaacgagtacgcctacctgaaggccatcatcttcttcgaccccgacgccaagggcctgagcgaccccggcaagatcaagagactgagagcccaggtgcaggtgagcctggaggactacatcaacgacagacagtacgacagcagaggcagattcggcgagctgctgctgctgctgcccaccctgcagagcatcacctggcagatgatcgagcagatccagttcatcaagctgttcggcatggccaagatcgacaacctgctgcaggagatgctgctgggcggcgcccccagcgacgccccccacgcccaccaccccctgcacccccacctgatgcaggagcacatgggcaccaacgtgatcgtggccaacaccatgcccacccacctgagcaacggccagatgtgcgagtggcccagacccagaggccaggccgccgcccccgaggccccccagcccgccccccccggcggcagcggcagcgagccctacaagctgctgcccggcgccgtggccaccatcgtgagacccctgagcgccatcccccagcccaccatcaccaagcaggaggtgatctga

SEQ ID NO: 1369 - RNA, 1314 nt, synthetic construct
  misc_feature 1..1314: note = CDS (opt4) from Homo sapiens__NP_000448.3__HNF4A(39-474)(S87A_K106R_K108R_K126R_ K127R)
  source 1..1314: mol_type = other RNA
atggacaccagccccagcgagggcaccaacctgaacgcccccaacagcctgggcgtgagcgccctgtgcgccatctgcggcgacagagccaccggcaagcactacggcgccagcagctgcgacggctgcaagggcttcttcagaagagccgtgagaaagaaccacatgtacagctgcagattcagcagacagtgcgtggtggacagagacagaagaaaccagtgcagatactgcagactgaagaagtgcttcagagccggcatgagaagagaggccgtgcagaacgagagagacagaatcagcaccagaagaagcagctacgaggacagcagcctgcccagcatcaacgccctgctgcaggccgaggtgctgagcagacagatcaccagccccgtgagcggcatcaacggcgacatcagagccaagaagatcgccagcatcgccgacgtgtgcgagagcatgaaggagcagctgctggtgctggtggagtgggccaagtacatccccgccttctgcgagctgcccctggacgaccaggtggccctgctgagagcccacgccggcgagcacctgctgctgggcgccaccaagagaagcatggtgttcaaggacgtgctgctgctgggcaacgactacatcgtgcccagacactgccccgagctggccgagatgagcagagtgagcatcagaatcctggacgagctggtgctgcccttccaggagctgcagatcgacgacaacgagtacgcctacctgaaggccatcatcttcttcgaccccgacgccaagggcctgagcgaccccggcaagatcaagagactgagaagccaggtgcaggtgagcctggaggactacatcaacgacagacagtacgacagcagaggcagattcggcgagctgctgctgctgctgcccaccctgcagagcatcacctggcagatgatcgagcagatccagttcatcaagctgttcggcatggccaagatcgacaacctgctgcaggagatgctgctgggcggcagccccagcgacgccccccacgcccaccaccccctgcacccccacctgatgcaggagcacatgggcaccaacgtgatcgtggccaacaccatgcccacccacctgagcaacggccagatgtgcgagtggcccagacccagaggccaggccgccacccccgagaccccccagcccagcccccccggcggcagcggcagcgagccctacaagctgctgcccggcgccgtggccaccatcgtgaagcccctgagcgccatcccccagcccaccatcaccaagcaggaggtgatctga

SEQ ID NO: 1370 - RNA, 1314 nt, synthetic construct
  misc_feature 1..1314: note = CDS (opt4) from Homo sapiens__NP_000448.3__HNF4A(39-474)(S87A_K106R_K108R_K126R_ K127R_S142A_S143A_S148A_T166A_S167A_S313A_S378A_T429A_T432A _S436A_K458R_S461A)
  source 1..1314: mol_type = other RNA
atggacaccagccccagcgagggcaccaacctgaacgcccccaacagcctgggcgtgagcgccctgtgcgccatctgcggcgacagagccaccggcaagcactacggcgccagcagctgcgacggctgcaagggcttcttcagaagagccgtgagaaagaaccacatgtacagctgcagattcagcagacagtgcgtggtggacagagacagaagaaaccagtgcagatactgcagactgaagaagtgcttcagagccggcatgagaagagaggccgtgcagaacgagagagacagaatcagcaccagaagagccgcctacgaggacagcgccctgcccagcatcaacgccctgctgcaggccgaggtgctgagcagacagatcgccgcccccgtgagcggcatcaacggcgacatcagagccaagaagatcgccagcatcgccgacgtgtgcgagagcatgaaggagcagctgctggtgctggtggagtgggccaagtacatccccgccttctgcgagctgcccctggacgaccaggtggccctgctgagagcccacgccggcgagcacctgctgctgggcgccaccaagagaagcatggtgttcaaggacgtgctgctgctgggcaacgactacatcgtgcccagacactgccccgagctggccgagatgagcagagtgagcatcagaatcctggacgagctggtgctgcccttccaggagctgcagatcgacgacaacgagtacgcctacctgaaggccatcatcttcttcgaccccgacgccaagggcctgagcgaccccggcaagatcaagagactgagagcccaggtgcaggtgagcctggaggactacatcaacgacagacagtacgacagcagaggcagattcggcgagctgctgctgctgctgcccaccctgcagagcatcacctggcagatgatcgagcagatccagttcatcaagctgttcggcatggccaagatcgacaacctgctgcaggagatgctgctgggcggcgcccccagcgacgccccccacgcccaccaccccctgcacccccacctgatgcaggagcacatgggcaccaacgtgatcgtggccaacaccatgcccacccacctgagcaacggccagatgtgcgagtggcccagacccagaggccaggccgccgcccccgaggccccccagcccgccccccccggcggcagcggcagcgagccctacaagctgctgcccggcgccgtggccaccatcgtgagacccctggccgccatcccccagcccaccatcaccaagcaggaggtgatctga

SEQ ID NO: 1371 - RNA, 1314 nt, synthetic construct
  misc_feature 1..1314: note = CDS (opt4) from Homo sapiens__NP_000448.3__HNF4A(39-474)(S87A_K106R_K108R_K126R_ K127R_S142A_S143A_S148A_T166A_S167A_S313A_S378A_T429A_T432A _S436A_K458R_S461E)
  source 1..1314: mol_type = other RNA
atggacaccagccccagcgagggcaccaacctgaacgcccccaacagcctgggcgtgagcgccctgtgcgccatctgcggcgacagagccaccggcaagcactacggcgccagcagctgcgacggctgcaagggcttcttcagaagagccgtgagaaagaaccacatgtacagctgcagattcagcagacagtgcgtggtggacagagacagaagaaaccagtgcagatactgcagactgaagaagtgcttcagagccggcatgagaagagaggccgtgcagaacgagagagacagaatcagcaccagaagagccgcctacgaggacagcgccctgcccagcatcaacgccctgctgcaggccgaggtgctgagcagacagatcgccgcccccgtgagcggcatcaacggcgacatcagagccaagaagatcgccagcatcgccgacgtgtgcgagagcatgaaggagcagctgctggtgctggtggagtgggccaagtacatccccgccttctgcgagctgcccctggacgaccaggtggccctgctgagagcccacgccggcgagcacctgctgctgggcgccaccaagagaagcatggtgttcaaggacgtgctgctgctgggcaacgactacatcgtgcccagacactgccccgagctggccgagatgagcagagtgagcatcagaatcctggacgagctggtgctgcccttccaggagctgcagatcgacgacaacgagtacgcctacctgaaggccatcatcttcttcgaccccgacgccaagggcctgagcgaccccggcaagatcaagagactgagagcccaggtgcaggtgagcctggaggactacatcaacgacagacagtacgacagcagaggcagattcggcgagctgctgctgctgctgcccaccctgcagagcatcacctggcagatgatcgagcagatccagttcatcaagctgttcggcatggccaagatcgacaacctgctgcaggagatgctgctgggcggcgcccccagcgacgccccccacgcccaccaccccctgcacccccacctgatgcaggagcacatgggcaccaacgtgatcgtggccaacaccatgcccacccacctgagcaacggccagatgtgcgagtggcccagacccagaggccaggccgccgcccccgaggccccccagcccgccccccccggcggcagcggcagcgagccctacaagctgctgcccggcgccgtggccaccatcgtgagacccctggaggccatcccccagcccaccatcaccaagcaggaggtgatctga

SEQ ID NO: 1372 - RNA, 1314 nt, synthetic construct
  misc_feature 1..1314: note = CDS (opt4) from Homo sapiens__NP_000448.3__HNF4A(39-474)(S87A_K106R_K108R_K126R_ K127R_S142A_S143A_S148E_T166A_S167E_S313A_S378E_T429E_T432E _S436E_K458R_S461E)
  source 1..1314: mol_type = other RNA
atggacaccagccccagcgagggcaccaacctgaacgcccccaacagcctgggcgtgagcgccctgtgcgccatctgcggcgacagagccaccggcaagcactacggcgccagcagctgcgacggctgcaagggcttcttcagaagagccgtgagaaagaaccacatgtacagctgcagattcagcagacagtgcgtggtggacagagacagaagaaaccagtgcagatactgcagactgaagaagtgcttcagagccggcatgagaagagaggccgtgcagaacgagagagacagaatcagcaccagaagagccgcctacgaggacagcgagctgcccagcatcaacgccctgctgcaggccgaggtgctgagcagacagatcgccgagcccgtgagcggcatcaacggcgacatcagagccaagaagatcgccagcatcgccgacgtgtgcgagagcatgaaggagcagctgctggtgctggtggagtgggccaagtacatccccgccttctgcgagctgcccctggacgaccaggtggccctgctgagagcccacgccggcgagcacctgctgctgggcgccaccaagagaagcatggtgttcaaggacgtgctgctgctgggcaacgactacatcgtgcccagacactgccccgagctggccgagatgagcagagtgagcatcagaatcctggacgagctggtgctgcccttccaggagctgcagatcgacgacaacgagtacgcctacctgaaggccatcatcttcttcgaccccgacgccaagggcctgagcgaccccggcaagatcaagagactgagagcccaggtgcaggtgagcctggaggactacatcaacgacagacagtacgacagcagaggcagattcggcgagctgctgctgctgctgcccaccctgcagagcatcacctggcagatgatcgagcagatccagttcatcaagctgttcggcatggccaagatcgacaacctgctgcaggagatgctgctgggcggcgagcccagcgacgccccccacgcccaccaccccctgcacccccacctgatgcaggagcacatgggcaccaacgtgatcgtggccaacaccatgcccacccacctgagcaacggccagatgtgcgagtggcccagacccagaggccaggccgccgagcccgaggagccccagcccgagccccccggcggcagcggcagcgagccctacaagctgctgcccggcgccgtggccaccatcgtgagacccctggaggccatcccccagcccaccatcaccaagcaggaggtgatctga

SEQ ID NO: 1373 - RNA, 1314 nt, synthetic construct
  misc_feature 1..1314: note = CDS (opt4) from Homo sapiens__NP_000448.3__HNF4A(39-474)(S87A_K106R_K108R_K126R_ K127R_S142A_S143A_S148A_T166A_S167A_K179R_K180R_S313A_S378A _T429A_T432A_S436A_K458R_S461E)
  source 1..1314: mol_type = other RNA
atggacaccagccccagcgagggcaccaacctgaacgcccccaacagcctgggcgtgagcgccctgtgcgccatctgcggcgacagagccaccggcaagcactacggcgccagcagctgcgacggctgcaagggcttcttcagaagagccgtgagaaagaaccacatgtacagctgcagattcagcagacagtgcgtggtggacagagacagaagaaaccagtgcagatactgcagactgaagaagtgcttcagagccggcatgagaagagaggccgtgcagaacgagagagacagaatcagcaccagaagagccgcctacgaggacagcgccctgcccagcatcaacgccctgctgcaggccgaggtgctgagcagacagatcgccgcccccgtgagcggcatcaacggcgacatcagagccagaagaatcgccagcatcgccgacgtgtgcgagagcatgaaggagcagctgctggtgctggtggagtgggccaagtacatccccgccttctgcgagctgcccctggacgaccaggtggccctgctgagagcccacgccggcgagcacctgctgctgggcgccaccaagagaagcatggtgttcaaggacgtgctgctgctgggcaacgactacatcgtgcccagacactgccccgagctggccgagatgagcagagtgagcatcagaatcctggacgagctggtgctgcccttccaggagctgcagatcgacgacaacgagtacgcctacctgaaggccatcatcttcttcgaccccgacgccaagggcctgagcgaccccggcaagatcaagagactgagagcccaggtgcaggtgagcctggaggactacatcaacgacagacagtacgacagcagaggcagattcggcgagctgctgctgctgctgcccaccctgcagagcatcacctggcagatgatcgagcagatccagttcatcaagctgttcggcatggccaagatcgacaacctgctgcaggagatgctgctgggcggcgcccccagcgacgccccccacgcccaccaccccctgcacccccacctgatgcaggagcacatgggcaccaacgtgatcgtggccaacaccatgcccacccacctgagcaacggccagatgtgcgagtggcccagacccagaggccaggccgccgcccccgaggccccccagcccgccccccccggcggcagcggcagcgagccctacaagctgctgcccggcgccgtggccaccatcgtgagacccctggaggccatcccccagcccaccatcaccaagcaggaggtgatctga

SEQ ID NO: 1374 - RNA, 1314 nt, synthetic construct
  misc_feature 1..1314: note = CDS (opt4) from Homo sapiens__NP_000448.3__HNF4A(39-474)(S87A_K106R_K108R_K126R_ K127R_S142A_S143A_S148A_T166A_S167A_K300R_K307R_K309R_S313A _S378A_T429A_T432A_S436A_K458R_S461E)
  source 1..1314: mol_type = other RNA
atggacaccagccccagcgagggcaccaacctgaacgcccccaacagcctgggcgtgagcgccctgtgcgccatctgcggcgacagagccaccggcaagcactacggcgccagcagctgcgacggctgcaagggcttcttcagaagagccgtgagaaagaaccacatgtacagctgcagattcagcagacagtgcgtggtggacagagacagaagaaaccagtgcagatactgcagactgaagaagtgcttcagagccggcatgagaagagaggccgtgcagaacgagagagacagaatcagcaccagaagagccgcctacgaggacagcgccctgcccagcatcaacgccctgctgcaggccgaggtgctgagcagacagatcgccgcccccgtgagcggcatcaacggcgacatcagagccaagaagatcgccagcatcgccgacgtgtgcgagagcatgaaggagcagctgctggtgctggtggagtgggccaagtacatccccgccttctgcgagctgcccctggacgaccaggtggccctgctgagagcccacgccggcgagcacctgctgctgggcgccaccaagagaagcatggtgttcaaggacgtgctgctgctgggcaacgactacatcgtgcccagacactgccccgagctggccgagatgagcagagtgagcatcagaatcctggacgagctggtgctgcccttccaggagctgcagatcgacgacaacgagtacgcctacctgaaggccatcatcttcttcgaccccgacgccagaggcctgagcgaccccggcagaatcagaagactgagagcccaggtgcaggtgagcctggaggactacatcaacgacagacagtacgacagcagaggcagattcggcgagctgctgctgctgctgcccaccctgcagagcatcacctggcagatgatcgagcagatccagttcatcaagctgttcggcatggccaagatcgacaacctgctgcaggagatgctgctgggcggcgcccccagcgacgccccccacgcccaccaccccctgcacccccacctgatgcaggagcacatgggcaccaacgtgatcgtggccaacaccatgcccacccacctgagcaacggccagatgtgcgagtggcccagacccagaggccaggccgccgcccccgaggccccccagcccgccccccccggcggcagcggcagcgagccctacaagctgctgcccggcgccgtggccaccatcgtgagacccctggaggccatcccccagcccaccatcaccaagcaggaggtgatctga

SEQ ID NO: 1375 - RNA, 1314 nt, synthetic construct
  misc_feature 1..1314: note = CDS (opt4) from Homo sapiens__NP_000448.3__HNF4A(39-474)(S87A_K106R_K108R_K126R_ K127R_S142A_S143A_S148A_T166A_S167A_S313A_S378A_T429A_T432A _S436A_K447R_K458R_S461E_K470R)
  source 1..1314: mol_type = other RNA
atggacaccagccccagcgagggcaccaacctgaacgcccccaacagcctgggcgtgagcgccctgtgcgccatctgcggcgacagagccaccggcaagcactacggcgccagcagctgcgacggctgcaagggcttcttcagaagagccgtgagaaagaaccacatgtacagctgcagattcagcagacagtgcgtggtggacagagacagaagaaaccagtgcagatactgcagactgaagaagtgcttcagagccggcatgagaagagaggccgtgcagaacgagagagacagaatcagcaccagaagagccgcctacgaggacagcgccctgcccagcatcaacgccctgctgcaggccgaggtgctgagcagacagatcgccgcccccgtgagcggcatcaacggcgacatcagagccaagaagatcgccagcatcgccgacgtgtgcgagagcatgaaggagcagctgctggtgctggtggagtgggccaagtacatccccgccttctgcgagctgcccctggacgaccaggtggccctgctgagagcccacgccggcgagcacctgctgctgggcgccaccaagagaagcatggtgttcaaggacgtgctgctgctgggcaacgactacatcgtgcccagacactgccccgagctggccgagatgagcagagtgagcatcagaatcctggacgagctggtgctgcccttccaggagctgcagatcgacgacaacgagtacgcctacctgaaggccatcatcttcttcgaccccgacgccaagggcctgagcgaccccggcaagatcaagagactgagagcccaggtgcaggtgagcctggaggactacatcaacgacagacagtacgacagcagaggcagattcggcgagctgctgctgctgctgcccaccctgcagagcatcacctggcagatgatcgagcagatccagttcatcaagctgttcggcatggccaagatcgacaacctgctgcaggagatgctgctgggcggcgcccccagcgacgccccccacgcccaccaccccctgcacccccacctgatgcaggagcacatgggcaccaacgtgatcgtggccaacaccatgcccacccacctgagcaacggccagatgtgcgagtggcccagacccagaggccaggccgccgcccccgaggccccccagcccgccccccccggcggcagcggcagcgagccctacagactgctgcccggcgccgtggccaccatcgtgagacccctggaggccatcccccagcccaccatcaccagacaggaggtgatctga

SEQ ID NO: 1376 - RNA, 1314 nt, synthetic construct
  misc_feature 1..1314: note = CDS (opt4) from Homo sapiens__NP_000448.3__HNF4A(39-474)(S87A_K106R_K108R_K126R_ K127R_S142A_S143A_S148A_T166A_S167A_K179R_K180R_K234R_K300R _K307R_K309R_S313A_S378A_T429A_T432A_S436A_K447R_K458R_S461 E_K470R)
  source 1..1314: mol_type = other RNA
atggacaccagccccagcgagggcaccaacctgaacgcccccaacagcctgggcgtgagcgccctgtgcgccatctgcggcgacagagccaccggcaagcactacggcgccagcagctgcgacggctgcaagggcttcttcagaagagccgtgagaaagaaccacatgtacagctgcagattcagcagacagtgcgtggtggacagagacagaagaaaccagtgcagatactgcagactgaagaagtgcttcagagccggcatgagaagagaggccgtgcagaacgagagagacagaatcagcaccagaagagccgcctacgaggacagcgccctgcccagcatcaacgccctgctgcaggccgaggtgctgagcagacagatcgccgcccccgtgagcggcatcaacggcgacatcagagccagaagaatcgccagcatcgccgacgtgtgcgagagcatgaaggagcagctgctggtgctggtggagtgggccaagtacatccccgccttctgcgagctgcccctggacgaccaggtggccctgctgagagcccacgccggcgagcacctgctgctgggcgccaccagaagaagcatggtgttcaaggacgtgctgctgctgggcaacgactacatcgtgcccagacactgccccgagctggccgagatgagcagagtgagcatcagaatcctggacgagctggtgctgcccttccaggagctgcagatcgacgacaacgagtacgcctacctgaaggccatcatcttcttcgaccccgacgccagaggcctgagcgaccccggcagaatcagaagactgagagcccaggtgcaggtgagcctggaggactacatcaacgacagacagtacgacagcagaggcagattcggcgagctgctgctgctgctgcccaccctgcagagcatcacctggcagatgatcgagcagatccagttcatcaagctgttcggcatggccaagatcgacaacctgctgcaggagatgctgctgggcggcgcccccagcgacgccccccacgcccaccaccccctgcacccccacctgatgcaggagcacatgggcaccaacgtgatcgtggccaacaccatgcccacccacctgagcaacggccagatgtgcgagtggcccagacccagaggccaggccgccgcccccgaggccccccagcccgccccccccggcggcagcggcagcgagccctacagactgctgcccggcgccgtggccaccatcgtgagacccctggaggccatcccccagcccaccatcaccagacaggaggtgatctga

SEQ ID NO: 1377 - RNA, 1314 nt, synthetic construct
  misc_feature 1..1314: note = CDS (opt4) from Homo sapiens__NP_000448.3__HNF4A(39-474)(S87A_S95A_S99A_K106R_K1 08R_K126R_K127R_S142A_S143A_S148A_T166A_S167A_S313A_S378A_T 429A_T432A_S436A_K458R_S461E)
  source 1..1314: mol_type = other RNA
atggacaccagccccagcgagggcaccaacctgaacgcccccaacagcctgggcgtgagcgccctgtgcgccatctgcggcgacagagccaccggcaagcactacggcgccagcagctgcgacggctgcaagggcttcttcagaagagccgtgagaaagaaccacatgtacgcctgcagattcgccagacagtgcgtggtggacagagacagaagaaaccagtgcagatactgcagactgaagaagtgcttcagagccggcatgagaagagaggccgtgcagaacgagagagacagaatcagcaccagaagagccgcctacgaggacagcgccctgcccagcatcaacgccctgctgcaggccgaggtgctgagcagacagatcgccgcccccgtgagcggcatcaacggcgacatcagagccaagaagatcgccagcatcgccgacgtgtgcgagagcatgaaggagcagctgctggtgctggtggagtgggccaagtacatccccgccttctgcgagctgcccctggacgaccaggtggccctgctgagagcccacgccggcgagcacctgctgctgggcgccaccaagagaagcatggtgttcaaggacgtgctgctgctgggcaacgactacatcgtgcccagacactgccccgagctggccgagatgagcagagtgagcatcagaatcctggacgagctggtgctgcccttccaggagctgcagatcgacgacaacgagtacgcctacctgaaggccatcatcttcttcgaccccgacgccaagggcctgagcgaccccggcaagatcaagagactgagagcccaggtgcaggtgagcctggaggactacatcaacgacagacagtacgacagcagaggcagattcggcgagctgctgctgctgctgcccaccctgcagagcatcacctggcagatgatcgagcagatccagttcatcaagctgttcggcatggccaagatcgacaacctgctgcaggagatgctgctgggcggcgcccccagcgacgccccccacgcccaccaccccctgcacccccacctgatgcaggagcacatgggcaccaacgtgatcgtggccaacaccatgcccacccacctgagcaacggccagatgtgcgagtggcccagacccagaggccaggccgccgcccccgaggccccccagcccgccccccccggcggcagcggcagcgagccctacaagctgctgcccggcgccgtggccaccatcgtgagacccctggaggccatcccccagcccaccatcaccaagcaggaggtgatctga

SEQ ID NO: 1378 - RNA, 1314 nt, synthetic construct
  misc_feature 1..1314: note = CDS (opt4) from Homo sapiens__NP_000448.3__HNF4A(39-474)(S87A_K106R_K108R_K126R_ K127R_S138A_T139A_S142A_S143A_S148A_T166A_S167A_S313A_S378A _T429A_T432A_S436A_K458R_S461E)
  source 1..1314: mol_type = other RNA
atggacaccagccccagcgagggcaccaacctgaacgcccccaacagcctgggcgtgagcgccctgtgcgccatctgcggcgacagagccaccggcaagcactacggcgccagcagctgcgacggctgcaagggcttcttcagaagagccgtgagaaagaaccacatgtacagctgcagattcagcagacagtgcgtggtggacagagacagaagaaaccagtgcagatactgcagactgaagaagtgcttcagagccggcatgagaagagaggccgtgcagaacgagagagacagaatcgccgccagaagagccgcctacgaggacagcgccctgcccagcatcaacgccctgctgcaggccgaggtgctgagcagacagatcgccgcccccgtgagcggcatcaacggcgacatcagagccaagaagatcgccagcatcgccgacgtgtgcgagagcatgaaggagcagctgctggtgctggtggagtgggccaagtacatccccgccttctgcgagctgcccctggacgaccaggtggccctgctgagagcccacgccggcgagcacctgctgctgggcgccaccaagagaagcatggtgttcaaggacgtgctgctgctgggcaacgactacatcgtgcccagacactgccccgagctggccgagatgagcagagtgagcatcagaatcctggacgagctggtgctgcccttccaggagctgcagatcgacgacaacgagtacgcctacctgaaggccatcatcttcttcgaccccgacgccaagggcctgagcgaccccggcaagatcaagagactgagagcccaggtgcaggtgagcctggaggactacatcaacgacagacagtacgacagcagaggcagattcggcgagctgctgctgctgctgcccaccctgcagagcatcacctggcagatgatcgagcagatccagttcatcaagctgttcggcatggccaagatcgacaacctgctgcaggagatgctgctgggcggcgcccccagcgacgccccccacgcccaccaccccctgcacccccacctgatgcaggagcacatgggcaccaacgtgatcgtggccaacaccatgcccacccacctgagcaacggccagatgtgcgagtggcccagacccagaggccaggccgccgcccccgaggccccccagcccgccccccccggcggcagcggcagcgagccctacaagctgctgcccggcgccgtggccaccatcgtgagacccctggaggccatcccccagcccaccatcaccaagcaggaggtgatctga

SEQ ID NO: 1379 - RNA, 1314 nt, synthetic construct
  misc_feature 1..1314: note = CDS (opt4) from Homo sapiens__NP_000448.3__HNF4A(39-474)(S87A_S95A_S99A_K106R_K1 08R_K126R_K127R_S138A_T139A_S142A_S143A_S148A_T166A_S167A_S 313A_S378A_T429A_T432A_S436A_K458R_S461E)
  source 1..1314: mol_type = other RNA
atggacaccagccccagcgagggcaccaacctgaacgcccccaacagcctgggcgtgagcgccctgtgcgccatctgcggcgacagagccaccggcaagcactacggcgccagcagctgcgacggctgcaagggcttcttcagaagagccgtgagaaagaaccacatgtacgcctgcagattcgccagacagtgcgtggtggacagagacagaagaaaccagtgcagatactgcagactgaagaagtgcttcagagccggcatgagaagagaggccgtgcagaacgagagagacagaatcgccgccagaagagccgcctacgaggacagcgccctgcccagcatcaacgccctgctgcaggccgaggtgctgagcagacagatcgccgcccccgtgagcggcatcaacggcgacatcagagccaagaagatcgccagcatcgccgacgtgtgcgagagcatgaaggagcagctgctggtgctggtggagtgggccaagtacatccccgccttctgcgagctgcccctggacgaccaggtggccctgctgagagcccacgccggcgagcacctgctgctgggcgccaccaagagaagcatggtgttcaaggacgtgctgctgctgggcaacgactacatcgtgcccagacactgccccgagctggccgagatgagcagagtgagcatcagaatcctggacgagctggtgctgcccttccaggagctgcagatcgacgacaacgagtacgcctacctgaaggccatcatcttcttcgaccccgacgccaagggcctgagcgaccccggcaagatcaagagactgagagcccaggtgcaggtgagcctggaggactacatcaacgacagacagtacgacagcagaggcagattcggcgagctgctgctgctgctgcccaccctgcagagcatcacctggcagatgatcgagcagatccagttcatcaagctgttcggcatggccaagatcgacaacctgctgcaggagatgctgctgggcggcgcccccagcgacgccccccacgcccaccaccccctgcacccccacctgatgcaggagcacatgggcaccaacgtgatcgtggccaacaccatgcccacccacctgagcaacggccagatgtgcgagtggcccagacccagaggccaggccgccgcccccgaggccccccagcccgccccccccggcggcagcggcagcgagccctacaagctgctgcccggcgccgtggccaccatcgtgagacccctggaggccatcccccagcccaccatcaccaagcaggaggtgatctga

SEQ ID NO: 1380 - RNA, 1314 nt, synthetic construct
  misc_feature 1..1314: note = CDS (opt5) from Homo sapiens__NP_000448.3__HNF4A(39-474)
  source 1..1314: mol_type = other RNA
atggacacatctcctagcgaggggaccaacctcaatgctccgaactccctgggagtgtctgccctttgcgccatctgtggcgatcgggctacagggaaacactacggagccagctcctgcgacggctgtaaggggtttttccgcagatctgtgcggaaaaatcatatgtatagctgccgcttttccagacaatgtgtcgtggataaggacaaacggaaccagtgccgctactgtagactgaagaagtgcttccgggctggaatgaaaaaggaagccgttcagaatgagcgcgatagaattagcacccggcgcagctcctatgaagacagctctctcccctccatcaacgcgctgctgcaggccgaggtgctcagcagacaaattacatctcctgtctccggcatcaatggcgatattcgggctaaaaagatcgccagcatcgctgacgtgtgtgagtccatgaaagaacagctgcttgttctggtggagtgggccaagtacattcccgcgttttgcgaactccctctggatgaccaggtcgcccttctgcgcgctcacgccggggagcatctcctgctgggagctaccaagagatctatggtgttcaaagacgtgctcctgcttggcaacgattatatcgtcccccggcactgtcctgagctggccgaaatgagcagagtttccattcgcatcctcgacgagctggtgcttccgtttcaggaactgcaaattgatgacaatgagtacgcctacctcaaggctatcattttctttgatcccgacgcgaaagggctgagcgatcctggaaagatcaaacggctgagatctcaggtgcaggtctccctcgaagactatatcaacgatcgccagtacgacagccggggcagattcggggagctgcttctgctcctgcccacgcttcaatctattacctggcagatgatcgagcagattcaatttatcaagctgttcggaatggccaaaattgataatctcctgcaggaaatgctgctcggcggcagcccttccgacgctccccatgcccaccacccgctgcatcctcaccttatgcaggagcatatggggacaaacgtgatcgttgccaataccatgcccacacacctgtctaacggacagatgtgcgaatggcctcgcccccggggccaagctgccacccccgagacgcctcagccgtctccccctgggggatccggcagcgaaccctataagctcctgcctggggcggtggctacaatcgtcaagcccctgtctgccattccgcagcctaccatcacaaaacaggaggtgatttga

SEQ ID NO: 1381 - RNA, 1314 nt, synthetic construct
  misc_feature 1..1314: note = CDS (opt5) from Homo sapiens__NP_000448.3__HNF4A(39-474)(S313A)
  source 1..1314: mol_type = other RNA
atggacacatctcctagcgaggggaccaacctcaatgctccgaactccctgggagtgtctgccctttgcgccatctgtggcgatcgggctacagggaaacactacggagccagctcctgcgacggctgtaaggggtttttccgcagatctgtgcggaaaaatcatatgtatagctgccgcttttccagacaatgtgtcgtggataaggacaaacggaaccagtgccgctactgtagactgaagaagtgcttccgggctggaatgaaaaaggaagccgttcagaatgagcgcgatagaattagcacccggagatcttcctatgaagacagctctctcccctccatcaacgcgctgctgcaggccgaggtgctcagccgccaaattacatctcctgtctccggcatcaatggcgatattcgggctaaaaagatcgccagcatcgctgacgtgtgtgagtccatgaaagaacagctgcttgttctggtggagtgggccaagtacattcccgcgttttgcgaactccctctggatgaccaggtcgcccttctgcgcgctcacgccggggagcatctcctgctgggagctaccaagagatctatggtgttcaaagacgtgctcctgcttggcaacgattatatcgtcccccggcactgtcctgagctggccgaaatgagcagagtttccattcgcatcctcgacgagctggtgcttccgtttcaggaactgcaaattgatgacaatgagtacgcctacctcaaggctatcattttctttgatcccgacgcgaaagggctgagcgatcctggaaagatcaaacggctgagagcccaggtgcaggtctctctcgaagactatatcaacgatcgccagtacgactcccggggcagattcggggagctgcttctgctcctgcccacgcttcaaagcattacctggcagatgatcgagcagattcaatttatcaagctgttcggaatggctaaaattgataatctcctgcaggaaatgctgctcggcggctctcctagcgacgctccccatgcccaccacccgctgcatcctcaccttatgcaggagcatatggggacaaacgtgatcgttgccaataccatgcccacacacctgtccaacggacagatgtgcgaatggcctcgcccccggggccaagccgcgacccccgagacgcctcagccgtctccccctgggggaagcggctccgaaccctataagctcctgcctggggctgtggccacaatcgtcaagcccctgagcgccattccgcagcctaccatcacaaaacaggaggtgatttga

SEQ ID NO: 1382 - RNA, 1314 nt, synthetic construct
  misc_feature 1..1314: note = CDS (opt5) from Homo sapiens__NP_000448.3__HNF4A(39-474)(S313E)
  source 1..1314: mol_type = other RNA
atggacacatctcctagcgaggggaccaacctcaatgctccgaactccctgggagtgtctgccctttgcgccatctgtggcgatcgggctacagggaaacactacggagccagctcctgcgacggctgtaaggggtttttccgcagatctgtgcggaaaaatcatatgtatagctgccgcttttccagacaatgtgtcgtggataaggacaaacggaaccagtgccgctactgtagactgaagaagtgcttccgggctggaatgaaaaaggaagccgttcagaatgagcgcgatagaattagcacccggagatcttcctatgaagacagctctctcccctccatcaacgcgctgctgcaggccgaggtgctcagccgccaaattacatctcctgtctccggcatcaatggcgatattcgggctaaaaagatcgccagcatcgctgacgtgtgtgagtccatgaaagaacagctgcttgttctggtggagtgggccaagtacattcccgcgttttgcgaactccctctggatgaccaggtcgcccttctgcgcgctcacgccggggagcatctcctgctgggagctaccaagagatctatggtgttcaaagacgtgctcctgcttggcaacgattatatcgtcccccggcactgtcctgagctggccgaaatgagcagagtttccattcgcatcctcgacgagctggtgcttccgtttcaggaactgcaaattgatgacaatgagtacgcctacctcaaggctatcattttctttgatcccgacgcgaaagggctgagcgatcctggaaagatcaaacggctgagagaacaggtgcaggtctctctcgaggactatatcaacgatcgccagtacgactcccggggcagattcggggagctgcttctgctcctgcccacgcttcaaagcattacctggcagatgatcgaacagattcaatttatcaagctgttcggaatggccaaaattgataatctcctgcaggagatgctgctcggcggctctcctagcgacgctccccatgcccaccacccgctgcatcctcaccttatgcaggaacatatggggacaaacgtgatcgttgccaataccatgcccacacacctgtccaacggacagatgtgcgagtggcctcgcccccggggccaagctgccacccccgaaacgcctcagccgtctccccctgggggaagcggctccgagccctataagctcctgcctggggcggtggctacaatcgtcaagcccctgagcgccattccgcagcctaccatcacaaaacaggaggtgatttga

SEQ ID NO: 1383 - RNA, 1314 nt, synthetic construct
  misc_feature 1..1314: note = CDS (opt5) from Homo sapiens__NP_000448.3__HNF4A(39-474)(S142A_S143A)
  source 1..1314: mol_type = other RNA
atggacacatctcctagcgaggggaccaacctcaatgctccgaactccctgggagtgtctgccctttgcgccatctgtggcgatcgggctacagggaaacactacggagccagctcctgcgacggctgtaaggggtttttccgcagatctgtgcggaaaaatcatatgtatagctgccgcttttccagacaatgtgtcgtggataaggacaaacggaaccagtgccgctactgtagactgaagaagtgcttccgggctggaatgaaaaaggaagccgttcagaatgagcgcgatagaattagcacccggcgcgcggcctatgaagactcttccctccccagcatcaacgctctgctgcaggccgaggtgctctctagacaaattacatcccctgtcagcggcatcaatggcgatattcgggctaaaaagatcgcctctatcgcggacgtgtgtgagtccatgaaagaacagctgcttgttctggtggagtgggccaagtacattcccgctttttgcgaactccctctggatgaccaggtcgcccttctgcgcgctcacgccggggagcatctcctgctgggagccaccaagagaagcatggtgttcaaagacgtgctcctgcttggcaacgattatatcgtcccccggcactgtcctgagctggctgaaatgtccagagtttctattcgcatcctcgacgagctggtgcttccgtttcaggaactgcaaattgatgacaatgagtacgcgtacctcaaggccatcattttctttgatcccgacgctaaagggctgagcgatcctggaaagatcaaacggctgagatcccaggtgcaggtcagcctcgaagactatatcaacgatcgccagtacgactctcggggcagattcggggagctgcttctgctcctgcccacgcttcaatccattacctggcagatgatcgagcagattcaatttatcaagctgttcggaatggccaaaattgataatctcctgcaggaaatgctgctcggcggcagcccttctgacgctccccatgcccaccacccgctgcatcctcaccttatgcaggagcatatggggacaaacgtgatcgttgccaataccatgcccacacacctgagcaacggacagatgtgcgaatggcctcgcccccggggccaagcggctacccccgagacgcctcagccgtctccccctgggggatccggcagcgaaccctataagctcctgcctggggccgtggccacaatcgtcaagcccctgtccgctattccgcagcctaccatcacaaaacaggaggtgatttga

SEQ ID NO: 1384 - RNA, 1314 nt, synthetic construct
  misc_feature 1..1314: note = CDS (opt5) from Homo sapiens__NP_000448.3__HNF4A(39-474)(S142E_S143E)
  source 1..1314: mol_type = other RNA
atggacacatctcctagcgaggggaccaacctcaatgctccgaactccctgggagtgtctgccctttgcgccatctgtggcgatcgggctacagggaaacactacggagccagctcctgcgacggctgtaaggggtttttccgcagatctgtgcggaaaaatcatatgtatagctgccgcttttccagacaatgtgtcgtggataaggacaaacggaaccagtgccgctactgtagactgaagaagtgcttccgggctggaatgaaaaaggaagccgttcagaatgagcgcgatagaattagcacccggcgcgaagagtatgaggactcttccctccccagcatcaacgcgctgctgcaggccgaagtgctctctagacaaattacatcccctgtcagcggcatcaatggcgatattcgggctaaaaagatcgcctctatcgctgacgtgtgtgagtccatgaaagaacagctgcttgttctggtggagtgggccaagtacattcccgcgttttgcgagctccctctggatgaccaggtcgcccttctgcgcgctcacgccggggaacatctcctgctgggagctaccaagagaagcatggtgttcaaagacgtgctcctgcttggcaacgattatatcgtcccccggcactgtcctgagctggccgaaatgtccagagtttctattcgcatcctcgacgagctggtgcttccgtttcaggaactgcaaattgatgacaatgagtacgcctacctcaaggctatcattttctttgatcccgacgcgaaagggctgagcgatcctggaaagatcaaacggctgagatcccaggtgcaggtcagcctcgaggactatatcaacgatcgccagtacgactctcggggcagattcggggaactgcttctgctcctgcccacgcttcaatccattacctggcagatgatcgagcagattcaatttatcaagctgttcggaatggccaaaattgataatctcctgcaggaaatgctgctcggcggcagcccttctgacgctccccatgcccaccacccgctgcatcctcaccttatgcaggagcatatggggacaaacgtgatcgttgccaataccatgcccacacacctgagcaacggacagatgtgcgaatggcctcgcccccggggccaagctgccacccccgagacgcctcagccgtctccccctgggggatccggcagcgagccctataagctcctgcctggggcggtggctacaatcgtcaagcccctgtccgccattccgcagcctaccatcacaaaacaggaagtgatttga

SEQ ID NO: 1385 - RNA, 1314 nt, synthetic construct
  misc_feature 1..1314: note = CDS (opt5) from Homo sapiens__NP_000448.3__HNF4A(39-474)(S143A)
  source 1..1314: mol_type = other RNA
atggacacatctcctagcgaggggaccaacctcaatgctccgaactccctgggagtgtctgccctttgcgccatctgtggcgatcgggctacagggaaacactacggagccagctcctgcgacggctgtaaggggtttttccgcagatctgtgcggaaaaatcatatgtatagctgccgcttttccagacaatgtgtcgtggataaggacaaacggaaccagtgccgctactgtagactgaagaagtgcttccgggctggaatgaaaaaggaagccgttcagaatgagcgcgatagaattagcacccggcgctctgcgtatgaagactccagcctcccctctatcaacgccctgctgcaggctgaggtgctctccagacaaattacaagccctgtctctggcatcaatggcgatattcgggccaaaaagatcgcttccatcgccgacgtgtgtgagagcatgaaagaacagctgcttgttctggtggagtgggcgaagtacattcccgccttttgcgaactccctctggatgaccaggtcgcccttctgcgcgcccacgctggggagcatctcctgctgggagccaccaagagatccatggtgttcaaagacgtgctcctgcttggcaacgattatatcgtcccccggcactgtcctgagctggccgaaatgtctagagttagcattcgcatcctcgacgagctggtgcttccgtttcaggaactgcaaattgatgacaatgagtacgcttacctcaaggcgatcattttctttgatcccgacgccaaagggctgtccgatcctggaaagatcaaacggctgagaagccaggtgcaggtctctctcgaagactatatcaacgatcgccagtacgactcccggggcagattcggggagctgcttctgctcctgcccacgcttcaaagcattacctggcagatgatcgagcagattcaatttatcaagctgttcggaatggctaaaattgataatctcctgcaggaaatgctgctcggcggctctcctagcgacgctccccatgcccaccacccgctgcatcctcaccttatgcaggagcatatggggacaaacgtgatcgttgctaataccatgcccacacacctgtccaacggacagatgtgcgaatggcctcgcccccggggccaagccgcgacccccgagacgcctcagccgtctccccctgggggaagcggctccgaaccctataagctcctgcctggggctgtggccacaatcgtcaagcccctgagcgccattccgcagcctaccatcacaaaacaggaggtgatttga

SEQ ID NO: 1386 - RNA, 1314 nt, synthetic construct
  misc_feature 1..1314: note = CDS (opt5) from Homo sapiens__NP_000448.3__HNF4A(39-474)(T166A)
  source 1..1314: mol_type = other RNA
atggacacatctcctagcgaggggaccaacctcaatgctccgaactccctgggagtgtctgccctttgcgccatctgtggcgatcgggctacagggaaacactacggagccagctcctgcgacggctgtaaggggtttttccgcagatctgtgcggaaaaatcatatgtatagctgccgcttttccagacaatgtgtcgtggataaggacaaacggaaccagtgccgctactgtagactgaagaagtgcttccgggctggaatgaaaaaggaagccgttcagaatgagcgcgatagaattagcacccggcgcagctcctatgaagacagctctctcccctccatcaacgcgctgctgcaggccgaggtgctcagcagacaaattgcttctcctgtctccggcatcaatggcgatattcgggccaaaaagatcgctagcatcgccgacgtgtgtgagtccatgaaagaacagctgcttgttctggtggagtgggcgaagtacattcccgccttttgcgaactccctctggatgaccaggtcgcccttctgcgcgcccacgctggggagcatctcctgctgggagccacaaagagatctatggtgttcaaagacgtgctcctgcttggcaacgattatatcgtcccccggcactgtcctgagctggccgaaatgagcagagtttccattcgcatcctcgacgagctggtgcttccgtttcaggaactgcaaattgatgacaatgagtacgcttacctcaaggcgatcattttctttgatcccgacgccaaagggctgagcgatcctggaaagatcaaacggctgagatctcaggtgcaggtctccctcgaagactatatcaacgatcgccagtacgacagccggggcagattcggggagctgcttctgctcctgcccacccttcaatctattacgtggcagatgatcgagcagattcaatttatcaagctgttcggaatggctaaaattgataatctcctgcaggaaatgctgctcggcggcagcccttccgacgctccccatgcccaccacccgctgcatcctcaccttatgcaggagcatatggggaccaacgtgatcgttgctaatacaatgcccacccacctgtctaacggacagatgtgcgaatggcctcgcccccggggccaagccgcgacacccgagacccctcagccgtctccccctgggggatccggcagcgaaccctataagctcctgcctggggctgtggccacgatcgtcaagcccctgtctgccattccgcagcctacaatcaccaaacaggaggtgatttga

SEQ ID NO: 1387 - RNA, 1314 nt, synthetic construct
  misc_feature 1..1314: note = CDS (opt5) from Homo sapiens__NP_000448.3__HNF4A(39-474)(S167E)
  source 1..1314: mol_type = other RNA
atggacacatctcctagcgaggggaccaacctcaatgctccgaactccctgggagtgtctgccctttgcgccatctgtggcgatcgggctacagggaaacactacggagccagctcctgcgacggctgtaaggggtttttccgcagatctgtgcggaaaaatcatatgtatagctgccgcttttccagacaatgtgtcgtggataaggacaaacggaaccagtgccgctactgtagactgaagaagtgcttccgggctggaatgaaaaaggaagccgttcagaatgagcgcgatagaattagcacccggagatcttcctatgaagacagctctctcccctccatcaacgcgctgctgcaggccgaggtgctcagccgccaaattacagagcctgtctctggcatcaatggcgatattcgggctaaaaagatcgcctccatcgctgacgtgtgtgaaagcatgaaagagcagctgcttgttctggtggaatgggccaagtacattcccgcgttttgcgagctccctctggatgaccaggtcgcccttctgcgcgctcacgccggggagcatctcctgctgggagctaccaagagatccatggtgttcaaagacgtgctcctgcttggcaacgattatatcgtcccccggcactgtcctgaactggccgagatgtctagagttagcattcgcatcctcgacgaactggtgcttccgtttcaggagctgcaaattgatgacaatgaatacgcctacctcaaggctatcattttctttgatcccgacgcgaaagggctgtccgatcctggaaagatcaaacggctgagaagccaggtgcaggtctctctcgaggactatatcaacgatcgccagtacgactcccggggcagattcggggagctgcttctgctcctgcccacgcttcaaagcattacctggcagatgatcgaacagattcaatttatcaagctgttcggaatggccaaaattgataatctcctgcaggagatgctgctcggcggctctcctagcgacgctccccatgcccaccacccgctgcatcctcaccttatgcaggaacatatggggacaaacgtgatcgttgccaataccatgcccacacacctgtccaacggacagatgtgcgagtggcctcgcccccggggccaagctgccacccccgaaacgcctcagccgtctccccctgggggaagcggctccgagccctataagctcctgcctggggcggtggctacaatcgtcaagcccctgagcgccattccgcagcctaccatcacaaaacaggaggtgatttga

SEQ ID NO: 1388 - RNA, 1314 nt, synthetic construct
  misc_feature 1..1314: note = CDS (opt5) from Homo sapiens__NP_000448.3__HNF4A(39-474)(S167A)
  source 1..1314: mol_type = other RNA
atggacacatctcctagcgaggggaccaacctcaatgctccgaactccctgggagtgtctgccctttgcgccatctgtggcgatcgggctacagggaaacactacggagccagctcctgcgacggctgtaaggggtttttccgcagatctgtgcggaaaaatcatatgtatagctgccgcttttccagacaatgtgtcgtggataaggacaaacggaaccagtgccgctactgtagactgaagaagtgcttccgggctggaatgaaaaaggaagccgttcagaatgagcgcgatagaattagcacccggagatcttcctatgaagacagctctctcccctccatcaacgcgctgctgcaggccgaggtgctcagccgccaaattacagctcctgtctctggcatcaatggcgatattcgggccaaaaagatcgcttccatcgccgacgtgtgtgagagcatgaaagaacagctgcttgttctggtggagtgggcgaagtacattcccgccttttgcgaactccctctggatgaccaggtcgcccttctgcgcgcccacgctggggagcatctcctgctgggagccaccaagagatccatggtgttcaaagacgtgctcctgcttggcaacgattatatcgtcccccggcactgtcctgagctggccgaaatgtctagagttagcattcgcatcctcgacgagctggtgcttccgtttcaggaactgcaaattgatgacaatgagtacgcttacctcaaggcgatcattttctttgatcccgacgccaaagggctgtccgatcctggaaagatcaaacggctgagaagccaggtgcaggtctctctcgaagactatatcaacgatcgccagtacgactcccggggcagattcggggagctgcttctgctcctgcccacgcttcaaagcattacctggcagatgatcgagcagattcaatttatcaagctgttcggaatggctaaaattgataatctcctgcaggaaatgctgctcggcggctctcctagcgacgctccccatgcccaccacccgctgcatcctcaccttatgcaggagcatatggggacaaacgtgatcgttgctaataccatgcccacacacctgtccaacggacagatgtgcgaatggcctcgcccccggggccaagccgcgacccccgagacgcctcagccgtctccccctgggggaagcggctccgaaccctataagctcctgcctggggctgtggccacaatcgtcaagcccctgagcgccattccgcagcctaccatcacaaaacaggaggtgatttga

SEQ ID NO: 1389 - RNA, 1314 nt, synthetic construct
  misc_feature 1..1314: note = CDS (opt5) from Homo sapiens__NP_000448.3__HNF4A(39-474)(S167A_S378A_T429A_T432A _S436A)
  source 1..1314: mol_type = other RNA
atggacacatctcctagcgaggggaccaacctcaatgctccgaactccctgggagtgtctgccctttgcgccatctgtggcgatcgggctacagggaaacactacggagccagctcctgcgacggctgtaaggggtttttccgcagatctgtgcggaaaaatcatatgtatagctgccgcttttccagacaatgtgtcgtggataaggacaaacggaaccagtgccgctactgtagactgaagaagtgcttccgggctggaatgaaaaaggaagccgttcagaatgagcgcgatagaattagcacccggagatcttcctatgaagacagctctctcccctccatcaacgcgctgctgcaggccgaggtgctcagccgccaaattacagctcctgtctctggcatcaatggcgatattcgggccaaaaagatcgcttccatcgccgacgtgtgtgagagcatgaaagaacagctgcttgttctggtggagtgggcgaagtacattcccgccttttgcgaactccctctggatgaccaggtcgcccttctgcgcgcccacgctggggagcatctcctgctgggagccaccaagagatccatggtgttcaaagacgtgctcctgcttggcaacgattatatcgtcccccggcactgtcctgagctggccgaaatgtctagagttagcattcgcatcctcgacgagctggtgcttccgtttcaggaactgcaaattgatgacaatgagtacgcttacctcaaggcgatcattttctttgatcccgacgccaaagggctgtccgatcctggaaagatcaaacggctgagaagccaggtgcaggtctctctcgaagactatatcaacgatcgccagtacgactcccggggcagattcggggagctgcttctgctcctgcccacgcttcaaagcattacctggcagatgatcgagcagattcaatttatcaagctgttcggaatggctaaaattgataatctcctgcaggaaatgctgctcggcggcgccccttctgacgctccccatgctcaccacccgctgcatcctcaccttatgcaggagcatatggggacaaacgtgatcgttgccaataccatgcccacacacctgagcaacggacagatgtgcgaatggcctcgcccccggggccaagcggctgcccccgaggcccctcagccggctccccctgggggatccggctctgaaccctataagctcctgcctggggccgtggctaccatcgtcaagcccctgagcgccattccgcagcctacgatcacaaaacaggaggtgatttga

SEQ ID NO: 1390 - RNA, 1314 nt, synthetic construct
  misc_feature 1..1314: note = CDS (opt5) from Homo sapiens__NP_000448.3__HNF4A(39-474)(S167E_S378E_T429E_T432E _S436E)
  source 1..1314: mol_type = other RNA
atggacacatctcctagcgaggggaccaacctcaatgctccgaactccctgggagtgtctgccctttgcgccatctgtggcgatcgggctacagggaaacactacggagccagctcctgcgacggctgtaaggggtttttccgcagatctgtgcggaaaaatcatatgtatagctgccgcttttccagacaatgtgtcgtggataaggacaaacggaaccagtgccgctactgtagactgaagaagtgcttccgggctggaatgaaaaaggaagccgttcagaatgagcgcgatagaattagcacccggagatcttcctatgaagacagctctctcccctccatcaacgcgctgctgcaggccgaggtgctcagccgccaaattacagagcctgtctctggcatcaatggcgatattcgggctaaaaagatcgcctccatcgctgacgtgtgtgaaagcatgaaagagcagctgcttgttctggtggaatgggccaagtacattcccgcgttttgcgagctccctctggatgaccaggtcgcccttctgcgcgctcacgccggggagcatctcctgctgggagctaccaagagatccatggtgttcaaagacgtgctcctgcttggcaacgattatatcgtcccccggcactgtcctgaactggccgagatgtctagagttagcattcgcatcctcgacgaactggtgcttccgtttcaggagctgcaaattgatgacaatgaatacgcctacctcaaggctatcattttctttgatcccgacgcgaaagggctgtccgatcctggaaagatcaaacggctgagaagccaggtgcaggtctctctcgaggactatatcaacgatcgccagtacgactcccggggcagattcggggagctgcttctgctcctgcccacgcttcaaagcattacctggcagatgatcgaacagattcaatttatcaagctgttcggaatggccaaaattgataatctcctgcaggagatgctgctcggcggcgaaccttctgacgctccccatgcccaccacccgctgcatcctcaccttatgcaggagcatatggggacaaacgtgatcgttgccaataccatgcccacacacctgagcaacggacagatgtgcgaatggcctcgcccccggggccaagctgccgagcccgaggaacctcagccggagccccctgggggatccggctctgaaccctataagctcctgcctggggcggtggctaccatcgtcaagcccctgagcgccattccgcagcctacgatcacaaaacaggaggtgatttga

SEQ ID NO: 1391 - RNA, 1314 nt, synthetic construct
  misc_feature 1..1314: note = CDS (opt5) from Homo sapiens__NP_000448.3__HNF4A(39-474)(S87A)
  source 1..1314: mol_type = other RNA
atggacacatctcctagcgaggggaccaacctcaatgctccgaactccctgggagtgtctgccctttgcgccatctgtggcgatcgggctacagggaaacactacggagccagctcctgcgacggctgtaaggggtttttccgcagagctgtgcggaaaaatcatatgtattcttgccgctttagcagacaatgtgtcgtggataaggacaaacggaaccagtgccgctactgtagactgaagaagtgcttccgggccggaatgaaaaaggaagcggttcagaatgagcgcgatagaatttccacccggcgcagctcttatgaagactccagcctcccctctatcaacgccctgctgcaggctgaggtgctctccagacaaattacaagccctgtctctggcatcaatggcgatattcgggccaaaaagatcgcttccatcgccgacgtgtgtgagagcatgaaagaacagctgcttgttctggtggagtgggcgaagtacattcccgccttttgcgaactccctctggatgaccaggtcgcccttctgcgcgcccacgctggggagcatctcctgctgggagccaccaagagatccatggtgttcaaagacgtgctcctgcttggcaacgattatatcgtcccccggcactgtcctgagctggccgaaatgtctagagttagcattcgcatcctcgacgagctggtgcttccgtttcaggaactgcaaattgatgacaatgagtacgcttacctcaaggcgatcattttctttgatcccgacgccaaagggctgtccgatcctggaaagatcaaacggctgagaagccaggtgcaggtctctctcgaagactatatcaacgatcgccagtacgactcccggggcagattcggggagctgcttctgctcctgcccacgcttcaaagcattacctggcagatgatcgagcagattcaatttatcaagctgttcggaatggctaaaattgataatctcctgcaggaaatgctgctcggcggctctcctagcgacgctccccatgcccaccacccgctgcatcctcaccttatgcaggagcatatggggacaaacgtgatcgttgctaataccatgcccacacacctgtccaacggacagatgtgcgaatggcctcgcccccggggccaagccgcgacccccgagacgcctcagccgtctccccctgggggaagcggctccgaaccctataagctcctgcctggggctgtggccacaatcgtcaagcccctgagcgccattccgcagcctaccatcacaaaacaggaggtgatttga

SEQ ID NO: 1392 - RNA, 1314 nt, synthetic construct
  misc_feature 1..1314: note = CDS (opt5) from Homo sapiens__NP_000448.3__HNF4A(39-474)(S87E)
  source 1..1314: mol_type = other RNA
atggacacatctcctagcgaggggaccaacctcaatgctccgaactccctgggagtgtctgccctttgcgccatctgtggcgatcgggctacagggaaacactacggagccagctcctgcgacggctgtaaggggtttttccgcagagaagtgcggaaaaatcatatgtattcttgccgctttagcagacaatgtgtcgtggataaggacaaacggaaccagtgccgctactgtagactgaagaagtgcttccgggctggaatgaaaaaggaggccgttcagaatgaacgcgatagaatttccacccggcgcagctcttatgaggactccagcctcccctctatcaacgcgctgctgcaggccgaggtgctctccagacaaattacaagccctgtctctggcatcaatggcgatattcgggctaaaaagatcgcctccatcgctgacgtgtgtgaaagcatgaaagagcagctgcttgttctggtggaatgggccaagtacattcccgcgttttgcgagctccctctggatgaccaggtcgcccttctgcgcgctcacgccggggagcatctcctgctgggagctaccaagagatccatggtgttcaaagacgtgctcctgcttggcaacgattatatcgtcccccggcactgtcctgaactggccgagatgtctagagttagcattcgcatcctcgacgaactggtgcttccgtttcaggagctgcaaattgatgacaatgaatacgcctacctcaaggctatcattttctttgatcccgacgcgaaagggctgtccgatcctggaaagatcaaacggctgagaagccaggtgcaggtctctctcgaggactatatcaacgatcgccagtacgactcccggggcagattcggggagctgcttctgctcctgcccacgcttcaaagcattacctggcagatgatcgaacagattcaatttatcaagctgttcggaatggccaaaattgataatctcctgcaggagatgctgctcggcggctctcctagcgacgctccccatgcccaccacccgctgcatcctcaccttatgcaggaacatatggggacaaacgtgatcgttgccaataccatgcccacacacctgtccaacggacagatgtgcgagtggcctcgcccccggggccaagctgccacccccgaaacgcctcagccgtctccccctgggggaagcggctccgagccctataagctcctgcctggggcggtggctacaatcgtcaagcccctgagcgccattccgcagcctaccatcacaaaacaggaggtgatttga

SEQ ID NO: 1393 - RNA, 1314 nt, synthetic construct
  misc_feature 1..1314: note = CDS (opt5) from Homo sapiens__NP_000448.3__HNF4A(39-474)(R2V)
  source 1..1314: mol_type = other RNA
atggacacatctcctagcgaggggaccaacctcaatgctccgaactccctgggagtgtctgccctttgcgccatctgtggcgatagagctacagggaaacactacggagccagctcctgcgacggctgtaaggggtttttccggcgctctgtccggaaaaatcatatgtatagctgcagattttcccgccaatgtgtggttgataaggacaaaagaaaccagtgccggtactgtcgcctgaagaagtgcttcagagctggaatgaaaaaggaagccgtgcagaatgagcgggatcgcattagcaccagacggtcttcctatgaagacagctctctcccctccatcaacgcgctgctgcaggccgaggtcctcagccgccaaattacatctcctgtgtccggcatcaatggcgatattagagctaaaaagatcgccagcatcgctgacgtttgtgagtccatgaaagaacagctgcttgtgctggtcgagtgggccaagtacattcccgcgttttgcgaactccctctggatgaccaggtggcccttctgcgggctcacgccggggagcatctcctgctgggagctaccaagcgctctatggtgttcaaagacgtcctcctgcttggcaacgattatatcgttcccagacactgtcctgagctggccgaaatgagccgggtgtccattagaatcctcgacgagctggtgcttccgtttcaggaactgcaaattgatgacaatgagtacgcctacctcaaggctatcattttctttgatcccgacgcgaaagggctgagcgatcctggaaagatcaaacgcctgcggtctcaggtccaggtgtccctcgaagactatatcaacgatagacagtacgacagccgcggccggttcggggagctgcttctgctcctgcccacgcttcaatctattacctggcagatgatcgagcagattcaatttatcaagctgttcggaatggccaaaattgataatctcctgcaggaaatgctgctcggcggcagcccttccgacgctccccatgcccaccacccgctgcatcctcaccttatgcaggagcatatggggacaaacgttatcgtggccaataccatgcccacacacctgtctaacggacagatgtgcgaatggcctagaccccgcggccaagctgccacccccgagacgcctcagccgagccctcccgggggatccggcagcgaaccctataagctcctgcctggggcggtcgctacaatcgtgaagcccctgtctgccattccgcagcctaccatcacaaaacaggaggttatttga

SEQ ID NO: 1394 - RNA, 1314 nt, synthetic construct
  misc_feature 1..1314: note = CDS (opt5) from Homo sapiens__NP_000448.3__HNF4A(39-474)(R2V_K5V)
  source 1..1314: mol_type = other RNA
atggacacatctcctagcgaggggaccaacctcaatgctccgaactccctgggagtgtctgccctttgcgccatctgtggcgatagagctacagggaagcactacggagccagctcctgcgacggctgtaaagggtttttccggcgctctgtgagaaagaatcatatgtatagctgccggttttcccgccaatgtgttgtggataaagacaagagaaaccagtgccggtactgtcgcctgaaaaagtgcttcagagctggaatgaagaaagaagccgtccagaatgagcgggatcgcattagcaccagacggtcttcctatgaagacagctctctcccctccatcaacgcgctgctgcaggccgaggtgctcagccgccaaattacatctcctgtttccggcatcaatggcgatattagagctaagaaaatcgccagcatcgctgacgtgtgtgagtccatgaaggaacagctgcttgtcctggtggagtgggccaaatacattcccgcgttttgcgaactccctctggatgaccaggtggcccttctgcgggctcacgccggggagcatctcctgctgggagctaccaagcgctctatggtcttcaaggacgttctcctgcttggcaacgattatatcgtgcccagacactgtcctgagctggccgaaatgagccgggtgtccattagaatcctcgacgagctggtccttccgtttcaggaactgcaaattgatgacaatgagtacgcctacctcaaagctatcattttctttgatcccgacgcgaaggggctgagcgatcctggaaaaatcaagcgcctgcggtctcaggtgcaggtttccctcgaagactatatcaacgatagacagtacgacagccgcggccggttcggggagctgcttctgctcctgcccacgcttcaatctattacctggcagatgatcgagcagattcaatttatcaaactgttcggaatggccaagattgataatctcctgcaggaaatgctgctcggcggcagcccttccgacgctccccatgcccaccacccgctgcatcctcaccttatgcaggagcatatggggacaaacgtgatcgtcgccaataccatgcccacacacctgtctaacggacagatgtgcgaatggcctagaccccgcggccaagctgccacccccgagacgcctcagccgagccctcccgggggatccggcagcgaaccctataaactcctgcctggggcggtggctacaatcgttaagcccctgtctgccattccgcagcctaccatcacaaagcaggaggtgatttga

SEQ ID NO: 1395 - RNA, 1314 nt, synthetic construct
  misc_feature 1..1314: note = CDS (opt5) from Homo sapiens__NP_000448.3__HNF4A(39-474)(K179R_K180R)
  source 1..1314: mol_type = other RNA
atggacacatctcctagcgaggggaccaacctcaatgctccgaactccctgggagtgtctgccctttgcgccatctgtggcgatcgggctacagggaaacactacggagccagctcctgcgacggctgtaaggggtttttccgcagatctgtgcggaaaaatcatatgtatagctgccgcttttccagacaatgtgtcgtggataaggacaaacggaaccagtgccgctactgtagactgaagaagtgcttccgggctggaatgaaaaaggaagccgttcagaatgagcgcgatagaattagcacccggcgcagctcctatgaagacagctctctcccctccatcaacgcgctgctgcaggccgaggtgctcagcagacaaattacatctcctgtctccggcatcaatggcgatattcgggctcgcagaatcgccagcatcgctgacgtgtgtgagtccatgaaagaacagctgcttgttctggtggagtgggccaagtacattcccgcgttttgcgaactccctctggatgaccaggtcgcccttctgcgggctcacgccggggagcatctcctgctgggagctaccaaaagatctatggtgttcaaggacgtgctcctgcttggcaacgattatatcgtcccccgccactgtcctgagctggccgaaatgagccgggtttccattagaatcctcgacgagctggtgcttccgtttcaggaactgcaaattgatgacaatgagtacgcctacctcaaggctatcattttctttgatcccgacgcgaaagggctgagcgatcctggaaagatcaaacgcctgcggtctcaggtgcaggtctccctcgaagactatatcaacgatagacagtacgacagccgcggccggttcggggagctgcttctgctcctgcccacgcttcaatctattacctggcagatgatcgagcagattcaatttatcaagctgttcggaatggccaaaattgataatctcctgcaggaaatgctgctcggcggcagcccttccgacgctccccatgcccaccacccgctgcatcctcaccttatgcaggagcatatggggacaaacgtgatcgttgccaataccatgcccacacacctgtctaacggacagatgtgcgaatggcctagaccccgcggccaagctgccacccccgagacgcctcagccgtctccccctgggggatccggcagcgaaccctataagctcctgcctggggcggtggctacaatcgtcaaacccctgtctgccattccgcagcctaccatcacaaagcaggaggtgatttga

SEQ ID NO: 1396 - RNA, 1314 nt, synthetic construct
  misc_feature 1..1314: note = CDS (opt5) from Homo sapiens__NP_000448.3__HNF4A(39-474)(K234R)
  source 1..1314: mol_type = other RNA
atggacacatctcctagcgaggggaccaacctcaatgctccgaactccctgggagtgtctgccctttgcgccatctgtggcgatcgggctacagggaaacactacggagccagctcctgcgacggctgtaaggggtttttccgcagatctgtgcggaaaaatcatatgtatagctgccgcttttccagacaatgtgtcgtggataaggacaaacggaaccagtgccgctactgtagactgaagaagtgcttccgggctggaatgaaaaaggaagccgttcagaatgagcgcgatagaattagcacccggcgcagctcctatgaagacagctctctcccctccatcaacgcgctgctgcaggccgaggtgctcagcagacaaattacatctcctgtctccggcatcaatggcgatattcgggctaaaaagatcgccagcatcgctgacgtgtgtgagtccatgaaagaacagctgcttgttctggtggagtgggccaagtacattcccgcgttttgcgaactccctctggatgaccaggtcgcccttctgcgcgctcacgccggggagcatctcctgctgggagctaccagacggtctatggtgttcaaggacgtgctcctgcttggcaacgattatatcgtccccagacactgtcctgagctggccgaaatgagccgcgtttccattcggatcctcgacgagctggtgcttccgtttcaggaactgcaaattgatgacaatgagtacgcctacctcaaagctatcattttctttgatcccgacgcgaaggggctgagcgatcctggaaaaatcaagagactgcgctctcaggtgcaggtctccctcgaagactatatcaacgatcggcagtacgacagcagaggccgcttcggggagctgcttctgctcctgcccacgcttcaatctattacctggcagatgatcgagcagattcaatttatcaaactgttcggaatggccaagattgataatctcctgcaggaaatgctgctcggcggcagcccttccgacgctccccatgcccaccacccgctgcatcctcaccttatgcaggagcatatggggacaaacgtgatcgttgccaataccatgcccacacacctgtctaacggacagatgtgcgaatggcctcggcccagaggccaagctgccacccccgagacgcctcagccgtctccccctgggggatccggcagcgaaccctataaactcctgcctggggcggtggctacaatcgtcaagcccctgtctgccattccgcagcctaccatcacaaagcaggaggtgatttga

SEQ ID NO: 1397 - RNA, 1314 nt, synthetic construct
  misc_feature 1..1314: note = CDS (opt5) from Homo sapiens__NP_000448.3__HNF4A(39-474)(K300R)
  source 1..1314: mol_type = other RNA
atggacacatctcctagcgaggggaccaacctcaatgctccgaactccctgggagtgtctgccctttgcgccatctgtggcgatcgggctacagggaaacactacggagccagctcctgcgacggctgtaaggggtttttccgcagatctgtgcggaaaaatcatatgtatagctgccgcttttccagacaatgtgtcgtggataaggacaaacggaaccagtgccgctactgtagactgaagaagtgcttccgggctggaatgaaaaaggaagccgttcagaatgagcgcgatagaattagcacccggcgcagctcctatgaagacagctctctcccctccatcaacgcgctgctgcaggccgaggtgctcagcagacaaattacatctcctgtctccggcatcaatggcgatattcgggctaaaaagatcgccagcatcgctgacgtgtgtgagtccatgaaagaacagctgcttgttctggtggagtgggccaagtacattcccgcgttttgcgaactccctctggatgaccaggtcgcccttctgcgcgctcacgccggggagcatctcctgctgggagctaccaagagatctatggtgttcaaagacgtgctcctgcttggcaacgattatatcgtcccccggcactgtcctgagctggccgaaatgagcagagtttccattcgcatcctcgacgagctggtgcttccgtttcaggaactgcaaattgatgacaatgagtacgcctacctcaaggctatcattttctttgatcccgacgcgcgggggctgagcgatcctggaaaaatcaagagactgcgctctcaggtgcaggtctccctcgaagactatatcaacgatcggcagtacgacagcagaggccgcttcggggagctgcttctgctcctgcccacgcttcaatctattacctggcagatgatcgagcagattcaatttatcaaactgttcggaatggccaagattgataatctcctgcaggaaatgctgctcggcggcagcccttccgacgctccccatgcccaccacccgctgcatcctcaccttatgcaggagcatatggggacaaacgtgatcgttgccaataccatgcccacacacctgtctaacggacagatgtgcgaatggcctcggcccagaggccaagctgccacccccgagacgcctcagccgtctccccctgggggatccggcagcgaaccctataaactcctgcctggggcggtggctacaatcgtcaagcccctgtctgccattccgcagcctaccatcacaaagcaggaggtgatttga

SEQ ID NO: 1398 - RNA, 1314 nt, synthetic construct
  misc_feature 1..1314: note = CDS (opt5) from Homo sapiens__NP_000448.3__HNF4A(39-474)(K300R_K307R_K309R)
  source 1..1314: mol_type = other RNA
atggacacatctcctagcgaggggaccaacctcaatgctccgaactccctgggagtgtctgccctttgcgccatctgtggcgatcgggctacagggaaacactacggagccagctcctgcgacggctgtaaggggtttttccgcagatctgtgcggaaaaatcatatgtatagctgccgcttttccagacaatgtgtcgtggataaggacaaacggaaccagtgccgctactgtagactgaagaagtgcttccgggctggaatgaaaaaggaagccgttcagaatgagcgcgatagaattagcacccggcgcagctcctatgaagacagctctctcccctccatcaacgcgctgctgcaggccgaggtgctcagcagacaaattacatctcctgtctccggcatcaatggcgatattcgggctaaaaagatcgccagcatcgctgacgtgtgtgagtccatgaaagaacagctgcttgttctggtggagtgggccaagtacattcccgcgttttgcgaactccctctggatgaccaggtcgcccttctgcgcgctcacgccggggagcatctcctgctgggagctaccaagagatctatggtgttcaaagacgtgctcctgcttggcaacgattatatcgtcccccggcactgtcctgagctggccgaaatgagcagagtttccattcgcatcctcgacgagctggtgcttccgtttcaggaactgcaaattgatgacaatgagtacgcctacctcaaggctatcattttctttgatcccgacgcgcgggggctgagcgatcctggaagaatccgccggctgagatctcaggtgcaggtctccctcgaagactatatcaacgatcgccagtacgacagccggggcagattcggggagctgcttctgctcctgcccacgcttcaatctattacctggcagatgatcgagcagattcaatttatcaaactgttcggaatggccaagattgataatctcctgcaggaaatgctgctcggcggcagcccttccgacgctccccatgcccaccacccgctgcatcctcaccttatgcaggagcatatggggacaaacgtgatcgttgccaataccatgcccacacacctgtctaacggacagatgtgcgaatggcctcgcccccggggccaagctgccacccccgagacgcctcagccgtctccccctgggggatccggcagcgaaccctataaactcctgcctggggcggtggctacaatcgtcaagcccctgtctgccattccgcagcctaccatcacaaaacaggaggtgatttga

SEQ ID NO: 1399 - RNA, 1314 nt, synthetic construct
  misc_feature 1..1314: note = CDS (opt5) from Homo sapiens__NP_000448.3__HNF4A(39-474)(K447R_K470R)
  source 1..1314: mol_type = other RNA
atggacacatctcctagcgaggggaccaacctcaatgctccgaactccctgggagtgtctgccctttgcgccatctgtggcgatcgggctacagggaaacactacggagccagctcctgcgacggctgtaaggggtttttccgcagatctgtgcggaaaaatcatatgtatagctgccgcttttccagacaatgtgtcgtggataaggacaaacggaaccagtgccgctactgtagactgaagaagtgcttccgggctggaatgaaaaaggaagccgttcagaatgagcgcgatagaattagcacccggcgcagctcctatgaagacagctctctcccctccatcaacgcgctgctgcaggccgaggtgctcagcagacaaattacatctcctgtctccggcatcaatggcgatattcgggctaaaaagatcgccagcatcgctgacgtgtgtgagtccatgaaagaacagctgcttgttctggtggagtgggccaagtacattcccgcgttttgcgaactccctctggatgaccaggtcgcccttctgcgcgctcacgccggggagcatctcctgctgggagctaccaagagatctatggtgttcaaagacgtgctcctgcttggcaacgattatatcgtcccccggcactgtcctgagctggccgaaatgagcagagtttccattcgcatcctcgacgagctggtgcttccgtttcaggaactgcaaattgatgacaatgagtacgcctacctcaaggctatcattttctttgatcccgacgcgaaagggctgagcgatcctggaaagatcaaacggctgagatctcaggtgcaggtctccctcgaagactatatcaacgatcgccagtacgacagccggggcagattcggggagctgcttctgctcctgcccacgcttcaatctattacctggcagatgatcgagcagattcaatttatcaagctgttcggaatggccaaaattgataatctcctgcaggaaatgctgctcggcggcagcccttccgacgctccccatgcccaccacccgctgcatcctcaccttatgcaggagcatatggggacaaacgtgatcgttgccaataccatgcccacacacctgtctaacggacagatgtgcgaatggcctcgcccccggggccaagctgccacccccgagacgcctcagccgtctccccctgggggatccggcagcgaaccctatagactcctgcctggggcggtggctacaatcgtcaagcccctgtctgccattccgcagcctaccatcacacgccaggaggtgatttga

SEQ ID NO: 1400 - RNA, 1314 nt, synthetic construct
  misc_feature 1..1314: note = CDS (opt5) from Homo sapiens__NP_000448.3__HNF4A(39-474)(K458R)
  source 1..1314: mol_type = other RNA
atggacacatctcctagcgaggggaccaacctcaatgctccgaactccctgggagtgtctgccctttgcgccatctgtggcgatcgggctacagggaaacactacggagccagctcctgcgacggctgtaaggggtttttccgcagatctgtgcggaaaaatcatatgtatagctgccgcttttccagacaatgtgtcgtggataaggacaaacggaaccagtgccgctactgtagactgaagaagtgcttccgggctggaatgaaaaaggaagccgttcagaatgagcgcgatagaattagcacccggcgcagctcctatgaagacagctctctcccctccatcaacgcgctgctgcaggccgaggtgctcagcagacaaattacatctcctgtctccggcatcaatggcgatattcgggctaaaaagatcgccagcatcgctgacgtgtgtgagtccatgaaagaacagctgcttgttctggtggagtgggccaagtacattcccgcgttttgcgaactccctctggatgaccaggtcgcccttctgcgcgctcacgccggggagcatctcctgctgggagctaccaagagatctatggtgttcaaagacgtgctcctgcttggcaacgattatatcgtcccccggcactgtcctgagctggccgaaatgagcagagtttccattcgcatcctcgacgagctggtgcttccgtttcaggaactgcaaattgatgacaatgagtacgcctacctcaaggctatcattttctttgatcccgacgcgaaagggctgagcgatcctggaaagatcaaacggctgagatctcaggtgcaggtctccctcgaagactatatcaacgatcgccagtacgacagccggggcagattcggggagctgcttctgctcctgcccacgcttcaatctattacctggcagatgatcgagcagattcaatttatcaagctgttcggaatggccaaaattgataatctcctgcaggaaatgctgctcggcggcagcccttccgacgctccccatgcccaccacccgctgcatcctcaccttatgcaggagcatatggggacaaacgtgatcgttgccaataccatgcccacacacctgtctaacggacagatgtgcgaatggcctcgcccccggggccaagctgccacccccgagacgcctcagccgtctccccctgggggatccggcagcgaaccctataagctcctgcctggggcggtggctacaatcgtcagacccctgtctgccattccgcagcctaccatcacaaagcaggaggtgatttga

SEQ ID NO: 1401 - RNA, 1314 nt, synthetic construct
  misc_feature 1..1314: note = CDS (opt5) from Homo sapiens__NP_000448.3__HNF4A(39-474)(K106R_K108R_K126R_K127R )
  source 1..1314: mol_type = other RNA
atggacacatctcctagcgaggggaccaacctcaatgctccgaactccctgggagtgtctgccctttgcgccatctgtggcgatcgggctacagggaaacactacggagccagctcctgcgacggctgtaaggggtttttccgcagatctgtgcggaaaaatcatatgtatagctgccgcttttccagacaatgtgtcgtggatcgggaccgcagaaaccagtgccggtactgtcgcctgaagaaatgcttcagagctggaatgcggcgcgaagccgttcagaatgagagagatcggattagcacccgcagatcttcctatgaagacagctctctcccctccatcaacgcgctgctgcaggccgaggtgctcagccggcaaattacatctcctgtctccggcatcaatggcgatattagagctaagaagatcgccagcatcgctgacgtgtgtgagtccatgaaagaacagctgcttgttctggtggagtgggccaagtacattcccgcgttttgcgaactccctctggatgaccaggtcgcccttctgcgcgctcacgccggggagcatctcctgctgggagctaccaaacggtctatggtgttcaaggacgtgctcctgcttggcaacgattatatcgtccccagacactgtcctgagctggccgaaatgagccgcgtttccattcggatcctcgacgagctggtgcttccgtttcaggaactgcaaattgatgacaatgagtacgcctacctcaaagctatcattttctttgatcccgacgcgaaggggctgagcgatcctggaaagatcaaaagactgcgctctcaggtgcaggtctccctcgaagactatatcaacgatcggcagtacgacagcagaggccgcttcggggagctgcttctgctcctgcccacgcttcaatctattacctggcagatgatcgagcagattcaatttatcaagctgttcggaatggccaaaattgataatctcctgcaggaaatgctgctcggcggcagcccttccgacgctccccatgcccaccacccgctgcatcctcaccttatgcaggagcatatggggacaaacgtgatcgttgccaataccatgcccacacacctgtctaacggacagatgtgcgaatggcctcggcccagaggccaagctgccacccccgagacgcctcagccgagccctcccgggggatccggcagcgaaccctataagctcctgcctggggcggtggctacaatcgtcaaacccctgtctgccattccgcagcctaccatcacaaagcaggaggtgatttga

SEQ ID NO: 1402 - RNA, 1314 nt, synthetic construct
  misc_feature 1..1314: note = CDS (opt5) from Homo sapiens__NP_000448.3__HNF4A(39-474)(E285Q)
  source 1..1314: mol_type = other RNA
atggacacatctcctagcgaggggaccaacctcaatgctccgaactccctgggagtgtctgccctttgcgccatctgtggcgatcgggctacagggaaacactacggagccagctcctgcgacggctgtaaggggtttttccgcagatctgtgcggaaaaatcatatgtatagctgccgcttttccagacaatgtgtcgtggataaggacaaacggaaccagtgccgctactgtagactgaagaagtgcttccgggctggaatgaaaaaggaagccgttcagaatgagcgcgatagaattagcacccggcgcagctcctatgaagacagctctctcccctccatcaacgcgctgctgcaggccgaggtgctcagcagacaaattacatctcctgtctccggcatcaatggcgatattcgggctaaaaagatcgccagcatcgctgacgtgtgtgagtccatgaaagaacagctgcttgttctggtggagtgggccaagtacattcccgcgttttgcgaactccctctggatgaccaggtcgcccttctgcgcgctcacgccggggagcatctcctgctgggagctaccaagagatctatggtgttcaaagacgtgctcctgcttggcaacgattatatcgtcccccggcactgtcctgagctggccgaaatgagcagagtttccattcgcatcctcgacgagctggtgcttccgtttcaggaactgcaaattgatgacaatcagtacgcctacctcaaggctatcattttctttgatcccgacgcgaaagggctgagcgatcctggaaagatcaaacggctgagatctcaggtgcaggtctccctcgaggactatatcaacgatcgccaatacgacagccggggcagattcggggaactgcttctgctcctgcccacgcttcagtctattacctggcagatgatcgagcaaattcagtttatcaagctgttcggaatggccaaaattgataatctcctgcaggagatgctgctcggcggcagcccttccgacgctccccatgcccaccacccgctgcatcctcaccttatgcaggaacatatggggacaaacgtgatcgttgccaataccatgcccacacacctgtctaacggacaaatgtgcgagtggcctcgcccccggggccaggctgccacccccgaaacgcctcagccgtctccccctgggggatccggcagcgagccctataagctcctgcctggggcggtggctacaatcgtcaagcccctgtctgccattccgcagcctaccatcacaaaacaagaagtgatttga

SEQ ID NO: 1403 - RNA, 1314 nt, synthetic construct
  misc_feature 1..1314: note = CDS (opt5) from Homo sapiens__NP_000448.3__HNF4A(39-474)(T166E)
  source 1..1314: mol_type = other RNA
atggacacatctcctagcgaggggaccaacctcaatgctccgaactccctgggagtgtctgccctttgcgccatctgtggcgatcgggctacagggaaacactacggagccagctcctgcgacggctgtaaggggtttttccgcagatctgtgcggaaaaatcatatgtatagctgccgcttttccagacaatgtgtcgtggataaggacaaacggaaccagtgccgctactgtagactgaagaagtgcttccgggctggaatgaaaaaggaagccgttcagaatgagcgcgatagaattagcacccggcgcagctcctatgaagacagctctctcccctccatcaacgcgctgctgcaggccgaggtgctcagcagacaaattgagtctcctgtctccggcatcaatggcgatattcgggctaaaaagatcgccagcatcgctgacgtgtgtgaatccatgaaagagcagctgcttgttctggtggaatgggccaagtacattcccgcgttttgcgagctccctctggatgaccaggtcgcccttctgcgcgctcacgccggggagcatctcctgctgggagctacaaagagatctatggtgttcaaagacgtgctcctgcttggcaacgattatatcgtcccccggcactgtcctgaactggccgagatgagcagagtttccattcgcatcctcgacgaactggtgcttccgtttcaggagctgcaaattgatgacaatgaatacgcctacctcaaggctatcattttctttgatcccgacgcgaaagggctgagcgatcctggaaagatcaaacggctgagatctcaggtgcaggtctccctcgaggactatatcaacgatcgccagtacgacagccggggcagattcggggagctgcttctgctcctgcccacccttcaatctattacgtggcagatgatcgaacagattcaatttatcaagctgttcggaatggccaaaattgataatctcctgcaggagatgctgctcggcggcagcccttccgacgctccccatgcccaccacccgctgcatcctcaccttatgcaggaacatatggggaccaacgtgatcgttgccaatacaatgcccacccacctgtctaacggacagatgtgcgagtggcctcgcccccggggccaagctgccacacccgaaacccctcagccgtctccccctgggggatccggcagcgagccctataagctcctgcctggggcggtggctacgatcgtcaagcccctgtctgccattccgcagcctacaatcaccaaacaggaggtgatttga

SEQ ID NO: 1404 - RNA, 1314 nt, synthetic construct
  misc_feature 1..1314: note = CDS (opt5) from Homo sapiens__NP_000448.3__HNF4A(39-474)(S148A)
  source 1..1314: mol_type = other RNA
atggacacatctcctagcgaggggaccaacctcaatgctccgaactccctgggagtgtctgccctttgcgccatctgtggcgatcgggctacagggaaacactacggagccagctcctgcgacggctgtaaggggtttttccgcagatctgtgcggaaaaatcatatgtatagctgccgcttttccagacaatgtgtcgtggataaggacaaacggaaccagtgccgctactgtagactgaagaagtgcttccgggctggaatgaaaaaggaagccgttcagaatgagcgcgatagaattagcacccggagatcttcctatgaagacagcgcgctcccctctatcaacgccctgctgcaggctgaggtgctctcccgccaaattacaagccctgtctctggcatcaatggcgatattcgggccaaaaagatcgcttccatcgccgacgtgtgtgagagcatgaaagaacagctgcttgttctggtggagtgggcgaagtacattcccgccttttgcgaactccctctggatgaccaggtcgcccttctgcgcgcccacgctggggagcatctcctgctgggagccaccaagagatccatggtgttcaaagacgtgctcctgcttggcaacgattatatcgtcccccggcactgtcctgagctggccgaaatgtctagagttagcattcgcatcctcgacgagctggtgcttccgtttcaggaactgcaaattgatgacaatgagtacgcttacctcaaggcgatcattttctttgatcccgacgccaaagggctgtccgatcctggaaagatcaaacggctgagaagccaggtgcaggtctctctcgaagactatatcaacgatcgccagtacgactcccggggcagattcggggagctgcttctgctcctgcccacgcttcaaagcattacctggcagatgatcgagcagattcaatttatcaagctgttcggaatggctaaaattgataatctcctgcaggaaatgctgctcggcggctctcctagcgacgctccccatgcccaccacccgctgcatcctcaccttatgcaggagcatatggggacaaacgtgatcgttgctaataccatgcccacacacctgtccaacggacagatgtgcgaatggcctcgcccccggggccaagccgcgacccccgagacgcctcagccgtctccccctgggggaagcggctccgaaccctataagctcctgcctggggctgtggccacaatcgtcaagcccctgagcgccattccgcagcctaccatcacaaaacaggaggtgatttga

SEQ ID NO: 1405 - RNA, 1314 nt, synthetic construct
  misc_feature 1..1314: note = CDS (opt5) from Homo sapiens__NP_000448.3__HNF4A(39-474)(S148E)
  source 1..1314: mol_type = other RNA
atggacacatctcctagcgaggggaccaacctcaatgctccgaactccctgggagtgtctgccctttgcgccatctgtggcgatcgggctacagggaaacactacggagccagctcctgcgacggctgtaaggggtttttccgcagatctgtgcggaaaaatcatatgtatagctgccgcttttccagacaatgtgtcgtggataaggacaaacggaaccagtgccgctactgtagactgaagaagtgcttccgggctggaatgaaaaaggaagccgttcagaatgagcgcgatagaattagcacccggagatcttcctatgaagacagcgagctcccctctatcaacgcgctgctgcaggccgaggtgctctcccgccaaattacaagccctgtctctggcatcaatggcgatattcgggctaaaaagatcgcctccatcgctgacgtgtgtgaaagcatgaaagagcagctgcttgttctggtggaatgggccaagtacattcccgcgttttgcgagctccctctggatgaccaggtcgcccttctgcgcgctcacgccggggagcatctcctgctgggagctaccaagagatccatggtgttcaaagacgtgctcctgcttggcaacgattatatcgtcccccggcactgtcctgaactggccgagatgtctagagttagcattcgcatcctcgacgaactggtgcttccgtttcaggagctgcaaattgatgacaatgaatacgcctacctcaaggctatcattttctttgatcccgacgcgaaagggctgtccgatcctggaaagatcaaacggctgagaagccaggtgcaggtctctctcgaggactatatcaacgatcgccagtacgactcccggggcagattcggggagctgcttctgctcctgcccacgcttcaaagcattacctggcagatgatcgaacagattcaatttatcaagctgttcggaatggccaaaattgataatctcctgcaggagatgctgctcggcggctctcctagcgacgctccccatgcccaccacccgctgcatcctcaccttatgcaggaacatatggggacaaacgtgatcgttgccaataccatgcccacacacctgtccaacggacagatgtgcgagtggcctcgcccccggggccaagctgccacccccgaaacgcctcagccgtctccccctgggggaagcggctccgagccctataagctcctgcctggggcggtggctacaatcgtcaagcccctgagcgccattccgcagcctaccatcacaaaacaggaggtgatttga

SEQ ID NO: 1406 - RNA, 1314 nt, synthetic construct
  misc_feature 1..1314: note = CDS (opt5) from Homo sapiens__NP_000448.3__HNF4A(39-474)(S183A)
  source 1..1314: mol_type = other RNA
atggacacatctcctagcgaggggaccaacctcaatgctccgaactccctgggagtgtctgccctttgcgccatctgtggcgatcgggctacagggaaacactacggagccagctcctgcgacggctgtaaggggtttttccgcagatctgtgcggaaaaatcatatgtatagctgccgcttttccagacaatgtgtcgtggataaggacaaacggaaccagtgccgctactgtagactgaagaagtgcttccgggctggaatgaaaaaggaagccgttcagaatgagcgcgatagaattagcacccggagatcttcctatgaagacagctctctcccctccatcaacgcgctgctgcaggccgaggtgctcagccgccaaattacatctcctgtctccggcatcaatggcgatattcgggctaaaaagatcgccgctatcgccgacgtgtgtgagagcatgaaagaacagctgcttgttctggtggagtgggcgaagtacattcccgccttttgcgaactccctctggatgaccaggtcgcccttctgcgcgcccacgctggggagcatctcctgctgggagccaccaagagatccatggtgttcaaagacgtgctcctgcttggcaacgattatatcgtcccccggcactgtcctgagctggccgaaatgtctagagttagcattcgcatcctcgacgagctggtgcttccgtttcaggaactgcaaattgatgacaatgagtacgcttacctcaaggcgatcattttctttgatcccgacgccaaagggctgtccgatcctggaaagatcaaacggctgagaagccaggtgcaggtctctctcgaagactatatcaacgatcgccagtacgactcccggggcagattcggggagctgcttctgctcctgcccacgcttcaaagcattacctggcagatgatcgagcagattcaatttatcaagctgttcggaatggctaaaattgataatctcctgcaggaaatgctgctcggcggctctcctagcgacgctccccatgcccaccacccgctgcatcctcaccttatgcaggagcatatggggacaaacgtgatcgttgctaataccatgcccacacacctgtccaacggacagatgtgcgaatggcctcgcccccggggccaagccgcgacccccgagacgcctcagccgtctccccctgggggaagcggctccgaaccctataagctcctgcctggggctgtggccacaatcgtcaagcccctgagcgccattccgcagcctaccatcacaaaacaggaggtgatttga

SEQ ID NO: 1407 - RNA, 1314 nt, synthetic construct
  misc_feature 1..1314: note = CDS (opt5) from Homo sapiens__NP_000448.3__HNF4A(39-474)(S183E)
  source 1..1314: mol_type = other RNA
atggacacatctcctagcgaggggaccaacctcaatgctccgaactccctgggagtgtctgccctttgcgccatctgtggcgatcgggctacagggaaacactacggagccagctcctgcgacggctgtaaggggtttttccgcagatctgtgcggaaaaatcatatgtatagctgccgcttttccagacaatgtgtcgtggataaggacaaacggaaccagtgccgctactgtagactgaagaagtgcttccgggctggaatgaaaaaggaagccgttcagaatgagcgcgatagaattagcacccggagatcttcctatgaagacagctctctcccctccatcaacgcgctgctgcaggccgaggtgctcagccgccaaattacatctcctgtctccggcatcaatggcgatattcgggctaaaaagatcgccgagatcgctgacgtgtgtgaaagcatgaaagagcagctgcttgttctggtggaatgggccaagtacattcccgcgttttgcgagctccctctggatgaccaggtcgcccttctgcgcgctcacgccggggagcatctcctgctgggagctaccaagagatccatggtgttcaaagacgtgctcctgcttggcaacgattatatcgtcccccggcactgtcctgaactggccgagatgtctagagttagcattcgcatcctcgacgaactggtgcttccgtttcaggagctgcaaattgatgacaatgaatacgcctacctcaaggctatcattttctttgatcccgacgcgaaagggctgtccgatcctggaaagatcaaacggctgagaagccaggtgcaggtctctctcgaggactatatcaacgatcgccagtacgactcccggggcagattcggggagctgcttctgctcctgcccacgcttcaaagcattacctggcagatgatcgaacagattcaatttatcaagctgttcggaatggccaaaattgataatctcctgcaggagatgctgctcggcggctctcctagcgacgctccccatgcccaccacccgctgcatcctcaccttatgcaggaacatatggggacaaacgtgatcgttgccaataccatgcccacacacctgtccaacggacagatgtgcgagtggcctcgcccccggggccaagctgccacccccgaaacgcctcagccgtctccccctgggggaagcggctccgagccctataagctcctgcctggggcggtggctacaatcgtcaagcccctgagcgccattccgcagcctaccatcacaaaacaggaggtgatttga

SEQ ID NO: 1408 - RNA, 1314 nt, synthetic construct
  misc_feature 1..1314: note = CDS (opt5) from Homo sapiens__NP_000448.3__HNF4A(39-474)(S461A)
  source 1..1314: mol_type = other RNA
atggacacatctcctagcgaggggaccaacctcaatgctccgaactccctgggagtgtctgccctttgcgccatctgtggcgatcgggctacagggaaacactacggagccagctcctgcgacggctgtaaggggtttttccgcagatctgtgcggaaaaatcatatgtatagctgccgcttttccagacaatgtgtcgtggataaggacaaacggaaccagtgccgctactgtagactgaagaagtgcttccgggctggaatgaaaaaggaagccgttcagaatgagcgcgatagaattagcacccggcgcagctcctatgaagacagctctctcccctccatcaacgcgctgctgcaggccgaggtgctcagcagacaaattacatctcctgtctccggcatcaatggcgatattcgggctaaaaagatcgccagcatcgctgacgtgtgtgagtccatgaaagaacagctgcttgttctggtggagtgggccaagtacattcccgcgttttgcgaactccctctggatgaccaggtcgcccttctgcgcgctcacgccggggagcatctcctgctgggagctaccaagagatctatggtgttcaaagacgtgctcctgcttggcaacgattatatcgtcccccggcactgtcctgagctggccgaaatgagcagagtttccattcgcatcctcgacgagctggtgcttccgtttcaggaactgcaaattgatgacaatgagtacgcctacctcaaggctatcattttctttgatcccgacgcgaaagggctgagcgatcctggaaagatcaaacggctgagatctcaggtgcaggtctccctcgaagactatatcaacgatcgccagtacgacagccggggcagattcggggagctgcttctgctcctgcccacgcttcaatctattacctggcagatgatcgagcagattcaatttatcaagctgttcggaatggccaaaattgataatctcctgcaggaaatgctgctcggcggcagcccttccgacgctccccatgcccaccacccgctgcatcctcaccttatgcaggagcatatggggacaaacgtgatcgttgccaataccatgcccacacacctgtctaacggacagatgtgcgaatggcctcgcccccggggccaagctgccacccccgagacgcctcagccgtctccccctgggggatccggcagcgaaccctataagctcctgcctggggcggtggctacaatcgtcaagcccctggccgccattccgcagcctaccatcacaaaacaggaggtgatttga

SEQ ID NO: 1409 - RNA, 1314 nt, synthetic construct
  misc_feature 1..1314: note = CDS (opt5) from Homo sapiens__NP_000448.3__HNF4A(39-474)(S461E)
  source 1..1314: mol_type = other RNA
atggacacatctcctagcgaggggaccaacctcaatgctccgaactccctgggagtgtctgccctttgcgccatctgtggcgatcgggctacagggaaacactacggagccagctcctgcgacggctgtaaggggtttttccgcagatctgtgcggaaaaatcatatgtatagctgccgcttttccagacaatgtgtcgtggataaggacaaacggaaccagtgccgctactgtagactgaagaagtgcttccgggctggaatgaaaaaggaagccgttcagaatgagcgcgatagaattagcacccggcgcagctcctatgaagacagctctctcccctccatcaacgcgctgctgcaggccgaggtgctcagcagacaaattacatctcctgtctccggcatcaatggcgatattcgggctaaaaagatcgccagcatcgctgacgtgtgtgagtccatgaaagaacagctgcttgttctggtggagtgggccaagtacattcccgcgttttgcgaactccctctggatgaccaggtcgcccttctgcgcgctcacgccggggagcatctcctgctgggagctaccaagagatctatggtgttcaaagacgtgctcctgcttggcaacgattatatcgtcccccggcactgtcctgagctggccgaaatgagcagagtttccattcgcatcctcgacgagctggtgcttccgtttcaggaactgcaaattgatgacaatgagtacgcctacctcaaggctatcattttctttgatcccgacgcgaaagggctgagcgatcctggaaagatcaaacggctgagatctcaggtgcaggtctccctcgaagactatatcaacgatcgccagtacgacagccggggcagattcggggagctgcttctgctcctgcccacgcttcaatctattacctggcagatgatcgagcagattcaatttatcaagctgttcggaatggccaaaattgataatctcctgcaggaaatgctgctcggcggcagcccttccgacgctccccatgcccaccacccgctgcatcctcaccttatgcaggagcatatggggacaaacgtgatcgttgccaataccatgcccacacacctgtctaacggacagatgtgcgaatggcctcgcccccggggccaagctgccacccccgagacgcctcagccgtctccccctgggggatccggcagcgaaccctataagctcctgcctggggcggtggctacaatcgtcaagcccctggaggccattccgcagcctaccatcacaaaacaggaggtgatttga

SEQ ID NO: 1410 - RNA, 1314 nt, synthetic construct
  misc_feature 1..1314: note = CDS (opt5) from Homo sapiens__NP_000448.3__HNF4A(39-474)(S142A_S143A_S313A)
  source 1..1314: mol_type = other RNA
atggacacatctcctagcgaggggaccaacctcaatgctccgaactccctgggagtgtctgccctttgcgccatctgtggcgatcgggctacagggaaacactacggagccagctcctgcgacggctgtaaggggtttttccgcagatctgtgcggaaaaatcatatgtatagctgccgcttttccagacaatgtgtcgtggataaggacaaacggaaccagtgccgctactgtagactgaagaagtgcttccgggctggaatgaaaaaggaagccgttcagaatgagcgcgatagaattagcacccggcgcgcggcctatgaagactcttccctccccagcatcaacgctctgctgcaggccgaggtgctctctagacaaattacatcccctgtcagcggcatcaatggcgatattcgggctaaaaagatcgcctctatcgcggacgtgtgtgagtccatgaaagaacagctgcttgttctggtggagtgggccaagtacattcccgctttttgcgaactccctctggatgaccaggtcgcccttctgcgcgctcacgccggggagcatctcctgctgggagccaccaagagaagcatggtgttcaaagacgtgctcctgcttggcaacgattatatcgtcccccggcactgtcctgagctggctgaaatgtccagagtttctattcgcatcctcgacgagctggtgcttccgtttcaggaactgcaaattgatgacaatgagtacgcgtacctcaaggccatcattttctttgatcccgacgctaaagggctgagcgatcctggaaagatcaaacggctgagagcccaggtgcaggtctccctcgaagactatatcaacgatcgccagtacgacagccggggcagattcggggagctgcttctgctcctgcccacgcttcaatctattacctggcagatgatcgagcagattcaatttatcaagctgttcggaatggccaaaattgataatctcctgcaggaaatgctgctcggcggctcccctagcgacgctccccatgcccaccacccgctgcatcctcaccttatgcaggagcatatggggacaaacgtgatcgttgcgaataccatgcccacacacctgtctaacggacagatgtgcgaatggcctcgcccccggggccaagctgccacccccgagacgcctcagccgagccctcccgggggatccggctctgaaccctataagctcctgcctggggccgtggctacaatcgtcaagcccctgagcgccattccgcagcctaccatcacaaaacaggaggtgatttga

SEQ ID NO: 1411 - RNA, 1314 nt, synthetic construct
  misc_feature 1..1314: note = CDS (opt5) from Homo sapiens__NP_000448.3__HNF4A(39-474)(S142A_S143A_S313A_K458R )
  source 1..1314: mol_type = other RNA
atggacacatctcctagcgaggggaccaacctcaatgctccgaactccctgggagtgtctgccctttgcgccatctgtggcgatcgggctacagggaaacactacggagccagctcctgcgacggctgtaaggggtttttccgcagatctgtgcggaaaaatcatatgtatagctgccgcttttccagacaatgtgtcgtggataaggacaaacggaaccagtgccgctactgtagactgaagaagtgcttccgggctggaatgaaaaaggaagccgttcagaatgagcgcgatagaattagcacccggcgcgcggcctatgaagactcttccctccccagcatcaacgctctgctgcaggccgaggtgctctctagacaaattacatcccctgtcagcggcatcaatggcgatattcgggctaaaaagatcgcctctatcgcggacgtgtgtgagtccatgaaagaacagctgcttgttctggtggagtgggccaagtacattcccgctttttgcgaactccctctggatgaccaggtcgcccttctgcgcgctcacgccggggagcatctcctgctgggagccaccaagagaagcatggtgttcaaagacgtgctcctgcttggcaacgattatatcgtcccccggcactgtcctgagctggctgaaatgtccagagtttctattcgcatcctcgacgagctggtgcttccgtttcaggaactgcaaattgatgacaatgagtacgcgtacctcaaggccatcattttctttgatcccgacgctaaagggctgagcgatcctggaaagatcaaacggctgagagcccaggtgcaggtctccctcgaagactatatcaacgatcgccagtacgacagccggggcagattcggggagctgcttctgctcctgcccacgcttcaatctattacctggcagatgatcgagcagattcaatttatcaagctgttcggaatggccaaaattgataatctcctgcaggaaatgctgctcggcggctcccctagcgacgctccccatgcccaccacccgctgcatcctcaccttatgcaggagcatatggggacaaacgtgatcgttgcgaataccatgcccacacacctgtctaacggacagatgtgcgaatggcctcgcccccggggccaagctgccacccccgagacgcctcagccgagccctcccgggggatccggctctgaaccctataagctcctgcctggggccgtggctacaatcgtcagacccctgagcgccattccgcagcctaccatcacaaagcaggaggtgatttga

SEQ ID NO: 1412 - RNA, 1314 nt, synthetic construct
  misc_feature 1..1314: note = CDS (opt5) from Homo sapiens__NP_000448.3__HNF4A(39-474)(S142A_S143A_S167A_S313A _S378A_T429A_T432A_S436A_K458R)
  source 1..1314: mol_type = other RNA
atggacacatctcctagcgaggggaccaacctcaatgctccgaactccctgggagtgtctgccctttgcgccatctgtggcgatcgggctacagggaaacactacggagccagctcctgcgacggctgtaaggggtttttccgcagatctgtgcggaaaaatcatatgtatagctgccgcttttccagacaatgtgtcgtggataaggacaaacggaaccagtgccgctactgtagactgaagaagtgcttccgggctggaatgaaaaaggaagccgttcagaatgagcgcgatagaattagcacccggcgcgcggcctatgaagactcttccctccccagcatcaacgctctgctgcaggccgaggtgctctctagacaaattacagctcctgtctccggcatcaatggcgatattcgggccaaaaagatcgcgagcatcgccgacgtgtgtgagtctatgaaagaacagctgcttgttctggtggagtgggctaagtacattcccgccttttgcgaactccctctggatgaccaggtcgcccttctgcgcgcccacgccggggagcatctcctgctgggagctaccaagagatccatggtgttcaaagacgtgctcctgcttggcaacgattatatcgtcccccggcactgtcctgagctggcggaaatgagcagagtttccattcgcatcctcgacgagctggtgcttccgtttcaggaactgcaaattgatgacaatgagtacgcctacctcaaggctatcattttctttgatcccgacgccaaagggctgtctgatcctggaaagatcaaacggctgagagcccaggtgcaggtcagcctcgaagactatatcaacgatcgccagtacgactcccggggcagattcggggagctgcttctgctcctgcccacgcttcaaagcattacctggcagatgatcgagcagattcaatttatcaagctgttcggaatggctaaaattgataatctcctgcaggaaatgctgctcggcggcgccccttctgacgcgccccatgctcaccacccgctgcatcctcaccttatgcaggagcatatggggacaaacgtgatcgttgccaataccatgcccacacacctgtccaacggacagatgtgcgaatggcctcgcccccggggccaagccgctgcccccgaggctcctcagccggctccccctgggggaagcggctctgaaccctataagctcctgcctggggcggtggccaccatcgtcagacccctgagcgctattccgcagcctacgatcacaaagcaggaggtgatttga

SEQ ID NO: 1413 - RNA, 1314 nt, synthetic construct
  misc_feature 1..1314: note = CDS (opt5) from Homo sapiens__NP_000448.3__HNF4A(39-474)(S142A_S143A_S148A_S167A _S313A_S378A_T429A_T432A_S436A_K458R)
  source 1..1314: mol_type = other RNA
atggacacatctcctagcgaggggaccaacctcaatgctccgaactccctgggagtgtctgccctttgcgccatctgtggcgatcgggctacagggaaacactacggagccagctcctgcgacggctgtaaggggtttttccgcagatctgtgcggaaaaatcatatgtatagctgccgcttttccagacaatgtgtcgtggataaggacaaacggaaccagtgccgctactgtagactgaagaagtgcttccgggctggaatgaaaaaggaagccgttcagaatgagcgcgatagaattagcacccggcgcgcggcctatgaagactctgctctcccctccatcaacgccctgctgcaggctgaggtgctcagcagacaaattacagcccctgtctctggcatcaatggcgatattcgggcgaaaaagatcgcctccatcgctgacgtgtgtgagagcatgaaagaacagctgcttgttctggtggagtgggccaagtacattcccgctttttgcgaactccctctggatgaccaggtcgcccttctgcgcgcccacgctggggagcatctcctgctgggagcgaccaagagatctatggtgttcaaagacgtgctcctgcttggcaacgattatatcgtcccccggcactgtcctgagctggccgaaatgtccagagttagcattcgcatcctcgacgagctggtgcttccgtttcaggaactgcaaattgatgacaatgagtacgcttacctcaaggccatcattttctttgatcccgacgccaaagggctgtccgatcctggaaagatcaaacggctgagagctcaggtgcaggtctctctcgaagactatatcaacgatcgccagtacgacagccggggcagattcggggagctgcttctgctcctgcccacgcttcaatccattacctggcagatgatcgagcagattcaatttatcaagctgttcggaatggccaaaattgataatctcctgcaggaaatgctgctcggcggcgcgcctagcgacgctccccatgcccaccacccgctgcatcctcaccttatgcaggagcatatggggacaaacgtgatcgttgccaataccatgcccacacacctgtctaacggacagatgtgcgaatggcctcgcccccggggccaagctgccgctcccgaggcccctcagccggcgccccctgggggatccggcagcgaaccctataagctcctgcctggggccgtggctaccatcgtcagacccctgtctgccattccgcagcctacgatcacaaagcaggaggtgatttga

SEQ ID NO: 1414 - RNA, 1314 nt, synthetic construct
  misc_feature 1..1314: note = CDS (opt5) from Homo sapiens__NP_000448.3__HNF4A(39-474)(K106R_K108R_K126R_K127R _S142A_S143A_S148A_S167A_S313A_S378A_T429A_T432A_S436A_K458 R)
  source 1..1314: mol_type = other RNA
atggacacatctcctagcgaggggaccaacctcaatgctccgaactccctgggagtgtctgccctttgcgccatctgtggcgatcgggctacagggaaacactacggagccagctcctgcgacggctgtaaggggtttttccgcagatctgtgcggaaaaatcatatgtatagctgccgcttttccagacaatgtgtcgtggatcgggaccgcagaaaccagtgccggtactgtcgcctgaagaaatgcttcagagctggaatgcggcgcgaagccgttcagaatgagagagatcggattagcacccgcagagcggcctatgaagactctgctctcccctccatcaacgccctgctgcaggctgaggtgctcagccggcaaattacagcccctgtctctggcatcaatggcgatattagagcgaagaagatcgcctccatcgctgacgtgtgtgagagcatgaaagaacagctgcttgttctggtggagtgggccaagtacattcccgctttttgcgaactccctctggatgaccaggtcgcccttctgcgcgcccacgctggggagcatctcctgctgggagcgaccaaacggtctatggtgttcaaggacgtgctcctgcttggcaacgattatatcgtccccagacactgtcctgagctggccgaaatgtcccgcgttagcattcggatcctcgacgagctggtgcttccgtttcaggaactgcaaattgatgacaatgagtacgcttacctcaaagccatcattttctttgatcccgacgccaaggggctgtccgatcctggaaagatcaaaagactgcgcgctcaggtgcaggtctctctcgaagactatatcaacgatcggcagtacgacagcagaggccgcttcggggagctgcttctgctcctgcccacgcttcaatccattacctggcagatgatcgagcagattcaatttatcaagctgttcggaatggccaaaattgataatctcctgcaggaaatgctgctcggcggcgcgcctagcgacgctccccatgcccaccacccgctgcatcctcaccttatgcaggagcatatggggacaaacgtgatcgttgccaataccatgcccacacacctgtctaacggacagatgtgcgaatggcctcggcccagaggccaagctgccgctcccgaggcccctcagccggcgccccctgggggatccggcagcgaaccctataagctcctgcctggggccgtggctaccatcgtccgccccctgtctgccattccgcagcctacgatcacaaaacaggaggtgatttga

SEQ ID NO: 1415 - RNA, 1314 nt, synthetic construct
  misc_feature 1..1314: note = CDS (opt5) from Homo sapiens__NP_000448.3__HNF4A(39-474)(S142A_S143A_S148A_T166A _S167A_S313A_S378A_T429A_T432A_S436A_K458R)
  source 1..1314: mol_type = other RNA
atggacacatctcctagcgaggggaccaacctcaatgctccgaactccctgggagtgtctgccctttgcgccatctgtggcgatcgggctacagggaaacactacggagccagctcctgcgacggctgtaaggggtttttccgcagatctgtgcggaaaaatcatatgtatagctgccgcttttccagacaatgtgtcgtggataaggacaaacggaaccagtgccgctactgtagactgaagaagtgcttccgggctggaatgaaaaaggaagccgttcagaatgagcgcgatagaattagcacccggcgcgcggcctatgaagactctgctctcccctccatcaacgccctgctgcaggctgaggtgctcagcagacaaattgccgcgcctgtctctggcatcaatggcgatattcgggccaaaaagatcgcttccatcgccgacgtgtgtgagagcatgaaagaacagctgcttgttctggtggagtgggctaagtacattcccgccttttgcgaactccctctggatgaccaggtcgcccttctgcgcgctcacgcgggggagcatctcctgctgggagccacaaagagatctatggtgttcaaagacgtgctcctgcttggcaacgattatatcgtcccccggcactgtcctgagctggctgaaatgtccagagttagcattcgcatcctcgacgagctggtgcttccgtttcaggaactgcaaattgatgacaatgagtacgcctacctcaaggccatcattttctttgatcccgacgctaaagggctgtccgatcctggaaagatcaaacggctgagagcccaggtgcaggtctctctcgaagactatatcaacgatcgccagtacgacagccggggcagattcggggagctgcttctgctcctgcccacccttcaatccattacgtggcagatgatcgagcagattcaatttatcaagctgttcggaatggcgaaaattgataatctcctgcaggaaatgctgctcggcggcgctcctagcgacgctccccatgcccaccacccgctgcatcctcaccttatgcaggagcatatggggaccaacgtgatcgttgccaatacaatgcccacccacctgtctaacggacagatgtgcgaatggcctcgcccccggggccaagccgctgcccccgaggcgcctcagccggctccccctgggggatccggcagcgaaccctataagctcctgcctggggccgtggccacaatcgtcagacccctgtctgctattccgcagcctaccatcacgaagcaggaggtgatttga

SEQ ID NO: 1416 - RNA, 1314 nt, synthetic construct
  misc_feature 1..1314: note = CDS (opt5) from Homo sapiens__NP_000448.3__HNF4A(39-474)(S87A_S142A_S143A_S148A_ T166A_S167A_S313A_S378A_T429A_T432A_S436A_K458R)
  source 1..1314: mol_type = other RNA
atggacacatctcctagcgaggggaccaacctcaatgctccgaactccctgggagtgtctgccctttgcgccatctgtggcgatcgggctacagggaaacactacggagccagctcctgcgacggctgtaaggggtttttccgcagagctgtgcggaaaaatcatatgtattcttgccgctttagcagacaatgtgtcgtggataaggacaaacggaaccagtgccgctactgtagactgaagaagtgcttccgggccggaatgaaaaaggaagcggttcagaatgagcgcgatagaatttccacccggcgcgccgcttatgaagacagcgccctcccctctatcaacgctctgctgcaggccgaggtgctctccagacaaattgcggcccctgtcagcggcatcaatggcgatattcgggctaaaaagatcgcctctatcgctgacgtgtgtgagtccatgaaagaacagctgcttgttctggtggagtgggccaagtacattcccgccttttgcgaactccctctggatgaccaggtcgcccttctgcgcgcgcacgccggggagcatctcctgctgggagctacaaagagaagcatggtgttcaaagacgtgctcctgcttggcaacgattatatcgtcccccggcactgtcctgagctggccgaaatgtctagagtttccattcgcatcctcgacgagctggtgcttccgtttcaggaactgcaaattgatgacaatgagtacgcctacctcaaggctatcattttctttgatcccgacgccaaagggctgagcgatcctggaaagatcaaacggctgagagctcaggtgcaggtctccctcgaagactatatcaacgatcgccagtacgactctcggggcagattcggggagctgcttctgctcctgcccacccttcaaagcattacgtggcagatgatcgagcagattcaatttatcaagctgttcggaatggcgaaaattgataatctcctgcaggaaatgctgctcggcggcgccccttccgacgctccccatgctcaccacccgctgcatcctcaccttatgcaggagcatatggggaccaacgtgatcgttgccaatacaatgcccacccacctgagcaacggacagatgtgcgaatggcctcgcccccggggccaagctgccgcgcccgaggcccctcagccggctccccctgggggatctggctccgaaccctataagctcctgcctggggccgtggctacaatcgtcagacccctgagcgccattccgcagcctaccatcacgaagcaggaggtgatttga

SEQ ID NO: 1417 - RNA, 1314 nt, synthetic construct
  misc_feature 1..1314: note = CDS (opt5) from Homo sapiens__NP_000448.3__HNF4A(39-474)(S87A_K106R_K108R_K126R_ K127R_S142A_S143A_S148A_T166A_S167A_S313A_S378A_T429A_T432A _S436A_K458R)
  source 1..1314: mol_type = other RNA
atggacacatctcctagcgaggggaccaacctcaatgctccgaactccctgggagtgtctgccctttgcgccatctgtggcgatcgggctacagggaaacactacggagccagctcctgcgacggctgtaaggggtttttccgcagagctgtgcggaaaaatcatatgtattcttgccgctttagcagacaatgtgtcgtggatcgggaccgcagaaaccagtgccggtactgtcgcctgaagaaatgcttcagagccggaatgcggcgcgaagcggttcagaatgagagagatcggatttccacccgcagagccgcttatgaagacagcgccctcccctctatcaacgctctgctgcaggccgaggtgctctcccggcaaattgcggcccctgtcagcggcatcaatggcgatattagagctaagaagatcgcctctatcgctgacgtgtgtgagtccatgaaagaacagctgcttgttctggtggagtgggccaagtacattcccgccttttgcgaactccctctggatgaccaggtcgcccttctgcgcgcgcacgccggggagcatctcctgctgggagctacaaaacggagcatggtgttcaaggacgtgctcctgcttggcaacgattatatcgtccccagacactgtcctgagctggccgaaatgtctcgcgtttccattcggatcctcgacgagctggtgcttccgtttcaggaactgcaaattgatgacaatgagtacgcctacctcaaagctatcattttctttgatcccgacgccaaggggctgagcgatcctggaaagatcaaaagactgcgcgctcaggtgcaggtctccctcgaagactatatcaacgatcggcagtacgactctagaggccgcttcggggagctgcttctgctcctgcccacccttcaaagcattacgtggcagatgatcgagcagattcaatttatcaagctgttcggaatggcgaaaattgataatctcctgcaggaaatgctgctcggcggcgccccttccgacgctccccatgctcaccacccgctgcatcctcaccttatgcaggagcatatggggaccaacgtgatcgttgccaatacaatgcccacccacctgagcaacggacagatgtgcgaatggcctcggcccagaggccaagctgccgcgcccgaggcccctcagccggctccccctgggggatctggctccgaaccctataagctcctgcctggggccgtggctacaatcgtccgccccctgagcgccattccgcagcctaccatcacgaaacaggaggtgatttga

SEQ ID NO: 1418 - RNA, 1314 nt, synthetic construct
  misc_feature 1..1314: note = CDS (opt5) from Homo sapiens__NP_000448.3__HNF4A(39-474)(S87A_K106R_K108R_K126R_ K127R)
  source 1..1314: mol_type = other RNA
atggacacatctcctagcgaggggaccaacctcaatgctccgaactccctgggagtgtctgccctttgcgccatctgtggcgatcgggctacagggaaacactacggagccagctcctgcgacggctgtaaggggtttttccgcagagctgtgcggaaaaatcatatgtattcttgccgctttagcagacaatgtgtcgtggatcgggaccgcagaaaccagtgccggtactgtcgcctgaagaaatgcttcagagccggaatgcggcgcgaagcggttcagaatgagagagatcggatttccacccgcagaagctcttatgaagactccagcctcccctctatcaacgccctgctgcaggctgaggtgctctcccggcaaattacaagccctgtctctggcatcaatggcgatattagagccaagaagatcgcttccatcgccgacgtgtgtgagagcatgaaagaacagctgcttgttctggtggagtgggcgaagtacattcccgccttttgcgaactccctctggatgaccaggtcgcccttctgcgcgcccacgctggggagcatctcctgctgggagccaccaaacggtccatggtgttcaaggacgtgctcctgcttggcaacgattatatcgtccccagacactgtcctgagctggccgaaatgtctcgcgttagcattcggatcctcgacgagctggtgcttccgtttcaggaactgcaaattgatgacaatgagtacgcttacctcaaagcgatcattttctttgatcccgacgccaaggggctgtccgatcctggaaagatcaaaagactgcgcagccaggtgcaggtctctctcgaagactatatcaacgatcggcagtacgactccagaggccgcttcggggagctgcttctgctcctgcccacgcttcaaagcattacctggcagatgatcgagcagattcaatttatcaagctgttcggaatggctaaaattgataatctcctgcaggaaatgctgctcggcggctctcctagcgacgctccccatgcccaccacccgctgcatcctcaccttatgcaggagcatatggggacaaacgtgatcgttgctaataccatgcccacacacctgtccaacggacagatgtgcgaatggcctcggcccagaggccaagccgcgacccccgagacgcctcagccgtctccccctgggggaagcggctccgaaccctataagctcctgcctggggctgtggccacaatcgtcaaacccctgagcgccattccgcagcctaccatcacaaagcaggaggtgatttga

SEQ ID NO: 1419 - RNA, 1314 nt, synthetic construct
  misc_feature 1..1314: note = CDS (opt5) from Homo sapiens__NP_000448.3__HNF4A(39-474)(S87A_K106R_K108R_K126R_ K127R_S142A_S143A_S148A_T166A_S167A_S313A_S378A_T429A_T432A _S436A_K458R_S461A)
  source 1..1314: mol_type = other RNA
atggacacatctcctagcgaggggaccaacctcaatgctccgaactccctgggagtgtctgccctttgcgccatctgtggcgatcgggctacagggaaacactacggagccagctcctgcgacggctgtaaggggtttttccgcagagctgtgcggaaaaatcatatgtattcttgccgctttagcagacaatgtgtcgtggatcgggaccgcagaaaccagtgccggtactgtcgcctgaagaaatgcttcagagccggaatgcggcgcgaagcggttcagaatgagagagatcggatttccacccgcagagccgcttatgaagacagcgccctcccctctatcaacgctctgctgcaggccgaggtgctctcccggcaaattgcggcccctgtcagcggcatcaatggcgatattagagctaagaagatcgcctctatcgctgacgtgtgtgagtccatgaaagaacagctgcttgttctggtggagtgggccaagtacattcccgccttttgcgaactccctctggatgaccaggtcgcccttctgcgcgcgcacgccggggagcatctcctgctgggagctacaaaacggagcatggtgttcaaggacgtgctcctgcttggcaacgattatatcgtccccagacactgtcctgagctggccgaaatgtctcgcgtttccattcggatcctcgacgagctggtgcttccgtttcaggaactgcaaattgatgacaatgagtacgcctacctcaaagctatcattttctttgatcccgacgccaaggggctgagcgatcctggaaagatcaaaagactgcgcgctcaggtgcaggtctccctcgaagactatatcaacgatcggcagtacgactctagaggccgcttcggggagctgcttctgctcctgcccacccttcaaagcattacgtggcagatgatcgagcagattcaatttatcaagctgttcggaatggcgaaaattgataatctcctgcaggaaatgctgctcggcggcgccccttccgacgctccccatgctcaccacccgctgcatcctcaccttatgcaggagcatatggggaccaacgtgatcgttgccaatacaatgcccacccacctgagcaacggacagatgtgcgaatggcctcggcccagaggccaagctgccgcgcccgaggcccctcagccggctccccctgggggatctggctccgaaccctataagctcctgcctggggccgtggctacaatcgtccgccccctggccgcgattccgcagcctaccatcacgaaacaggaggtgatttga

SEQ ID NO: 1420 - RNA, 1314 nt, synthetic construct
  misc_feature 1..1314: note = CDS (opt5) from Homo sapiens__NP_000448.3__HNF4A(39-474)(S87A_K106R_K108R_K126R_ K127R_S142A_S143A_S148A_T166A_S167A_S313A_S378A_T429A_T432A _S436A_K458R_S461E)
  source 1..1314: mol_type = other RNA
atggacacatctcctagcgaggggaccaacctcaatgctccgaactccctgggagtgtctgccctttgcgccatctgtggcgatcgggctacagggaaacactacggagccagctcctgcgacggctgtaaggggtttttccgcagagctgtgcggaaaaatcatatgtattcttgccgctttagcagacaatgtgtcgtggatcgggaccgcagaaaccagtgccggtactgtcgcctgaagaaatgcttcagagccggaatgcggcgcgaagcggttcagaatgagagagatcggatttccacccgcagagccgcttatgaagacagcgccctcccctctatcaacgctctgctgcaggccgaggtgctctcccggcaaattgcggcccctgtcagcggcatcaatggcgatattagagctaagaagatcgcctctatcgctgacgtgtgtgagtccatgaaagaacagctgcttgttctggtggagtgggccaagtacattcccgccttttgcgaactccctctggatgaccaggtcgcccttctgcgcgcgcacgccggggagcatctcctgctgggagctacaaaacggagcatggtgttcaaggacgtgctcctgcttggcaacgattatatcgtccccagacactgtcctgagctggccgaaatgtctcgcgtttccattcggatcctcgacgagctggtgcttccgtttcaggaactgcaaattgatgacaatgagtacgcctacctcaaagctatcattttctttgatcccgacgccaaggggctgagcgatcctggaaagatcaaaagactgcgcgctcaggtgcaggtctccctcgaagactatatcaacgatcggcagtacgactctagaggccgcttcggggagctgcttctgctcctgcccacccttcaaagcattacgtggcagatgatcgagcagattcaatttatcaagctgttcggaatggcgaaaattgataatctcctgcaggaaatgctgctcggcggcgccccttccgacgctccccatgctcaccacccgctgcatcctcaccttatgcaggagcatatggggaccaacgtgatcgttgccaatacaatgcccacccacctgagcaacggacagatgtgcgaatggcctcggcccagaggccaagctgccgcgcccgaggcccctcagccggctccccctgggggatctggctccgaaccctataagctcctgcctggggccgtggctacaatcgtccgccccctggaggccattccgcagcctaccatcacgaaacaggaggtgatttga

SEQ ID NO: 1421 - RNA, 1314 nt, synthetic construct
  misc_feature 1..1314: note = CDS (opt5) from Homo sapiens__NP_000448.3__HNF4A(39-474)(S87A_K106R_K108R_K126R_ K127R_S142A_S143A_S148E_T166A_S167E_S313A_S378E_T429E_T432E _S436E_K458R_S461E)
  source 1..1314: mol_type = other RNA
atggacacatctcctagcgaggggaccaacctcaatgctccgaactccctgggagtgtctgccctttgcgccatctgtggcgatcgggctacagggaaacactacggagccagctcctgcgacggctgtaaggggtttttccgcagagctgtgcggaaaaatcatatgtattcttgccgctttagcagacaatgtgtcgtggatcgggaccgcagaaaccagtgccggtactgtcgcctgaagaaatgcttcagagccggaatgcggcgcgaagcggttcagaatgagagagatcggatttccacccgcagagccgcttatgaagacagcgagctcccctctatcaacgccctgctgcaggctgaggtgctctcccggcaaattgccgaacctgtcagcggcatcaatggcgatattagagcgaagaagatcgcctctatcgctgacgtgtgtgagtccatgaaagaacagctgcttgttctggtggagtgggccaagtacattcccgctttttgcgagctccctctggatgaccaggtcgcccttctgcgcgcccacgctggggaacatctcctgctgggagcgacaaaacggagcatggtgttcaaggacgtgctcctgcttggcaacgattatatcgtccccagacactgtcctgagctggccgaaatgtctcgcgtttccattcggatcctcgacgagctggtgcttccgtttcaggaactgcaaattgatgacaatgagtacgcttacctcaaagccatcattttctttgatcccgacgccaaggggctgagcgatcctggaaagatcaaaagactgcgcgctcaggtgcaggtctccctcgaggactatatcaacgatcggcagtacgactctagaggccgcttcggggaactgcttctgctcctgcccacccttcaaagcattacgtggcagatgatcgagcagattcaatttatcaagctgttcggaatggccaaaattgataatctcctgcaggaaatgctgctcggcggcgagccttccgacgcgccccatgctcaccacccgctgcatcctcaccttatgcaggaacatatggggaccaacgtgatcgttgccaatacaatgcccacccacctgagcaacggacagatgtgcgagtggcctcggcccagaggccaagccgctgagcccgaggaacctcagccggaaccccctgggggatctggctccgagccctataagctcctgcctggggccgtggctacaatcgtccgccccctggaagccattccgcagcctaccatcacgaaacaggaggtgatttga

SEQ ID NO: 1422 - RNA, 1314 nt, synthetic construct
  misc_feature 1..1314: note = CDS (opt5) from Homo sapiens__NP_000448.3__HNF4A(39-474)(S87A_K106R_K108R_K126R_ K127R_S142A_S143A_S148A_T166A_S167A_K179R_K180R_S313A_S378A _T429A_T432A_S436A_K458R_S461E)
  source 1..1314: mol_type = other RNA
atggacacatctcctagcgaggggaccaacctcaatgctccgaactccctgggagtgtctgccctttgcgccatctgtggcgatcgggctacagggaaacactacggagccagctcctgcgacggctgtaaggggtttttccgcagagctgtgcggaaaaatcatatgtattcttgccgctttagcagacaatgtgtcgtggatcgggaccgcagaaaccagtgccggtactgtcgcctgaagaaatgcttcagagccggaatgcggcgcgaagcggttcagaatgagagagatcggatttccacccgcagagccgcttatgaagacagcgccctcccctctatcaacgctctgctgcaggccgaggtgctctcccggcaaattgcggcccctgtcagcggcatcaatggcgatattagagctcgccggatcgcctctatcgctgacgtgtgtgagtccatgaaggaacagctgcttgttctggtggagtgggccaagtacattcccgccttttgcgaactccctctggatgaccaggtcgcccttctgagagcgcacgccggggagcatctcctgctgggagctacaaaacgcagcatggtgttcaaggacgtgctcctgcttggcaacgattatatcgtcccccggcactgtcctgagctggccgaaatgtctagagtttccattcgcatcctcgacgagctggtgcttccgtttcaggaactgcaaattgatgacaatgagtacgcctacctcaaagctatcattttctttgatcccgacgccaaggggctgagcgatcctggaaaaatcaagcggctgagagctcaggtgcaggtctccctcgaagactatatcaacgatcgccagtacgactctcggggcagattcggggagctgcttctgctcctgcccacccttcaaagcattacgtggcagatgatcgagcagattcaatttatcaagctgttcggaatggcgaaaattgataatctcctgcaggaaatgctgctcggcggcgccccttccgacgctccccatgctcaccacccgctgcatcctcaccttatgcaggagcatatggggaccaacgtgatcgttgccaatacaatgcccacccacctgagcaacggacagatgtgcgaatggcctcgcccccggggccaagctgccgcgcccgaggcccctcagccggctccccctgggggatctggctccgaaccctataagctcctgcctggggccgtggctacaatcgtcagacccctggaggccattccgcagcctaccatcacgaaacaggaggtgatttga

SEQ ID NO: 1423 - RNA, 1314 nt, synthetic construct
  misc_feature 1..1314: note = CDS (opt5) from Homo sapiens__NP_000448.3__HNF4A(39-474)(S87A_K106R_K108R_K126R_ K127R_S142A_S143A_S148A_T166A_S167A_K300R_K307R_K309R_S313A _S378A_T429A_T432A_S436A_K458R_S461E)
  source 1..1314: mol_type = other RNA
atggacacatctcctagcgaggggaccaacctcaatgctccgaactccctgggagtgtctgccctttgcgccatctgtggcgatcgggctacagggaaacactacggagccagctcctgcgacggctgtaaggggtttttccgcagagctgtgcggaaaaatcatatgtattcttgccgctttagcagacaatgtgtcgtggatcgggaccgcagaaaccagtgccggtactgtcgcctgaagaaatgcttcagagccggaatgcggcgcgaagcggttcagaatgagagagatcggatttccacccgcagagccgcttatgaagacagcgccctcccctctatcaacgctctgctgcaggccgaggtgctctcccggcaaattgcggcccctgtcagcggcatcaatggcgatattagagctaagaagatcgcctctatcgctgacgtgtgtgagtccatgaaagaacagctgcttgttctggtggagtgggccaagtacattcccgccttttgcgaactccctctggatgaccaggtcgcccttctgcgcgcgcacgccggggagcatctcctgctgggagctacaaaacggagcatggtgttcaaggacgtgctcctgcttggcaacgattatatcgtccccagacactgtcctgagctggccgaaatgtctcgcgtttccattcggatcctcgacgagctggtgcttccgtttcaggaactgcaaattgatgacaatgagtacgcctacctcaaagctatcattttctttgatcccgacgccagagggctgagcgatcctggacgcatccggagactgcgcgctcaggtgcaggtctccctcgaagactatatcaacgatcggcagtacgactctagaggccgcttcggggagctgcttctgctcctgcccacccttcaaagcattacgtggcagatgatcgagcagattcaatttatcaagctgttcggaatggcgaagattgataatctcctgcaggaaatgctgctcggcggcgccccttccgacgctccccatgctcaccacccgctgcatcctcaccttatgcaggagcatatggggaccaacgtgatcgttgccaatacaatgcccacccacctgagcaacggacagatgtgcgaatggcctcggcccagaggccaagctgccgcgcccgaggcccctcagccggctccccctgggggatctggctccgaaccctataaactcctgcctggggccgtggctacaatcgtccggcccctggaggccattccgcagcctaccatcacgaagcaggaggtgatttga

SEQ ID NO: 1424 - RNA, 1314 nt, synthetic construct
  misc_feature 1..1314: note = CDS (opt5) from Homo sapiens__NP_000448.3__HNF4A(39-474)(S87A_K106R_K108R_K126R_ K127R_S142A_S143A_S148A_T166A_S167A_S313A_S378A_T429A_T432A _S436A_K447R_K458R_S461E_K470R)
  source 1..1314: mol_type = other RNA
atggacacatctcctagcgaggggaccaacctcaatgctccgaactccctgggagtgtctgccctttgcgccatctgtggcgatcgggctacagggaaacactacggagccagctcctgcgacggctgtaaggggtttttccgcagagctgtgcggaaaaatcatatgtattcttgccgctttagcagacaatgtgtcgtggatcgggaccgcagaaaccagtgccggtactgtcgcctgaagaaatgcttcagagccggaatgcggcgcgaagcggttcagaatgagagagatcggatttccacccgcagagccgcttatgaagacagcgccctcccctctatcaacgctctgctgcaggccgaggtgctctcccggcaaattgcggcccctgtcagcggcatcaatggcgatattagagctaagaagatcgcctctatcgctgacgtgtgtgagtccatgaaagaacagctgcttgttctggtggagtgggccaagtacattcccgccttttgcgaactccctctggatgaccaggtcgcccttctgcgcgcgcacgccggggagcatctcctgctgggagctacaaaacggagcatggtgttcaaggacgtgctcctgcttggcaacgattatatcgtccccagacactgtcctgagctggccgaaatgtctcgcgtttccattcggatcctcgacgagctggtgcttccgtttcaggaactgcaaattgatgacaatgagtacgcctacctcaaagctatcattttctttgatcccgacgccaaggggctgagcgatcctggaaagatcaaaagactgcgcgctcaggtgcaggtctccctcgaagactatatcaacgatcggcagtacgactctagaggccgcttcggggagctgcttctgctcctgcccacccttcaaagcattacgtggcagatgatcgagcagattcaatttatcaagctgttcggaatggcgaaaattgataatctcctgcaggaaatgctgctcggcggcgccccttccgacgctccccatgctcaccacccgctgcatcctcaccttatgcaggagcatatggggaccaacgtgatcgttgccaatacaatgcccacccacctgagcaacggacagatgtgcgaatggcctcggcccagaggccaagctgccgcgcccgaggcccctcagccggctccccctgggggatctggctccgaaccctatcgcctcctgcctggggccgtggctacaatcgtccggcccctggaggccattccgcagcctaccatcacgagacaggaggtgatttga

SEQ ID NO: 1425 - RNA, 1314 nt, synthetic construct
  misc_feature 1..1314: note = CDS (opt5) from Homo sapiens__NP_000448.3__HNF4A(39-474)(S87A_K106R_K108R_K126R_ K127R_S142A_S143A_S148A_T166A_S167A_K179R_K180R_K234R_K300R _K307R_K309R_S313A_S378A_T429A_T432A_S436A_K447R_K458R_S461 E_K470R)
  source 1..1314: mol_type = other RNA
atggacacatctcctagcgaggggaccaacctcaatgctccgaactccctgggagtgtctgccctttgcgccatctgtggcgatcgggctacagggaaacactacggagccagctcctgcgacggctgtaaggggtttttccgcagagctgtgcggaaaaatcatatgtattcttgccgctttagcagacaatgtgtcgtggatcgggaccgcagaaaccagtgccggtactgtcgcctgaagaaatgcttcagagccggaatgcggcgcgaagcggttcagaatgagagagatcggatttccacccgcagagccgcttatgaagacagcgccctcccctctatcaacgctctgctgcaggccgaggtgctctcccggcaaattgcggcccctgtcagcggcatcaatggcgatattagagctcgccggatcgcctctatcgctgacgtgtgtgagtccatgaaggaacagctgcttgttctggtggagtgggccaagtacattcccgccttttgcgaactccctctggatgaccaggtcgcccttctgagagcgcacgccggggagcatctcctgctgggagctacacgccggagcatggtgttcaaagacgtgctcctgcttggcaacgattatatcgtccccagacactgtcctgagctggccgaaatgtctcgcgtttccattcggatcctcgacgagctggtgcttccgtttcaggaactgcaaattgatgacaatgagtacgcctacctcaaggctatcattttctttgatcccgacgccagagggctgagcgatcctggacgcatccggagactgcgcgctcaggtgcaggtctccctcgaagactatatcaacgatcggcagtacgactctagaggccggttcggggagctgcttctgctcctgcccacccttcaaagcattacgtggcagatgatcgagcagattcaatttatcaaactgttcggaatggcgaagattgataatctcctgcaggaaatgctgctcggcggcgccccttccgacgctccccatgctcaccacccgctgcatcctcaccttatgcaggagcatatggggaccaacgtgatcgttgccaatacaatgcccacccacctgagcaacggacagatgtgcgaatggcctcgccccagaggccaagctgccgcgcccgaggcccctcagccggctccccctgggggatctggctccgaaccctatcggctcctgcctggggccgtggctacaatcgtcagacccctggaggccattccgcagcctaccatcacgcgccaggaggtgatttga

SEQ ID NO: 1426 - RNA, 1314 nt, synthetic construct
  misc_feature 1..1314: note = CDS (opt5) from Homo sapiens__NP_000448.3__HNF4A(39-474)(S87A_S95A_S99A_K106R_K1 08R_K126R_K127R_S142A_S143A_S148A_T166A_S167A_S313A_S378A_T 429A_T432A_S436A_K458R_S461E)
  source 1..1314: mol_type = other RNA
atggacacatctcctagcgaggggaccaacctcaatgctccgaactccctgggagtgtctgccctttgcgccatctgtggcgatcgggctacagggaaacactacggagccagctcctgcgacggctgtaaggggtttttccgcagagctgtgcggaaaaatcatatgtatgcctgccgctttgcgagacaatgtgtcgtggatcgggaccgcagaaaccagtgccggtactgtcgcctgaagaaatgcttcagagccggaatgcggcgcgaagctgttcagaatgagagagatcggatttctacccgcagagccgcttatgaagacagcgccctcccctccatcaacgcgctgctgcaggccgaggtgctcagccggcaaattgctgcccctgtctctggcatcaatggcgatattagagctaagaagatcgcctccatcgccgacgtgtgtgagagcatgaaagaacagctgcttgttctggtggagtgggctaagtacattcccgcgttttgcgaactccctctggatgaccaggtcgcccttctgcgcgctcacgccggggagcatctcctgctgggagccacaaaacggtctatggtgttcaaggacgtgctcctgcttggcaacgattatatcgtccccagacactgtcctgagctggctgaaatgtcccgcgttagcattcggatcctcgacgagctggtgcttccgtttcaggaactgcaaattgatgacaatgagtacgcctacctcaaagcgatcattttctttgatcccgacgctaaggggctgtctgatcctggaaagatcaaaagactgcgcgcccaggtgcaggtctccctcgaagactatatcaacgatcggcagtacgacagcagaggccgcttcggggagctgcttctgctcctgcccacccttcaatccattacgtggcagatgatcgagcagattcaatttatcaagctgttcggaatggccaaaattgataatctcctgcaggaaatgctgctcggcggcgctccttctgacgctccccatgcccaccacccgctgcatcctcaccttatgcaggagcatatggggaccaacgtgatcgttgccaatacaatgcccacccacctgagcaacggacagatgtgcgaatggcctcggcccagaggccaagcggccgctcccgaggcccctcagccggctccccctgggggatccggcagcgaaccctataagctcctgcctggggccgtggcgacaatcgtccgccccctggaggccattccgcagcctaccatcacgaaacaggaggtgatttga

SEQ ID NO: 1427 - RNA, 1314 nt, synthetic construct
  misc_feature 1..1314: note = CDS (opt5) from Homo sapiens__NP_000448.3__HNF4A(39-474)(S87A_K106R_K108R_K126R_ K127R_S138A_T139A_S142A_S143A_S148A_T166A_S167A_S313A_S378A _T429A_T432A_S436A_K458R_S461E)
  source 1..1314: mol_type = other RNA
atggacacatctcctagcgaggggaccaacctcaatgctccgaactccctgggagtgtctgccctttgcgccatctgtggcgatcgggctacagggaaacactacggagccagctcctgcgacggctgtaaggggtttttccgcagagctgtgcggaaaaatcatatgtattcttgccgctttagcagacaatgtgtcgtggatcgggaccgcagaaaccagtgccggtactgtcgcctgaagaaatgcttcagagccggaatgcggcgcgaagcggttcagaatgagagagatcggattgccgctcgcagagccgcttatgaagactccgccctccccagcatcaacgcgctgctgcaggccgaggtgctctctcggcaaattgctgcccctgtctccggcatcaatggcgatattagagctaagaagatcgccagcatcgccgacgtgtgtgagtctatgaaagaacagctgcttgttctggtggagtgggctaagtacattcccgcgttttgcgaactccctctggatgaccaggtcgcccttctgcgcgctcacgccggggagcatctcctgctgggagccaccaaacggtccatggtgttcaaggacgtgctcctgcttggcaacgattatatcgtccccagacactgtcctgagctggctgaaatgagccgcgtttctattcggatcctcgacgagctggtgcttccgtttcaggaactgcaaattgatgacaatgagtacgcctacctcaaagcgatcattttctttgatcccgacgctaaggggctgtccgatcctggaaagatcaaaagactgcgcgcccaggtgcaggtcagcctcgaagactatatcaacgatcggcagtacgactccagaggccgcttcggggagctgcttctgctcctgcccacacttcaatctattacctggcagatgatcgagcagattcaatttatcaagctgttcggaatggccaaaattgataatctcctgcaggaaatgctgctcggcggcgctcctagcgacgctccccatgcccaccacccgctgcatcctcaccttatgcaggagcatatggggacgaacgtgatcgttgccaataccatgcccacacacctgtccaacggacagatgtgcgaatggcctcggcccagaggccaagcggccgctcccgaggcccctcagccggctccccctgggggaagcggctctgaaccctataagctcctgcctggggccgtggcgaccatcgtccgccccctggaggccattccgcagcctacaatcaccaaacaggaggtgatttga

SEQ ID NO: 1428 - RNA, 1314 nt, synthetic construct
  misc_feature 1..1314: note = CDS (opt5) from Homo sapiens__NP_000448.3__HNF4A(39-474)(S87A_S95A_S99A_K106R_K1 08R_K126R_K127R_S138A_T139A_S142A_S143A_S148A_T166A_S167A_S 313A_S378A_T429A_T432A_S436A_K458R_S461E)
  source 1..1314: mol_type = other RNA
atggacacatctcctagcgaggggaccaacctcaatgctccgaactccctgggagtgtctgccctttgcgccatctgtggcgatcgggctacagggaaacactacggagccagctcctgcgacggctgtaaggggtttttccgcagagctgtgcggaaaaatcatatgtatgcctgccgctttgcgagacaatgtgtcgtggatcgggaccgcagaaaccagtgccggtactgtcgcctgaagaaatgcttcagagccggaatgcggcgcgaagctgttcagaatgagagagatcggattgccgctcgcagagccgcgtatgaagactctgccctccccagcatcaacgctctgctgcaggccgaggtgctctcccggcaaattgctgcccctgtcagcggcatcaatggcgatattagagccaagaagatcgcttctatcgcggacgtgtgtgagtccatgaaagaacagctgcttgttctggtggagtgggccaagtacattcccgctttttgcgaactccctctggatgaccaggtcgcccttctgcgcgcccacgctggggagcatctcctgctgggagccaccaaacggagcatggtgttcaaggacgtgctcctgcttggcaacgattatatcgtccccagacactgtcctgagctggcggaaatgtctcgcgtttccattcggatcctcgacgagctggtgcttccgtttcaggaactgcaaattgatgacaatgagtacgcttacctcaaagccatcattttctttgatcccgacgccaaggggctgagcgatcctggaaagatcaaaagactgcgcgctcaggtgcaggtctctctcgaagactatatcaacgatcggcagtacgactccagaggccgcttcggggagctgcttctgctcctgcccacacttcaaagcattacctggcagatgatcgagcagattcaatttatcaagctgttcggaatggccaaaattgataatctcctgcaggaaatgctgctcggcggcgctccttccgacgcgccccatgcccaccacccgctgcatcctcaccttatgcaggagcatatggggacgaacgtgatcgttgccaataccatgcccacacacctgtctaacggacagatgtgcgaatggcctcggcccagaggccaagctgccgctcccgaggcccctcagccggcgccccctgggggaagcggctccgaaccctataagctcctgcctggggccgtggctaccatcgtccgccccctggaggccattccgcagcctacaatcaccaaacaggaggtgatttga

SEQ ID NO: 1429 - RNA, 1314 nt, synthetic construct
  misc_feature 1..1314: note = CDS (opt11) from Homo sapiens__NP_000448.3__HNF4A(39-474)
  source 1..1314: mol_type = other RNA
atggacacatcaccctcagaaggtacaaacctcaacgcccccaactcgctaggcgtctccgcactatgcgcaatctgcggcgaccgtgccaccggcaaacactacggagcctcatcctgcgacggttgtaaaggcttcttccgacgcagcgtcagaaaaaaccacatgtactcctgccgcttctcccgtcaatgcgtcgtcgacaaagacaaacgcaaccaatgccggtactgccgcctaaaaaaatgcttccgcgcaggcatgaaaaaagaagcagtccaaaacgaacgcgaccgcatatcaacccgtcgatcatcatacgaagactcctccctccccagcatcaacgccctcctccaagcagaagtactaagccggcaaataacatccccagtcagcggcatcaacggagacatacgagccaaaaaaatagcttcaatcgccgacgtctgcgaatccatgaaagagcaactactggtcctcgtcgaatgggctaaatacatcccggccttctgcgaactccccctcgacgatcaagtcgcccttctaagagcccacgccggcgaacacctcctcttaggcgcaaccaaacgcagcatggtattcaaagacgtactgctcctcggcaacgattacatcgtcccacgacattgccccgagctcgcagaaatgtcccgagtctccatccgcatactcgacgaactcgtactccccttccaagaactccaaatagacgacaatgaatacgcatacctcaaagcaatcatcttcttcgaccccgacgccaaaggactcagcgacccaggcaaaatcaaacgcctacgatcacaagtacaagtttcacttgaagactacatcaacgacagacaatacgactcaagaggtcgtttcggagaactactcctactactaccaaccctccaaagcataacctggcaaatgatagaacaaatacaatttataaaactcttcggcatggccaaaatcgacaatctcctacaagaaatgctcctcggaggaagcccctcagatgccccacacgcccaccacccactacacccccacctcatgcaagagcacatgggtaccaacgtcatagtcgccaacacaatgcccacccacctctcaaacggccaaatgtgcgaatggccgcgcccacgcggacaagccgccacccccgaaaccccacagccaagcccacccggtggctccggcagcgaaccctacaaactcctacccggcgccgttgcaacaatagtcaaacccctatccgccataccccaaccaacgatcaccaaacaagaagtcatctag

SEQ ID NO: 1430 - RNA, 1314 nt, synthetic construct
  misc_feature 1..1314: note = CDS (opt11) from Homo sapiens__NP_000448.3__HNF4A(39-474)(S313A)
  source 1..1314: mol_type = other RNA
atggatacctccccatctgaaggcaccaacctcaacgcacccaactctctcggagtctccgccctatgcgcaatctgcggcgaccgagccactggaaaacactacggcgcctcctcttgcgacggatgcaaaggcttcttccgaagatcagtccgaaaaaaccacatgtactcatgccgcttctcgcgccaatgcgtcgtcgacaaagacaaacgtaaccaatgcagatactgccgactcaaaaaatgcttccgcgccggcatgaaaaaagaagccgtccagaacgaacgcgaccgcatctcaaccagacgctcgagctacgaagactcctccctaccctccatcaacgccctactccaagcagaagtactatcccgccaaataacctcccccgtcagcggcatcaacggcgacatcagagccaaaaaaatcgcctcaatcgccgacgtatgcgagagcatgaaagaacagctccttgtcctagtagaatgggccaaatacatcccagccttctgcgaactccccctcgacgaccaagtcgccctactcagagcccacgccggcgaacacctcctcctcggcgctaccaagcgatctatggtattcaaggatgtacttctactcggaaacgactacatcgtaccacgccactgcccagaactagccgaaatgtcccgcgtatccatccgaatcctcgatgaactcgtactccccttccaagaactacaaattgacgacaatgaatacgcctacttaaaagccatcatattcttcgaccccgacgccaaaggtctgtccgacccaggcaaaatcaaacgactacgggcccaagtccaagtatcactcgaagactacatcaacgaccgccaatacgactcacgcggccgcttcggcgagctcctcctccttctcccaaccctacaatccataacctggcaaatgatcgaacaaatccaattcataaaactcttcggcatggcaaaaattgacaaccttctccaagaaatgctcctgggcggatccccctccgacgccccacacgcccatcaccccctccacccccacctaatgcaggaacacatgggcacaaatgtcatagtagccaacactatgcccacacatctctcaaacggccagatgtgtgaatggccacgcccacgaggacaagcagccacacccgaaacaccacaaccctcccccccaggcggctccggatccgaaccctacaaactcctacccggcgccgtcgccacaatcgtcaaacccctatccgccatcccccaacccacgatcaccaaacaagaagtcatctaa

SEQ ID NO: 1431 - RNA, 1314 nt, synthetic construct
  misc_feature 1..1314: note = CDS (opt11) from Homo sapiens__NP_000448.3__HNF4A(39-474)(S313E)
  source 1..1314: mol_type = other RNA
atggacacctccccctcagaaggaaccaacctaaacgctcccaactcccttggcgtctccgccctctgcgcaatatgcggagaccgcgccaccggaaaacactacggcgcctcatcctgcgacggttgcaaaggcttcttccgccgatccgtccgcaaaaaccacatgtattcctgccgcttctcgcgacagtgcgtagtcgacaaagataaacgaaaccaatgccgatactgccgccttaaaaaatgcttccgcgccggaatgaaaaaagaagcagtccaaaacgaacgagaccgcatcagcacccgtaggagctcatacgaggactcgagcctcccctcgatcaacgccttactccaagccgaagtactgtcccgccagatcacctcacccgtctccggcatcaacggagacatcagagccaaaaaaatagcatcgatcgccgacgtatgcgagtccatgaaagaacaactcctagtactagtcgaatgggccaaatacatcccagcattctgcgaactacccctagatgatcaagtagccctactacgagcccacgccggcgaacacctcctcctcggggccaccaaacgatcaatggtcttcaaagacgtcctcctcctcggcaacgactacatcgtaccccgccactgcccagaactcgcagaaatgtcacgcgtctcaatccgcatcctggacgaacttgtactcccattccaagaactacaaatagacgacaacgaatacgcatacctgaaagcaatcatctttttcgaccccgacgccaaaggcctatctgaccccggtaaaataaaacgcctccgcgaacaagtacaagtctctctcgaagactacatcaacgaccgccagtacgacagccggggacgcttcggcgaacttctcctcctcctccccactctacaaagcatcacctggcaaatgatcgaacaaatacaattcatcaaactcttcggaatggcaaaaatcgacaacctcctccaagaaatgctcctcggcggctccccgagcgacgcccctcacgcccaccacccactccacccccacctaatgcaagagcacatgggaaccaacgtcatagtcgcaaacacaatgcccacccacctctccaacggccaaatgtgcgaatggccccgcccacgcggccaagccgccacacccgaaacaccccaaccatcacccccaggcggatcaggatccgagccctacaaactcctcccaggcgccgtcgccacaatcgtcaaacccctcagcgccataccacaaccaacaataacgaaacaagaagtcatataa

SEQ ID NO: 1432 - RNA, 1314 nt, synthetic construct
  misc_feature 1..1314: note = CDS (opt11) from Homo sapiens__NP_000448.3__HNF4A(39-474)(S142A_S143A)
  source 1..1314: mol_type = other RNA
atggacacctccccctccgaaggcaccaacttaaacgcccccaactcccttggggtctccgctctctgcgcaatctgcggagacagagccaccggtaaacactacggagcctcctcctgcgacggatgcaaaggcttcttccgccgctcagtacgcaaaaaccacatgtatagttgccgcttctctcgccagtgcgtggtcgacaaagacaaacgcaaccaatgccgatactgccgcctcaaaaagtgcttccgcgccggaatgaagaaagaagctgtccaaaacgaacgcgaccgcatctcaacccgcagagcggcatacgaagacagctcgctaccctccataaacgccctccttcaagccgaagtcctatcccgacagatcacctcccccgtctctggaataaacggcgacatccgcgcaaagaaaatcgcctccatcgccgacgtatgcgaatccatgaaagaacaactcctagtgctagtagaatgggccaaatacatacccgccttctgcgagctccccctagacgaccaagtagccctactccgcgcacacgcaggcgaacacctcctcctcggcgccaccaaacgatcaatggtcttcaaagacgtactactcctcggcaatgactacatcgtcccacgacactgccccgaattagcagaaatgtcgcgagtctccatacgcatcctagacgaactcgtactccctttccaagaactacaaatcgatgacaacgaatacgcatacctcaaagccatcatcttcttcgacccagacgccaaaggcctttccgatcccggcaaaatcaaaagactacgctcacaagtacaagtctccctcgaagattacatcaacgaccgccaatacgactcacgcggccgcttcggagaactcctactactcctcccaaccctacaatccatcacctggcaaatgatcgaacaaatccagttcattaaactcttcggaatggccaaaatcgataacctcctacaagaaatgctcctaggcggcagtccatccgacgcgccccacgcacaccatccactccacccccacctcatgcaagaacacatgggcaccaacgtaatcgtcgcaaacaccatgcccacacacctttcaaacggccaaatgtgcgaatggccgcgcccccgcggccaagcagccaccccagaaaccccacaaccatcacccccaggcggcagcggctcagaaccctataaactcctccccggcgccgtagccacaatcgtcaaacctctctccgcaatcccccaacccaccatcaccaaacaagaagtcatctaa

SEQ ID NO: 1433 - RNA, 1314 nt, synthetic construct
  misc_feature 1..1314: note = CDS (opt11) from Homo sapiens__NP_000448.3__HNF4A(39-474)(S142E_S143E)
  source 1..1314: mol_type = other RNA
atggacaccagcccgtccgaaggcacaaacctcaacgcccccaactcccttggtgtctcagccctctgcgcaatctgcggcgaccgtgccaccggtaaacactatggcgcctcatcctgcgacggctgcaaaggcttcttcagacgatcggtacgcaaaaaccacatgtactcatgtcgcttctcccgacaatgtgtagtggacaaagacaaaagaaaccaatgccgctactgccgcctcaaaaaatgcttccgcgcaggcatgaaaaaagaagccgtccagaatgaacgagaccgcataagcacccgccgagaagaatatgaagactcctcacttccctcaatcaacgccctactccaagccgaagtactatcacggcaaatcacaagccccgtctcaggaataaacggagacatccgcgccaaaaaaattgcctccatcgcggacgtatgcgaaagcatgaaagaacaactactcgtactcgtcgaatgggcaaaatacatccccgcattctgcgaactccccctcgacgaccaagtagccctgctcagagcacacgccggagaacaccttctcctcggcgccaccaaacgctccatggtcttcaaagacgtcctcctcctagggaacgactacatagtaccacgacactgcccagaactagccgaaatgtccagagtatcaatccgaatcctcgacgaactcgtcctccccttccaagaactacaaatcgacgacaacgaatacgcctacctaaaagccatcatattcttcgatcccgacgcaaaaggcctctccgaccccggcaaaatcaagcgactacgatcacaagtacaagtctccctggaagactacatcaacgaccgccaatacgacagccgcggaagattcggcgaactcctgctactactccccaccctacaatccatcacctggcaaatgatagaacaaatacaattcatcaaactcttcggcatggctaaaatcgacaacctcctacaagaaatgctactaggcggcagcccctcagacgccccccacgcccaccaccccctccacccccacctcatgcaggaacacatgggcaccaacgtcatcgtcgccaacacaatgcccacccatctctccaacggccaaatgtgcgaatggcctaggccacgtggtcaagcagcaacccccgaaaccccccaaccctccccaccaggcggttcaggatccgaaccctacaaactactcccaggcgccgtagccaccattgtcaagccgctcagcgctataccccaacccaccataaccaaacaagaagtcatataa

SEQ ID NO: 1434 - RNA, 1314 nt, synthetic construct
  misc_feature 1..1314: note = CDS (opt11) from Homo sapiens__NP_000448.3__HNF4A(39-474)(S143A)
  source 1..1314: mol_type = other RNA
atggacacctcaccatcagaaggcaccaacctcaacgcccccaactccctcggagtctcagccctctgcgcaatctgcggcgaccgcgccaccggcaaacactacggagcctcgtcctgcgacggatgcaaaggattcttcaggcgctccgtacggaaaaaccacatgtactcttgtcgtttctcccgccaatgcgtagtcgacaaagacaaacgcaaccaatgccgctactgtcgcctcaaaaaatgcttccgcgccggcatgaagaaagaagccgtccaaaacgaacgcgaccgcatctccacccgcaggtccgcctacgaagactccagcctaccctccatcaacgcactactccaagccgaagtcctctcccgccaaatcacgtctcccgtctcaggaatcaacggcgacatccgcgctaagaaaatagcatctatcgccgacgtctgtgaatccatgaaagaacaactactcgtactggtagaatgggccaaatacatccccgccttctgcgaacttcccctcgacgaccaagttgcactcctccgagcccacgccggggaacacctactcctcggagccaccaaacgctcaatggtcttcaaagacgtactcctcctcggcaacgactacatcgtgccacgccactgccccgaactagccgaaatgtcccgggtctccattcgaatcctcgacgaactcgtcctccccttccaagaactccaaatagacgacaacgaatacgcttacctcaaagcaataatcttcttcgacccagatgccaaaggcctcagcgacccgggcaagattaaacgcctccgctctcaagtccaagtctcccttgaagactacatcaacgaccgccaatacgactcccgcggtcgattcggggaactactcctactcctcccaacactacaatccatcacctggcaaatgatcgaacaaatccaattcatcaaactcttcggcatggccaaaatcgacaacctcctacaggaaatgctcctaggaggcagcccctccgacgccccccacgcccaccaccccctccacccccacctaatgcaagaacatatgggaaccaacgtaatcgtcgcaaacacaatgcccacccacctctccaacggccaaatgtgcgaatggccccgcccccgcggtcaagcagccacacccgaaacccctcaaccctccccgcccggaggcagcggctccgaaccatacaaactcctcccaggcgccgtagccaccatcgtaaaacccctatcggccataccccaacccacaatcaccaaacaagaagtaatctaa

SEQ ID NO: 1435 - RNA, 1314 nt, synthetic construct
  misc_feature 1..1314: note = CDS (opt11) from Homo sapiens__NP_000448.3__HNF4A(39-474)(T166A)
  source 1..1314: mol_type = other RNA
atggacacttccccctcagaaggcacaaacctcaacgcacccaactccctaggagtctccgccctatgcgcgatctgtggcgaccgagcaaccggcaagcattacggcgcatcctcctgcgacggatgcaaaggcttcttccgccgatccgtccgaaagaaccacatgtactcctgccgattctcccgccaatgcgtagttgacaaagacaaacgcaatcaatgccgatactgccgcctcaagaaatgcttccgagcaggaatgaagaaagaagccgtccaaaacgaacgcgatcgcatatccacccgccgctcctcctacgaagactcctccctcccctccatcaacgcactcctccaagcggaagtactctcacgccaaatcgcgtccccagtctccggcataaacggagacatccgcgccaagaaaatagcctcaatcgctgacgtctgcgaatctatgaaagaacagctcctcgtcctagtcgaatgggccaaatacatccccgccttctgcgaactcccactagacgaccaagtggcactcctccgcgcccacgccggcgaacacctactactcggagccaccaaacgctccatggtgttcaaagacgtactactcctcggaaatgactacatcgtcccccgacactgccccgaactcgccgaaatgtccagggtctccatccgcatcctcgacgaactggtcctcccattccaagaactccaaatcgacgacaacgaatacgcctacctaaaagccatcatcttcttcgaccccgacgccaaaggcctatccgacccgggcaaaatcaaacgactccgctcccaagtccaagtctcactcgaagactacatcaacgatagacagtacgactcacgcggtagattcggagaactcctactcctactccccacactccaatccataacctggcaaatgatagaacaaatacaattcatcaaactcttcggcatggccaaaatcgacaacctactccaggaaatgctcttaggcggctccccatccgacgccccacacgcccaccaccccctccacccccacctcatgcaagaacacatgggcaccaatgtcatagtagcaaacaccatgcccacacacctctccaacggacaaatgtgcgaatggccccgcccacgcggtcaggccgccacccccgaaaccccacaaccctccccacccggaggctccggatcagaaccctacaaactcctccccggcgccgtcgcaaccatcgttaaaccactatccgccataccccaacccaccatcaccaaacaagaggtcatataa

SEQ ID NO: 1436 - RNA, 1314 nt, synthetic construct
  misc_feature 1..1314: note = CDS (opt11) from Homo sapiens__NP_000448.3__HNF4A(39-474)(S167E)
  source 1..1314: mol_type = other RNA
atggacacctccccctctgaaggcaccaacctcaacgcacccaacagccttggcgtcagcgccttatgcgccatttgcggagaccgcgccaccggcaaacactacggagcatcctcatgcgacggctgcaaaggcttcttccgccgatcagtccgaaaaaaccacatgtactcctgccgcttctctcgccagtgcgtagtcgataaagataaaagaaatcaatgccgctactgccgcctcaaaaaatgcttccgcgccggcatgaaaaaagaagcagttcaaaacgaacgcgaccgaatctccacccgccgctcatcctacgaagactcttccctcccctctataaacgccctcctccaagccgaagtactctcacgccaaatcaccgaacctgtctccggcattaacggagacatacgcgccaagaaaatagccagcatcgccgacgtctgcgaatcaatgaaagaacaactcctcgtcctagtcgaatgggccaaatacatccccgcattctgcgaacttcccctcgacgaccaagtcgccctcctccgtgcccatgcaggcgaacacctcctcctcggcgccaccaaacgctccatggtctttaaagacgtcctcctcctgggcaacgactacatcgtcccccgacactgcccagaactcgccgagatgagccgcgtgtccatacgcatactcgacgaactcgtcctccccttccaagaactccagatagacgataacgaatacgcatacctaaaagccataatattcttcgaccccgacgctaaaggtctctcagacccaggaaaaatcaaacgtctcagaagccaagtccaagtctcactcgaagactacatcaacgaccgccaatacgactctcgcggccgcttcggcgaactcctcttattactcccaacactccaatcaatcacctggcaaatgatcgaacaaatacaatttatcaaactcttcggcatggctaaaatcgacaatctcctccaagaaatgctcctcggaggctccccctcagatgccccccacgcccaccacccccttcatccccacttaatgcaagaacatatgggcaccaacgtcatcgtagccaacaccatgcccacacacctatccaacggccaaatgtgcgaatggccccgcccccgaggacaagccgccaccccagaaacaccccaaccctccccccccggaggcagcggctccgaaccatacaaactcctcccaggtgccgtcgccactatcgtcaaacccctctcagccatcccccaaccaaccatcacaaagcaagaagtcatctaa

SEQ ID NO: 1437 - RNA, 1314 nt, synthetic construct
  misc_feature 1..1314: note = CDS (opt11) from Homo sapiens__NP_000448.3__HNF4A(39-474)(S167A)
  source 1..1314: mol_type = other RNA
atggacacctcaccctccgaaggtaccaacctcaacgcgcccaactccctcggcgtctcagccctctgcgccatctgcggcgaccgcgcgaccggcaaacactacggtgcctcctcatgcgacggatgcaaaggcttcttccgacgctcagtccgcaaaaaccacatgtactcctgccgcttctcacgacaatgcgtcgttgacaaagacaaacgcaaccaatgccgctactgccgcctcaaaaaatgcttccgcgcaggaatgaaaaaagaagcagttcaaaacgaacgcgaccgcatctcaacccgcagatcatcatacgaagactcatccctaccatcaataaacgccctcctacaagccgaagtcctctccagacaaatcaccgcccccgtctcaggcataaacggcgacatccgtgcaaaaaaaatcgcctccatcgctgacgtctgcgaatccatgaaagaacaactccttgtcctcgtcgaatgggccaaatacattcctgccttctgcgaactccccctcgacgaccaagtcgcactactcagagcccacgcaggcgaacacctcctcctcggagcaacaaaacgctccatggtcttcaaagacgtcctcctactcggaaatgactacatcgtccccagacactgccccgaactcgctgaaatgtcaagagtctccatacgaatactagacgaactagtcctacccttccaagaactgcaaatagacgacaacgaatacgcctacctcaaagccatcatattcttcgaccccgacgccaagggactctcagaccccggcaaaatcaaacgcctacgctcccaagtgcaagtcagcctcgaagactacataaacgatcgccagtacgactcacgaggacgattcggagaactcctcctcctcctcccaacactccagtccatcacctggcaaatgatcgaacaaatccaatttatcaaactcttcggcatggccaaaatcgacaacctactacaagaaatgctcctcggaggatccccctcagacgccccccacgcccaccaccctctccacccccacctaatgcaagaacacatggggaccaacgtaatcgtcgccaataccatgccaactcatctatcaaacggtcaaatgtgcgaatggccccgcccccggggacaagccgccacccccgagacaccgcaaccctccccccctggcggatccggctcagaaccctataaactactccccggcgcggtcgccaccatagtcaaaccactctctgccatcccccaaccaaccataaccaaacaagaagtcatctaa

SEQ ID NO: 1438 - RNA, 1314 nt, synthetic construct
  misc_feature 1..1314: note = CDS (opt11) from Homo sapiens__NP_000448.3__HNF4A(39-474)(S167A_S378A_T429A_T432A _S436A)
  source 1..1314: mol_type = other RNA
atggacacaagcccctccgaaggcacaaatctcaacgcccccaactcactaggcgtctcagccctatgtgctatctgcggcgaccgcgccaccggcaaacactacggcgcatcatcatgtgacggatgcaaaggattcttccgacgctccgtccgaaagaaccacatgtactcctgccgattcagcagacaatgtgttgtcgacaaagacaaacgcaaccaatgtcgctactgccgcctcaaaaaatgctttagagccggaatgaaaaaagaagccgtccaaaacgaacgcgaccgcatctccacacgccgaagctcatacgaagactcatctctcccctccatcaacgcactcctccaagccgaagtcctatctcgccaaatcaccgcacccgtctccggcatcaacggcgacatacgcgccaaaaaaatagcctccatagcagacgtatgcgaatccatgaaagagcaactcctcgtgctagtcgaatgggccaaatacatccccgccttctgcgagctcccactagacgaccaagtcgccctcctccgcgcccacgccggcgaacacctgctcctaggcgccaccaaaagaagcatggtattcaaagacgtcctactcctcggcaacgactatatagtccctcgccactgtccagaactcgcagaaatgtccagagtcagcatccgaatcctcgacgaactcgtcctacccttccaagaactacaaatcgacgacaacgaatacgcctaccttaaagccatcatcttcttcgaccccgacgccaaaggcctatccgaccccggcaaaatcaaacgcttacgatcccaagtccaggtcagcctcgaagactacataaacgaccgccaatacgactcacgcggccgcttcggcgaactactcctcctcctcccaaccctccaaagcatcacctggcaaatgatagaacaaatacaattcatcaaacttttcggcatggccaaaatcgacaaccttttacaagaaatgctactcggtggcgcgcccagcgacgctccgcacgcccaccaccccctccacccacacctcatgcaggaacacatgggcaccaacgtaatagtcgccaacacaatgccaacccacctctcaaacggccagatgtgcgaatggccccgaccccgaggccaagccgcagccccagaagccccccaaccagcccccccaggaggatccggctcagaaccctataaactcttacccggtgccgtcgcgaccattgtcaaacccctctccgccataccccagcccacaatcaccaaacaagaagtcatctaa

SEQ ID NO: 1439 - RNA, 1314 nt, synthetic construct
  misc_feature 1..1314: note = CDS (opt11) from Homo sapiens__NP_000448.3__HNF4A(39-474)(S167E_S378E_T429E_T432E _S436E)
  source 1..1314: mol_type = other RNA
atggacacctccccctcagaaggcaccaacctcaacgctccaaactccctaggggtctccgcactctgcgcaatctgcggcgaccgtgccaccggcaaacattacggcgcctcatcctgcgacggctgcaaaggattcttccggcgatccgtccgaaagaaccacatgtacagctgcagattcagccgacaatgcgtcgtggacaaagataaacgcaaccaatgccgctactgccgactcaagaaatgcttccgcgcaggcatgaagaaagaagcagtacaaaacgaacgcgaccgcatctcaacaagacgtagctcctacgaagactcaagcctcccatccatcaacgccctcctccaagccgaagtactctcacgtcaaatcaccgaacccgtgtcaggaatcaacggcgacatccgcgccaagaaaatcgcctccatcgcagacgtctgcgaatccatgaaagaacaactcctcgtcctggtcgaatgggctaaatacatccccgcattctgcgaactccccctagatgaccaagtcgccctactgcgcgcccacgcaggcgaacatctattactcggcgccaccaaacgcagcatggtattcaaagacgtcctcctcctcggcaacgactacatagtcccacgccactgcccagaactggccgaaatgagccgagtctctatccgcatactcgacgagctagtcctccccttccaagaactccaaattgacgacaacgaatacgcctacctcaaagccatcatattcttcgaccccgacgcgaaaggcctatccgaccccggtaaaatcaaaagactacgctcacaagtccaagtctcccttgaagactacatcaacgaccgccagtacgacagccgcggccgcttcggcgaactacttctcctcctccccaccctccaatccatcacctggcaaatgatcgaacaaatccaattcataaaactattcggaatggccaaaatcgacaacctcctgcaagaaatgctcctcggaggcgaaccctcagacgcaccccacgcccatcaccccctccatccacacttaatgcaagaacacatgggcaccaacgtaatcgtagccaacactatgcccacccacctatccaatggccaaatgtgcgaatggcccagaccaagaggacaagccgccgaacccgaagaaccacaaccagaacctcccggtggatccggctcagaaccctacaaactactccccggagccgtagctaccatcgtcaagcccctatcagccatcccccaacccacaatcaccaaacaggaagtcatctaa

SEQ ID NO: 1440 - RNA, 1314 nt, synthetic construct
  misc_feature 1..1314: note = CDS (opt11) from Homo sapiens__NP_000448.3__HNF4A(39-474)(S87A)
  source 1..1314: mol_type = other RNA
atggacacctcaccctcagagggcaccaatctcaacgccccaaactcactcggagtaagtgcactatgcgcgatctgcggcgaccgcgccaccggcaaacactacggcgcatcctcctgcgacggctgcaaaggattcttccgacgcgccgtccgcaaaaaccacatgtactcatgccgcttctcacgccagtgcgtcgtagacaaagacaaacgcaatcaatgccgctactgccgactcaagaaatgcttccgcgccggaatgaagaaagaagcagtacaaaacgaacgcgaccgaatctccacccgccgctcctcctacgaagattcctccctcccctccatcaacgccctactccaagccgaagtactctcccgccaaatcacctctccagtttccggcataaacggcgacatacgagcaaagaaaattgcatctatcgccgacgtctgcgaatcgatgaaagagcaactcctagtactcgtagaatgggccaaatacatccccgcattctgcgaactcccacttgacgaccaagtcgcccttctccgagcacacgccggcgaacatctcctgctcggcgctacaaaaagaagcatggtcttcaaagacgtcctcctactcggcaacgactacatcgtcccccgccactgccccgaactagccgaaatgagccgagtctccatcagaatcctcgacgaactcgtactccccttccaagaactccaaatagacgacaacgaatatgcatacctcaaagcaatcatattcttcgaccccgacgccaaaggactttccgaccccggcaaaataaaacgcctccgatcccaagtacaggtctccctcgaagactacatcaacgacagacaatacgacagccgtggacgattcggagagttactcctactacttcccacccttcagtcaatcacctggcaaatgatagaacaaatccaattcatcaaactgttcggaatggctaaaatcgacaacctgctacaagaaatgctcctcggcggctcccctagcgacgccccacacgcacaccaccccctccacccacacctcatgcaagagcacatgggcacaaacgtaatagtagccaacacaatgcccacccacctctcgaacggccaaatgtgcgaatggccccgcccccgcggacaagccgcaaccccagaaacaccccaaccttcacccccaggcggctccggatccgaaccctacaaactactccccggagccgtagcaaccatagtcaaaccgctcagcgccatcccccaacccacaataaccaaacaagaagtcatctag

SEQ ID NO: 1441 - RNA, 1314 nt, synthetic construct
  misc_feature 1..1314: note = CDS (opt11) from Homo sapiens__NP_000448.3__HNF4A(39-474)(S87E)
  source 1..1314: mol_type = other RNA
atggacacctccccctccgaaggaaccaacctaaacgcaccaaattccctcggcgtctccgccctttgcgccatatgtggggaccgcgcaacaggaaaacactacggcgcctcctcctgcgacggatgcaaaggattcttccgacgcgaagtcagaaaaaaccacatgtactcatgtcgattctcccgccagtgcgtcgtcgacaaagacaaaagaaaccaatgcagatactgtcgcctaaaaaaatgcttccgcgccggaatgaaaaaggaagcagtacagaacgaacgcgaccgcatctccaccagacgctcctcctacgaagactcatccctgccctcgatcaacgcacttctccaagccgaggtcctatcaagacaaatcacttctccagtatccggcatcaatggcgacatccgcgccaaaaaaatcgcctcaatcgccgacgtctgcgagtccatgaaagaacaactactagtccttgtagaatgggctaaatatattcccgccttctgcgaacttcccctagacgaccaagtagcactcctccgcgctcacgccggcgagcacctactactcggcgcaaccaaaagatcaatggtcttcaaagacgtcctcctcctgggcaacgactacatcgtcccccgacactgccccgaactcgcggaaatgtcccgcgtcagcatccgcatcctcgacgaactcgtactccccttccaagaactacaaatcgacgacaacgaatacgcctacctcaaagcgataatcttcttcgacccagacgccaaaggtctatccgacccaggaaaaatcaaacgtctccgctctcaagtacaagtctctctcgaagactacataaacgaccgccaatacgactccagaggccggttcggcgaactcctcctcctactccccacactccaaagcatcacctggcaaatgatcgaacaaatccaattcataaaactattcggcatggccaaaatagacaacctgctacaagaaatgctcctcggaggttccccctcagacgccccccacgcccaccacccccttcacccacacctaatgcaagaacacatgggcactaacgtaatagtagccaacacaatgcccacccacctctccaacggccaaatgtgtgaatggccaagaccacgcggacaagccgcaacccctgagaccccccagccctccccacccggcggctctggcagcgaaccctacaaactgctacccggggccgtcgccacaatcgtaaaaccactctcggcaatcccccaacccaccatcaccaaacaagaagttatctaa

SEQ ID NO: 1442 - RNA, 1314 nt, synthetic construct
  misc_feature 1..1314: note = CDS (opt11) from Homo sapiens__NP_000448.3__HNF4A(39-474)(R2V)
  source 1..1314: mol_type = other RNA
atggacacctccccctccgaaggcacaaacctcaacgcccccaactccctcggcgtctccgccctatgcgccatatgcggagaccgagccaccggcaagcactacggcgcttcctcctgcgacggatgcaaaggcttcttccggagaagcgtccggaaaaaccacatgtattcctgccgattctcacgccaatgcgtagtcgacaaagacaaacgcaaccaatgccgctactgccgccttaagaaatgtttcagagccggaatgaagaaagaagccgtccaaaacgaacgcgaccgcataagcacccgccgctcctcatacgaagacagcagcctcccctccatcaacgccctcctccaagcagaagtgctctcccgacaaatcaccagccccgtaagcggaatcaacggcgacatacgcgccaagaaaatcgcctccatcgccgacgtctgcgaatcaatgaaagaacaactactcgtccttgtagaatgggccaaatacatccccgccttctgcgagctcccactcgacgaccaagtcgccctcctccgcgcacacgccggtgaacatctcctactaggagcaaccaaacgatcaatggtattcaaagacgtcctcctcctcggtaacgactacatagtcccaagacactgccccgaactagccgaaatgtcacgcgtctccatccgcatcctagacgaactcgtccttccctttcaagaactacaaatcgacgacaacgaatacgcctacctcaaagccatcatcttcttcgacccagacgcaaaaggactctcagaccccggcaaaatcaaacgcctccgctcccaagtccaagtcagcctcgaagactacatcaacgacagacaatacgactcacgaggccgcttcggagaactactactcttgctccccacactacaatcgataacctggcaaatgatcgaacaaatccaatttatcaaactattcggaatggcaaaaatagacaaccttctgcaagaaatgctccttggcggctctccctctgacgctccccacgcccaccaccccctccacccccaccttatgcaagaacacatgggaaccaacgtcatcgtagccaacacaatgcccacccacctatcaaacggccaaatgtgcgaatggccacggccacgcggccaagccgcaacacccgaaaccccacaaccctcacccccaggcggctccggctcagagccgtacaaactactacccggcgccgtagccaccatcgtgaaacctctctccgccatccctcaacccacaatcaccaaacaagaggtcatctaa

SEQ ID NO: 1443 - RNA, 1314 nt, synthetic construct
  misc_feature 1..1314: note = CDS (opt11) from Homo sapiens__NP_000448.3__HNF4A(39-474)(R2V_K5V)
  source 1..1314: mol_type = other RNA
atggacacctccccctcagaaggtaccaacctcaacgcacccaactcgctcggcgtatcagccctttgtgccatctgcggtgatcgcgcaaccggaaaacactacggcgcatcctcatgcgacggctgcaaaggcttcttccgccgatccgtccgtaaaaaccatatgtactcctgtcgattctcccgccaatgtgtcgtagataaagacaaacgcaaccaatgcagatactgccgcctaaaaaaatgcttccgggcaggtatgaagaaagaagcagtccaaaacgaacgcgaccgcatcagcacccgccgctcctcctacgaagactcgtccctcccatccatcaacgccctactccaagccgaagtcttatcccgacaaatcacttcccccgtctccggcataaacggcgacatccgcgcaaaaaaaatcgcctccatagccgacgtctgcgaatcaatgaaagaacaactcctagtccttgtcgaatgggccaaatacatccccgcattctgcgaactcccactcgatgaccaggtagccctcctccgcgcccacgcgggtgaacacctcctcctcggggccaccaaacgctccatggtattcaaagacgtcctcctcctcggaaacgactacatcgtcccacgccattgccccgagctagccgaaatgtctagagtctccatacgcatcctcgacgaactcgtactccccttccaagaactccaaattgatgacaacgaatacgcctacctcaaagcaatcatcttcttcgaccccgacgccaaagggctctccgacccaggaaaaatcaaacgcctcagatcccaagtccaggtatcactcgaagactacatcaacgaccgacaatacgactcccgaggccgtttcggcgaactcctactcctcttaccaaccctacaatccatcacatggcaaatgatcgaacaaattcaattcatcaaactcttcggaatggccaaaatcgacaatctcctacaagaaatgctcctcggaggatcaccctcagacgccccacacgcccaccaccctttacatccccacctaatgcaagaacacatgggaaccaacgtcatcgtagccaacaccatgccaacacacctctcaaacggacaaatgtgcgagtggcccagaccccgaggccaagccgccacaccagaaacaccccagccctcaccacccggcggctcaggctccgaaccctacaaactactccccggagccgtcgccaccatcgtcaagccactatcagcaatcccacaacccaccatcaccaaacaagaagtaatctaa

SEQ ID NO: 1444 - RNA, 1314 nt, synthetic construct
  misc_feature 1..1314: note = CDS (opt11) from Homo sapiens__NP_000448.3__HNF4A(39-474)(K179R_K180R)
  source 1..1314: mol_type = other RNA
atggacacctccccctccgaaggaaccaacctaaacgcccccaactccctaggcgtctccgccctctgcgcaatatgcggagaccgcgcaaccggcaaacattacggcgcttcctcctgtgacggttgcaaaggatttttccgccgatccgtccgtaaaaaccacatgtactcctgccgcttcagccgacaatgcgtggtagataaagacaaacgcaaccaatgccgttactgccgactcaaaaaatgcttccgagccggaatgaaaaaagaagcagtccaaaacgaacgcgaccgcatctctacacgcagatcttcatatgaagatagcagcctccccagcatcaacgccctcctccaagccgaagtcctctcccgacaaatcacctccccagtaagcggcataaatggcgacatccgtgcccggcgcatcgcatcaatcgccgacgtatgcgaatcaatgaaagaacaactactagtcctcgtcgaatgggcaaaatacatacccgcattctgcgaactccccctcgacgaccaagtagccctcctacgcgcccacgccggagaacacctactcctcggggccacgaaacgatccatggtcttcaaagacgtcctactcctcggaaatgactacatagtccccaggcactgccccgaactcgccgaaatgtcccgcgtctcaattcgaatcctagacgaactcgtcctacccttccaagaactccaaatagacgacaacgaatacgcttacctcaaagccattatcttcttcgacccagacgccaaaggactctccgacccgggaaaaataaaacgactacgcagccaagtccaagtctccttagaagactacatcaacgaccgccagtacgactcccgcggccgattcggagagcttctcctactcctccccaccctccaatccatcacatggcaaatgatcgaacaaatccaattcataaaactcttcggcatggccaaaatcgataatctactccaagaaatgctcctcggcgggtccccatcagacgccccccacgcacaccacccgctgcacccacacctaatgcaagaacacatgggaacaaacgtcatcgtcgccaacacaatgcccacccacctctcaaacggacagatgtgcgaatggccccgcccacgcggccaagcggcaacccccgaaacaccacagccctccccccccggcggcagcggctcagaaccctacaaactcctcccaggagcagtcgccaccatagtcaagcccctctcagccatcccacaaccaaccatcaccaaacaagaagtaatatag

SEQ ID NO: 1445 - RNA, 1314 nt, synthetic construct
  misc_feature 1..1314: note = CDS (opt11) from Homo sapiens__NP_000448.3__HNF4A(39-474)(K234R)
  source 1..1314: mol_type = other RNA
atggacacctccccatccgaaggcaccaaccttaacgcacccaactccctcggagtatccgccctctgcgccatctgcggcgaccgcgccacaggcaaacactacggagcctcatcctgcgacggctgcaaaggcttcttccgacgctccgtcagaaaaaaccacatgtactcctgccgattctcccgtcaatgcgtagtcgacaaagacaaacgcaaccaatgccgatactgccgcctcaaaaagtgcttccgagccggcatgaaaaaagaagccgtccagaacgagcgcgaccgaatctccacaagaagatcatcatacgaagactcctccctcccctccatcaacgccctactccaagccgaagtcctctccagacaaatcacaagccccgtatccggtatcaacggcgacataagagccaaaaaaatcgcctccatagccgacgtctgcgaatccatgaaagaacaactcctcgtgctcgtagaatgggccaaatacattcccgccttctgcgaactccctctcgacgaccaggtcgctctactcagggctcacgccggcgaacacctcctcctcggcgcaacccgccgctccatggtattcaaagacgtcctactactcggaaacgactacatcgttccccgccactgcccagagctcgctgaaatgtctcgcgtctccatccgcatcctcgacgaactcgtcctcccattccaagaactccaaatcgacgacaacgaatacgcctacctaaaagccataatcttcttcgaccccgacgcaaaaggactctccgacccagggaaaattaaacgactccgctcccaagtacaggtaagcctcgaagactacatcaacgaccgccaatacgattcccgaggccgcttcggcgaacttctcctactactacccaccctacagtccatcacctggcaaatgatcgaacaaatccaattcatcaaacttttcggaatggccaaaatcgacaacctcctccaagaaatgctcctcggcggctccccctccgacgccccccacgcacaccaccccctccacccacaccttatgcaagaacatatgggcacaaacgtcatcgtcgccaacaccatgcccacccacctctctaacggccaaatgtgcgaatggccccgcccaagaggccaagccgccaccccagaaaccccgcaacctagcccacccggcggctccggcagcgaaccctacaaactattacccggagcagtggccacgatcgtaaagcccctcagcgcaatcccacaaccaacaatcactaaacaagaagtcatctaa

SEQ ID NO: 1446 - RNA, 1314 nt, synthetic construct
  misc_feature 1..1314: note = CDS (opt11) from Homo sapiens__NP_000448.3__HNF4A(39-474)(K300R)
  source 1..1314: mol_type = other RNA
atggacacctccccctcggaaggcaccaacctcaacgcccccaactcccttggggtcagtgcactatgcgccatctgcggcgatagagccaccggaaagcactacggcgcctcctcatgcgacggctgcaaaggcttcttccgccgatccgtccgcaaaaaccacatgtactcatgcagattcagcagacaatgcgtcgtcgacaaagacaagagaaaccagtgccgatactgccgcctcaagaaatgtttccgcgccggcatgaagaaagaagcagtccaaaacgaacgcgaccgcatctccacccgccgctcatcctacgaagactccagcctaccctccataaatgccctactccaagcagaagtcctctcccgccaaataacctccccagtatccggaatcaacggcgacatccgcgccaagaaaatcgcctcaatagcagacgtctgcgaatccatgaaagaacaactacttgtcttagtagaatgggccaaatacatccccgccttttgcgaactaccccttgacgaccaagtcgccctcctccgcgcacacgccggcgaacacctattactaggcgccactaaacgctccatggtcttcaaagacgtactcctcctcggcaacgactatatcgtcccccgacactgccccgaactcgccgaaatgtcccgcgtctcaatacgaatcctcgacgaactcgtcctccccttccaagaactacagatcgacgacaacgaatacgcctacctcaaagcaatcatcttcttcgaccccgacgcccgcggcctatccgaccctggcaaaatcaaacgcctgcgctcccaagtacaagtgtccctcgaagactacatcaacgaccgacagtacgattcccgaggccgattcggcgaactcctcctcctactcccaacactccaatccatcacctggcaaatgatcgaacaaatccaattcattaaactcttcggcatggcaaaaatcgacaacctcctacaagaaatgctcctcggtgggtccccctccgatgctccccacgcccaccaccccctccacccccacctcatgcaggaacacatgggcaccaacgtcatcgtcgccaacacaatgccaacccacctctcaaacggacaaatgtgtgaatggccccgaccccgaggccaagcagccacacccgaaacaccccaaccctcacccccaggcggctccggctcagaaccctacaaactactcccaggagccgtcgccaccatcgtaaaaccactaagcgccataccccaaccaactatcacaaaacaggaggtcatctaa

SEQ ID NO: 1447 - RNA, 1314 nt, synthetic construct
  misc_feature 1..1314: note = CDS (opt11) from Homo sapiens__NP_000448.3__HNF4A(39-474)(K300R_K307R_K309R)
  source 1..1314: mol_type = other RNA
atggacacctccccatccgaaggcaccaacctcaacgccccaaactccctcggtgtatccgcactctgcgcaatctgcggcgaccgcgctacaggcaaacactacggcgcatcctcctgcgacggatgcaagggcttcttccgccgctcagtccggaaaaaccacatgtactcttgccgcttctcacgtcagtgcgtggtcgacaaagacaaacgcaaccaatgccgctactgccgactcaaaaaatgcttccgcgccggaatgaaaaaagaagcagtacaaaacgaacgagaccgcatcagcacccgtcgctccagctacgaagactcttcacttccctccatcaacgccctcctccaagccgaagtcctctcacgccaaatcacgtcccccgtctccggcataaacggcgacatccgagcaaaaaaaatcgcctccatcgcagacgtatgcgaatccatgaaagaacagctcctagtcctcgtcgaatgggccaaatacatcccagcattctgcgaacttcccctagacgaccaagtcgcccttctcagagcacacgctggggaacacctcctactaggcgcaacaaaacgctccatggtcttcaaagacgtactactcctcggcaacgactacatagtccctcgccactgccccgaactcgcagaaatgtcccgagtctcaatacgaatactagacgaactagtcctccctttccaagaactacaaatcgacgacaacgaatacgcttacctaaaagccatcattttcttcgacccagacgcccgcgggctctccgaccccggccgcatacgacgccttcgctcccaagtccaagtatcattagaagactacatcaacgaccgccaatacgactcccgcggccgcttcggagaactcctactcctcctacccacactccagtccatcacctggcaaatgatcgaacaaatccaattcattaaactattcggcatggccaaaatcgacaacctactccaagaaatgctcctcggcggaagcccctctgacgcccctcacgcacaccaccccctacacccacacttgatgcaggaacacatggggaccaacgtcatcgtcgccaacaccatgcccacacatctctcaaatggccaaatgtgcgaatggccacgacctcgcggtcaagctgctaccccagaaaccccccaaccttccccacccggcggttcaggctcggaaccctacaaactccttcccggcgccgtcgccacaatagtcaaaccactatccgcaatcccccaacccacaattaccaaacaagaagtaatctag

SEQ ID NO: 1448 - RNA, 1314 nt, synthetic construct
  misc_feature 1..1314: note = CDS (opt11) from Homo sapiens__NP_000448.3__HNF4A(39-474)(K447R_K470R)
  source 1..1314: mol_type = other RNA
atggacacctccccatccgaaggaacaaacctcaacgctcccaacagcttaggtgtctccgccctctgcgccatctgcggagatcgcgccaccggcaaacactacggcgcctcatcatgcgacggctgcaaaggcttcttccgacgctcagtccgcaaaaaccacatgtactcctgcagattctcaagacaatgtgtcgttgacaaagacaaacgaaaccaatgccgatactgccgccttaaaaaatgcttccgcgcaggaatgaaaaaagaagcagtccagaacgaacgcgaccgcatatccacccgccgttccagctacgaagacagctcactcccttcaatcaacgccctactacaagccgaagtcctctcccgacaaataacctcacccgtatccggcatcaacggagacatacgcgccaaaaaaatagcctcaatcgccgacgtctgcgaatccatgaaagaacaactcctagtcctagtcgaatgggccaaatacatacccgcattctgcgaactccccctagacgaccaggtagccctcctccgagcccacgccggcgagcacctcttacttggcgcaaccaaacgctccatggtattcaaggacgtcctactcctaggcaatgactacatcgtcccccgccactgccccgaactcgctgaaatgtcccgagtctcaatcagaattctagatgaactagtcctacccttccaagaactccaaatagacgacaacgaatacgcatacctcaaagccatcatattcttcgaccccgatgccaaaggtctaagcgaccccggaaaaataaagcgactacggtcgcaagtacaagtctccctggaagactacataaacgaccgccaatacgacagccgcggacgattcggagaactactcctactcctccccactctccaatccataacatggcaaatgatcgaacaaatccaattcatcaaactattcggcatggccaaaatcgacaatcttttacaggaaatgctacttggaggatccccatccgacgcccctcacgcgcaccacccactccacccacacctcatgcaagaacacatgggcaccaacgtgatagtagcaaacaccatgcccacccacctctccaacggccaaatgtgcgagtggccacgaccacggggccaagccgccaccccagagacaccacaaccctcaccccccggaggctccggctccgaaccctaccgactactgccaggagccgtcgcaaccatcgtaaaaccactcagcgccatcccccaacccaccatcacccggcaagaagtcatctaa

SEQ ID NO: 1449 - RNA, 1314 nt, synthetic construct
  misc_feature 1..1314: note = CDS (opt11) from Homo sapiens__NP_000448.3__HNF4A(39-474)(K458R)
  source 1..1314: mol_type = other RNA
atggacacaagcccatctgaaggaactaacctcaacgcccccaactccctaggagtatccgctctctgcgccatctgcggagaccgcgccaccgggaaacactacggcgcctcctcatgcgacggatgcaaaggcttcttccgccgctcagtccgcaaaaaccacatgtactcctgtcgattctcccgacaatgcgtcgtcgacaaagacaaacgcaaccaatgccgatactgccgcctcaagaaatgcttcagagccggcatgaagaaagaagccgtacaaaacgaacgagaccgcatctccacacgccgtagctcctacgaagactcaagcctcccctcaatcaacgccctacttcaggccgaagtcctctcccgacaaattaccagcccagtctccggcatcaacggcgacatccgagccaagaaaatcgcatcaatagccgatgtctgcgaaagcatgaaagaacaactccttgtcctcgtagaatgggccaaatacatccccgccttctgcgaactacccctcgatgaccaagtagccctactcagagcccacgccggcgaacacctcctcctcggcgccaccaaacgcagcatggtcttcaaagatgtactcctcctcggcaacgactacatcgtcccccgacactgccccgaacttgcagaaatgagcagagtctcaatccgcatcctcgacgaactcgtactaccattccaagaactccagatcgacgacaacgaatacgcctacctgaaagcaattatcttcttcgaccccgacgccaaaggcctctcagaccccggcaaaattaaacgcctcagaagtcaagtccaagtatccctcgaagactatatcaatgaccgccaatacgactcccgcgggcgcttcggcgaactcctcctccttctcccaaccctccaatcaatcacctggcaaatgatcgaacaaatccaattcataaaattattcggaatggccaaaatcgacaacctactccaggaaatgctcctcggcgggtccccctccgacgccccacacgcccaccaccccctccacccccacctaatgcaagaacatatgggcaccaacgtcatcgtcgcaaacaccatgccaacccacctctcaaacggacaaatgtgcgaatggccccgtccccgaggccaggccgccacccccgaaacccctcaaccctcgcctcccggaggctccggctcagaaccctacaaactcctcccaggtgcagttgcaacaatagtcagacccctctccgccatcccccagcccacaataacaaaacaagaagtcatctaa

SEQ ID NO: 1450 - RNA, 1314 nt, synthetic construct
  misc_feature 1..1314: note = CDS (opt11) from Homo sapiens__NP_000448.3__HNF4A(39-474)(K106R_K108R_K126R_K127R )
  source 1..1314: mol_type = other RNA
atggacacctcaccctccgaaggcaccaacctcaacgctcccaactccctaggcgtctcagccctctgcgcgatatgcggagaccgagccaccggtaaacactacggcgcttcgagctgcgacggctgcaaaggcttcttccgtcgctcagtccgcaaaaaccacatgtactcatgccgattctcacgccaatgcgtagtagaccgcgaccgccgcaaccagtgccgatactgccgtcttaagaaatgcttccgcgccggcatgcgcagagaagcagtccaaaacgaacgcgaccgcatctcaacccggcgcagctcttacgaagactcaagccttccctcaatcaacgccctactacaagccgaagtcctaagccgccaaatcacttcacccgtatccggaataaacggcgacatccgagccaagaaaatagcctccatcgccgacgtctgcgaaagcatgaaagaacaactcctcgtcttagtcgaatgggccaaatacatccccgcattctgcgaactcccactggacgaccaagtagccctgctccgagcccacgccggcgaacacctcctcctcggcgccacgaaacgaagcatggtcttcaaagacgtccttctccttggcaacgactacatcgtcccacgccactgcccagagctagccgaaatgtcacgagtctcaatccgcatactcgacgagctagtactcccattccaagaactacaaatagacgacaacgaatacgcctatctcaaagcgatcatattcttcgaccccgacgccaaaggcctctccgacccaggcaaaatcaaacgcctccgctcccaagtccaggtgtcccttgaagactacataaacgatcgccaatacgactcacgaggaagattcggcgaactccttcttcttctccccacactccagtcaatcacatggcaaatgatcgaacagatacaattcatcaaacttttcggcatggccaaaatagacaacctcctacaggaaatgctactaggaggatccccatcagacgcaccccacgcccaccaccccctacacccccacctcatgcaagaacacatgggcaccaacgtcatagtcgccaacaccatgcccacccacctaagcaacggacaaatgtgcgagtggccccgcccacgcggccaagccgccacccccgaaacaccacaaccaagcccacccggcggctccggctccgaaccatacaaacttctcccaggcgctgtagccaccatcgtaaaaccactctcagccataccccaacccactatcaccaaacaagaggttatctag

SEQ ID NO: 1451 - RNA, 1314 nt, synthetic construct
  misc_feature 1..1314: note = CDS (opt11) from Homo sapiens__NP_000448.3__HNF4A(39-474)(E285Q)
  source 1..1314: mol_type = other RNA
atggacacctcgccatccgaaggcacgaacctaaatgcccccaactcccttggcgtctccgcactctgcgccatctgcggcgaccgcgcaaccgggaaacactacggcgcctcatcctgcgacggctgcaaaggattcttccgtcgatctgtacgcaaaaaccacatgtactcttgccgattcagccgacaatgcgtcgttgacaaagacaaacgcaaccaatgccgctactgccgactcaaaaagtgcttccgcgcaggtatgaaaaaggaagcagtacaaaacgaacgagaccgcatttccacccgacgatcatcctatgaagactcctccctcccctcaatcaacgccctacttcaagccgaagtcctctcccgacaaataacctcccccgtcagcggcatcaacggcgacatcagagccaagaaaatcgcaagcatcgcagacgtatgcgagtcaatgaaagaacaactcctcgtcctagtcgaatgggcaaaatacatccccgccttctgcgaactcccactagacgaccaagtagccctcctccgcgcccacgccggagaacacctcctcctaggcgccactaaacgctccatggtcttcaaagacgtcctcctcctaggcaatgattacatcgttccccgacattgccccgaactagccgaaatgtcccgagtatccatccgcatcctcgacgaactcgtcctaccattccaagaactacaaatcgacgacaaccaatatgcatacctaaaagcaatcatcttcttcgaccccgacgccaaaggccttagcgacccaggcaaaatcaagcgactacgcagccaagtacaagtatccctagaagattacatcaacgatcgccaatacgactcccgcggccggttcggcgaactcctcctcctcctccccactctacaatccataacctggcaaatgatagaacaaatccaattcatcaagttattcggcatggccaaaatagacaacctcctccaagaaatgctactcggcggctccccatccgacgccccacacgcccatcaccccctccacccacaccttatgcaagaacacatgggcaccaacgtaatagtcgccaacaccatgccaacccacctctccaacggacaaatgtgcgaatggccacggccacgcggacaagccgccacaccggaaacaccacaacccagcccacccggcggttccggctccgaaccctacaaactactacccggcgcagtcgccaccatcgtcaaaccgctctcagccatccctcaaccaaccatcaccaaacaagaagtcatataa

SEQ ID NO: 1452 - RNA, 1314 nt, synthetic construct
  misc_feature 1..1314: note = CDS (opt11) from Homo sapiens__NP_000448.3__HNF4A(39-474)(T166E)
  source 1..1314: mol_type = other RNA
atggacactagcccctccgaaggcaccaacctcaacgcaccaaactccttaggggtttcagccctatgcgccatatgcggcgatagagcaacaggaaaacactacggcgcctcatcatgcgatggctgcaaaggcttcttccgccgatccgtccgaaagaaccacatgtactcatgccgcttctcacgacaatgcgtcgtcgacaaagacaagcgaaaccaatgccgctactgccgcctaaagaaatgcttccgcgccggcatgaagaaagaagcagtacaaaacgaacgcgatcgcatctccacccgcagatcgtcctacgaagacagcagcctccccagcatcaacgccctcctccaagctgaagtcctctcccgccaaatcgaatcacccgtctcaggcatcaacggtgatatccgcgcaaagaaaatagcctccatcgccgacgtctgcgaatccatgaaagaacaactcctagtcctagtagaatgggccaaatacatcccagcattctgcgagctccccctggacgatcaagtcgctctcctccgcgcccacgccggcgaacacctcctactcggagcaaccaaacgcagtatggtattcaaagacgtcctactactcggtaacgactacatagtaccccgccactgcccagaactcgccgaaatgtcccgtgtctccatacgcatcctagacgaactcgtcctccccttccaagaactacaaatcgacgacaacgaatacgcctacctaaaagccatcatcttcttcgaccccgacgctaaaggcctctccgatccaggcaaaatcaaacgcctacgaagccaagtccaagtttccctcgaagactacatcaacgacagacaatacgactcccgcggccgcttcggcgaactactcctcctacttccaacactccaaagcataacgtggcaaatgatagaacaaatccaattcatcaaactcttcggcatggctaaaatagacaacctcctccaggaaatgctccttggaggctccccctccgacgcaccccacgcccaccacccactccaccctcacctcatgcaagaacacatgggcacaaacgtaatcgttgccaacactatgcccacccacctatccaacggacaaatgtgcgaatggccccgaccccgcggccaagccgccaccccagagactccccaaccctcgccacccggagggtccggctccgaaccctacaaactactccccggagcagtagcaacaatcgtaaaaccactctccgccataccccaacccactatcaccaaacaagaagtcatctaa

SEQ ID NO: 1453 - RNA, 1314 nt, synthetic construct
  misc_feature 1..1314: note = CDS (opt11) from Homo sapiens__NP_000448.3__HNF4A(39-474)(S148A)
  source 1..1314: mol_type = other RNA
atggacacctctccctccgaaggcaccaacctcaacgcacccaactccctcggagtctccgccctctgcgccatctgtggcgaccgagcaaccgggaaacattacggcgcatcctcctgcgacggctgcaaaggcttcttccgccgatccgtcagaaaaaaccacatgtactcgtgccgattctcacgccaatgcgtagttgacaaagacaaacgcaaccaatgccgctactgccgccttaaaaaatgcttccgcgccggaatgaaaaaagaggccgtacaaaatgaacgcgaccgaatcagcacacgccgctcttcatacgaagactccgcactcccatccatcaacgccctactacaagccgaagtcctcagccggcaaatcacatccccagtgtccggtattaacggagacatacgcgccaagaaaatagcctccatagcagacgtctgcgagtcaatgaaagaacaactcctcgtactcgtagaatgggcaaaatacatccccgccttctgcgaacttcccctcgacgaccaagtcgcactcctccgcgcccacgccggcgaacatctcctactaggagccaccaaacgttcaatggtcttcaaagacgtcctgctactcggcaacgactatatcgtccccagacactgccccgaactagcagaaatgtccagagtctcaatacgaatcctagacgaactcgtcctcccattccaagaactacaaatcgacgacaacgaatacgcctacctcaaagccatcatcttctttgaccccgacgccaaagggctctccgaccccggaaaaatcaaacgcctgcgctcacaagtccaagtatccctcgaagactacatcaacgaccgccagtacgacagccgaggacgtttcggcgaactcctactcctcctcccaacactccagtccatcacctggcaaatgatcgaacaaatccaattcataaaactcttcggcatggccaaaatcgacaacctactccaagaaatgctcctcggcggatccccgtccgacgccccccacgcccaccaccccctacacccacacctcatgcaagaacacatgggaacaaacgtcatcgtagccaacaccatgcccacccacctctccaacggccaaatgtgcgaatggccccgcccacgcggccaagctgcaacaccagaaaccccacaaccatccccccccggcggcagcggctccgaaccctacaagcttctccccggtgccgtggccacaatagtcaaaccactctcggccattccccaaccaacaataacaaaacaagaagtgatctaa

SEQ ID NO: 1454 - RNA, 1314 nt, synthetic construct
  misc_feature 1..1314: note = CDS (opt11) from Homo sapiens__NP_000448.3__HNF4A(39-474)(S148E)
  source 1..1314: mol_type = other RNA
atggacacctcaccctctgaaggaaccaacctcaacgcacccaactccctcggcgtatccgccctgtgcgccatctgcggtgatcgcgccaccggcaaacactacggggcctcaagctgcgacggctgcaaaggcttcttccgccgctctgtcaggaaaaaccacatgtacagctgccgattctcccgccaatgcgtagtcgataaagacaaacggaaccaatgccgatactgtcgcctcaagaaatgcttccgagcaggcatgaaaaaggaagcagtccaaaacgaacgggaccgaatctccactcgccgctcatcctacgaagacagcgaactaccctccattaatgccctcctccaagcagaagtactttcacgacaaataacctcccccgtctcaggcatcaacggcgacatcagagccaagaaaatcgcctccatcgccgacgtatgcgaatccatgaaagaacaactcctggtgctagtcgaatgggcaaaatatatccccgctttctgcgaactccccctagacgaccaagtcgcactcctccgagcccacgccggagagcacctcttactaggcgccaccaaacgaagcatggtcttcaaagacgtcctcctcctcggaaatgactacatcgtccccagacactgccccgaactcgccgaaatgtcacgagtctccatcagaatcctcgacgaactggtcctaccatttcaagaactacaaatcgatgacaacgaatacgcatacctcaaagcgatcatcttcttcgaccccgacgccaaagggctctccgacccaggcaaaatcaaacgcctcagaagccaggtccaagtctccctagaagactacataaacgaccgccagtatgactcccgcggcagattcggcgaactcctccttctacttccgaccctccaatccatcacctggcaaatgatcgaacaaatccaattcatcaaactcttcggcatggccaaaattgacaacctcctacaagaaatgctcctaggcggcagcccctcagacgcgccccacgcccaccacccactccacccacacctcatgcaagagcacatgggcaccaacgtcatagtagccaacaccatgcccacacacctctccaacggccagatgtgcgaatggccacgcccacgtggtcaagcagccacccccgaaaccccgcaaccatccccacccggcggatccggatccgaaccctacaaactcctacccggcgcagtcgccacaatcgtaaaacccctcagcgccatccctcagcccaccataaccaaacaagaagtcatctga

SEQ ID NO: 1455 - RNA, 1314 nt, synthetic construct
  misc_feature 1..1314: note = CDS (opt11) from Homo sapiens__NP_000448.3__HNF4A(39-474)(S183A)
  source 1..1314: mol_type = other RNA
atggacacctccccctcggagggaacaaacctcaacgcccccaactcactcggcgtcagcgcactctgcgccatatgcggcgaccgcgccaccggaaaacactacggagcctcaagctgcgacggctgcaaaggattcttcagacgcagcgtccggaaaaaccacatgtactcctgccgcttctcccgacaatgcgtcgtcgacaaagacaaacgaaaccaatgccgatactgccgcctaaaaaaatgcttccgcgctggaatgaaaaaagaagcagtacaaaacgaacgcgaccgcatatccaccagaagatcctcctacgaagactccagcctaccctcaatcaacgctctcctccaagcagaagtcctcagccgccaaatcacctcacccgtcagcggcatcaacggggacatccgcgccaaaaaaatcgccgcgattgccgacgtgtgcgaatccatgaaagagcaactcctcgtcctcgtagaatgggccaaatacatccccgccttctgcgaactacccctagacgaccaagtagcccttctacgcgcccacgccggggaacacctcctactcggcgcaaccaaaaggtcaatggtcttcaaagacgtcctcctactcggaaacgactacatcgtgcccaggcactgtccggaactcgccgaaatgtccagagtctcaatccggatactagacgaactcgtactccccttccaagaactacaaatcgacgacaacgaatacgcatacctaaaagccatcatcttcttcgacccagacgctaaaggactaagcgacccaggcaagatcaaacgactacgttcccaagtacaagtatccctggaagactacatcaacgaccgccaatacgactcacgaggtcgcttcggcgaactgctcctactcctacccaccctccaatccatcacatggcaaatgatcgaacaaatccaattcatcaaactcttcggtatggctaaaatcgacaacctactccaagaaatgcttctcggcggctccccatccgacgccccccacgcccaccacccactccacccccacctaatgcaagaacacatgggcaccaatgtcatagtcgccaacaccatgcccacccacctctcaaacggacaaatgtgcgaatggccccgaccacggggacaagcagccacaccagaaaccccccaacctagcccacccggaggctccggctcggaaccctacaaactcctccccggcgccgtagccaccatagtaaaacctttatccgccatcccacaacccaccatcacgaaacaggaagtaatataa

SEQ ID NO: 1456 - RNA, 1314 nt, synthetic construct
  misc_feature 1..1314: note = CDS (opt11) from Homo sapiens__NP_000448.3__HNF4A(39-474)(S183E)
  source 1..1314: mol_type = other RNA
atggatacctccccctcggaagggaccaacctcaacgccccaaattcacttggagtctccgccctatgcgccatatgtggagaccgcgctaccggaaaacactatggcgcgtcatcctgcgacggatgcaaaggcttcttcagacgctcggtccgcaaaaaccacatgtactcctgccgattctcccgccaatgcgtcgtcgacaaagacaaaagaaaccaatgcaggtactgccgtctgaagaaatgcttccgcgccggaatgaagaaagaagccgtccaaaacgaacgcgaccgaatcagcaccagacgcagctcctacgaagactcctcactcccatcaatcaacgccctactccaagccgaagtcctctcccgccaaatcacctccccagtaagcggaatcaacggcgacatccgcgccaagaaaatagccgaaatagccgacgtctgcgaatcaatgaaagaacagctactcgtcctcgtcgaatgggccaaatacatacccgccttctgcgaactccctctcgacgaccaagtcgcactactcagagcccacgccggagaacacctactcctcggagccacgaaacgatccatggtattcaaagacgtactcctccttggtaacgattacatcgtcccaagacactgcccagaactcgccgaaatgtccagagtatcaatccgaatcctcgacgagctagtactcccctttcaggaactacaaatagatgacaacgaatacgcatacctaaaagccatcatcttctttgaccccgacgccaaaggcctctccgacccaggcaaaatcaaacgcctacgctcccaagttcaagtatccctcgaagactacatcaatgaccgccaatacgacagccgaggacgcttcggcgaactactcctgctactccccaccctacaatccatcacttggcaaatgatcgaacaaatccaattcatcaaactcttcggcatggccaaaatcgacaaccttctccaggaaatgctcctcggtggcagcccctccgacgcaccccacgcccaccaccccctccacccacacctcatgcaagaacacatgggcaccaacgtcatagtagcaaacaccatgcccacccacctatcaaacggacaaatgtgcgaatggccgcgcccgagaggacaagccgccacacccgaaacaccccaaccaagccctcccggcggctcaggttcagaaccctataaactcctacccggcgccgtagccaccatcgtaaaacccctcagcgccatcccccaacccaccatcaccaaacaagaagtgatataa

SEQ ID NO: 1457 - RNA, 1314 nt, synthetic construct
  misc_feature 1..1314: note = CDS (opt11) from Homo sapiens__NP_000448.3__HNF4A(39-474)(S461A)
  source 1..1314: mol_type = other RNA
atggacacatcccccagcgaaggcaccaatctaaacgcacccaactccctcggggtctcagcactatgcgccatctgcggagatcgcgctactggcaaacactacggagcctcctcctgcgacggctgcaaaggcttcttccgaagatcagtccgcaaaaaccacatgtactcatgccgcttctctcgccaatgcgtcgtcgacaaagacaaacgaaaccagtgccgctactgccgcctaaagaaatgctttcgcgccggcatgaagaaagaagcagtacaaaacgaacgcgaccgcatctccacccgccggtcaagctacgaggactcatcactcccatcaatcaacgctctcctccaagcagaagtccttagccgacaaatcacatcccccgtttccggaatcaacggcgacatccgagcaaagaaaatcgcctctatcgcagacgtatgcgaatccatgaaagaacaactcctagtcctagtcgaatgggcaaaatatatacccgccttctgcgaactgcccctagacgatcaagtcgcactactccgagcccacgccggcgagcacctcctgctcggcgccacaaaacgatccatggtattcaaagacgtactactcctcgggaacgactacatcgtaccccgccactgccccgagctcgccgaaatgtcacgtgtctcaattcgcatactagacgagctagtcctccccttccaagaactacaaatagacgacaacgaatacgcatacctaaaagccatcatcttcttcgaccccgatgccaaaggactatccgaccccggcaaaatcaaacgccttcgttcacaagtgcaagtctcgctcgaagactacatcaacgaccgccaatacgactccagaggccgattcggagaactcctactcctcctccccaccctccaatccatcacatggcaaatgatagaacaaatccaattcataaaactcttcggcatggccaaaatcgacaacctgctccaagaaatgctcctcggcggatcaccctccgacgccccacacgcccaccaccccctacacccccaccttatgcaagaacacatgggaaccaacgtcatcgtcgccaacacaatgcccacacacctatcaaacggacaaatgtgcgagtggcctcgcccccgcggccaagcagccacacccgaaacaccccagccctccccacccggcggctccggctcggaaccctacaaacttctcccaggcgccgtcgccaccatcgtaaaaccactcgccgcaataccccaaccaaccatcaccaaacaagaggtaatctaa

SEQ ID NO: 1458 - RNA, 1314 nt, synthetic construct
  misc_feature 1..1314: note = CDS (opt11) from Homo sapiens__NP_000448.3__HNF4A(39-474)(S461E)
  source 1..1314: mol_type = other RNA
atggacacctctccatccgaaggcacaaacctcaacgcacccaactccctcggcgtctccgcactttgcgcaatctgcggcgaccgagccaccggcaaacattacggagcctccagctgcgacggctgcaagggattcttccgccgcagcgtccgcaaaaaccacatgtactcgtgccgcttctcacgacagtgcgtagtcgacaaagacaaacgcaaccaatgcagatactgcagacttaaaaagtgcttccgcgcgggaatgaagaaagaagccgtccaaaacgaacgagatcgcatctccacccgccggagctcatacgaagactcatcactaccatcaataaacgccctcctacaagccgaagtcctatcccgccaaataacctcccccgtctctggcatcaacggagacatccgcgccaagaaaatcgcaagcatcgccgacgtctgcgaatcaatgaaagagcaactactcgtcctagtagaatgggcaaaatacataccagccttctgcgaactccccctagacgaccaagtcgcgctactccgagcccacgcaggagaacaccttctcctaggcgcaaccaaacgctccatggtatttaaagacgtcctactcctgggcaacgactacatagtcccccgccattgcccagaactcgccgaaatgtcacgcgtatcgatacgcatcctcgacgagctagtcctccccttccaagaactacaaatagacgacaacgaatacgcctacttgaaagccataatcttcttcgacccagacgccaaaggcctctccgacccaggcaaaataaaacgcctacgcagccaggtacaggtcagcctcgaagactatatcaacgaccgtcaatacgactcccgaggccgattcggagaactcctcctactcctaccaaccctccaatcaatcacctggcaaatgatcgaacaaatacaattcatcaaactgttcggcatggcaaaaatagacaacctacttcaagaaatgctcttaggaggctccccctccgacgccccacacgcccaccaccccctccacccacacctcatgcaagaacacatggggaccaacgtaatagtcgccaacaccatgcccacccacctatccaacggccaaatgtgcgaatggccccgcccgcgcggccaagccgccacccctgaaacaccacaaccctcccctcccggcggatcaggctccgaaccctacaaactccttcccggcgccgtagccactatcgtcaaacccctcgaagccatacctcaaccaaccatcaccaaacaagaggtcatctaa

SEQ ID NO: 1459 - RNA, 1314 nt, synthetic construct
  misc_feature 1..1314: note = CDS (opt11) from Homo sapiens__NP_000448.3__HNF4A(39-474)(S142A_S143A_S313A)
  source 1..1314: mol_type = other RNA
atggacacctcaccctctgaagggaccaacctaaacgcaccaaactcactcggagtcagcgccctatgcgccatctgcggcgaccgcgcaaccggaaaacactacggcgcctcctcttgcgacggctgcaaaggcttcttccgaagatccgtcagaaaaaaccatatgtacagctgccgcttctcacgacaatgcgtcgtcgacaaagacaaaagaaaccaatgcagatattgccgactcaaaaaatgctttcgagccggcatgaaaaaggaagcagtccaaaacgaacgcgaccgcatttccacccgcagagccgcctacgaagacagctccctccccagcatcaacgcactactccaagctgaagtattatcccgccaaatcacctccccagtctccggcatcaacggcgacatacgggccaaaaaaatcgcctcaatcgccgacgtctgcgaatccatgaaagaacaactcctagtcctagtcgaatgggccaaatacatacccgcattctgcgaactacctttagacgaccaagtcgccctcttacgagcccacgccggcgaacatctactgcttggcgccaccaaacgatccatggttttcaaagacgtactactcctcggaaacgactacatcgtcccacgtcactgcccagaactagccgaaatgtcccgcgtctcaatccgcatcctcgacgaactcgtactcccctttcaagaactacaaatcgacgacaacgagtacgcctacctcaaagccatcatcttcttcgaccccgacgcaaaaggcctctccgaccccggcaaaattaaacgacttagagcacaagtacaagtcagcctagaagactacataaatgaccgccaatacgacagcagaggccgcttcggcgagctcctactcctcctccccaccctacaatcaattacctggcagatgatcgaacaaatacaattcataaaacttttcggaatggccaaaatcgacaacctactccaagaaatgctcctcggcggctcccccagcgacgccccccacgcacaccaccccctacacccccacctaatgcaagagcacatgggaaccaacgtcatagtagccaacacaatgcccactcacctcagcaacggccaaatgtgcgaatggccccgcccccgaggacaagccgccacccccgaaaccccccaaccgagcccccccggcggctccggctccgaaccctacaaactcctccctggcgccgtagccacgatagtaaaaccgctctccgccatcccccaaccgacaataacgaaacaagaagtaatctaa

SEQ ID NO: 1460 - RNA, 1314 nt, synthetic construct
  misc_feature 1..1314: note = CDS (opt11) from Homo sapiens__NP_000448.3__HNF4A(39-474)(S142A_S143A_S313A_K458R )
  source 1..1314: mol_type = other RNA
atggacacatccccctccgagggcaccaacctcaacgcccccaactctctcggcgtctctgccctctgcgccatctgcggcgaccgcgccaccggaaaacactacggagccagctcatgcgacggctgcaaaggattctttcgacgctccgttagaaaaaaccacatgtactcatgccgtttctctcgccaatgcgtcgtcgacaaagacaaacgtaaccagtgccgctactgccgcctaaaaaaatgcttccgcgcaggcatgaaaaaagaagccgtccaaaacgagagagaccgcatatccacccgccgagccgcctacgaagactcttcactaccgtccataaacgccctcctacaagccgaagtcctatcacgacaaataacctcccccgtcagcggcatcaacggcgacatcagagccaagaaaatagcctctatagcagacgtatgcgaatcaatgaaagaacaactcctagtactagtcgaatgggccaaatacattcccgccttctgcgaactgccactcgacgaccaagtggccctactccgtgcccacgccggcgaacatttactcctcggcgccaccaaacgatcaatggtattcaaagacgtactactcctcggcaacgactacatagtcccccgccactgccccgaactcgccgaaatgtcacgtgtctctatccggatcctagacgaactcgtcctccccttccaagaactccaaatcgacgacaacgaatacgcctacctaaaagccatcatattcttcgatcccgacgccaagggtctctccgacccaggaaaaatcaaacgcctacgcgcacaagtacaagtatccctcgaagactacatcaacgaccgacaatacgacagccgcggccgattcggcgaactactccttctcctccccacactacaatcaataacctggcaaatgatcgaacaaatccagttcataaaactctttggcatggccaaaatagacaacctcctccaggaaatgctcctcggaggaagcccctccgacgccccccacgcccaccacccactccacccccacctcatgcaagagcacatgggcaccaacgtcatcgtcgccaacaccatgcccacacacctatcaaacggccaaatgtgtgaatggcccagacctcgcggccaagccgccacacccgaaaccccacaaccctcccccccggggggctcaggctccgaaccctacaaactcctcccaggtgccgtcgccacaatcgtacgacccctctccgccatccctcaaccaacaataaccaaacaagaagtcatctaa

SEQ ID NO: 1461 - RNA, 1314 nt, synthetic construct
  misc_feature 1..1314: note = CDS (opt11) from Homo sapiens__NP_000448.3__HNF4A(39-474)(S142A_S143A_S167A_S313A _S378A_T429A_T432A_S436A_K458R)
  source 1..1314: mol_type = other RNA
atggacacatcgccaagcgaaggaaccaaccttaacgccccaaactccctgggcgtctccgccctttgcgccatctgcggagaccgcgccacaggcaaacactatggcgcctccagctgcgacggctgcaaaggcttcttccgacgctcagtacggaaaaaccacatgtactcatgccgcttctcacgccaatgcgtcgtcgacaaagacaaacgcaaccaatgccgctactgccgactcaaaaaatgcttccgcgcaggcatgaaaaaggaagccgtccaaaacgaacgcgaccgtatctcaacccgacgtgctgcatacgaagactcatccctcccctccatcaacgccctactccaggccgaagtcctgagtcgacaaatcacagcccccgtctcaggcatcaacggcgacatccgagcaaagaaaatcgcctctatagccgacgtctgcgaatcaatgaaagaacaactcctcgtcctcgtagaatgggccaaatacatccccgcattctgcgaactacccctcgacgaccaagtcgccctactaagagcccacgccggcgaacaccttctgcttggcgccacaaaacgcagcatggtattcaaagacgtactactcctcggcaacgactacatcgtaccccgacactgccccgaactcgccgaaatgtcccgcgtctccatacgcatcctagacgaactggtcctccccttccaggaactccaaatcgacgacaacgaatacgcctacctcaaagccatcatattcttcgacccagacgcaaaaggcctcagcgaccccggcaaaatcaaaagactccgcgcccaagtacaagtcagcctagaagattacataaacgaccgccaatacgatagcagaggccgattcggcgaactcctcctactcctacccacactacaatcaatcacctggcaaatgatagaacaaatccaattcatcaagctattcggcatggcaaaaattgacaacctactacaagaaatgctcctcggcggcgccccaagcgacgcaccacacgcccaccaccccctccacccgcacctcatgcaagaacacatgggcaccaacgtcatcgtcgccaacacaatgcccacacacctctccaatggacaaatgtgcgaatggccacgcccacgaggccaagcggccgcgcccgaagccccacaacctgccccgcccggaggctctggaagcgaaccctacaaactactccccggcgcagtcgccacgatagtccgcccactatccgccatcccccagcccacaataaccaaacaagaagtcatataa

SEQ ID NO: 1462 - RNA, 1314 nt, synthetic construct
  misc_feature 1..1314: note = CDS (opt11) from Homo sapiens__NP_000448.3__HNF4A(39-474)(S142A_S143A_S148A_S167A _S313A_S378A_T429A_T432A_S436A_K458R)
  source 1..1314: mol_type = other RNA
atggacacctccccatccgaaggcaccaacctcaacgcccccaactcactaggagtctccgccctttgcgccatctgcggcgaccgcgccacaggaaaacactacggcgcgtcaagctgcgatggatgcaaaggtttcttccgtcgttccgtccgcaaaaaccacatgtattcctgccgattctcgcgccaatgcgtcgtcgacaaagacaaacgaaaccaatgccgatactgccgcctcaaaaagtgcttccgcgccggcatgaagaaagaagccgtccaaaacgaacgcgacagaatatcaacccgacgagccgcctacgaagactcagccctcccctcaataaatgccctcctccaagcagaggtcctttccagacagatcaccgcccccgtctccggcatcaacggcgacatcagagccaagaaaatcgcctccatcgccgacgtctgcgaatccatgaaagaacaacttctagttctcgtcgaatgggccaaatacatccccgccttctgcgaactaccccttgacgaccaagtcgctctcctgcgcgcccacgccggcgaacacctccttctcggagcaactaaacgctccatggtgttcaaagacgtcctcctcctcggcaacgactacatcgtcccccgacactgccccgaactagctgaaatgtcacgcgtcagcatcagaatcctcgacgaactcgtcctccccttccaagaactccaaatcgatgacaacgagtacgcctatcttaaagccatcatattcttcgacccagacgcaaaaggtctctccgaccccggcaaaataaaacgactccgcgcccaagtccaagtttccctcgaagactacatcaacgaccgacaatacgattcccgcggccgattcggcgaactcctcctactccttcccaccctccagtccataacatggcaaatgatcgaacaaatccaattcataaaactcttcggcatggccaaaatagacaacctcctccaagagatgctactcggcggtgctccatccgacgccccacacgcacaccaccccctccacccccacctcatgcaagagcacatgggcaccaacgtcatagtagcaaacaccatgcctacccacctatccaacggacaaatgtgcgaatggccccgcccacggggccaagccgccgcccccgaagccccacaacccgccccacccggaggatccggcagcgaaccctacaaactactacccggtgccgtcgccacaatcgtccgccccctatccgccataccacagcccaccatcaccaaacaagaagtcatatag

SEQ ID NO: 1463 - RNA, 1314 nt, synthetic construct
  misc_feature 1..1314: note = CDS (opt11) from Homo sapiens__NP_000448.3__HNF4A(39-474)(K106R_K108R_K126R_K127R _S142A_S143A_S148A_S167A_S313A_S378A_T429A_T432A_S436A_K458 R)
  source 1..1314: mol_type = other RNA
atggacacctcaccatccgaaggcacaaacctaaacgcccccaactcacttggcgtttcggccctctgcgccatatgcggagaccgcgccaccggcaaacactacggagcatcctcctgcgacggctgtaaaggcttcttcagacgatccgtacgcaaaaaccacatgtactcctgccgcttcagcagacaatgcgtcgtcgaccgcgaccgccgcaaccaatgccgctactgccgcctaaagaaatgcttccgcgcaggcatgcgccgagaagcagtccaaaacgaacgagaccgaataagcacccgcagagccgcgtacgaagactccgccctcccatcaatcaacgcacttctacaagccgaagtactctcccgccaaataaccgccccagtatccggaatcaacggcgacatccgcgccaagaaaatcgcttccatagcagacgtctgtgaatccatgaaagagcaactcctcgtcctcgtcgagtgggccaaatacatccccgccttctgcgagctacccctcgacgaccaagtcgccctcctccgagcccacgctggcgaacacctcctactcggcgccaccaaaagatccatggttttcaaagacgtactccttctgggaaacgactacatcgtacccaggcactgccccgagctagccgaaatgtccagagtctcaatccgcatactcgacgagctcgtccttccctttcaagaacttcaaatagacgacaacgaatacgcatacctgaaagccatcatcttcttcgaccccgacgccaaaggactatccgacccaggcaaaatcaaacgcctacgagcacaagtacaagtctccctagaagactacataaacgaccgccaatacgactcgagaggccgcttcggcgaactactccttctcctccctaccctacaaagcatcacctggcaaatgatcgaacaaatccaattcataaaactcttcggaatggccaaaatcgacaatttactccaggaaatgttactcggcggcgcaccatccgacgcaccccacgcccaccaccccctacacccccacctcatgcaagaacacatgggaaccaatgtcatagtcgccaacacaatgcctacacatctctccaacggccaaatgtgcgaatggccgcgtccccgaggacaagcagccgcccccgaagcaccccagcccgccccgcccggcggatccggatcagaaccctacaaactcctcccaggcgccgtcgcaaccatcgtccgccccctctcagcaatcccccaacccaccatcaccaaacaagaagtcatctaa

SEQ ID NO: 1464 - RNA, 1314 nt, synthetic construct
  misc_feature 1..1314: note = CDS (opt11) from Homo sapiens__NP_000448.3__HNF4A(39-474)(S142A_S143A_S148A_T166A _S167A_S313A_S378A_T429A_T432A_S436A_K458R)
  source 1..1314: mol_type = other RNA
atggacacctccccctcagaaggaaccaacctaaatgcccccaactctctcggcgtctccgctctctgcgccatctgcggcgaccgagccaccggaaaacactacggagcctcctcctgcgacgggtgcaaaggcttcttcagaagatccgtccgcaaaaaccacatgtactcatgccggttctcccgacaatgcgtagtcgacaaagacaaacgcaaccaatgccgctactgccgcctcaaaaaatgctttcgcgccggcatgaagaaagaagcagtacaaaacgaaagagacagaatctcaactcgcagagccgcctacgaagactcggcgctcccctctatcaacgccctgcttcaagccgaagtcctctcacgccaaatcgccgcacccgtatccggaatcaacggcgatatccgcgcaaaaaaaatcgcatccatcgccgacgtctgcgaatccatgaaggaacaactgctagtcctcgtagaatgggccaaatacatccctgccttctgtgaactccccctagacgatcaagtcgccctcctacgcgcccacgccggcgagcacctactacttggagccaccaaacgttctatggtcttcaaagacgtactcttactcggcaacgactacatagtcccccgccactgcccagaactggccgaaatgagccgcgtctcaatacgaatcctagacgaactcgtgctaccattccaagaactacaaatcgacgacaacgaatacgcatacctaaaagctattatcttcttcgaccccgacgccaaaggcctatccgaccccggcaaaataaaacgcctgcgagcccaagtacaagtaagcctcgaagactacatcaacgaccgacagtacgactcccgaggccgcttcggcgaactcctacttctcctccccaccctacaatccatcacctggcaaatgatagaacaaatccaattcatcaaactcttcggaatggcaaaaatcgataacctgctccaagaaatgctcctcggcggagccccaagcgatgcaccacacgcacaccacccactacacccacacctcatgcaagaacacatgggaaccaacgtcatagtcgccaacacaatgccaacccacctatccaacggccaaatgtgcgaatggccccgcccccgcggtcaagcagcagctcccgaagcacctcaaccagccccccccggaggctccggctccgaaccttacaaactcctcccaggagccgtcgccacaatcgtaagacccctctcagccatcccccaaccaaccatcacaaaacaagaagtgatataa

SEQ ID NO: 1465 - RNA, 1314 nt, synthetic construct
  misc_feature 1..1314: note = CDS (opt11) from Homo sapiens__NP_000448.3__HNF4A(39-474)(S87A_S142A_S143A_S148A_ T166A_S167A_S313A_S378A_T429A_T432A_S436A_K458R)
  source 1..1314: mol_type = other RNA
atggacacctcaccatcagaaggtacaaacctcaacgcccctaactcactcggcgtatctgcactatgcgcaatatgcggagaccgtgccactggcaaacactacggagcctcatcatgtgacggctgcaaaggcttcttccgacgtgcagtccgcaaaaaccatatgtactcctgccgattctcccgacaatgcgtcgtagacaaagacaaacgaaaccaatgccggtactgccgcctaaagaaatgcttccgcgccgggatgaagaaagaagccgtacaaaacgaacgagatcgcatctccacacgccgagccgcctacgaagactccgccctcccctccatcaacgccctactccaggccgaagtactgtcgcgccaaatcgccgcgccagtttccggaataaacggcgacatccgcgccaagaaaatcgcctcaatcgcagacgtatgcgaatccatgaaagaacaactcctcgtcctcgtagaatgggccaaatacatccccgcattctgcgaactacccctagatgaccaagtagcactattacgcgctcacgccggagaacacctcctcctcggagccactaaacgctccatggtcttcaaagacgtcctcctcctcggcaacgactacatcgtaccccgccactgccccgaactcgcagaaatgtcaagggtctccataagaatcctagacgagctagtcctaccgttccaagaactccaaatcgacgacaatgaatacgcatacctcaaagccataatcttcttcgacccagacgccaaaggcctctcagaccccggcaaaatcaaacgactacgcgcccaggtccaagtctccctagaagactacatcaacgacagacaatacgacagccgagggagattcggcgaactcctcctactcctccccaccctccaatcaataacatggcaaatgatcgaacaaatccagttcatcaaactcttcggcatggccaaaatcgacaacctactccaagaaatgctcctcggaggcgccccaagcgacgcaccccacgcacaccaccccctccacccacacctcatgcaagaacacatgggaaccaacgtcatagtagcaaacacaatgcccacccacctctcaaacggccaaatgtgcgaatggccccgcccacgaggccaagcagcggcccccgaagctccccaacccgcccctcccggagggtccggcagcgaaccctacaaactcctcccaggcgcagtagccaccatcgtacgcccgctttccgcaatacctcagcccacaatcacaaaacaagaagtaatataa

SEQ ID NO: 1466 - RNA, 1314 nt, synthetic construct
  misc_feature 1..1314: note = CDS (opt11) from Homo sapiens__NP_000448.3__HNF4A(39-474)(S87A_K106R_K108R_K126R_ K127R_S142A_S143A_S148A_T166A_S167A_S313A_S378A_T429A_T432A _S436A_K458R)
  source 1..1314: mol_type = other RNA
atggacacctccccatccgaaggtaccaacttaaacgcccccaactccttaggcgtctccgccctctgcgcaatctgcggcgaccgagctacaggtaaacactacggcgcatcaagctgtgacggctgcaaaggcttcttccgacgagccgtccgcaaaaaccacatgtactcatgcagattctcccgacaatgcgtcgtggacagagaccgacgaaaccaatgccgctactgccgcctcaaaaaatgcttccgcgccggcatgcgacgtgaagcagtccaaaacgaacgtgatcgcataagcactagacgcgccgcctacgaagactccgccctgccctccatcaacgccctactacaagccgaagtccttagcagacaaatagccgccccagtctccggaataaacggagacatacgtgccaaaaaaatagcatccatcgccgacgtatgcgaaagcatgaaagaacaactccttgtcctagtagaatgggctaaatacatccccgcattctgcgaactccccctagacgaccaagtagccctcctccgagcacacgccggcgaacacctcctactcggcgccacaaaaagaagcatggtcttcaaagacgtcctacttctaggaaacgactacatcgtccctcgccactgccccgaactcgccgagatgagtagagtctctatcagaatcctcgacgaactcgtactcccattccaagaactacaaatagacgacaacgaatacgcctacctcaaagcgatcatcttcttcgaccccgacgccaaaggcctatcagaccccggcaaaatcaaaagactccgcgcccaagtacaagtctccctagaagactacatcaacgaccgccagtacgacagccgaggccgattcggcgaactacttctactcctcccaacactacaatcaatcacctggcagatgatcgaacaaatccaattcatcaaactattcggcatggccaaaatagacaaccttctacaagaaatgctcctaggcggcgcccccagcgacgcaccacacgcacaccacccccttcacccccacctaatgcaagagcacatgggcaccaacgtcattgtagccaacacaatgcccacccacctctcgaacggtcaaatgtgcgaatggccccgcccacgcggccaagcagccgcacccgaagcaccccaaccagccccacccggaggatccggttcggaaccctacaaactcctacccggcgccgtggccacaatagtaagacccctctcagcaatcccccaacccaccatcaccaaacaagaagtcatctaa

SEQ ID NO: 1467 - RNA, 1314 nt, synthetic construct
  misc_feature 1..1314: note = CDS (opt11) from Homo sapiens__NP_000448.3__HNF4A(39-474)(S87A_K106R_K108R_K126R_ K127R)
  source 1..1314: mol_type = other RNA
atggacaccagcccatctgaaggtaccaacctcaacgcaccaaactccctcggcgtttcagctctatgcgccatatgcggagaccgcgccaccggcaaacactacggagcctcctcttgcgacggctgcaaaggcttcttccgcagagccgtacgcaaaaaccacatgtacagctgtagattttcccgccaatgcgtcgtcgaccgcgaccgccgcaaccagtgcagatattgccgactcaagaaatgcttccgcgcaggaatgcgccgcgaagccgtacaaaacgaacgcgaccgcatctccacacgccgctcatcttacgaagactcctccctaccaagcatcaacgcactacttcaagcagaagtcctatcccgacaaatcacctcccccgtctcaggcataaacggcgacataagggcaaagaaaatcgcctccatagccgacgtatgcgaatcaatgaaagaacaactcctagtcctcgtcgaatgggccaaatacatccccgccttctgcgaactgcccctcgacgaccaagtagcacttctccgcgcccacgccggcgaacacctcctactcggcgccaccaaacgttccatggtcttcaaagacgtcctcctacttggtaacgactacatcgtaccccgccactgccctgaactcgcagaaatgtcccgcgtctcaataagaatcctcgacgagctagttctccccttccaagaactacaaatcgacgacaacgaatacgcctacctcaaagccatcatatttttcgaccccgacgccaaaggcctttccgaccccggcaaaataaaacgcctccgctctcaagtccaggtcagcctcgaagactacatcaacgaccgccaatacgactctcgtggccgcttcggagaactactactactcctccccacactacaatccatcacctggcaaatgatcgaacaaatccaattcatcaaactcttcggcatggccaaaattgacaacctactccaagaaatgctcctaggcggctccccatccgacgcaccccacgcccaccaccccctccacccccacctcatgcaagaacacatgggaaccaacgtaatcgtcgcaaacacaatgccaacccacctatccaacggtcaaatgtgcgaatggccacgaccccgcggccaagcagctacccccgaaaccccacaaccctcaccaccaggaggcagcggttccgaaccatacaaactcctacccggggccgtcgccaccatcgtaaaacccctctccgccatcccccaacctacaatcaccaaacaagaagtcatctaa

SEQ ID NO: 1468 - RNA, 1314 nt, synthetic construct
  misc_feature 1..1314: note = CDS (opt11) from Homo sapiens__NP_000448.3__HNF4A(39-474)(S87A_K106R_K108R_K126R_ K127R_S142A_S143A_S148A_T166A_S167A_S313A_S378A_T429A_T432A _S436A_K458R_S461A)
  source 1..1314: mol_type = other RNA
atggacacctctcccagcgaaggcacaaacctcaacgcccccaactcactcggggtctccgccctctgcgccatatgcggtgaccgtgcaaccggcaaacactacggcgcctcatcctgcgacggctgcaaaggattcttccgacgcgccgtacgcaaaaaccacatgtactcctgcagattctcacgccaatgcgtcgtggaccgagaccgccgcaaccaatgccgttactgccgcctcaagaaatgcttccgagccggaatgcgaagagaagccgtacaaaacgaacgcgaccgcatctccacacgacgagcagcctacgaagactccgccctaccctccataaacgcactcctccaagccgaagtactctcccgacaaatagccgcaccagtctccggcataaacggagacatccgagcaaagaaaatagcctcaatcgccgacgtatgcgaatcaatgaaagaacaacttctcgtcctcgtcgaatgggccaaatatatacccgccttctgcgaactccccctagacgaccaagtggcccttcttcgcgcccacgccggcgaacacctcctactcggagccaccaaacgctccatggtcttcaaagacgtactactcctcggtaacgactacatcgtcccacgacactgccccgaactagccgaaatgtcacgcgtctccatccgcatcctagacgaactcgtactcccattccaagaactccaaatcgacgacaacgaatacgcatacctcaaagccatcatcttcttcgacccagacgccaaaggcctatccgacccaggaaaaataaaacgcttacgcgcacaagtccaagtctccctcgaagactacatcaacgaccgtcagtacgacagccgggggagattcggcgaactgctactactacttcccaccctccaatccatcacctggcaaatgatagaacaaatacaattcatcaaactattcggcatggccaaaatcgacaacctcctacaagaaatgctactcggcggcgccccctccgacgcaccccacgcccaccaccccctccacccccatctaatgcaagaacacatgggcacaaacgtcatcgttgccaacacaatgcccacccacctttccaacggccaaatgtgcgaatggccacgcccccgtggccaagccgccgcccccgaagccccacaaccggccccaccaggtggatccggctcggaaccctacaaactactcccaggagcggtcgctaccatcgtacgccctttggccgccatcccccaacccacaatcaccaaacaagaagttatctag

SEQ ID NO: 1469 - RNA, 1314 nt, synthetic construct
  misc_feature 1..1314: note = CDS (opt11) from Homo sapiens__NP_000448.3__HNF4A(39-474)(S87A_K106R_K108R_K126R_ K127R_S142A_S143A_S148A_T166A_S167A_S313A_S378A_T429A_T432A _S436A_K458R_S461E)
  source 1..1314: mol_type = other RNA
atggacacctcaccatccgaaggcacaaacctcaacgccccgaactccctaggagtctcagccctctgcgccatatgcggcgaccgagccacaggcaaacactacggcgcctcatcgtgcgacggatgcaaaggattcttccgacgagctgtccgcaaaaaccacatgtactcctgccgcttctcccgccaatgcgtcgttgaccgcgaccggcgcaaccaatgcagatactgccgactcaagaaatgcttccgcgcaggcatgcgacgagaagccgtccaaaacgaacgcgaccgcatctcaaccagacgcgccgcctacgaagactctgcactccccagcatcaacgccctcctgcaagccgaagtattatcccgacagatcgccgcccccgtatccggcatcaacggcgacatccgcgccaagaaaatcgcctccatcgcagatgtctgcgaaagcatgaaagaacaattactcgtactcgtcgaatgggcaaaatacatccccgcattctgcgaactccccctcgacgaccaagtcgccctattacgcgcccacgcaggagaacaccttctcttaggcgcaacgaaacgcagcatggtcttcaaagacgtcctactcctcggcaacgactacatcgtcccccgtcactgccccgaactcgccgaaatgtcccgcgtatccatccgcatcctcgacgaactcgtcctaccattccaagaactccaaatcgacgacaacgaatacgcctacctcaaagcaatcatcttcttcgaccccgacgcaaaaggactatccgaccccggcaaaatcaaacgcctccgcgcacaagtccaagtctccctcgaagactacataaacgacagacaatacgacagccgaggcagattcggagaacttctcctcctcctccccacactacaatccatcacatggcaaatgatcgaacaaatacaattcatcaaactcttcggcatggcaaaaatcgacaacctgctccaagaaatgctacttggcggagcccccagcgacgccccacacgcacaccaccccctccacccccacctcatgcaagagcacatgggcaccaacgtcatcgtagccaacacaatgcccacacacctctccaacggccaaatgtgcgaatggccccgtccccgcggccaagccgcagcccccgaagcaccacaacccgcacctccaggcggcagcggctctgaaccctacaaactcctccccggcgcagtcgccacaatcgtccgccccctagaggccataccccaacccacaattaccaaacaagaggtaatctaa

SEQ ID NO: 1470 - RNA, 1314 nt, synthetic construct
  misc_feature 1..1314: note = CDS (opt11) from Homo sapiens__NP_000448.3__HNF4A(39-474)(S87A_K106R_K108R_K126R_ K127R_S142A_S143A_S148E_T166A_S167E_S313A_S378E_T429E_T432E _S436E_K458R_S461E)
  source 1..1314: mol_type = other RNA
atggacacaagccccagcgaagggaccaacctcaacgcgccaaacagcctaggcgtctcagccctatgtgccatctgcggagacagagccaccggcaaacactacggagcctcatcctgcgacggatgcaaaggcttcttccgacgcgccgtccgcaaaaaccacatgtactcctgccgtttctcccgacaatgcgtcgtagaccgcgaccgccgcaaccaatgccgctattgccgcctaaagaaatgcttccgcgccggcatgcgacgcgaagccgtccagaacgagcgcgaccgaatctccacacgtcgcgctgcctacgaagactctgaactcccctcgataaacgcactgctccaagccgaagttctatcacgccaaatagccgaacccgtcagcggcatcaacggcgacatccgcgccaagaaaatcgcatcaatcgcagatgtatgcgaatccatgaaagaacagctcctcgtcctcgtagaatgggctaaatacatccccgccttctgtgagctccccctcgacgaccaggtagccctgctaagagcccatgccggcgaacacctcctccttggcgccactaaacgatcaatggtattcaaagacgtcctcctactaggaaacgactacatagtccccagacactgccccgaacttgcagaaatgagccgagtctccatccgcatcttagacgaactcgtcctcccattccaagaactccagatcgacgacaacgaatacgcataccttaaagcaataatcttcttcgaccccgacgccaaaggactatcagaccccgggaaaattaaaagactccgagcacaagtccaagtctcactcgaagactacatcaacgatcgccaatacgactcacgcggacgatttggcgaactcctcctgttactccccaccctacaaagcatcacctggcaaatgatcgaacaaatccagttcataaaactcttcggaatggccaaaatcgacaacctgctccaagaaatgctcctcggcggcgaaccctccgacgcaccccacgcccaccaccccctccacccacacctaatgcaagaacacatgggaaccaacgtcatagtcgccaacaccatgccaacacacctctcgaacggccaaatgtgcgaatggccccgaccacgcggccaagccgctgaacccgaagaaccccaacccgaacccccaggaggctccggctccgaaccctacaaactcctccctggcgccgtcgcaaccatagtacgccccctagaagctatcccacaacccacaataaccaaacaagaagtcatctga

SEQ ID NO: 1471 - RNA, 1314 nt, synthetic construct
  misc_feature 1..1314: note = CDS (opt11) from Homo sapiens__NP_000448.3__HNF4A(39-474)(S87A_K106R_K108R_K126R_ K127R_S142A_S143A_S148A_T166A_S167A_K179R_K180R_S313A_S378A _T429A_T432A_S436A_K458R_S461E)
  source 1..1314: mol_type = other RNA
atggacacatccccctcagaaggaaccaacctcaacgcacccaactccctcggagtttccgccctatgcgcaatctgcggcgatcgagccaccggcaaacactacggcgcctcgtcttgcgacggctgcaaaggcttcttccgccgcgccgtcagaaaaaaccacatgtactcatgccggttctccagacaatgcgtcgtcgaccgagaccgccgaaaccaatgcaggtactgccgcctgaaaaaatgcttccgcgcaggcatgcgccgcgaagccgtccaaaacgagcgagaccgaatctcaacgcgacgcgccgcctacgaagactcagccctcccatccatcaacgcactactacaagccgaagtactatcccgacaaatagccgcaccagtctcaggaatcaacggagacatacgcgccagacgaatagcctccattgccgacgtatgcgaaagcatgaaagaacaactactcgttctcgtcgagtgggccaaatacattcccgctttctgcgaattacccctagacgaccaagtcgccctcctcagagcccacgcaggcgaacacctcctactcggagccaccaaacgatccatggtcttcaaagacgtcttactcctcggcaacgactacatcgtccccagacactgtcccgaactcgccgaaatgtcccgcgtctccatccgaatcctcgacgaactcgtactccccttccaggaactccaaatcgacgacaacgaatacgcctacctaaaagccatcatttttttcgaccctgatgccaaaggcctctctgaccccggcaaaatcaaacgactacgcgcccaagtccaagtctcactcgaagactacatcaacgatcgccagtacgactcccgaggccgcttcggtgaactcctcctcctcctgcccaccctacaatcaataacttggcaaatgatcgaacaaatacaattcatcaaactcttcggcatggccaaaattgacaacctcctacaagaaatgcttctcggcggagcacccagcgatgccccacacgcccaccaccccctccacccacacctcatgcaagaacacatgggcaccaacgtaatcgtcgccaacacaatgcccacacacctctccaacggacaaatgtgcgaatggccccgcccccgaggccaagcagccgccccagaagcaccccaacccgccccacccggaggctcaggctctgaaccctacaaactcctcccaggagcagtcgcaaccatcgtccggcccctcgaagcaatcccccaacccacaatcacaaaacaagaggtaatctag

SEQ ID NO: 1472 - RNA, 1314 nt, synthetic construct
  misc_feature 1..1314: note = CDS (opt11) from Homo sapiens__NP_000448.3__HNF4A(39-474)(S87A_K106R_K108R_K126R_ K127R_S142A_S143A_S148A_T166A_S167A_K300R_K307R_K309R_S313A _S378A_T429A_T432A_S436A_K458R_S461E)
  source 1..1314: mol_type = other RNA
atggacacatccccatcagaagggaccaacctaaacgcccccaactccctcggcgtctccgcactctgcgcaatctgcggcgacagagccaccggaaaacactacggcgcctcctcatgcgacggatgcaaaggattcttccgaagagccgtccgaaaaaaccacatgtactcatgccgattctcgcgccaatgcgtcgtcgatcgcgacagacgcaaccaatgccgatactgcagacttaaaaaatgcttccgtgctggcatgcgacgcgaagctgtccaaaatgagcgcgaccgcatatctacccgaagagccgcctacgaagactcagcactaccctcaatcaacgccctactccaggccgaagtcctatcccgacaaatcgcagcccccgtgtccggcataaacggtgacatccgcgccaaaaaaatcgcctcaatagccgacgtctgtgaaagcatgaaagaacaactactagttctcgtcgaatgggcaaaatacatacccgcattctgcgaactcccactagacgaccaagtggccctcctccgagcccatgcaggagaacacctcctcctcggggccacaaaacgctccatggtgttcaaagacgtactactcctaggaaacgactacatcgtaccccgccactgccccgaactagctgaaatgtcacgcgtctcgatccgcatcctcgacgaactcgtcctaccattccaagaactgcaaatcgacgacaacgagtacgcgtacctaaaagcaataatattcttcgaccccgacgcccgcggcctctccgaccccggaagaatcaggcgactccgcgcccaagtccaagtaagcctcgaagactacatcaacgaccgccaatacgactcacgaggcagattcggcgaactactcctcctcctcccaacacttcaatcaatcacctggcaaatgatcgaacaaatccaattcatcaagctattcggcatggccaaaatcgacaacctcctacaagaaatgctactgggaggcgccccctccgacgccccccacgcccaccaccccctacatccacacctcatgcaggaacatatgggaaccaacgtcatcgtcgcaaacaccatgcccacccacctttccaacggccaaatgtgcgaatggccccgcccccgcggccaagcagccgcccccgaagccccccaacccgcaccacccggcggcagtggctcggaaccctacaaactcctccccggcgccgtagccaccatcgtccgaccactagaagcaataccacaacccaccataaccaaacaagaagtaatctaa

SEQ ID NO: 1473 - RNA, 1314 nt, synthetic construct
  misc_feature 1..1314: note = CDS (opt11) from Homo sapiens__NP_000448.3__HNF4A(39-474)(S87A_K106R_K108R_K126R_ K127R_S142A_S143A_S148A_T166A_S167A_S313A_S378A_T429A_T432A _S436A_K447R_K458R_S461E_K470R)
  source 1..1314: mol_type = other RNA
atggacacatccccctccgaaggaacaaacctaaacgcccccaactccctcggtgtgtccgccttatgcgccatctgcggagaccgcgccacaggcaaacactacggcgcatcaagctgcgacggctgtaaaggattcttccgccgcgccgtgcgcaaaaaccacatgtactcatgccgcttctcccgccagtgcgtcgtcgaccgcgaccgccgcaaccaatgccgatactgccgcctcaagaaatgcttccgagccggcatgcgacgagaagcagtccaaaacgaacgcgatcgcatctccacaagacgcgcagcatatgaagactcggccctcccatcaatcaacgccctcctacaagccgaagtactatcccgccaaatcgccgcccccgtctccggcatcaacggcgacatacgcgctaagaaaatcgcctcaatagcagacgtctgcgaatcaatgaaagaacaactgctcgtactcgtggaatgggccaaatacatcccagcgttctgcgaactccccctcgacgaccaagtagcattactacgcgcccacgccggcgaacaccttctactaggagcaaccaaacgatccatggtcttcaaagacgtcctgctcctaggaaatgactacatcgtcccccgccattgccctgaactagcagaaatgtcgcgcgtctcaatccgaatcctcgacgaactcgttctaccattccaagaactacaaatcgacgacaacgaatacgcctaccttaaagcaataatcttcttcgacccagatgcaaaaggcctctccgaccccggcaaaatcaaacgcctacgagcacaagtccaagtctctctcgaagactacatcaacgaccgccaatacgactcacgtggccgcttcggcgaactcctcctcctcctacccacccttcaatcaatcacatggcaaatgatcgaacaaatacaattcataaaactattcggcatggccaaaatcgacaacctcctccaagaaatgctactcggcggtgccccgtccgacgcaccccacgcccaccaccccctccatccacacctcatgcaggaacacatgggaaccaacgtcatcgtcgccaacaccatgcccactcacctcagcaacggacaaatgtgcgaatggccaagaccgcgaggacaagccgccgcccccgaagccccacaacctgcacccccaggaggctccggatcagaaccttaccgcctcctccccggcgccgtcgccacaatcgtacgcccactcgaagccatcccccaaccaaccatcacccgccaagaagtcatctaa

SEQ ID NO: 1474 - RNA, 1314 nt, synthetic construct
  misc_feature 1..1314: note = CDS (opt11) from Homo sapiens__NP_000448.3__HNF4A(39-474)(S87A_K106R_K108R_K126R_ K127R_S142A_S143A_S148A_T166A_S167A_K179R_K180R_K234R_K300R _K307R_K309R_S313A_S378A_T429A_T432A_S436A_K447R_K458R_S461 E_K470R)
  source 1..1314: mol_type = other RNA
atggacacctccccctcggaaggcaccaacctcaacgcccctaactcactcggcgtttccgctctctgcgccatctgcggagaccgagcgacaggaaaacactacggagcctcctcatgcgatggctgcaaaggcttcttccgccgcgcagtacgcaaaaaccacatgtactcatgcagattctcaagacaatgcgtcgtcgaccgcgaccgacgcaaccaatgccgatactgccgcctcaagaaatgcttccgcgccggcatgcgccgagaagcagtccaaaacgaacgcgacagaataagtactcgccgagccgcatacgaagacagcgccctaccatccatcaacgcactcctccaagccgaagtcctatcacgacaaatcgcagctcccgtttccggcatcaacggcgatatccgcgcaagacgaatagcaagcattgcagacgtctgcgaatcaatgaaagaacaactcctcgtcctcgtcgaatgggccaaatacatccccgcattctgcgaactccccctcgacgaccaagtcgccctactaagagcccacgccggcgaacacctcctcctaggcgctacccgacgctccatggtattcaaagacgtcctactcctaggtaacgactacatcgtaccccgccactgccccgaactcgcagaaatgagcagagtttcaatccgcatcctagacgagctagttctccccttccaagaacttcaaatcgacgataacgaatacgcctacctaaaagccatcatcttcttcgacccagacgcccgaggcctctccgacccaggacgaataagaagactacgcgcccaagtacaagtttccctcgaagattacatcaacgacagacagtacgactccagaggccgattcggtgaactcctcctgctactccccaccctccaaagcataacatggcaaatgatcgaacaaatccaattcatcaaactcttcggcatggccaaaatcgacaacctcctacaagaaatgctactgggcggtgcaccctccgacgccccacacgctcaccaccccctccacccccatcttatgcaagaacacatgggaaccaatgtcatcgtcgcaaacacaatgcccacccacctaagcaacggccaaatgtgcgaatggcccagaccacgcggccaagcagccgcccccgaagccccacaaccagcccctcccggaggatcaggatctgaaccctaccgactactccccggagccgtcgccaccatcgtccgccccctcgaagcaataccacaaccgaccataacgcgccaagaagtcatctaa

SEQ ID NO: 1475 - RNA, 1314 nt, synthetic construct
  misc_feature 1..1314: note = CDS (opt11) from Homo sapiens__NP_000448.3__HNF4A(39-474)(S87A_S95A_S99A_K106R_K1 08R_K126R_K127R_S142A_S143A_S148A_T166A_S167A_S313A_S378A_T 429A_T432A_S436A_K458R_S461E)
  source 1..1314: mol_type = other RNA
atggatacctccccatccgaaggaaccaacctcaacgccccaaactcactaggcgtctccgccctctgcgccatctgcggcgaccgcgccaccggcaaacactacggcgcctcttcctgtgacggatgcaaaggctttttccggcgcgcagtccgcaaaaaccacatgtacgcctgccgtttcgcccgacagtgcgtagtcgaccgcgaccgtcgaaaccaatgcagatactgccgactaaagaaatgcttccgcgccggcatgcgcagagaagcagtacaaaacgaacgagaccgcatctcaacccgccgtgcggcatatgaagactcggccctaccatccatcaacgccctgctccaagccgaagtattatcccgccaaatcgcagcccccgttagtggaatcaacggcgacatccgagccaagaaaatcgcctccatagccgacgtctgcgagagcatgaaagaacaactcctcgtactcgtagaatgggcaaaatacatacccgccttctgcgaactccccctagacgaccaagtagccctactccgagcccacgccggtgaacatctactcctcggagccaccaaaagatccatggtattcaaagacgtcctcctcctaggcaacgactacatcgtcccccgccactgccccgaactcgccgaaatgtcccgcgtctcaatccgcatactggacgagctcgtactccccttccaagaactacaaatcgacgacaacgaatacgcttacctaaaagcaatcatcttcttcgacccagacgcgaaaggcctatcagatcccggcaaaatcaaacgcctacgcgcacaagtacaagtatcccttgaagactacataaacgaccgacaatacgacagccggggccgtttcggagaacttctcctcctcctacccacactccaatccattacctggcaaatgatagaacaaatccaattcatcaaactcttcggaatggccaagatcgacaacctcctccaagaaatgctactcggaggcgcccccagtgacgctccccacgcccatcaccccctccacccccacctaatgcaagaacacatgggcaccaacgtcatagtcgccaacaccatgccaacccacctctcaaacggccaaatgtgcgaatggcctcgccccagaggccaagcggccgcccccgaagccccacaacccgccccacccggcggctccggatcagaaccatacaaactcctacccggcgccgtagccactatcgtacgaccactcgaagccatcccacaacccacaatcaccaaacaagaagtcatctaa

SEQ ID NO: 1476 - RNA, 1314 nt, synthetic construct
  misc_feature 1..1314: note = CDS (opt11) from Homo sapiens__NP_000448.3__HNF4A(39-474)(S87A_K106R_K108R_K126R_ K127R_S138A_T139A_S142A_S143A_S148A_T166A_S167A_S313A_S378A _T429A_T432A_S436A_K458R_S461E)
  source 1..1314: mol_type = other RNA
atggacacctctccttccgaaggcaccaacctcaacgccccaaactccctcggcgtctccgccttgtgcgccatctgcggcgaccgagccacaggaaaacactacggagcctcctcctgcgatggctgcaaaggcttcttccgccgcgcagtaagaaaaaaccacatgtactcatgccgcttctcccgccagtgcgtcgtagaccgcgaccgccgcaaccaatgccgctactgccgcctcaaaaaatgcttccgagccggaatgcgaagagaagccgtccaaaacgaacgcgaccgcatcgccgcccgacgggccgcatacgaggatagcgccctcccaagcatcaatgctcttctccaagccgaggtcctttcccgtcaaatcgcagcccccgtatccggaatcaacggagacatacgcgccaaaaaaatcgcaagcatcgccgacgtctgcgaaagcatgaaagaacaactcctcgtactcgtcgaatgggccaaatacataccagccttctgcgaactacccctcgacgatcaagtagccctcctacgagcccacgccggagaacacctcctacttggcgccacaaaacgaagcatggttttcaaggacgtcctcctcctcggcaacgactacatagtaccccgccactgccccgaactagcagaaatgtcccgggtatcgatccgcatactagacgaactagtcctcccctttcaagaactccaaatcgatgacaacgaatacgcttacctgaaagcaataatcttcttcgaccctgacgccaaaggcctctccgacccaggaaaaataaaacgcctccgcgcccaagtacaagtctccctagaagactacataaacgaccgacaatacgactcccgaggacgattcggcgaactactattattactacctacactacaatccatcacctggcaaatgatcgaacaaatccaattcatcaaactattcggcatggccaaaatcgacaacctactccaagaaatgctcctaggcggcgcccccagcgacgccccacacgcccaccaccccctccacccccacctaatgcaagaacacatgggcacaaacgtcatagtagccaacaccatgcccacccacctcagcaacggccaaatgtgcgagtggccccgaccacgcggccaagccgcagcccctgaagccccccaacctgccccccccggcggctccggctccgaaccatacaaactactccccggggccgtcgccacaatcgtcagacccctcgaagcaatcccccaacctacaatcaccaaacaagaagtaatttaa

SEQ ID NO: 1477 - RNA, 1314 nt, synthetic construct
  misc_feature 1..1314: note = CDS (opt11) from Homo sapiens__NP_000448.3__HNF4A(39-474)(S87A_S95A_S99A_K106R_K1 08R_K126R_K127R_S138A_T139A_S142A_S143A_S148A_T166A_S167A_S 313A_S378A_T429A_T432A_S436A_K458R_S461E)
  source 1..1314: mol_type = other RNA
atggacacctcccccagcgaaggcaccaacctaaacgcccctaactcactcggagtgtccgcactatgcgcaatctgcggggaccgcgccaccggcaaacactacggcgcctccagctgcgacggctgcaaaggcttcttccgccgagccgtccgcaagaaccacatgtacgcctgccgcttcgctcgccaatgcgtcgtagaccgagaccgcagaaaccaatgcagatactgcagactcaagaaatgcttccgcgccggcatgcgacgcgaagccgtacaaaacgaacgcgaccgcatcgccgctcgtcgagcagcctatgaagactcagcccttccctcaataaacgcactactccaagccgaagtcctcagccgacaaatcgccgccccagtctcaggcatcaacggcgacatccgcgccaagaaaatagcctccatcgcggacgtctgcgagtccatgaaagaacaactcctagttctggtcgaatgggctaaatacatccccgcattctgcgaactcccactcgacgaccaagtagccctactccgagcccacgcaggagaacacctactcctaggagccacaaaacgttccatggtatttaaagacgtcctcctactaggcaacgactacatcgtcccccgccactgccccgaactcgccgaaatgtcccgcgtctccatccgcatcctagacgagctcgtactcccattccaagaactccaaatagacgacaacgaatacgcctacctaaaagccatcatcttcttcgatccagacgcaaaaggcctctcagacccaggcaaaatcaaaagacttagagcccaagtccaagtatcactcgaagactacatcaacgaccgacaatacgactcccgcggaaggttcggcgaactcctcctcctcctccccacactacaatccatcacctggcaaatgatagaacaaattcaattcataaaactattcggcatggccaagatagacaacctcctccaagaaatgctcctcggcggagccccctccgacgcaccccacgcccaccaccccctacacccccacctgatgcaagaacacatgggaacaaacgtaatcgtagccaacaccatgccgacacatctctctaacggccaaatgtgcgaatggccacgcccacgcggccaagccgcagcccccgaagcaccacaaccagccccacccggaggctccggatccgaaccctacaagttgctccccggcgccgtagccacaatcgtccgccccctagaggccataccacaacccacaatcacaaaacaagaagtcatataa

SEQ ID NO: 1478 - RNA, 1314 nt, synthetic construct
  misc_feature 1..1314: note = CDS (opt28) from Homo sapiens__NP_000448.3__HNF4A(39-474)
  source 1..1314: mol_type = other RNA
atggacacatctcccagtgagggcactaacctgaatgcccctaactcactgggggtgagcgctctgtgcgcaatctgcggagacagggccaccggcaaacactacggggcttcctcttgtgatggatgcaagggctttttcagacgcagcgtccggaaaaatcatatgtacagttgccgattttcaaggcagtgcgtggtggacaaggacaagagaaaccagtgccgctattgtcggctgaaaaagtgcttcagggcaggaatgaaaaaggaagccgtccagaatgagagagatcgaatttccacacggcgcagctcttacgaagacagctccctgccaagtatcaacgctctgctgcaggcagaggtgctgtcaaggcagatcactagccccgtgtctgggattaacggcgatatcagagccaagaaaattgcttccatcgcagacgtctgcgaaagcatgaaggagcagctgctggtgctggtggagtgggccaaatacatccctgcattttgcgaactgccactggacgatcaggtcgctctgctgcgggcccacgcaggagagcatctgctgctgggcgctaccaagcgaagtatggtgttcaaggacgtgctgctgctggggaatgactatattgtccccaggcactgccctgaactggccgagatgtcaagagtgtctatccgcatcctggatgaactggtgctgccattccaggagctgcagattgacgataacgaatacgcatacctgaaagctatcatctttttcgaccccgacgccaagggactgtccgatcctggcaaaattaagcggctgaggagccaggtccaggtgagtctggaggactatatcaatgacagacagtacgatagccgagggcggtttggagaactgctgctgctgctgccaacactgcagtccattacctggcagatgatcgagcagatccagttcattaaactgttcggcatggcaaagatcgacaacctgctgcaggagatgctgctgggagggtcaccctctgatgcccctcatgctcaccacccactgcatccccacctgatgcaggaacatatgggcactaatgtgatcgtcgcaaacacaatgcctacccacctgagcaatggacagatgtgtgagtggccacgccccaggggccaggccgcaactcctgaaaccccacagccctcccctccagggggatctggcagcgagccctacaagctgctgcctggagctgtggccacaattgtgaaaccactgagtgcaatcccccagcctaccattactaagcaggaagtcatctga

SEQ ID NO: 1479 - RNA, 1314 nt, synthetic construct
  misc_feature 1..1314: note = CDS (opt28) from Homo sapiens__NP_000448.3__HNF4A(39-474)(S313A)
  source 1..1314: mol_type = other RNA
atggacacatctccctcagagggcactaacctgaatgcccctaacagtctgggggtgagcgctctgtgcgcaatctgcggagacagggccaccggcaaacactacggggcttcctcttgtgatggatgcaagggctttttcagacgcagcgtccggaaaaatcatatgtactcatgccgatttagtaggcagtgcgtggtggacaaggacaagagaaaccagtgccgctattgtcggctgaaaaagtgcttcagggcaggaatgaaaaaggaagccgtccagaatgagagagatcgaatttccacacggcgcagctcttacgaagacagctccctgccatcaatcaacgctctgctgcaggcagaggtgctgagtaggcagatcactagccccgtgtctgggattaacggcgatatcagagccaagaaaattgcatccatcgctgacgtctgcgaaagcatgaaggagcagctgctggtgctggtggagtgggccaaatacatccctgcattttgcgaactgccactggacgatcaggtcgctctgctgcgggcccacgcaggagagcatctgctgctgggcgctaccaagcgatcaatggtgttcaaggacgtgctgctgctggggaatgactatattgtccccaggcactgccctgaactggccgagatgagtagagtgtctatccgcatcctggatgaactggtgctgccattccaggagctgcagattgacgataacgaatacgcatacctgaaagctatcatctttttcgaccccgacgccaagggactgtccgatcctggcaaaattaagcggctgagggcacaggtccaggtgagcctggaggactatatcaatgacagacagtacgatagccgagggcggtttggagaactgctgctgctgctgccaacactgcagtccattacctggcagatgatcgagcagatccagttcattaaactgttcggcatggccaagatcgacaacctgctgcaggagatgctgctgggagggtcaccctctgatgctcctcatgcacaccacccactgcatccccacctgatgcaggaacatatgggcactaatgtgatcgtcgccaacacaatgcctacccacctgagtaatggacagatgtgtgagtggccacgccccaggggccaggcagctactcctgaaaccccacagcccagccctccagggggatccggctctgagccctacaagctgctgcctggagcagtggccacaattgtgaaaccactgagcgctatcccccagcctaccattactaagcaggaagtcatctga

SEQ ID NO: 1480 - RNA, 1314 nt, synthetic construct
  misc_feature 1..1314: note = CDS (opt28) from Homo sapiens__NP_000448.3__HNF4A(39-474)(S313E)
  source 1..1314: mol_type = other RNA
atggacacatctccctcagagggcactaacctgaatgcccctaacagtctgggggtgagcgctctgtgcgcaatctgcggagacagggccaccggcaaacactacggggcttcctcttgtgatggatgcaagggctttttcagacgcagcgtccggaaaaatcatatgtactcatgccgatttagtaggcagtgcgtggtggacaaggacaagagaaaccagtgccgctattgtcggctgaaaaagtgcttcagggcaggaatgaaaaaggaagccgtccagaatgagagagatcgaatttccacacggcgcagctcttacgaagacagctccctgccatcaatcaacgctctgctgcaggcagaggtgctgagtaggcagatcactagccccgtgtctgggattaacggcgatatcagagccaagaaaattgcatccatcgctgacgtctgcgaaagcatgaaggagcagctgctggtgctggtggagtgggccaaatacatccctgcattttgcgaactgccactggacgatcaggtcgctctgctgcgggcccacgcaggagagcatctgctgctgggcgctaccaagcgatcaatggtgttcaaggacgtgctgctgctggggaatgactatattgtccccaggcactgccctgaactggccgagatgagtagagtgtctatccgcatcctggatgaactggtgctgccattccaggagctgcagattgacgataacgaatacgcatacctgaaagctatcatctttttcgaccccgacgccaagggactgtccgatcctggcaaaattaagcggctgagggagcaggtccaggtgagcctggaagactatatcaatgacagacagtacgatagccgagggcggtttggagagctgctgctgctgctgccaacactgcagtccattacctggcagatgatcgagcagatccagttcattaaactgttcggcatggcaaagatcgacaacctgctgcaggaaatgctgctgggagggtcaccctctgatgcccctcatgctcaccacccactgcatccccacctgatgcaggagcatatgggcactaatgtgatcgtcgcaaacacaatgcctacccacctgagtaatggacagatgtgtgaatggccacgccccaggggccaggccgcaactcctgagaccccacagcccagccctccagggggatccggctctgaaccctacaagctgctgcctggagctgtggcaacaattgtgaaaccactgagcgccatcccccagcctaccattactaagcaggaggtcatctga

SEQ ID NO: 1481 - RNA, 1314 nt, synthetic construct
  misc_feature 1..1314: note = CDS (opt28) from Homo sapiens__NP_000448.3__HNF4A(39-474)(S142A_S143A)
  source 1..1314: mol_type = other RNA
atggacacatctccctcagagggcactaacctgaatgcccctaacagtctgggggtgagcgctctgtgcgcaatctgcggagacagggccaccggcaaacactacggggcttcctcttgtgatggatgcaagggctttttcagacgcagcgtccggaaaaatcatatgtactcatgccgatttagtaggcagtgcgtggtggacaaggacaagagaaaccagtgccgctattgtcggctgaaaaagtgcttcagggcaggaatgaaaaaggaagccgtccagaatgagagagatcgaatttccacacggcgcgctgcatacgaagacagctctctgccaagcatcaacgccctgctgcaggcagaggtgctgtccaggcagatcacttcacccgtgagtgggattaacggcgatatcagagctaagaaaattgccagcatcgcagacgtctgcgaatctatgaaggagcagctgctggtgctggtggagtgggctaaatacatccctgccttttgcgaactgccactggacgatcaggtcgcactgctgcgggctcacgccggagagcatctgctgctgggcgcaaccaagcgatccatggtgttcaaggacgtgctgctgctggggaatgactatattgtccccaggcactgccctgaactggctgagatgagcagagtgtcaatccgcatcctggatgaactggtgctgccattccaggagctgcagattgacgataacgaatacgcctacctgaaagcaatcatctttttcgaccccgacgccaagggactgagtgatcctggcaaaattaagcggctgaggtctcaggtccaggtgtccctggaggactatatcaatgacagacagtacgatagccgagggcggtttggagaactgctgctgctgctgccaacactgcagagcattacctggcagatgatcgagcagatccagttcattaaactgttcggcatggctaagatcgacaacctgctgcaggagatgctgctgggagggtccccctcagatgcacctcatgcccaccacccactgcatccccacctgatgcaggaacatatgggcactaatgtgatcgtcgcaaacacaatgcctacccacctgtctaatggacagatgtgtgagtggccacgccccaggggccaggctgcaactcctgaaaccccacagcccagtcctccagggggaagcggctccgagccctacaagctgctgcctggagccgtggctacaattgtgaaaccactgtctgcaatcccccagcctaccattactaagcaggaagtcatctga

SEQ ID NO: 1482 - RNA, 1314 nt, synthetic construct
  misc_feature 1..1314: note = CDS (opt28) from Homo sapiens__NP_000448.3__HNF4A(39-474)(S142E_S143E)
  source 1..1314: mol_type = other RNA
atggacacatctccctcagagggcactaacctgaatgcccctaacagtctgggggtgagcgctctgtgcgcaatctgcggagacagggccaccggcaaacactacggggcttcctcttgtgatggatgcaagggctttttcagacgcagcgtccggaaaaatcatatgtactcatgccgatttagtaggcagtgcgtggtggacaaggacaagagaaaccagtgccgctattgtcggctgaaaaagtgcttcagggcaggaatgaaaaaggaagccgtccagaatgagagagatcgaatttccacacggcgcgaagagtacgaagacagctctctgccaagcatcaacgctctgctgcaggcagaggtgctgtccaggcagatcacttcacccgtgagtgggattaacggcgatatcagagccaagaaaattgcaagcatcgctgacgtctgcgagtctatgaaggaacagctgctggtgctggtggagtgggccaaatacatccctgcattttgcgaactgccactggacgatcaggtcgctctgctgcgggcccacgcaggagagcatctgctgctgggcgctaccaagcgatccatggtgttcaaggacgtgctgctgctggggaatgactatattgtccccaggcactgccctgaactggccgagatgagcagagtgtcaatccgcatcctggatgaactggtgctgccattccaggagctgcagattgacgataacgaatacgcatacctgaaagctatcatctttttcgaccccgacgccaagggactgagtgatcctggcaaaattaagcggctgaggtctcaggtccaggtgtccctggaggactatatcaatgacagacagtacgatagccgagggcggtttggagagctgctgctgctgctgccaacactgcagagcattacctggcagatgatcgaacagatccagttcattaaactgttcggcatggcaaagatcgacaacctgctgcaggagatgctgctgggagggtccccctcagatgcccctcatgctcaccacccactgcatccccacctgatgcaggaacatatgggcactaatgtgatcgtcgcaaacacaatgcctacccacctgtctaatggacagatgtgtgagtggccacgccccaggggccaggccgcaactcctgaaaccccacagcccagtcctccagggggaagcggctccgagccctacaagctgctgcctggagctgtggcaacaattgtgaaaccactgtctgccatcccccagcctaccattactaagcaggaagtcatctga

SEQ ID NO: 1483 - RNA, 1314 nt, synthetic construct
  misc_feature 1..1314: note = CDS (opt28) from Homo sapiens__NP_000448.3__HNF4A(39-474)(S143A)
  source 1..1314: mol_type = other RNA
atggacacatctccctcagagggcactaacctgaatgcccctaacagtctgggggtgagcgctctgtgcgcaatctgcggagacagggccaccggcaaacactacggggcttcctcttgtgatggatgcaagggctttttcagacgcagcgtccggaaaaatcatatgtactcatgccgatttagtaggcagtgcgtggtggacaaggacaagagaaaccagtgccgctattgtcggctgaaaaagtgcttcagggcaggaatgaaaaaggaagccgtccagaatgagagagatcgaatttccacacggcgcagcgcttacgaagactctagcctgccatccatcaacgcactgctgcaggccgaggtgctgtcaaggcagatcaccagtcccgtgagcgggattaacggcgatatcagagcaaagaaaattgcttctatcgccgacgtctgcgaatccatgaaggagcagctgctggtgctggtggagtgggcaaaatacatccctgctttttgcgaactgccactggacgatcaggtcgccctgctgcgggcacacgctggagagcatctgctgctgggcgccactaagcgaagcatggtgttcaaggacgtgctgctgctggggaatgactatattgtccccaggcactgccctgaactggcagagatgtcaagagtgagtatccgcatcctggatgaactggtgctgccattccaggagctgcagattgacgataacgaatacgcttacctgaaagccatcatctttttcgaccccgacgcaaagggactgtctgatcctggcaaaattaagcggctgaggtcccaggtccaggtgagcctggaggactatatcaatgacagacagtacgatagccgagggcggtttggagaactgctgctgctgctgccaacactgcagtccattacctggcagatgatcgagcagatccagttcattaaactgttcggcatggccaagatcgacaacctgctgcaggagatgctgctgggagggtcaccctctgatgctcctcatgcacaccacccactgcatccccacctgatgcaggaacatatgggcactaatgtgatcgtcgccaacacaatgcctacccacctgagtaatggacagatgtgtgagtggccacgccccaggggccaggcagctactcctgaaaccccacagcccagccctccagggggatccggctctgagccctacaagctgctgcctggagcagtggccacaattgtgaaaccactgagcgctatcccccagcctaccattactaagcaggaagtcatctga

SEQ ID NO: 1484 - RNA, 1314 nt, synthetic construct
  misc_feature 1..1314: note = CDS (opt28) from Homo sapiens__NP_000448.3__HNF4A(39-474)(T166A)
  source 1..1314: mol_type = other RNA
atggacacatctccctcagagggcactaacctgaatgcccctaacagtctgggggtgagcgctctgtgcgcaatctgcggagacagggccaccggcaaacactacggggcttcctcttgtgatggatgcaagggctttttcagacgcagcgtccggaaaaatcatatgtactcatgccgatttagtaggcagtgcgtggtggacaaggacaagagaaaccagtgccgctattgtcggctgaaaaagtgcttcagggcaggaatgaaaaaggaagccgtccagaatgagagagatcgaatttccacacggcgcagctcttacgaagacagctccctgccatcaatcaacgctctgctgcaggcagaggtgctgagtaggcagatcgccagccccgtgtctgggattaacggcgatatcagagcaaagaaaattgcttccatcgccgacgtctgcgaaagcatgaaggagcagctgctggtgctggtggagtgggcaaaatacatccctgctttttgcgaactgccactggacgatcaggtcgccctgctgcgggcacacgctggagagcatctgctgctgggcgccactaagcgatcaatggtgttcaaggacgtgctgctgctggggaatgactatattgtccccaggcactgccctgaactggcagagatgagtagagtgtctatccgcatcctggatgaactggtgctgccattccaggagctgcagattgacgataacgaatacgcttacctgaaagccatcatctttttcgaccccgacgcaaagggactgtccgatcctggcaaaattaagcggctgaggagccaggtccaggtgagcctggaggactatatcaatgacagacagtacgattcccgagggcggtttggagaactgctgctgctgctgccaaccctgcagtcaattacatggcagatgatcgagcagatccagttcattaaactgttcggcatggccaagatcgacaacctgctgcaggagatgctgctgggagggtctcccagtgatgctcctcatgcacaccacccactgcatccccacctgatgcaggaacatatgggcaccaatgtgatcgtcgccaacactatgcctacacacctgagcaatggacagatgtgtgagtggccacgccccaggggccaggcagctacccctgaaactccacagccctcccctccagggggatctggcagcgagccctacaagctgctgcctggagcagtggccaccattgtgaaaccactgtcagctatcccccagcctacaattaccaagcaggaagtcatctga

SEQ ID NO: 1485 - RNA, 1314 nt, synthetic construct
  misc_feature 1..1314: note = CDS (opt28) from Homo sapiens__NP_000448.3__HNF4A(39-474)(S167E)
  source 1..1314: mol_type = other RNA
atggacacatctccctcagagggcactaacctgaatgcccctaacagtctgggggtgagcgctctgtgcgcaatctgcggagacagggccaccggcaaacactacggggcttcctcttgtgatggatgcaagggctttttcagacgcagcgtccggaaaaatcatatgtactcatgccgatttagtaggcagtgcgtggtggacaaggacaagagaaaccagtgccgctattgtcggctgaaaaagtgcttcagggcaggaatgaaaaaggaagccgtccagaatgagagagatcgaatttccacacggcgcagctcttacgaagacagctccctgccatcaatcaacgctctgctgcaggcagaggtgctgagtaggcagatcactgaacccgtgagcgggattaacggcgatatcagagccaagaaaattgcatctatcgctgacgtctgcgagtccatgaaggagcagctgctggtgctggtggaatgggccaaatacatccctgcattttgcgagctgccactggacgatcaggtcgctctgctgcgggcccacgcaggagaacatctgctgctgggcgctaccaagcgaagcatggtgttcaaggacgtgctgctgctggggaatgactatattgtccccaggcactgccctgagctggccgaaatgtcaagagtgagtatccgcatcctggatgagctggtgctgccattccaggaactgcagattgacgataacgagtacgcatacctgaaagctatcatctttttcgaccccgacgccaagggactgtctgatcctggcaaaattaagcggctgaggtcccaggtccaggtgagcctggaagactatatcaatgacagacagtacgatagccgagggcggtttggagagctgctgctgctgctgccaacactgcagtccattacctggcagatgatcgagcagatccagttcattaaactgttcggcatggcaaagatcgacaacctgctgcaggaaatgctgctgggagggtcaccctctgatgcccctcatgctcaccacccactgcatccccacctgatgcaggagcatatgggcactaatgtgatcgtcgcaaacacaatgcctacccacctgagtaatggacagatgtgtgaatggccacgccccaggggccaggccgcaactcctgagaccccacagcccagccctccagggggatccggctctgaaccctacaagctgctgcctggagctgtggcaacaattgtgaaaccactgagcgccatcccccagcctaccattactaagcaggaggtcatctga

SEQ ID NO: 1486 - RNA, 1314 nt, synthetic construct
  misc_feature 1..1314: note = CDS (opt28) from Homo sapiens__NP_000448.3__HNF4A(39-474)(S167A)
  source 1..1314: mol_type = other RNA
atggacacatctccctcagagggcactaacctgaatgcccctaacagtctgggggtgagcgctctgtgcgcaatctgcggagacagggccaccggcaaacactacggggcttcctcttgtgatggatgcaagggctttttcagacgcagcgtccggaaaaatcatatgtactcatgccgatttagtaggcagtgcgtggtggacaaggacaagagaaaccagtgccgctattgtcggctgaaaaagtgcttcagggcaggaatgaaaaaggaagccgtccagaatgagagagatcgaatttccacacggcgcagctcttacgaagacagctccctgccatcaatcaacgctctgctgcaggcagaggtgctgagtaggcagatcactgcccccgtgagcgggattaacggcgatatcagagcaaagaaaattgcttctatcgccgacgtctgcgaatccatgaaggagcagctgctggtgctggtggagtgggcaaaatacatccctgctttttgcgaactgccactggacgatcaggtcgccctgctgcgggcacacgctggagagcatctgctgctgggcgccaccaagcgaagcatggtgttcaaggacgtgctgctgctggggaatgactatattgtccccaggcactgccctgaactggcagagatgtcaagagtgagtatccgcatcctggatgaactggtgctgccattccaggagctgcagattgacgataacgaatacgcttacctgaaagccatcatctttttcgaccccgacgcaaagggactgtctgatcctggcaaaattaagcggctgaggtcccaggtccaggtgagcctggaggactatatcaatgacagacagtacgatagccgagggcggtttggagaactgctgctgctgctgccaacactgcagtccattacctggcagatgatcgagcagatccagttcattaaactgttcggcatggccaagatcgacaacctgctgcaggagatgctgctgggagggtcaccctctgatgctcctcatgcacaccacccactgcatccccacctgatgcaggaacatatgggcactaatgtgatcgtcgccaacacaatgcctacccacctgagtaatggacagatgtgtgagtggccacgccccaggggccaggcagctactcctgaaaccccacagcccagccctccagggggatccggctctgagccctacaagctgctgcctggagcagtggccacaattgtgaaaccactgagcgctatcccccagcctaccattactaagcaggaagtcatctga

SEQ ID NO: 1487 - RNA, 1314 nt, synthetic construct
  misc_feature 1..1314: note = CDS (opt28) from Homo sapiens__NP_000448.3__HNF4A(39-474)(S167A_S378A_T429A_T432A _S436A)
  source 1..1314: mol_type = other RNA
atggacacatctccctcagagggcactaacctgaatgcccctaacagtctgggggtgagcgctctgtgcgcaatctgcggagacagggccaccggcaaacactacggggcttcctcttgtgatggatgcaagggctttttcagacgcagcgtccggaaaaatcatatgtactcatgccgatttagtaggcagtgcgtggtggacaaggacaagagaaaccagtgccgctattgtcggctgaaaaagtgcttcagggcaggaatgaaaaaggaagccgtccagaatgagagagatcgaatttccacacggcgcagctcttacgaagacagctccctgccatcaatcaacgctctgctgcaggcagaggtgctgagtaggcagatcactgcccccgtgagcgggattaacggcgatatcagagcaaagaaaattgcttctatcgccgacgtctgcgaatccatgaaggagcagctgctggtgctggtggagtgggcaaaatacatccctgctttttgcgaactgccactggacgatcaggtcgccctgctgcgggcacacgctggagagcatctgctgctgggcgccaccaagcgaagcatggtgttcaaggacgtgctgctgctggggaatgactatattgtccccaggcactgccctgaactggcagagatgtcaagagtgagtatccgcatcctggatgaactggtgctgccattccaggagctgcagattgacgataacgaatacgcttacctgaaagccatcatctttttcgaccccgacgcaaagggactgtctgatcctggcaaaattaagcggctgaggtcccaggtccaggtgagcctggaggactatatcaatgacagacagtacgatagccgagggcggtttggagaactgctgctgctgctgccaacactgcagtccattacctggcagatgatcgagcagatccagttcattaaactgttcggcatggccaagatcgacaacctgctgcaggagatgctgctgggaggggctccctcagatgcacctcatgcccaccacccactgcatccccacctgatgcaggaacatatgggcactaatgtgatcgtcgcaaacacaatgcctacccacctgtctaatggacagatgtgtgagtggccacgccccaggggccaggctgcagcccctgaagctccacagcccgcacctccagggggaagtggcagcgagccctacaagctgctgcctggagccgtggctactattgtgaaaccactgtccgcaatcccccagcctaccattacaaagcaggaagtcatctga

SEQ ID NO: 1488 - RNA, 1314 nt, synthetic construct
  misc_feature 1..1314: note = CDS (opt28) from Homo sapiens__NP_000448.3__HNF4A(39-474)(S167E_S378E_T429E_T432E _S436E)
  source 1..1314: mol_type = other RNA
atggacacatctccctcagagggcactaacctgaatgcccctaacagtctgggggtgagcgctctgtgcgcaatctgcggagacagggccaccggcaaacactacggggcttcctcttgtgatggatgcaagggctttttcagacgcagcgtccggaaaaatcatatgtactcatgccgatttagtaggcagtgcgtggtggacaaggacaagagaaaccagtgccgctattgtcggctgaaaaagtgcttcagggcaggaatgaaaaaggaagccgtccagaatgagagagatcgaatttccacacggcgcagctcttacgaagacagctccctgccatcaatcaacgctctgctgcaggcagaggtgctgagtaggcagatcactgaacccgtgagcgggattaacggcgatatcagagccaagaaaattgcatctatcgctgacgtctgcgagtccatgaaggagcagctgctggtgctggtggaatgggccaaatacatccctgcattttgcgagctgccactggacgatcaggtcgctctgctgcgggcccacgcaggagaacatctgctgctgggcgctaccaagcgaagcatggtgttcaaggacgtgctgctgctggggaatgactatattgtccccaggcactgccctgagctggccgaaatgtcaagagtgagtatccgcatcctggatgagctggtgctgccattccaggaactgcagattgacgataacgagtacgcatacctgaaagctatcatctttttcgaccccgacgccaagggactgtctgatcctggcaaaattaagcggctgaggtcccaggtccaggtgagcctggaagactatatcaatgacagacagtacgatagccgagggcggtttggagagctgctgctgctgctgccaacactgcagtccattacctggcagatgatcgagcagatccagttcattaaactgttcggcatggcaaagatcgacaacctgctgcaggaaatgctgctgggaggggagccctcagatgcccctcatgctcaccacccactgcatccccacctgatgcaggaacatatgggcactaatgtgatcgtcgcaaacacaatgcctacccacctgtctaatggacagatgtgtgagtggccacgccccaggggccaggccgcagaacctgaggaaccacagcccgagcctccagggggaagtggcagcgagccctacaagctgctgcctggagctgtggcaactattgtgaaaccactgtccgccatcccccagcctaccattacaaagcaggaagtcatctga

SEQ ID NO: 1489 - RNA, 1314 nt, synthetic construct
  misc_feature 1..1314: note = CDS (opt28) from Homo sapiens__NP_000448.3__HNF4A(39-474)(S87A)
  source 1..1314: mol_type = other RNA
atggacacatctccctcagagggcactaacctgaatgcccctaacagtctgggggtgagcgctctgtgcgcaatctgcggagacagggccaccggcaaacactacggggcttcctcttgtgatggatgcaagggctttttcagacgcgcagtccggaaaaatcatatgtacagctgccgattttcaaggcagtgcgtggtggacaaggacaagagaaaccagtgccgctattgtcggctgaaaaagtgcttcagggccggaatgaaaaaggaagctgtccagaatgagagagatcgaattagtacacggcgctccagctacgaagactctagcctgccatccatcaacgcactgctgcaggccgaggtgctgtcaaggcagatcaccagtcccgtgagcgggattaacggcgatatcagagcaaagaaaattgcttctatcgccgacgtctgcgaatccatgaaggagcagctgctggtgctggtggagtgggcaaaatacatccctgctttttgcgaactgccactggacgatcaggtcgccctgctgcgggcacacgctggagagcatctgctgctgggcgccactaagcgaagcatggtgttcaaggacgtgctgctgctggggaatgactatattgtccccaggcactgccctgaactggcagagatgtcaagagtgagtatccgcatcctggatgaactggtgctgccattccaggagctgcagattgacgataacgaatacgcttacctgaaagccatcatctttttcgaccccgacgcaaagggactgtctgatcctggcaaaattaagcggctgaggtcccaggtccaggtgagcctggaggactatatcaatgacagacagtacgatagccgagggcggtttggagaactgctgctgctgctgccaacactgcagtccattacctggcagatgatcgagcagatccagttcattaaactgttcggcatggccaagatcgacaacctgctgcaggagatgctgctgggagggtcaccctctgatgctcctcatgcacaccacccactgcatccccacctgatgcaggaacatatgggcactaatgtgatcgtcgccaacacaatgcctacccacctgagtaatggacagatgtgtgagtggccacgccccaggggccaggcagctactcctgaaaccccacagcccagccctccagggggatccggctctgagccctacaagctgctgcctggagcagtggccacaattgtgaaaccactgagcgctatcccccagcctaccattactaagcaggaagtcatctga

SEQ ID NO: 1490 - RNA, 1314 nt, synthetic construct
  misc_feature 1..1314: note = CDS (opt28) from Homo sapiens__NP_000448.3__HNF4A(39-474)(S87E)
  source 1..1314: mol_type = other RNA
atggacacatctccctcagagggcactaacctgaatgcccctaacagtctgggggtgagcgctctgtgcgcaatctgcggagacagggccaccggcaaacactacggggcttcctcttgtgatggatgcaagggctttttcagacgcgaagtccggaaaaatcatatgtacagctgccgattttcaaggcagtgcgtggtggacaaggacaagagaaaccagtgccgctattgtcggctgaaaaagtgcttcagggcaggaatgaaaaaggaggccgtccagaatgaaagagatcgaattagtacacggcgctccagctacgaggactctagcctgccatccatcaacgctctgctgcaggcagaagtgctgtcaaggcagatcaccagtcccgtgagcgggattaacggcgatatcagagccaagaaaattgcatctatcgctgacgtctgcgagtccatgaaggagcagctgctggtgctggtggaatgggccaaatacatccctgcattttgcgagctgccactggacgatcaggtcgctctgctgcgggcccacgcaggagaacatctgctgctgggcgctactaagcgaagcatggtgttcaaggacgtgctgctgctggggaatgactatattgtccccaggcactgccctgagctggccgaaatgtcaagagtgagtatccgcatcctggatgagctggtgctgccattccaggaactgcagattgacgataacgagtacgcatacctgaaagctatcatctttttcgaccccgacgccaagggactgtctgatcctggcaaaattaagcggctgaggtcccaggtccaggtgagcctggaagactatatcaatgacagacagtacgatagccgagggcggtttggagagctgctgctgctgctgccaacactgcagtccattacctggcagatgatcgagcagatccagttcattaaactgttcggcatggcaaagatcgacaacctgctgcaggaaatgctgctgggagggtcaccctctgatgcccctcatgctcaccacccactgcatccccacctgatgcaggagcatatgggcactaatgtgatcgtcgcaaacacaatgcctacccacctgagtaatggacagatgtgtgaatggccacgccccaggggccaggccgcaactcctgagaccccacagcccagccctccagggggatccggctctgaaccctacaagctgctgcctggagctgtggcaacaattgtgaaaccactgagcgccatcccccagcctaccattactaagcaggaggtcatctga

SEQ ID NO: 1491 - RNA, 1314 nt, synthetic construct
  misc_feature 1..1314: note = CDS (opt28) from Homo sapiens__NP_000448.3__HNF4A(39-474)(R2V)
  source 1..1314: mol_type = other RNA
atggacacatctccctcagagggcactaacctgaatgcccctaacagtctgggggtgagcgctctgtgcgcaatctgcggagaccgggccaccggcaaacactacggggcttcctcttgtgatggatgcaagggctttttcaggagaagcgtgcgcaaaaatcatatgtactcatgccgatttagtcggcagtgcgtggtcgacaaggacaagaggaaccagtgcagatattgtcgcctgaaaaagtgcttccgggcaggaatgaaaaaggaagccgtgcagaatgagagggatagaatttccacacgacggagctcttacgaagacagctccctgccatcaatcaacgctctgctgcaggcagaggtgctgagtcgccagatcactagccccgtctctgggattaacggcgatatcagggccaagaaaattgcatccatcgctgacgtgtgcgaaagcatgaaggagcagctgctggtgctggtcgagtgggccaaatacatccctgcattttgcgaactgccactggacgatcaggtggctctgctgagagcccacgcaggagagcatctgctgctgggcgctaccaagcggtcaatggtgttcaaggacgtcctgctgctggggaatgactatattgtgccccgacactgccctgaactggccgagatgagtagggtgtctatcagaatcctggatgaactggtcctgccattccaggagctgcagattgacgataacgaatacgcatacctgaaagctatcatctttttcgaccccgacgccaagggactgtccgatcctggcaaaattaagcgcctgcggagccaggtccaggtgagcctggaggactatatcaatgacaggcagtacgattccagagggcgatttggagaactgctgctgctgctgccaacactgcagtcaattacctggcagatgatcgagcagatccagttcattaaactgttcggcatggcaaagatcgacaacctgctgcaggagatgctgctgggagggtctcccagtgatgcccctcatgctcaccacccactgcatccccacctgatgcaggaacatatgggcactaatgtgatcgtggcaaacacaatgcctacccacctgagcaatggacagatgtgtgagtggccacggccccgcggccaggccgcaactcctgaaaccccacagccctcccctccagggggatctggcagcgagccctacaagctgctgcctggagctgtggcaacaattgtcaaaccactgtcagccatcccccagcctaccattactaagcaggaagtgatctga

SEQ ID NO: 1492 - RNA, 1314 nt, synthetic construct
  misc_feature 1..1314: note = CDS (opt28) from Homo sapiens__NP_000448.3__HNF4A(39-474)(R2V_K5V)
  source 1..1314: mol_type = other RNA
atggacacatctccctcagagggcactaacctgaatgcccctaacagtctgggggtgagcgctctgtgcgcaatctgcggagaccgggccaccggcaagcactacggggcttcctcttgtgatggatgcaaaggctttttcaggagaagcgtgcgcaagaatcatatgtactcatgccgatttagtcggcagtgcgtcgtggacaaagacaagaggaaccagtgcagatattgtcgcctgaagaaatgcttccgggcaggaatgaagaaagaagccgtgcagaatgagagggatagaatttccacacgacggagctcttacgaagacagctccctgccatcaatcaacgctctgctgcaggcagaggtcctgagtcgccagatcactagccccgtgtctgggattaacggcgatatcagggccaagaagattgcatccatcgctgacgtgtgcgaaagcatgaaagagcagctgctggtcctggtggagtgggccaagtacatccctgcattttgcgaactgccactggacgatcaggtggctctgctgagagcccacgcaggagagcatctgctgctgggcgctaccaaacggtcaatggtcttcaaggacgtgctgctgctggggaatgactatattgtgccccgacactgccctgaactggccgagatgagtagggtctctatcagaatcctggatgaactggtgctgccattccaggagctgcagattgacgataacgaatacgcatacctgaaggctatcatctttttcgaccccgacgccaaaggactgtccgatcctggcaagattaaacgcctgcggagccaggtgcaggtcagcctggaggactatatcaatgacaggcagtacgattccagagggcgatttggagaactgctgctgctgctgccaacactgcagtcaattacctggcagatgatcgagcagatccagttcattaagctgttcggcatggcaaaaatcgacaacctgctgcaggagatgctgctgggagggtctcccagtgatgcccctcatgctcaccacccactgcatccccacctgatgcaggaacatatgggcactaatgtgatcgtggcaaacacaatgcctacccacctgagcaatggacagatgtgtgagtggccacggccccgcggccaggccgcaactcctgaaaccccacagccctcccctccagggggatctggcagcgagccctacaagctgctgcctggagctgtcgcaacaattgtgaagccactgtcagccatcccccagcctaccattactaaacaggaagtcatctga

SEQ ID NO: 1493 - RNA, 1314 nt, synthetic construct
  misc_feature 1..1314: note = CDS (opt28) from Homo sapiens__NP_000448.3__HNF4A(39-474)(K179R_K180R)
  source 1..1314: mol_type = other RNA
atggacacatctccctcagagggcactaacctgaatgcccctaacagtctgggggtgagcgctctgtgcgcaatctgcggagacagggccaccggcaaacactacggggcttcctcttgtgatggatgcaagggctttttcagacgcagcgtccggaaaaatcatatgtactcatgccgatttagtaggcagtgcgtggtggacaaggacaagagaaaccagtgccgctattgtcggctgaaaaagtgcttcagggcaggaatgaaaaaggaagccgtccagaatgagagagatcgaatttccacacggcgcagctcttacgaagacagctccctgccatcaatcaacgctctgctgcaggcagaggtgctgagtaggcagatcactagccccgtgtctgggattaacggcgatatcagagcccggcgaattgcatccatcgctgacgtctgcgaaagcatgaaggagcagctgctggtgctggtggagtgggccaaatacatccctgcattttgcgaactgccactggacgatcaggtcgctctgctgagggcccacgcaggagagcatctgctgctgggcgctaccaagagatcaatggtgttcaaagacgtgctgctgctggggaatgactatattgtcccccgccactgccctgaactggccgagatgagtcgggtgtctatcaggatcctggatgaactggtgctgccattccaggagctgcagattgacgataacgaatacgcatacctgaaggctatcatctttttcgaccccgacgccaagggactgtccgatcctggcaaaattaagagactgcgaagccaggtccaggtgagcctggaggactatatcaatgaccggcagtacgattcccgcgggaggtttggagaactgctgctgctgctgccaacactgcagtcaattacctggcagatgatcgagcagatccagttcattaaactgttcggcatggcaaagatcgacaacctgctgcaggagatgctgctgggagggtctcccagtgatgcccctcatgctcaccacccactgcatccccacctgatgcaggaacatatgggcactaatgtgatcgtcgcaaacacaatgcctacccacctgagcaatggacagatgtgtgagtggccaagaccccggggccaggccgcaactcctgaaaccccacagccctcccctccagggggatctggcagcgagccctacaaactgctgcctggagctgtggcaacaattgtgaagccactgtcagccatcccccagcctaccattactaagcaggaagtcatctga

SEQ ID NO: 1494 - RNA, 1314 nt, synthetic construct
  misc_feature 1..1314: note = CDS (opt28) from Homo sapiens__NP_000448.3__HNF4A(39-474)(K234R)
  source 1..1314: mol_type = other RNA
atggacacatctccctcagagggcactaacctgaatgcccctaacagtctgggggtgagcgctctgtgcgcaatctgcggagacagggccaccggcaaacactacggggcttcctcttgtgatggatgcaagggctttttcagacgcagcgtccggaaaaatcatatgtactcatgccgatttagtaggcagtgcgtggtggacaaggacaagagaaaccagtgccgctattgtcggctgaaaaagtgcttcagggcaggaatgaaaaaggaagccgtccagaatgagagagatcgaatttccacacggcgcagctcttacgaagacagctccctgccatcaatcaacgctctgctgcaggcagaggtgctgagtaggcagatcactagccccgtgtctgggattaacggcgatatcagagccaagaaaattgcatccatcgctgacgtctgcgaaagcatgaaggagcagctgctggtgctggtggagtgggccaaatacatccctgcattttgcgaactgccactggacgatcaggtcgctctgctgcgggcccacgcaggagagcatctgctgctgggcgctacccgaaggtcaatggtgttcaaggacgtgctgctgctggggaatgactatattgtccccagacactgccctgaactggccgagatgagtcgcgtgtctatccggatcctggatgaactggtgctgccattccaggagctgcagattgacgataacgaatacgcatacctgaaggctatcatctttttcgaccccgacgccaaaggactgtccgatcctggcaagattaaaaggctgagaagccaggtccaggtgagcctggaggactatatcaatgaccgacagtacgattcccgggggcgctttggagaactgctgctgctgctgccaacactgcagtcaattacctggcagatgatcgagcagatccagttcattaagctgttcggcatggcaaaaatcgacaacctgctgcaggagatgctgctgggagggtctcccagtgatgcccctcatgctcaccacccactgcatccccacctgatgcaggaacatatgggcactaatgtgatcgtcgcaaacacaatgcctacccacctgagcaatggacagatgtgtgagtggccaaggcccagaggccaggccgcaactcctgaaaccccacagccctcccctccagggggatctggcagcgagccctacaagctgctgcctggagctgtggcaacaattgtgaagccactgtcagccatcccccagcctaccattactaaacaggaagtcatctga

SEQ ID NO: 1495 - RNA, 1314 nt, synthetic construct
  misc_feature 1..1314: note = CDS (opt28) from Homo sapiens__NP_000448.3__HNF4A(39-474)(K300R)
  source 1..1314: mol_type = other RNA
atggacacatctccctcagagggcactaacctgaatgcccctaacagtctgggggtgagcgctctgtgcgcaatctgcggagacagggccaccggcaaacactacggggcttcctcttgtgatggatgcaagggctttttcagacgcagcgtccggaaaaatcatatgtactcatgccgatttagtaggcagtgcgtggtggacaaggacaagagaaaccagtgccgctattgtcggctgaaaaagtgcttcagggcaggaatgaaaaaggaagccgtccagaatgagagagatcgaatttccacacggcgcagctcttacgaagacagctccctgccatcaatcaacgctctgctgcaggcagaggtgctgagtaggcagatcactagccccgtgtctgggattaacggcgatatcagagccaagaaaattgcatccatcgctgacgtctgcgaaagcatgaaggagcagctgctggtgctggtggagtgggccaaatacatccctgcattttgcgaactgccactggacgatcaggtcgctctgctgcgggcccacgcaggagagcatctgctgctgggcgctaccaagcgatcaatggtgttcaaggacgtgctgctgctggggaatgactatattgtccccaggcactgccctgaactggccgagatgagtagagtgtctatccgcatcctggatgaactggtgctgccattccaggagctgcagattgacgataacgaatacgcatacctgaaagctatcatctttttcgaccccgacgcccggggactgtccgatcctggcaagattaaaaggctgagaagccaggtccaggtgagcctggaggactatatcaatgaccgacagtacgattcccgggggcgctttggagaactgctgctgctgctgccaacactgcagtcaattacctggcagatgatcgagcagatccagttcattaagctgttcggcatggcaaaaatcgacaacctgctgcaggagatgctgctgggagggtctcccagtgatgcccctcatgctcaccacccactgcatccccacctgatgcaggaacatatgggcactaatgtgatcgtcgcaaacacaatgcctacccacctgagcaatggacagatgtgtgagtggccaaggcccagaggccaggccgcaactcctgaaaccccacagccctcccctccagggggatctggcagcgagccctacaagctgctgcctggagctgtggcaacaattgtgaagccactgtcagccatcccccagcctaccattactaaacaggaagtcatctga

SEQ ID NO: 1496 - RNA, 1314 nt, synthetic construct
  misc_feature 1..1314: note = CDS (opt28) from Homo sapiens__NP_000448.3__HNF4A(39-474)(K300R_K307R_K309R)
  source 1..1314: mol_type = other RNA
atggacacatctccctcagagggcactaacctgaatgcccctaacagtctgggggtgagcgctctgtgcgcaatctgcggagacagggccaccggcaaacactacggggcttcctcttgtgatggatgcaagggctttttcagacgcagcgtccggaaaaatcatatgtactcatgccgatttagtaggcagtgcgtggtggacaaggacaagagaaaccagtgccgctattgtcggctgaaaaagtgcttcagggcaggaatgaaaaaggaagccgtccagaatgagagagatcgaatttccacacggcgcagctcttacgaagacagctccctgccatcaatcaacgctctgctgcaggcagaggtgctgagtaggcagatcactagccccgtgtctgggattaacggcgatatcagagccaagaaaattgcatccatcgctgacgtctgcgaaagcatgaaggagcagctgctggtgctggtggagtgggccaaatacatccctgcattttgcgaactgccactggacgatcaggtcgctctgctgcgggcccacgcaggagagcatctgctgctgggcgctaccaagcgatcaatggtgttcaaggacgtgctgctgctggggaatgactatattgtccccaggcactgccctgaactggccgagatgagtagagtgtctatccgcatcctggatgaactggtgctgccattccaggagctgcagattgacgataacgaatacgcatacctgaaagctatcatctttttcgaccccgacgcccggggactgtccgatcctggcaggattagacgactgcggagccaggtccaggtgagcctggaggactatatcaatgaccgccagtacgattccagggggagatttggagaactgctgctgctgctgccaacactgcagtcaattacctggcagatgatcgagcagatccagttcattaagctgttcggcatggcaaaaatcgacaacctgctgcaggagatgctgctgggagggtctcccagtgatgcccctcatgctcaccacccactgcatccccacctgatgcaggaacatatgggcactaatgtgatcgtcgcaaacacaatgcctacccacctgagcaatggacagatgtgtgagtggccacggccccgcggccaggccgcaactcctgaaaccccacagccctcccctccagggggatctggcagcgagccctacaagctgctgcctggagctgtggcaacaattgtgaaaccactgtcagccatcccccagcctaccattactaagcaggaagtcatctga

SEQ ID NO: 1497 - RNA, 1314 nt, synthetic construct
  misc_feature 1..1314: note = CDS (opt28) from Homo sapiens__NP_000448.3__HNF4A(39-474)(K447R_K470R)
  source 1..1314: mol_type = other RNA
atggacacatctccctcagagggcactaacctgaatgcccctaacagtctgggggtgagcgctctgtgcgcaatctgcggagacagggccaccggcaaacactacggggcttcctcttgtgatggatgcaagggctttttcagacgcagcgtccggaaaaatcatatgtactcatgccgatttagtaggcagtgcgtggtggacaaggacaagagaaaccagtgccgctattgtcggctgaaaaagtgcttcagggcaggaatgaaaaaggaagccgtccagaatgagagagatcgaatttccacacggcgcagctcttacgaagacagctccctgccatcaatcaacgctctgctgcaggcagaggtgctgagtaggcagatcactagccccgtgtctgggattaacggcgatatcagagccaagaaaattgcatccatcgctgacgtctgcgaaagcatgaaggagcagctgctggtgctggtggagtgggccaaatacatccctgcattttgcgaactgccactggacgatcaggtcgctctgctgcgggcccacgcaggagagcatctgctgctgggcgctaccaagcgatcaatggtgttcaaggacgtgctgctgctggggaatgactatattgtccccaggcactgccctgaactggccgagatgagtagagtgtctatccgcatcctggatgaactggtgctgccattccaggagctgcagattgacgataacgaatacgcatacctgaaagctatcatctttttcgaccccgacgccaagggactgtccgatcctggcaaaattaagcggctgaggagccaggtccaggtgagcctggaggactatatcaatgacagacagtacgattcccgagggcggtttggagaactgctgctgctgctgccaacactgcagtcaattacctggcagatgatcgagcagatccagttcattaaactgttcggcatggcaaagatcgacaacctgctgcaggagatgctgctgggagggtctcccagtgatgcccctcatgctcaccacccactgcatccccacctgatgcaggaacatatgggcactaatgtgatcgtcgcaaacacaatgcctacccacctgagcaatggacagatgtgtgagtggccacgccccaggggccaggccgcaactcctgaaaccccacagccctcccctccagggggatctggcagcgagccctacagactgctgcctggagctgtggcaacaattgtgaagccactgtcagccatcccccagcctaccattactcggcaggaagtcatctga

SEQ ID NO: 1498 - RNA, 1314 nt, synthetic construct
  misc_feature 1..1314: note = CDS (opt28) from Homo sapiens__NP_000448.3__HNF4A(39-474)(K458R)
  source 1..1314: mol_type = other RNA
atggacacatctccctcagagggcactaacctgaatgcccctaacagtctgggggtgagcgctctgtgcgcaatctgcggagacagggccaccggcaaacactacggggcttcctcttgtgatggatgcaagggctttttcagacgcagcgtccggaaaaatcatatgtactcatgccgatttagtaggcagtgcgtggtggacaaggacaagagaaaccagtgccgctattgtcggctgaaaaagtgcttcagggcaggaatgaaaaaggaagccgtccagaatgagagagatcgaatttccacacggcgcagctcttacgaagacagctccctgccatcaatcaacgctctgctgcaggcagaggtgctgagtaggcagatcactagccccgtgtctgggattaacggcgatatcagagccaagaaaattgcatccatcgctgacgtctgcgaaagcatgaaggagcagctgctggtgctggtggagtgggccaaatacatccctgcattttgcgaactgccactggacgatcaggtcgctctgctgcgggcccacgcaggagagcatctgctgctgggcgctaccaagcgatcaatggtgttcaaggacgtgctgctgctggggaatgactatattgtccccaggcactgccctgaactggccgagatgagtagagtgtctatccgcatcctggatgaactggtgctgccattccaggagctgcagattgacgataacgaatacgcatacctgaaagctatcatctttttcgaccccgacgccaagggactgtccgatcctggcaaaattaagcggctgaggagccaggtccaggtgagcctggaggactatatcaatgacagacagtacgattcccgagggcggtttggagaactgctgctgctgctgccaacactgcagtcaattacctggcagatgatcgagcagatccagttcattaaactgttcggcatggcaaagatcgacaacctgctgcaggagatgctgctgggagggtctcccagtgatgcccctcatgctcaccacccactgcatccccacctgatgcaggaacatatgggcactaatgtgatcgtcgcaaacacaatgcctacccacctgagcaatggacagatgtgtgagtggccacgccccaggggccaggccgcaactcctgaaaccccacagccctcccctccagggggatctggcagcgagccctacaagctgctgcctggagctgtggcaacaattgtgagaccactgtcagccatcccccagcctaccattactaaacaggaagtcatctga

SEQ ID NO: 1499 - RNA, 1314 nt, synthetic construct
  misc_feature 1..1314: note = CDS (opt28) from Homo sapiens__NP_000448.3__HNF4A(39-474)(K106R_K108R_K126R_K127R )
  source 1..1314: mol_type = other RNA
atggacacatctccctcagagggcactaacctgaatgcccctaacagtctgggggtgagcgctctgtgcgcaatctgcggagacagggccaccggcaaacactacggggcttcctcttgtgatggatgcaagggctttttcagacgcagcgtccggaaaaatcatatgtactcatgccgatttagtaggcagtgcgtggtggacagagaccgccggaaccagtgcaggtattgtagactgaagaagtgcttccgagcaggaatgcggcgcgaagccgtccagaatgagagggatagaatttccacacggcgaagctcttacgaagacagctccctgccatcaatcaacgctctgctgcaggcagaggtgctgagtaggcagatcactagccccgtgtctgggattaacggcgatatcagagccaaaaagattgcatccatcgctgacgtctgcgaaagcatgaaagagcagctgctggtgctggtggagtgggccaagtacatccctgcattttgcgaactgccactggacgatcaggtcgctctgctgcgcgcccacgcaggagagcatctgctgctgggcgctaccaagcggtcaatggtgttcaaagacgtgctgctgctggggaatgactatattgtccccaggcactgccctgaactggccgagatgagtagagtgtctatccgaatcctggatgaactggtgctgccattccaggagctgcagattgacgataacgaatacgcatacctgaaggctatcatctttttcgaccccgacgccaaaggactgtccgatcctggcaagattaagcggctgcgcagccaggtccaggtgagcctggaggactatatcaatgacaggcagtacgattccagagggcggtttggagaactgctgctgctgctgccaacactgcagtcaattacctggcagatgatcgagcagatccagttcattaaactgttcggcatggcaaagatcgacaacctgctgcaggagatgctgctgggagggtctcccagtgatgcccctcatgctcaccacccactgcatccccacctgatgcaggaacatatgggcactaatgtgatcgtcgcaaacacaatgcctacccacctgagcaatggacagatgtgtgagtggccacgccccaggggccaggccgcaactcctgaaaccccacagccctcccctccagggggatctggcagcgagccctacaaactgctgcctggagctgtggcaacaattgtgaagccactgtcagccatcccccagcctaccattactaaacaggaagtcatctga

SEQ ID NO: 1500 - RNA, 1314 nt, synthetic construct
  misc_feature 1..1314: note = CDS (opt28) from Homo sapiens__NP_000448.3__HNF4A(39-474)(E285Q)
  source 1..1314: mol_type = other RNA
atggacacatctccctcagagggcactaacctgaatgcccctaacagtctgggggtgagcgctctgtgcgcaatctgcggagacagggccaccggcaaacactacggggcttcctcttgtgatggatgcaagggctttttcagacgcagcgtccggaaaaatcatatgtactcatgccgatttagtaggcagtgcgtggtggacaaggacaagagaaaccagtgccgctattgtcggctgaaaaagtgcttcagggcaggaatgaaaaaggaagccgtccagaatgagagagatcgaatttccacacggcgcagctcttacgaagacagctccctgccatcaatcaacgctctgctgcaggcagaggtgctgagtaggcagatcactagccccgtgtctgggattaacggcgatatcagagccaagaaaattgcatccatcgctgacgtctgcgaaagcatgaaggagcagctgctggtgctggtggagtgggccaaatacatccctgcattttgcgaactgccactggacgatcaggtcgctctgctgcgggcccacgcaggagagcatctgctgctgggcgctaccaagcgatcaatggtgttcaaggacgtgctgctgctggggaatgactatattgtccccaggcactgccctgaactggccgagatgagtagagtgtctatccgcatcctggatgaactggtgctgccattccaggagctgcagattgacgataaccagtacgcatacctgaaagctatcatctttttcgaccccgacgccaagggactgtccgatcctggcaaaattaagcggctgaggagccaggtccaggtgagcctggaagactatatcaatgacagacagtacgattcccgagggcggtttggagagctgctgctgctgctgccaacactgcagtcaattacctggcagatgatcgaacagatccagttcattaaactgttcggcatggcaaagatcgacaacctgctgcaggagatgctgctgggagggtctcccagtgatgcccctcatgctcaccacccactgcatccccacctgatgcaggagcatatgggcactaatgtgatcgtcgcaaacacaatgcctacccacctgagcaatggacagatgtgtgaatggccacgccccaggggccaggccgcaactcctgagaccccacagccctcccctccagggggatctggcagcgaaccctacaagctgctgcctggagctgtggcaacaattgtgaaaccactgtcagccatcccccagcctaccattactaagcaggaggtcatctga

SEQ ID NO: 1501 - RNA, 1314 nt, synthetic construct
  misc_feature 1..1314: note = CDS (opt28) from Homo sapiens__NP_000448.3__HNF4A(39-474)(T166E)
  source 1..1314: mol_type = other RNA
atggacacatctccctcagagggcactaacctgaatgcccctaacagtctgggggtgagcgctctgtgcgcaatctgcggagacagggccaccggcaaacactacggggcttcctcttgtgatggatgcaagggctttttcagacgcagcgtccggaaaaatcatatgtactcatgccgatttagtaggcagtgcgtggtggacaaggacaagagaaaccagtgccgctattgtcggctgaaaaagtgcttcagggcaggaatgaaaaaggaagccgtccagaatgagagagatcgaatttccacacggcgcagctcttacgaagacagctccctgccatcaatcaacgctctgctgcaggcagaggtgctgagtaggcagatcgaaagccccgtgtctgggattaacggcgatatcagagccaagaaaattgcatccatcgctgacgtctgcgagagcatgaaggagcagctgctggtgctggtggaatgggccaaatacatccctgcattttgcgagctgccactggacgatcaggtcgctctgctgcgggcccacgcaggagaacatctgctgctgggcgctactaagcgatcaatggtgttcaaggacgtgctgctgctggggaatgactatattgtccccaggcactgccctgagctggccgaaatgagtagagtgtctatccgcatcctggatgagctggtgctgccattccaggaactgcagattgacgataacgagtacgcatacctgaaagctatcatctttttcgaccccgacgccaagggactgtccgatcctggcaaaattaagcggctgaggagccaggtccaggtgagcctggaagactatatcaatgacagacagtacgattcccgagggcggtttggagagctgctgctgctgctgccaaccctgcagtcaattacatggcagatgatcgagcagatccagttcattaaactgttcggcatggcaaagatcgacaacctgctgcaggaaatgctgctgggagggtctcccagtgatgcccctcatgctcaccacccactgcatccccacctgatgcaggagcatatgggcaccaatgtgatcgtcgcaaacactatgcctacacacctgagcaatggacagatgtgtgaatggccacgccccaggggccaggccgcaacccctgagactccacagccctcccctccagggggatctggcagcgaaccctacaagctgctgcctggagctgtggcaaccattgtgaaaccactgtcagccatcccccagcctacaattaccaagcaggaggtcatctga

SEQ ID NO: 1502 - RNA, 1314 nt, synthetic construct
  misc_feature 1..1314: note = CDS (opt28) from Homo sapiens__NP_000448.3__HNF4A(39-474)(S148A)
  source 1..1314: mol_type = other RNA
atggacacatctccctcagagggcactaacctgaatgcccctaacagtctgggggtgagcgctctgtgcgcaatctgcggagacagggccaccggcaaacactacggggcttcctcttgtgatggatgcaagggctttttcagacgcagcgtccggaaaaatcatatgtactcatgccgatttagtaggcagtgcgtggtggacaaggacaagagaaaccagtgccgctattgtcggctgaaaaagtgcttcagggcaggaatgaaaaaggaagccgtccagaatgagagagatcgaatttccacacggcgcagctcttacgaagacagcgctctgccatccatcaacgcactgctgcaggccgaggtgctgtcaaggcagatcaccagtcccgtgagcgggattaacggcgatatcagagcaaagaaaattgcttctatcgccgacgtctgcgaatccatgaaggagcagctgctggtgctggtggagtgggcaaaatacatccctgctttttgcgaactgccactggacgatcaggtcgccctgctgcgggcacacgctggagagcatctgctgctgggcgccactaagcgaagcatggtgttcaaggacgtgctgctgctggggaatgactatattgtccccaggcactgccctgaactggcagagatgtcaagagtgagtatccgcatcctggatgaactggtgctgccattccaggagctgcagattgacgataacgaatacgcttacctgaaagccatcatctttttcgaccccgacgcaaagggactgtctgatcctggcaaaattaagcggctgaggtcccaggtccaggtgagcctggaggactatatcaatgacagacagtacgatagccgagggcggtttggagaactgctgctgctgctgccaacactgcagtccattacctggcagatgatcgagcagatccagttcattaaactgttcggcatggccaagatcgacaacctgctgcaggagatgctgctgggagggtcaccctctgatgctcctcatgcacaccacccactgcatccccacctgatgcaggaacatatgggcactaatgtgatcgtcgccaacacaatgcctacccacctgagtaatggacagatgtgtgagtggccacgccccaggggccaggcagctactcctgaaaccccacagcccagccctccagggggatccggctctgagccctacaagctgctgcctggagcagtggccacaattgtgaaaccactgagcgctatcccccagcctaccattactaagcaggaagtcatctga

SEQ ID NO: 1503 - RNA, 1314 nt, synthetic construct
  misc_feature 1..1314: note = CDS (opt28) from Homo sapiens__NP_000448.3__HNF4A(39-474)(S148E)
  source 1..1314: mol_type = other RNA
atggacacatctccctcagagggcactaacctgaatgcccctaacagtctgggggtgagcgctctgtgcgcaatctgcggagacagggccaccggcaaacactacggggcttcctcttgtgatggatgcaagggctttttcagacgcagcgtccggaaaaatcatatgtactcatgccgatttagtaggcagtgcgtggtggacaaggacaagagaaaccagtgccgctattgtcggctgaaaaagtgcttcagggcaggaatgaaaaaggaagccgtccagaatgagagagatcgaatttccacacggcgcagctcttacgaagacagcgagctgccatccatcaacgctctgctgcaggcagaagtgctgtcaaggcagatcaccagtcccgtgagcgggattaacggcgatatcagagccaagaaaattgcatctatcgctgacgtctgcgagtccatgaaggagcagctgctggtgctggtggaatgggccaaatacatccctgcattttgcgagctgccactggacgatcaggtcgctctgctgcgggcccacgcaggagaacatctgctgctgggcgctactaagcgaagcatggtgttcaaggacgtgctgctgctggggaatgactatattgtccccaggcactgccctgagctggccgaaatgtcaagagtgagtatccgcatcctggatgagctggtgctgccattccaggaactgcagattgacgataacgagtacgcatacctgaaagctatcatctttttcgaccccgacgccaagggactgtctgatcctggcaaaattaagcggctgaggtcccaggtccaggtgagcctggaagactatatcaatgacagacagtacgatagccgagggcggtttggagagctgctgctgctgctgccaacactgcagtccattacctggcagatgatcgagcagatccagttcattaaactgttcggcatggcaaagatcgacaacctgctgcaggaaatgctgctgggagggtcaccctctgatgcccctcatgctcaccacccactgcatccccacctgatgcaggagcatatgggcactaatgtgatcgtcgcaaacacaatgcctacccacctgagtaatggacagatgtgtgaatggccacgccccaggggccaggccgcaactcctgagaccccacagcccagccctccagggggatccggctctgaaccctacaagctgctgcctggagctgtggcaacaattgtgaaaccactgagcgccatcccccagcctaccattactaagcaggaggtcatctga

SEQ ID NO: 1504 - RNA, 1314 nt, synthetic construct
  misc_feature 1..1314: note = CDS (opt28) from Homo sapiens__NP_000448.3__HNF4A(39-474)(S183A)
  source 1..1314: mol_type = other RNA
atggacacatctccctcagagggcactaacctgaatgcccctaacagtctgggggtgagcgctctgtgcgcaatctgcggagacagggccaccggcaaacactacggggcttcctcttgtgatggatgcaagggctttttcagacgcagcgtccggaaaaatcatatgtactcatgccgatttagtaggcagtgcgtggtggacaaggacaagagaaaccagtgccgctattgtcggctgaaaaagtgcttcagggcaggaatgaaaaaggaagccgtccagaatgagagagatcgaatttccacacggcgcagctcttacgaagacagctccctgccatcaatcaacgctctgctgcaggcagaggtgctgagtaggcagatcactagccccgtgtctgggattaacggcgatatcagagccaagaaaattgcagctatcgccgacgtctgcgaatccatgaaggagcagctgctggtgctggtggagtgggcaaaatacatccctgctttttgcgaactgccactggacgatcaggtcgccctgctgcgggcacacgctggagagcatctgctgctgggcgccaccaagcgaagcatggtgttcaaggacgtgctgctgctggggaatgactatattgtccccaggcactgccctgaactggcagagatgtcaagagtgagtatccgcatcctggatgaactggtgctgccattccaggagctgcagattgacgataacgaatacgcttacctgaaagccatcatctttttcgaccccgacgcaaagggactgtctgatcctggcaaaattaagcggctgaggtcccaggtccaggtgagcctggaggactatatcaatgacagacagtacgatagccgagggcggtttggagaactgctgctgctgctgccaacactgcagtccattacctggcagatgatcgagcagatccagttcattaaactgttcggcatggccaagatcgacaacctgctgcaggagatgctgctgggagggtcaccctctgatgctcctcatgcacaccacccactgcatccccacctgatgcaggaacatatgggcactaatgtgatcgtcgccaacacaatgcctacccacctgagtaatggacagatgtgtgagtggccacgccccaggggccaggcagctactcctgaaaccccacagcccagccctccagggggatccggctctgagccctacaagctgctgcctggagcagtggccacaattgtgaaaccactgagcgctatcccccagcctaccattactaagcaggaagtcatctga

SEQ ID NO: 1505 - RNA, 1314 nt, synthetic construct
  misc_feature 1..1314: note = CDS (opt28) from Homo sapiens__NP_000448.3__HNF4A(39-474)(S183E)
  source 1..1314: mol_type = other RNA
atggacacatctccctcagagggcactaacctgaatgcccctaacagtctgggggtgagcgctctgtgcgcaatctgcggagacagggccaccggcaaacactacggggcttcctcttgtgatggatgcaagggctttttcagacgcagcgtccggaaaaatcatatgtactcatgccgatttagtaggcagtgcgtggtggacaaggacaagagaaaccagtgccgctattgtcggctgaaaaagtgcttcagggcaggaatgaaaaaggaagccgtccagaatgagagagatcgaatttccacacggcgcagctcttacgaagacagctccctgccatcaatcaacgctctgctgcaggcagaggtgctgagtaggcagatcactagccccgtgtctgggattaacggcgatatcagagccaagaaaattgcagaaatcgctgacgtctgcgagtccatgaaggagcagctgctggtgctggtggaatgggccaaatacatccctgcattttgcgagctgccactggacgatcaggtcgctctgctgcgggcccacgcaggagaacatctgctgctgggcgctaccaagcgaagcatggtgttcaaggacgtgctgctgctggggaatgactatattgtccccaggcactgccctgagctggccgaaatgtcaagagtgagtatccgcatcctggatgagctggtgctgccattccaggaactgcagattgacgataacgagtacgcatacctgaaagctatcatctttttcgaccccgacgccaagggactgtctgatcctggcaaaattaagcggctgaggtcccaggtccaggtgagcctggaagactatatcaatgacagacagtacgatagccgagggcggtttggagagctgctgctgctgctgccaacactgcagtccattacctggcagatgatcgagcagatccagttcattaaactgttcggcatggcaaagatcgacaacctgctgcaggaaatgctgctgggagggtcaccctctgatgcccctcatgctcaccacccactgcatccccacctgatgcaggagcatatgggcactaatgtgatcgtcgcaaacacaatgcctacccacctgagtaatggacagatgtgtgaatggccacgccccaggggccaggccgcaactcctgagaccccacagcccagccctccagggggatccggctctgaaccctacaagctgctgcctggagctgtggcaacaattgtgaaaccactgagcgccatcccccagcctaccattactaagcaggaggtcatctga

SEQ ID NO: 1506 - RNA, 1314 nt, synthetic construct
  misc_feature 1..1314: note = CDS (opt28) from Homo sapiens__NP_000448.3__HNF4A(39-474)(S461A)
  source 1..1314: mol_type = other RNA
atggacacatctccctcagagggcactaacctgaatgcccctaacagtctgggggtgagcgctctgtgcgcaatctgcggagacagggccaccggcaaacactacggggcttcctcttgtgatggatgcaagggctttttcagacgcagcgtccggaaaaatcatatgtactcatgccgatttagtaggcagtgcgtggtggacaaggacaagagaaaccagtgccgctattgtcggctgaaaaagtgcttcagggcaggaatgaaaaaggaagccgtccagaatgagagagatcgaatttccacacggcgcagctcttacgaagacagctccctgccatcaatcaacgctctgctgcaggcagaggtgctgagtaggcagatcactagccccgtgtctgggattaacggcgatatcagagccaagaaaattgcatccatcgctgacgtctgcgaaagcatgaaggagcagctgctggtgctggtggagtgggccaaatacatccctgcattttgcgaactgccactggacgatcaggtcgctctgctgcgggcccacgcaggagagcatctgctgctgggcgctaccaagcgatcaatggtgttcaaggacgtgctgctgctggggaatgactatattgtccccaggcactgccctgaactggccgagatgagtagagtgtctatccgcatcctggatgaactggtgctgccattccaggagctgcagattgacgataacgaatacgcatacctgaaagctatcatctttttcgaccccgacgccaagggactgtccgatcctggcaaaattaagcggctgaggagccaggtccaggtgagcctggaggactatatcaatgacagacagtacgattcccgagggcggtttggagaactgctgctgctgctgccaacactgcagtcaattacctggcagatgatcgagcagatccagttcattaaactgttcggcatggcaaagatcgacaacctgctgcaggagatgctgctgggagggtctcccagtgatgcccctcatgctcaccacccactgcatccccacctgatgcaggaacatatgggcactaatgtgatcgtcgcaaacacaatgcctacccacctgagcaatggacagatgtgtgagtggccacgccccaggggccaggccgcaactcctgaaaccccacagccctcccctccagggggatctggcagcgagccctacaagctgctgcctggagctgtggcaacaattgtgaaaccactggccgctatcccccagcctaccattactaagcaggaagtcatctga

SEQ ID NO: 1507 - RNA, 1314 nt, synthetic construct
  misc_feature 1..1314: note = CDS (opt28) from Homo sapiens__NP_000448.3__HNF4A(39-474)(S461E)
  source 1..1314: mol_type = other RNA
atggacacatctccctcagagggcactaacctgaatgcccctaacagtctgggggtgagcgctctgtgcgcaatctgcggagacagggccaccggcaaacactacggggcttcctcttgtgatggatgcaagggctttttcagacgcagcgtccggaaaaatcatatgtactcatgccgatttagtaggcagtgcgtggtggacaaggacaagagaaaccagtgccgctattgtcggctgaaaaagtgcttcagggcaggaatgaaaaaggaagccgtccagaatgagagagatcgaatttccacacggcgcagctcttacgaagacagctccctgccatcaatcaacgctctgctgcaggcagaggtgctgagtaggcagatcactagccccgtgtctgggattaacggcgatatcagagccaagaaaattgcatccatcgctgacgtctgcgaaagcatgaaggagcagctgctggtgctggtggagtgggccaaatacatccctgcattttgcgaactgccactggacgatcaggtcgctctgctgcgggcccacgcaggagagcatctgctgctgggcgctaccaagcgatcaatggtgttcaaggacgtgctgctgctggggaatgactatattgtccccaggcactgccctgaactggccgagatgagtagagtgtctatccgcatcctggatgaactggtgctgccattccaggagctgcagattgacgataacgaatacgcatacctgaaagctatcatctttttcgaccccgacgccaagggactgtccgatcctggcaaaattaagcggctgaggagccaggtccaggtgagcctggaggactatatcaatgacagacagtacgattcccgagggcggtttggagaactgctgctgctgctgccaacactgcagtcaattacctggcagatgatcgagcagatccagttcattaaactgttcggcatggcaaagatcgacaacctgctgcaggagatgctgctgggagggtctcccagtgatgcccctcatgctcaccacccactgcatccccacctgatgcaggaacatatgggcactaatgtgatcgtcgcaaacacaatgcctacccacctgagcaatggacagatgtgtgagtggccacgccccaggggccaggccgcaactcctgaaaccccacagccctcccctccagggggatctggcagcgagccctacaagctgctgcctggagctgtggcaacaattgtgaaaccactggaagccatcccccagcctaccattactaagcaggaggtcatctga

SEQ ID NO: 1508 - RNA, 1314 nt, synthetic construct
  misc_feature 1..1314: note = CDS (opt28) from Homo sapiens__NP_000448.3__HNF4A(39-474)(S142A_S143A_S313A)
  source 1..1314: mol_type = other RNA
atggacacatctccctcagagggcactaacctgaatgcccctaacagtctgggggtgagcgctctgtgcgcaatctgcggagacagggccaccggcaaacactacggggcttcctcttgtgatggatgcaagggctttttcagacgcagcgtccggaaaaatcatatgtactcatgccgatttagtaggcagtgcgtggtggacaaggacaagagaaaccagtgccgctattgtcggctgaaaaagtgcttcagggcaggaatgaaaaaggaagccgtccagaatgagagagatcgaatttccacacggcgcgctgcatacgaagacagctctctgccaagcatcaacgccctgctgcaggcagaggtgctgtccaggcagatcacttcacccgtgagtgggattaacggcgatatcagagctaagaaaattgccagcatcgcagacgtctgcgaatctatgaaggagcagctgctggtgctggtggagtgggctaaatacatccctgccttttgcgaactgccactggacgatcaggtcgcactgctgcgggctcacgccggagagcatctgctgctgggcgcaaccaagcgatccatggtgttcaaggacgtgctgctgctggggaatgactatattgtccccaggcactgccctgaactggctgagatgagcagagtgtcaatccgcatcctggatgaactggtgctgccattccaggagctgcagattgacgataacgaatacgcctacctgaaagcaatcatctttttcgaccccgacgccaagggactgagtgatcctggcaaaattaagcggctgagggctcaggtccaggtgtctctggaggactatatcaatgacagacagtacgattcccgagggcggtttggagaactgctgctgctgctgccaacactgcagagcattacctggcagatgatcgagcagatccagttcattaaactgttcggcatggcaaagatcgacaacctgctgcaggagatgctgctgggagggagcccctccgatgcccctcatgcacaccacccactgcatccccacctgatgcaggaacatatgggcactaatgtgatcgtcgctaacacaatgcctacccacctgtcaaatggacagatgtgtgagtggccacgccccaggggccaggcagccactcctgaaaccccacagccctctcctccagggggaagtggcagcgagccctacaagctgctgcctggagctgtggcaacaattgtgaaaccactgtccgccatcccccagcctaccattactaagcaggaagtcatctga

SEQ ID NO: 1509 - RNA, 1314 nt, synthetic construct
  misc_feature 1..1314: note = CDS (opt28) from Homo sapiens__NP_000448.3__HNF4A(39-474)(S142A_S143A_S313A_K458R )
  source 1..1314: mol_type = other RNA
atggacacatctccctcagagggcactaacctgaatgcccctaacagtctgggggtgagcgctctgtgcgcaatctgcggagacagggccaccggcaaacactacggggcttcctcttgtgatggatgcaagggctttttcagacgcagcgtccggaaaaatcatatgtactcatgccgatttagtaggcagtgcgtggtggacaaggacaagagaaaccagtgccgctattgtcggctgaaaaagtgcttcagggcaggaatgaaaaaggaagccgtccagaatgagagagatcgaatttccacacggcgcgctgcatacgaagacagctctctgccaagcatcaacgccctgctgcaggcagaggtgctgtccaggcagatcacttcacccgtgagtgggattaacggcgatatcagagctaagaaaattgccagcatcgcagacgtctgcgaatctatgaaggagcagctgctggtgctggtggagtgggctaaatacatccctgccttttgcgaactgccactggacgatcaggtcgcactgctgcgggctcacgccggagagcatctgctgctgggcgcaaccaagcgatccatggtgttcaaggacgtgctgctgctggggaatgactatattgtccccaggcactgccctgaactggctgagatgagcagagtgtcaatccgcatcctggatgaactggtgctgccattccaggagctgcagattgacgataacgaatacgcctacctgaaagcaatcatctttttcgaccccgacgccaagggactgagtgatcctggcaaaattaagcggctgagggctcaggtccaggtgtctctggaggactatatcaatgacagacagtacgattcccgagggcggtttggagaactgctgctgctgctgccaacactgcagagcattacctggcagatgatcgagcagatccagttcattaaactgttcggcatggcaaagatcgacaacctgctgcaggagatgctgctgggagggagcccctccgatgcccctcatgcacaccacccactgcatccccacctgatgcaggaacatatgggcactaatgtgatcgtcgctaacacaatgcctacccacctgtcaaatggacagatgtgtgagtggccacgccccaggggccaggcagccactcctgaaaccccacagccctctcctccagggggaagtggcagcgagccctacaagctgctgcctggagctgtggcaacaattgtgagaccactgtccgccatcccccagcctaccattactaaacaggaagtcatctga

SEQ ID NO: 1510 - RNA, 1314 nt, synthetic construct
  misc_feature 1..1314: note = CDS (opt28) from Homo sapiens__NP_000448.3__HNF4A(39-474)(S142A_S143A_S167A_S313A _S378A_T429A_T432A_S436A_K458R)
  source 1..1314: mol_type = other RNA
atggacacatctccctcagagggcactaacctgaatgcccctaacagtctgggggtgagcgctctgtgcgcaatctgcggagacagggccaccggcaaacactacggggcttcctcttgtgatggatgcaagggctttttcagacgcagcgtccggaaaaatcatatgtactcatgccgatttagtaggcagtgcgtggtggacaaggacaagagaaaccagtgccgctattgtcggctgaaaaagtgcttcagggcaggaatgaaaaaggaagccgtccagaatgagagagatcgaatttccacacggcgcgctgcatacgaagacagctctctgccaagcatcaacgccctgctgcaggcagaggtgctgtccaggcagatcactgctcccgtgtcagggattaacggcgatatcagagccaagaaaattgcaagtatcgctgacgtctgcgaaagcatgaaggagcagctgctggtgctggtggagtgggccaaatacatccctgcattttgcgaactgccactggacgatcaggtcgctctgctgcgggcccacgcaggagagcatctgctgctgggcgctaccaagcgatctatggtgttcaaggacgtgctgctgctggggaatgactatattgtccccaggcactgccctgaactggccgagatgtccagagtgagcatccgcatcctggatgaactggtgctgccattccaggagctgcagattgacgataacgaatacgcatacctgaaagccatcatctttttcgaccccgacgctaagggactgtcagatcctggcaaaattaagcggctgagggcacaggtccaggtgagtctggaggactatatcaatgacagacagtacgattctcgagggcggtttggagaactgctgctgctgctgccaacactgcagtccattacctggcagatgatcgagcagatccagttcattaaactgttcggcatggccaagatcgacaacctgctgcaggagatgctgctgggaggggcacccagcgatgctcctcatgcacaccacccactgcatccccacctgatgcaggaacatatgggcactaatgtgatcgtcgccaacacaatgcctacccacctgagcaatggacagatgtgtgagtggccacgccccaggggccaggctgcagcccctgaagctccacagcccgcacctccagggggatccggctcagagccctacaagctgctgcctggagccgtggctactattgtgagaccactgtctgcaatcccccagcctaccattacaaaacaggaagtcatctga

SEQ ID NO: 1511 - RNA, 1314 nt, synthetic construct
  misc_feature 1..1314: note = CDS (opt28) from Homo sapiens__NP_000448.3__HNF4A(39-474)(S142A_S143A_S148A_S167A _S313A_S378A_T429A_T432A_S436A_K458R)
  source 1..1314: mol_type = other RNA
atggacacatctccctcagagggcactaacctgaatgcccctaacagtctgggggtgagcgctctgtgcgcaatctgcggagacagggccaccggcaaacactacggggcttcctcttgtgatggatgcaagggctttttcagacgcagcgtccggaaaaatcatatgtactcatgccgatttagtaggcagtgcgtggtggacaaggacaagagaaaccagtgccgctattgtcggctgaaaaagtgcttcagggcaggaatgaaaaaggaagccgtccagaatgagagagatcgaatttccacacggcgcgctgcatacgaagacagcgccctgccatctatcaacgcactgctgcaggctgaggtgctgagcaggcagatcactgcccccgtgtccgggattaacggcgatatcagagcaaagaaaattgcttcaatcgccgacgtctgcgaaagtatgaaggagcagctgctggtgctggtggagtgggcaaaatacatccctgctttttgcgaactgccactggacgatcaggtcgccctgctgcgggcacacgctggagagcatctgctgctgggcgccaccaagcgaagcatggtgttcaaggacgtgctgctgctggggaatgactatattgtccccaggcactgccctgaactggcagagatgtctagagtgtccatccgcatcctggatgaactggtgctgccattccaggagctgcagattgacgataacgaatacgcctacctgaaagctatcatctttttcgaccccgacgcaaagggactgagcgatcctggcaaaattaagcggctgagggcccaggtccaggtgtcactggaggactatatcaatgacagacagtacgatagtcgagggcggtttggagaactgctgctgctgctgccaacactgcagtctattacctggcagatgatcgagcagatccagttcattaaactgttcggcatggcaaagatcgacaacctgctgcaggagatgctgctgggaggggctccctccgatgcacctcatgcccaccacccactgcatccccacctgatgcaggaacatatgggcactaatgtgatcgtcgctaacacaatgcctacccacctgagcaatggacagatgtgtgagtggccacgccccaggggccaggcagccgctcctgaagcaccacagcccgcccctccagggggaagcggctccgagccctacaagctgctgcctggagctgtggcaactattgtgagaccactgtcagccatcccccagcctaccattacaaaacaggaagtcatctga

SEQ ID NO: 1512 - RNA, 1314 nt, synthetic construct
  misc_feature 1..1314: note = CDS (opt28) from Homo sapiens__NP_000448.3__HNF4A(39-474)(K106R_K108R_K126R_K127R _S142A_S143A_S148A_S167A_S313A_S378A_T429A_T432A_S436A_K458 R)
  source 1..1314: mol_type = other RNA
atggacacatctccctcagagggcactaacctgaatgcccctaacagtctgggggtgagcgctctgtgcgcaatctgcggagacagggccaccggcaaacactacggggcttcctcttgtgatggatgcaagggctttttcagacgcagcgtccggaaaaatcatatgtactcatgccgatttagtaggcagtgcgtggtggacagagaccgccggaaccagtgcaggtattgtagactgaagaagtgcttccgagcaggaatgcggcgcgaagccgtccagaatgagagggatagaatttccacacggcgagctgcatacgaagacagcgccctgccatctatcaacgcactgctgcaggctgaggtgctgagcaggcagatcactgcccccgtgtccgggattaacggcgatatcagagctaaaaagattgcatcaatcgccgacgtctgcgaaagtatgaaagagcagctgctggtgctggtggagtgggcaaagtacatccctgctttttgcgaactgccactggacgatcaggtcgccctgctgcgcgcacacgctggagagcatctgctgctgggcgccaccaagcggagcatggtgttcaaagacgtgctgctgctggggaatgactatattgtccccaggcactgccctgaactggcagagatgtctagagtgtccatccgaatcctggatgaactggtgctgccattccaggagctgcagattgacgataacgaatacgcctacctgaaggctatcatctttttcgaccccgacgcaaaaggactgagcgatcctggcaagattaagcggctgcgcgcccaggtccaggtgtcactggaggactatatcaatgacaggcagtacgatagtagagggcggtttggagaactgctgctgctgctgccaacactgcagtctattacctggcagatgatcgagcagatccagttcattaaactgttcggcatggcaaagatcgacaacctgctgcaggagatgctgctgggaggggctccctccgatgcacctcatgcccaccacccactgcatccccacctgatgcaggaacatatgggcactaatgtgatcgtcgctaacacaatgcctacccacctgagcaatggacagatgtgtgagtggccacgccccaggggccaggcagccgctcctgaagcaccacagcccgcccctccagggggaagcggctccgagccctacaaactgctgcctggagctgtggcaactattgtgagaccactgtcagccatcccccagcctaccattacaaagcaggaagtcatctga

SEQ ID NO: 1513 - RNA, 1314 nt, synthetic construct
  misc_feature 1..1314: note = CDS (opt28) from Homo sapiens__NP_000448.3__HNF4A(39-474)(S142A_S143A_S148A_T166A _S167A_S313A_S378A_T429A_T432A_S436A_K458R)
  source 1..1314: mol_type = other RNA
atggacacatctccctcagagggcactaacctgaatgcccctaacagtctgggggtgagcgctctgtgcgcaatctgcggagacagggccaccggcaaacactacggggcttcctcttgtgatggatgcaagggctttttcagacgcagcgtccggaaaaatcatatgtactcatgccgatttagtaggcagtgcgtggtggacaaggacaagagaaaccagtgccgctattgtcggctgaaaaagtgcttcagggcaggaatgaaaaaggaagccgtccagaatgagagagatcgaatttccacacggcgcgctgcatacgaagacagcgccctgccatctatcaacgcactgctgcaggctgaggtgctgagcaggcagatcgccgcacccgtgtccgggattaacggcgatatcagagctaagaaaattgcctcaatcgcagacgtctgcgaaagtatgaaggagcagctgctggtgctggtggagtgggctaaatacatccctgccttttgcgaactgccactggacgatcaggtcgcactgctgcgggctcacgccggagagcatctgctgctgggcgcaactaagcgaagcatggtgttcaaggacgtgctgctgctggggaatgactatattgtccccaggcactgccctgaactggccgagatgtctagagtgtccatccgcatcctggatgaactggtgctgccattccaggagctgcagattgacgataacgaatacgcttacctgaaagcaatcatctttttcgaccccgacgccaagggactgagcgatcctggcaaaattaagcggctgagggcacaggtccaggtgtcactggaggactatatcaatgacagacagtacgatagtcgagggcggtttggagaactgctgctgctgctgccaaccctgcagtctattacatggcagatgatcgagcagatccagttcattaaactgttcggcatggctaagatcgacaacctgctgcaggagatgctgctgggaggggcaccctccgatgcccctcatgctcaccacccactgcatccccacctgatgcaggaacatatgggcaccaatgtgatcgtcgcaaacactatgcctacacacctgagcaatggacagatgtgtgagtggccacgccccaggggccaggccgctgcacctgaagccccacagcccgctcctccagggggaagcggctccgagccctacaagctgctgcctggagcagtggccaccattgtgagaccactgtcagcaatcccccagcctactattaccaaacaggaagtcatctga

SEQ ID NO: 1514 - RNA, 1314 nt, synthetic construct
  misc_feature 1..1314: note = CDS (opt28) from Homo sapiens__NP_000448.3__HNF4A(39-474)(S87A_S142A_S143A_S148A_ T166A_S167A_S313A_S378A_T429A_T432A_S436A_K458R)
  source 1..1314: mol_type = other RNA
atggacacatctccctcagagggcactaacctgaatgcccctaacagtctgggggtgagcgctctgtgcgcaatctgcggagacagggccaccggcaaacactacggggcttcctcttgtgatggatgcaagggctttttcagacgcgcagtccggaaaaatcatatgtacagctgccgattttcaaggcagtgcgtggtggacaaggacaagagaaaccagtgccgctattgtcggctgaaaaagtgcttcagggccggaatgaaaaaggaagctgtccagaatgagagagatcgaattagtacacggcgcgcagcctacgaagactccgcactgccaagcatcaacgctctgctgcaggccgaggtgctgtctaggcagatcgcagctcccgtgagcgggattaacggcgatatcagagccaagaaaattgcatccatcgctgacgtctgcgaatcaatgaaggagcagctgctggtgctggtggagtgggccaaatacatccctgcattttgcgaactgccactggacgatcaggtcgctctgctgcgggcccacgcaggagagcatctgctgctgggcgccactaagcgaagtatggtgttcaaggacgtgctgctgctggggaatgactatattgtccccaggcactgccctgaactggctgagatgagcagagtgtctatccgcatcctggatgaactggtgctgccattccaggagctgcagattgacgataacgaatacgcatacctgaaagccatcatctttttcgaccccgacgcaaagggactgtccgatcctggcaaaattaagcggctgagggctcaggtccaggtgagcctggaggactatatcaatgacagacagtacgattcacgagggcggtttggagaactgctgctgctgctgccaaccctgcagagtattacatggcagatgatcgagcagatccagttcattaaactgttcggcatggcaaagatcgacaacctgctgcaggagatgctgctgggaggggccccctctgatgctcctcatgcacaccacccactgcatccccacctgatgcaggaacatatgggcaccaatgtgatcgtcgccaacactatgcctacacacctgtccaatggacagatgtgtgagtggccacgccccaggggccaggctgcagcccctgaagctccacagcccgcacctccagggggaagcggcagcgagccctacaagctgctgcctggagccgtggcaaccattgtgagaccactgtccgctatcccccagcctactattaccaaacaggaagtcatctga

SEQ ID NO: 1515 - RNA, 1314 nt, synthetic construct
  misc_feature 1..1314: note = CDS (opt28) from Homo sapiens__NP_000448.3__HNF4A(39-474)(S87A_K106R_K108R_K126R_ K127R_S142A_S143A_S148A_T166A_S167A_S313A_S378A_T429A_T432A _S436A_K458R)
  source 1..1314: mol_type = other RNA
atggacacatctccctcagagggcactaacctgaatgcccctaacagtctgggggtgagcgctctgtgcgcaatctgcggagacagggccaccggcaaacactacggggcttcctcttgtgatggatgcaagggctttttcagacgcgcagtccggaaaaatcatatgtacagctgccgattttcaaggcagtgcgtggtggacagagaccgccggaaccagtgcaggtattgtagactgaagaagtgcttccgagccggaatgcggcgcgaagctgtccagaatgagagggatagaattagtacacggcgagcagcctacgaagactccgcactgccaagcatcaacgctctgctgcaggccgaggtgctgtctaggcagatcgcagctcccgtgagcgggattaacggcgatatcagagccaaaaagattgcatccatcgctgacgtctgcgaatcaatgaaagagcagctgctggtgctggtggagtgggccaagtacatccctgcattttgcgaactgccactggacgatcaggtcgctctgctgcgcgcccacgcaggagagcatctgctgctgggcgccactaagcggagtatggtgttcaaagacgtgctgctgctggggaatgactatattgtccccaggcactgccctgaactggctgagatgagcagagtgtctatccgaatcctggatgaactggtgctgccattccaggagctgcagattgacgataacgaatacgcatacctgaaggccatcatctttttcgaccccgacgcaaaaggactgtccgatcctggcaagattaagcggctgcgcgctcaggtccaggtgagcctggaggactatatcaatgacaggcagtacgattcaagagggcggtttggagaactgctgctgctgctgccaaccctgcagagtattacatggcagatgatcgagcagatccagttcattaaactgttcggcatggcaaagatcgacaacctgctgcaggagatgctgctgggaggggccccctctgatgctcctcatgcacaccacccactgcatccccacctgatgcaggaacatatgggcaccaatgtgatcgtcgccaacactatgcctacacacctgtccaatggacagatgtgtgagtggccacgccccaggggccaggctgcagcccctgaagctccacagcccgcacctccagggggaagcggcagcgagccctacaaactgctgcctggagccgtggcaaccattgtgagaccactgtccgctatcccccagcctactattaccaagcaggaagtcatctga

SEQ ID NO: 1516 - RNA, 1314 nt, synthetic construct
  misc_feature 1..1314: note = CDS (opt28) from Homo sapiens__NP_000448.3__HNF4A(39-474)(S87A_K106R_K108R_K126R_ K127R)
  source 1..1314: mol_type = other RNA
atggacacatctccctcagagggcactaacctgaatgcccctaacagtctgggggtgagcgctctgtgcgcaatctgcggagacagggccaccggcaaacactacggggcttcctcttgtgatggatgcaagggctttttcagacgcgcagtccggaaaaatcatatgtacagctgccgattttcaaggcagtgcgtggtggacagagaccgccggaaccagtgcaggtattgtagactgaagaagtgcttccgagccggaatgcggcgcgaagctgtccagaatgagagggatagaattagtacacggcgatccagctacgaagactctagcctgccatccatcaacgcactgctgcaggccgaggtgctgtcaaggcagatcaccagtcccgtgagcgggattaacggcgatatcagagctaaaaagattgcatctatcgccgacgtctgcgaatccatgaaagagcagctgctggtgctggtggagtgggcaaagtacatccctgctttttgcgaactgccactggacgatcaggtcgccctgctgcgcgcacacgctggagagcatctgctgctgggcgccactaagcggagcatggtgttcaaagacgtgctgctgctggggaatgactatattgtccccaggcactgccctgaactggcagagatgtcaagagtgagtatccgaatcctggatgaactggtgctgccattccaggagctgcagattgacgataacgaatacgcttacctgaaggccatcatctttttcgaccccgacgcaaaaggactgtctgatcctggcaagattaagcggctgcgctcccaggtccaggtgagcctggaggactatatcaatgacaggcagtacgatagcagagggcggtttggagaactgctgctgctgctgccaacactgcagtccattacctggcagatgatcgagcagatccagttcattaaactgttcggcatggccaagatcgacaacctgctgcaggagatgctgctgggagggtcaccctctgatgctcctcatgcacaccacccactgcatccccacctgatgcaggaacatatgggcactaatgtgatcgtcgccaacacaatgcctacccacctgagtaatggacagatgtgtgagtggccacgccccaggggccaggcagctactcctgaaaccccacagcccagccctccagggggatccggctctgagccctacaaactgctgcctggagcagtggccacaattgtgaagccactgagcgctatcccccagcctaccattactaaacaggaagtcatctga

SEQ ID NO: 1517 - RNA, 1314 nt, synthetic construct
  misc_feature 1..1314: note = CDS (opt28) from Homo sapiens__NP_000448.3__HNF4A(39-474)(S87A_K106R_K108R_K126R_ K127R_S142A_S143A_S148A_T166A_S167A_S313A_S378A_T429A_T432A _S436A_K458R_S461A)
  source 1..1314: mol_type = other RNA
atggacacatctccctcagagggcactaacctgaatgcccctaacagtctgggggtgagcgctctgtgcgcaatctgcggagacagggccaccggcaaacactacggggcttcctcttgtgatggatgcaagggctttttcagacgcgcagtccggaaaaatcatatgtacagctgccgattttcaaggcagtgcgtggtggacagagaccgccggaaccagtgcaggtattgtagactgaagaagtgcttccgagccggaatgcggcgcgaagctgtccagaatgagagggatagaattagtacacggcgagcagcctacgaagactccgcactgccaagcatcaacgctctgctgcaggccgaggtgctgtctaggcagatcgcagctcccgtgagcgggattaacggcgatatcagagccaaaaagattgcatccatcgctgacgtctgcgaatcaatgaaagagcagctgctggtgctggtggagtgggccaagtacatccctgcattttgcgaactgccactggacgatcaggtcgctctgctgcgcgcccacgcaggagagcatctgctgctgggcgccactaagcggagtatggtgttcaaagacgtgctgctgctggggaatgactatattgtccccaggcactgccctgaactggctgagatgagcagagtgtctatccgaatcctggatgaactggtgctgccattccaggagctgcagattgacgataacgaatacgcatacctgaaggccatcatctttttcgaccccgacgcaaaaggactgtccgatcctggcaagattaagcggctgcgcgctcaggtccaggtgagcctggaggactatatcaatgacaggcagtacgattcaagagggcggtttggagaactgctgctgctgctgccaaccctgcagagtattacatggcagatgatcgagcagatccagttcattaaactgttcggcatggcaaagatcgacaacctgctgcaggagatgctgctgggaggggccccctctgatgctcctcatgcacaccacccactgcatccccacctgatgcaggaacatatgggcaccaatgtgatcgtcgccaacactatgcctacacacctgtccaatggacagatgtgtgagtggccacgccccaggggccaggctgcagcccctgaagctccacagcccgcacctccagggggaagcggcagcgagccctacaaactgctgcctggagccgtggcaaccattgtgagaccactggctgccatcccccagcctactattaccaagcaggaagtcatctga

SEQ ID NO: 1518 - RNA, 1314 nt, synthetic construct
  misc_feature 1..1314: note = CDS (opt28) from Homo sapiens__NP_000448.3__HNF4A(39-474)(S87A_K106R_K108R_K126R_ K127R_S142A_S143A_S148A_T166A_S167A_S313A_S378A_T429A_T432A _S436A_K458R_S461E)
  source 1..1314: mol_type = other RNA
atggacacatctccctcagagggcactaacctgaatgcccctaacagtctgggggtgagcgctctgtgcgcaatctgcggagacagggccaccggcaaacactacggggcttcctcttgtgatggatgcaagggctttttcagacgcgcagtccggaaaaatcatatgtacagctgccgattttcaaggcagtgcgtggtggacagagaccgccggaaccagtgcaggtattgtagactgaagaagtgcttccgagccggaatgcggcgcgaagctgtccagaatgagagggatagaattagtacacggcgagcagcctacgaagactccgcactgccaagcatcaacgctctgctgcaggccgaggtgctgtctaggcagatcgcagctcccgtgagcgggattaacggcgatatcagagccaaaaagattgcatccatcgctgacgtctgcgaatcaatgaaagagcagctgctggtgctggtggagtgggccaagtacatccctgcattttgcgaactgccactggacgatcaggtcgctctgctgcgcgcccacgcaggagagcatctgctgctgggcgccactaagcggagtatggtgttcaaagacgtgctgctgctggggaatgactatattgtccccaggcactgccctgaactggctgagatgagcagagtgtctatccgaatcctggatgaactggtgctgccattccaggagctgcagattgacgataacgaatacgcatacctgaaggccatcatctttttcgaccccgacgcaaaaggactgtccgatcctggcaagattaagcggctgcgcgctcaggtccaggtgagcctggaggactatatcaatgacaggcagtacgattcaagagggcggtttggagaactgctgctgctgctgccaaccctgcagagtattacatggcagatgatcgagcagatccagttcattaaactgttcggcatggcaaagatcgacaacctgctgcaggagatgctgctgggaggggccccctctgatgctcctcatgcacaccacccactgcatccccacctgatgcaggaacatatgggcaccaatgtgatcgtcgccaacactatgcctacacacctgtccaatggacagatgtgtgagtggccacgccccaggggccaggctgcagcccctgaagctccacagcccgcacctccagggggaagcggcagcgagccctacaaactgctgcctggagccgtggcaaccattgtgagaccactggaagctatcccccagcctactattaccaagcaggaggtcatctga

SEQ ID NO: 1519 - RNA, 1314 nt, synthetic construct
  misc_feature 1..1314: note = CDS (opt28) from Homo sapiens__NP_000448.3__HNF4A(39-474)(S87A_K106R_K108R_K126R_ K127R_S142A_S143A_S148E_T166A_S167E_S313A_S378E_T429E_T432E _S436E_K458R_S461E)
  source 1..1314: mol_type = other RNA
atggacacatctccctcagagggcactaacctgaatgcccctaacagtctgggggtgagcgctctgtgcgcaatctgcggagacagggccaccggcaaacactacggggcttcctcttgtgatggatgcaagggctttttcagacgcgcagtccggaaaaatcatatgtacagctgccgattttcaaggcagtgcgtggtggacagagaccgccggaaccagtgcaggtattgtagactgaagaagtgcttccgagccggaatgcggcgcgaagctgtccagaatgagagggatagaattagtacacggcgagcagcctacgaagactccgagctgccaagcatcaacgcactgctgcaggctgaagtgctgtctaggcagatcgccgagcccgtgagcgggattaacggcgatatcagagctaaaaagattgcatccatcgccgacgtctgcgagtcaatgaaagaacagctgctggtgctggtggagtgggcaaagtacatccctgctttttgcgaactgccactggacgatcaggtcgccctgctgcgcgcacacgctggagagcatctgctgctgggcgccactaagcggagtatggtgttcaaagacgtgctgctgctggggaatgactatattgtccccaggcactgccctgaactggcagagatgagcagagtgtctatccgaatcctggatgaactggtgctgccattccaggagctgcagattgacgataacgaatacgcctacctgaaggctatcatctttttcgaccccgacgcaaaaggactgtccgatcctggcaagattaagcggctgcgcgcccaggtccaggtgagcctggaggactatatcaatgacaggcagtacgattcaagagggcggtttggagagctgctgctgctgctgccaaccctgcagagtattacatggcagatgatcgaacagatccagttcattaaactgttcggcatggcaaagatcgacaacctgctgcaggagatgctgctgggaggggaaccctctgatgctcctcatgcacaccacccactgcatccccacctgatgcaggagcatatgggcaccaatgtgatcgtcgccaacactatgcctacacacctgtccaatggacagatgtgtgaatggccacgccccaggggccaggctgcagagcctgaggaaccacagcccgagcctccagggggaagcggcagcgaaccctacaaactgctgcctggagccgtggctaccattgtgagaccactggaggcaatcccccagcctactattaccaagcaggaagtcatctga

SEQ ID NO: 1520 - RNA, 1314 nt, synthetic construct
  misc_feature 1..1314: note = CDS (opt28) from Homo sapiens__NP_000448.3__HNF4A(39-474)(S87A_K106R_K108R_K126R_ K127R_S142A_S143A_S148A_T166A_S167A_K179R_K180R_S313A_S378A _T429A_T432A_S436A_K458R_S461E)
  source 1..1314: mol_type = other RNA
atggacacatctccctcagagggcactaacctgaatgcccctaacagtctgggggtgagcgctctgtgcgcaatctgcggagacagggccaccggcaaacactacggggcttcctcttgtgatggatgcaagggctttttcagacgcgcagtccggaaaaatcatatgtacagctgccgattttcaaggcagtgcgtggtggacagagaccgccggaaccagtgcaggtattgtagactgaagaagtgcttccgagccggaatgcggcgcgaagctgtccagaatgagagggatagaattagtacacggcgagcagcctacgaagactccgcactgccaagcatcaacgctctgctgcaggccgaggtgctgtctaggcagatcgcagctcccgtgagcgggattaacggcgatatcagagcccgccggattgcatccatcgctgacgtctgcgaatcaatgaaagagcagctgctggtgctggtggagtgggccaagtacatccctgcattttgcgaactgccactggacgatcaggtcgctctgctgagggcccacgcaggagagcatctgctgctgggcgccactaaaagaagtatggtgttcaaggacgtgctgctgctggggaatgactatattgtcccccgacactgccctgaactggctgagatgagccgggtgtctatccgcatcctggatgaactggtgctgccattccaggagctgcagattgacgataacgaatacgcatacctgaaggccatcatctttttcgaccccgacgcaaaaggactgtccgatcctggcaagattaaaaggctgagagctcaggtccaggtgagcctggaggactatatcaatgaccggcagtacgattcacgcgggaggtttggagaactgctgctgctgctgccaaccctgcagagtattacatggcagatgatcgagcagatccagttcattaagctgttcggcatggcaaagatcgacaacctgctgcaggagatgctgctgggaggggccccctctgatgctcctcatgcacaccacccactgcatccccacctgatgcaggaacatatgggcaccaatgtgatcgtcgccaacactatgcctacacacctgtccaatggacagatgtgtgagtggccaagaccccgaggccaggctgcagcccctgaagctccacagcccgcacctccagggggaagcggcagcgagccctacaaactgctgcctggagccgtggcaaccattgtgcggccactggaagctatcccccagcctactattaccaagcaggaggtcatctga

SEQ ID NO: 1521 - RNA, 1314 nt, synthetic construct
  misc_feature 1..1314: note = CDS (opt28) from Homo sapiens__NP_000448.3__HNF4A(39-474)(S87A_K106R_K108R_K126R_ K127R_S142A_S143A_S148A_T166A_S167A_K300R_K307R_K309R_S313A _S378A_T429A_T432A_S436A_K458R_S461E)
  source 1..1314: mol_type = other RNA
atggacacatctccctcagagggcactaacctgaatgcccctaacagtctgggggtgagcgctctgtgcgcaatctgcggagacagggccaccggcaaacactacggggcttcctcttgtgatggatgcaagggctttttcagacgcgcagtccggaaaaatcatatgtacagctgccgattttcaaggcagtgcgtggtggacagagaccgccggaaccagtgcaggtattgtagactgaagaagtgcttccgagccggaatgcggcgcgaagctgtccagaatgagagggatagaattagtacacggcgagcagcctacgaagactccgcactgccaagcatcaacgctctgctgcaggccgaggtgctgtctaggcagatcgcagctcccgtgagcgggattaacggcgatatcagagccaaaaagattgcatccatcgctgacgtctgcgaatcaatgaaagagcagctgctggtgctggtggagtgggccaagtacatccctgcattttgcgaactgccactggacgatcaggtcgctctgctgcgcgcccacgcaggagagcatctgctgctgggcgccactaagcggagtatggtgttcaaagacgtgctgctgctggggaatgactatattgtccccaggcactgccctgaactggctgagatgagcagagtgtctatccgaatcctggatgaactggtgctgccattccaggagctgcagattgacgataacgaatacgcatacctgaaggccatcatctttttcgaccccgacgcacggggactgtccgatcctggccgcattaggagactgcgggctcaggtccaggtgagcctggaggactatatcaatgaccgccagtacgattcaagggggagatttggagaactgctgctgctgctgccaaccctgcagagtattacatggcagatgatcgagcagatccagttcattaaactgttcggcatggcaaagatcgacaacctgctgcaggagatgctgctgggaggggccccctctgatgctcctcatgcacaccacccactgcatccccacctgatgcaggaacatatgggcaccaatgtgatcgtcgccaacactatgcctacacacctgtccaatggacagatgtgtgagtggccacgaccccggggccaggctgcagcccctgaagctccacagcccgcacctccagggggaagcggcagcgagccctacaagctgctgcctggagccgtggcaaccattgtgaggccactggaagctatcccccagcctactattaccaaacaggaggtcatctga

SEQ ID NO: 1522 - RNA, 1314 nt, synthetic construct
  misc_feature 1..1314: note = CDS (opt28) from Homo sapiens__NP_000448.3__HNF4A(39-474)(S87A_K106R_K108R_K126R_ K127R_S142A_S143A_S148A_T166A_S167A_S313A_S378A_T429A_T432A _S436A_K447R_K458R_S461E_K470R)
  source 1..1314: mol_type = other RNA
atggacacatctccctcagagggcactaacctgaatgcccctaacagtctgggggtgagcgctctgtgcgcaatctgcggagacagggccaccggcaaacactacggggcttcctcttgtgatggatgcaagggctttttcagacgcgcagtccggaaaaatcatatgtacagctgccgattttcaaggcagtgcgtggtggacagagaccgccggaaccagtgcaggtattgtagactgaagaagtgcttccgagccggaatgcggcgcgaagctgtccagaatgagagggatagaattagtacacggcgagcagcctacgaagactccgcactgccaagcatcaacgctctgctgcaggccgaggtgctgtctaggcagatcgcagctcccgtgagcgggattaacggcgatatcagagccaaaaagattgcatccatcgctgacgtctgcgaatcaatgaaagagcagctgctggtgctggtggagtgggccaagtacatccctgcattttgcgaactgccactggacgatcaggtcgctctgctgcgcgcccacgcaggagagcatctgctgctgggcgccactaagcggagtatggtgttcaaagacgtgctgctgctggggaatgactatattgtccccaggcactgccctgaactggctgagatgagcagagtgtctatccgaatcctggatgaactggtgctgccattccaggagctgcagattgacgataacgaatacgcatacctgaaggccatcatctttttcgaccccgacgcaaaaggactgtccgatcctggcaagattaagcggctgcgcgctcaggtccaggtgagcctggaggactatatcaatgacaggcagtacgattcaagagggcggtttggagaactgctgctgctgctgccaaccctgcagagtattacatggcagatgatcgagcagatccagttcattaaactgttcggcatggcaaagatcgacaacctgctgcaggagatgctgctgggaggggccccctctgatgctcctcatgcacaccacccactgcatccccacctgatgcaggaacatatgggcaccaatgtgatcgtcgccaacactatgcctacacacctgtccaatggacagatgtgtgagtggccacgccccaggggccaggctgcagcccctgaagctccacagcccgcacctccagggggaagcggcagcgagccctacagactgctgcctggagccgtggcaaccattgtgcgaccactggaagctatcccccagcctactattacccggcaggaggtcatctga

SEQ ID NO: 1523 - RNA, 1314 nt, synthetic construct
  misc_feature 1..1314: note = CDS (opt28) from Homo sapiens__NP_000448.3__HNF4A(39-474)(S87A_K106R_K108R_K126R_ K127R_S142A_S143A_S148A_T166A_S167A_K179R_K180R_K234R_K300R _K307R_K309R_S313A_S378A_T429A_T432A_S436A_K447R_K458R_S461 E_K470R)
  source 1..1314: mol_type = other RNA
atggacacatctccctcagagggcactaacctgaatgcccctaacagtctgggggtgagcgctctgtgcgcaatctgcggagacagggccaccggcaaacactacggggcttcctcttgtgatggatgcaagggctttttcagacgcgcagtccggaaaaatcatatgtacagctgccgattttcaaggcagtgcgtggtggacagagaccgccggaaccagtgcaggtattgtagactgaagaagtgcttccgagccggaatgcggcgcgaagctgtccagaatgagagggatagaattagtacacggcgagcagcctacgaagactccgcactgccaagcatcaacgctctgctgcaggccgaggtgctgtctaggcagatcgcagctcccgtgagcgggattaacggcgatatcagagcccgccggattgcatccatcgctgacgtctgcgaatcaatgaaagagcagctgctggtgctggtggagtgggccaagtacatccctgcattttgcgaactgccactggacgatcaggtcgctctgctgagggcccacgcaggagagcatctgctgctgggcgccactagacgaagtatggtgttcaaagacgtgctgctgctggggaatgactatattgtcccccggcactgccctgaactggctgagatgagccgcgtgtctatcaggatcctggatgaactggtgctgccattccaggagctgcagattgacgataacgaatacgcatacctgaaggccatcatctttttcgaccccgacgcaagaggactgtccgatcctggccggattcgcaggctgagagctcaggtccaggtgagcctggaggactatatcaatgaccgacagtacgattcacgggggaggtttggagaactgctgctgctgctgccaaccctgcagagtattacatggcagatgatcgagcagatccagttcattaagctgttcggcatggcaaaaatcgacaacctgctgcaggagatgctgctgggaggggccccctctgatgctcctcatgcacaccacccactgcatccccacctgatgcaggaacatatgggcaccaatgtgatcgtcgccaacactatgcctacacacctgtccaatggacagatgtgtgagtggccaagaccccgcggccaggctgcagcccctgaagctccacagcccgcacctccagggggaagcggcagcgagccctaccggctgctgcctggagccgtggcaaccattgtgcgaccactggaagctatcccccagcctactattaccaggcaggaggtcatctga

SEQ ID NO: 1524 - RNA, 1314 nt, synthetic construct
  misc_feature 1..1314: note = CDS (opt28) from Homo sapiens__NP_000448.3__HNF4A(39-474)(S87A_S95A_S99A_K106R_K1 08R_K126R_K127R_S142A_S143A_S148A_T166A_S167A_S313A_S378A_T 429A_T432A_S436A_K458R_S461E)
  source 1..1314: mol_type = other RNA
atggacacatctccctcagagggcactaacctgaatgcccctaacagtctgggggtgagcgctctgtgcgcaatctgcggagacagggccaccggcaaacactacggggcttcctcttgtgatggatgcaagggctttttcagacgcgcagtccggaaaaatcatatgtacgcctgccgatttgctaggcagtgcgtggtggacagagaccgccggaaccagtgcaggtattgtagactgaagaagtgcttccgagcaggaatgcggcgcgaagccgtccagaatgagagggatagaattagcacacggcgagcagcttacgaagactcagccctgccaagtatcaacgcactgctgcaggctgaggtgctgtccaggcagatcgccgcacccgtgagcgggattaacggcgatatcagagctaaaaagattgcctctatcgcagacgtctgcgaaagcatgaaagagcagctgctggtgctggtggagtgggctaagtacatccctgccttttgcgaactgccactggacgatcaggtcgcactgctgcgcgcccacgctggagagcatctgctgctgggcgcaactaagcggtccatggtgttcaaagacgtgctgctgctggggaatgactatattgtccccaggcactgccctgaactggccgagatgtcaagagtgagtatccgaatcctggatgaactggtgctgccattccaggagctgcagattgacgataacgaatacgcatacctgaaggctatcatctttttcgaccccgacgcaaaaggactgagcgatcctggcaagattaagcggctgcgcgcccaggtccaggtgtctctggaggactatatcaatgacaggcagtacgattccagagggcggtttggagaactgctgctgctgctgccaaccctgcagagcattacatggcagatgatcgagcagatccagttcattaaactgttcggcatggctaagatcgacaacctgctgcaggagatgctgctgggaggggcaccctcagatgcccctcatgctcaccacccactgcatccccacctgatgcaggaacatatgggcaccaatgtgatcgtcgcaaacactatgcctacacacctgagtaatggacagatgtgtgagtggccacgccccaggggccaggccgctgcacctgaagccccacagcccgcacctccagggggatctggctccgagccctacaaactgctgcctggagctgtggccaccattgtgagaccactggaagcaatcccccagcctactattaccaagcaggaggtcatctga

SEQ ID NO: 1525 - RNA, 1314 nt, synthetic construct
  misc_feature 1..1314: note = CDS (opt28) from Homo sapiens__NP_000448.3__HNF4A(39-474)(S87A_K106R_K108R_K126R_ K127R_S138A_T139A_S142A_S143A_S148A_T166A_S167A_S313A_S378A _T429A_T432A_S436A_K458R_S461E)
  source 1..1314: mol_type = other RNA
atggacacatctccctcagagggcactaacctgaatgcccctaacagtctgggggtgagcgctctgtgcgcaatctgcggagacagggccaccggcaaacactacggggcttcctcttgtgatggatgcaagggctttttcagacgcgcagtccggaaaaatcatatgtacagctgccgattttcaaggcagtgcgtggtggacagagaccgccggaaccagtgcaggtattgtagactgaagaagtgcttccgagccggaatgcggcgcgaagctgtccagaatgagagggatagaattgcagcccggcgagcagcttacgaagacagtgccctgccatccatcaacgcactgctgcaggctgaggtgctgagcaggcagatcgccgcacccgtgtctgggattaacggcgatatcagagctaaaaagattgccagcatcgcagacgtctgcgaatccatgaaagagcagctgctggtgctggtggagtgggctaagtacatccctgccttttgcgaactgccactggacgatcaggtcgcactgctgcgcgcccacgctggagagcatctgctgctgggcgcaacaaagcggtcaatggtgttcaaagacgtgctgctgctggggaatgactatattgtccccaggcactgccctgaactggccgagatgagtagagtgagcatccgaatcctggatgaactggtgctgccattccaggagctgcagattgacgataacgaatacgcatacctgaaggctatcatctttttcgaccccgacgcaaaaggactgtctgatcctggcaagattaagcggctgcgcgcccaggtccaggtgtccctggaggactatatcaatgacaggcagtacgatagcagagggcggtttggagaactgctgctgctgctgccaactctgcagtcaattacctggcagatgatcgagcagatccagttcattaaactgttcggcatggctaagatcgacaacctgctgcaggagatgctgctgggaggggcacccagtgatgcccctcatgctcaccacccactgcatccccacctgatgcaggaacatatgggcacaaatgtgatcgtcgcaaacaccatgcctactcacctgtctaatggacagatgtgtgagtggccacgccccaggggccaggccgctgcacctgaagccccacagcccgcacctccagggggatccggcagcgagccctacaaactgctgcctggagctgtggccacaattgtgagaccactggaagcaatcccccagcctaccattactaagcaggaggtcatctga

SEQ ID NO: 1526 - RNA, 1314 nt, synthetic construct
  misc_feature 1..1314: note = CDS (opt28) from Homo sapiens__NP_000448.3__HNF4A(39-474)(S87A_S95A_S99A_K106R_K1 08R_K126R_K127R_S138A_T139A_S142A_S143A_S148A_T166A_S167A_S 313A_S378A_T429A_T432A_S436A_K458R_S461E)
  source 1..1314: mol_type = other RNA
atggacacatctccctcagagggcactaacctgaatgcccctaacagtctgggggtgagcgctctgtgcgcaatctgcggagacagggccaccggcaaacactacggggcttcctcttgtgatggatgcaagggctttttcagacgcgcagtccggaaaaatcatatgtacgcctgccgatttgctaggcagtgcgtggtggacagagaccgccggaaccagtgcaggtattgtagactgaagaagtgcttccgagcaggaatgcggcgcgaagccgtccagaatgagagggatagaattgcagctcggcgagccgcatacgaagacagcgctctgccatcaatcaacgccctgctgcaggcagaggtgctgagtaggcagatcgctgcccccgtgtccgggattaacggcgatatcagagctaaaaagattgcaagcatcgccgacgtctgcgaatctatgaaagagcagctgctggtgctggtggagtgggcaaagtacatccctgccttttgcgaactgccactggacgatcaggtcgctctgctgcgcgcacacgccggagagcatctgctgctgggcgcaacaaagcggagcatggtgttcaaagacgtgctgctgctggggaatgactatattgtccccaggcactgccctgaactggctgagatgtccagagtgtcaatccgaatcctggatgaactggtgctgccattccaggagctgcagattgacgataacgaatacgcatacctgaaggccatcatctttttcgaccccgacgctaaaggactgagtgatcctggcaagattaagcggctgcgcgcacaggtccaggtgagcctggaggactatatcaatgacaggcagtacgattctagagggcggtttggagaactgctgctgctgctgccaactctgcagtccattacctggcagatgatcgagcagatccagttcattaaactgttcggcatggccaagatcgacaacctgctgcaggagatgctgctgggaggggctcccagcgatgcacctcatgcccaccacccactgcatccccacctgatgcaggaacatatgggcacaaatgtgatcgtcgctaacaccatgcctactcacctgtcaaatggacagatgtgtgagtggccacgccccaggggccaggcagccgcacctgaagctccacagcccgcccctccagggggaagtggctctgagccctacaaactgctgcctggagcagtggctacaattgtgagaccactggaagccatcccccagcctaccattactaagcaggaggtcatctga

SEQ ID NO: 1527 - RNA, 1314 nt, synthetic construct
  misc_feature 1..1314: note = CDS (opt29) from Homo sapiens__NP_000448.3__HNF4A(39-474)
  source 1..1314: mol_type = other RNA
atggacaccagccctagcgagggcaccaacctgaacgcccctaatagcctgggagtgtccgccctgtgtgccatctgtggcgatagagccaccggcaagcactacggcgccagctcttgtgatggctgcaagggcttcttccggcggagcgtgcggaagaaccacatgtacagctgccggttcagccggcagtgcgtggtggacaaggataagcggaaccagtgccggtactgcagactgaagaagtgcttcagagccggcatgaagaaagaagccgtgcagaacgagcgggaccggatcagcaccagaagaagcagctacgaggacagcagcctgcccagcatcaacgccctgctgcaggccgaggtgctgagcagacagatcaccagcccagtgtccggcatcaacggcgacatccgggccaagaagatcgccagcattgccgacgtgtgcgagagcatgaaggaacagctgctggtgctggtggaatgggccaagtacatccccgccttttgcgagctgcccctggacgatcaggtggccctgctgagagcacacgccggcgaacatctgctgctgggagccaccaagcggagcatggtgttcaaggacgtgctgctgctgggcaacgactacatcgtgcccagacactgccctgagctggccgagatgagccgggtgtccatcagaatcctggacgaactggtgctgccgtttcaggaactgcagatcgacgacaacgagtacgcctacctgaaggccatcatctttttcgaccccgacgccaagggcctgagcgaccctggcaagatcaagcggctgagaagccaggtgcaagtgtccctggaagattacatcaacgaccggcagtacgacagccggggcagatttggcgaactgctcctgctgctgcccaccctgcagagcatcacctggcagatgatcgagcagatccagttcatcaagctgttcggcatggccaagatcgacaatctgctgcaggaaatgctgctcgggggcagcccttctgatgcccctcatgcccaccaccctctgcaccctcacctgatgcaagaacacatgggcaccaatgtgatcgtggccaacacaatgcccacccacctgagcaacggccagatgtgcgagtggcccagacctagaggacaggccgccacacctgagacacctcagccttctccacctggcggctctggcagcgagccttacaaactgctgcctggcgctgtggccaccatcgtgaaacctctgagcgccatcccccagcccaccatcaccaagcaggaagtgatctga

SEQ ID NO: 1528 - RNA, 1314 nt, synthetic construct
  misc_feature 1..1314: note = CDS (opt29) from Homo sapiens__NP_000448.3__HNF4A(39-474)(S313A)
  source 1..1314: mol_type = other RNA
atggacaccagccctagcgagggcaccaacctgaacgcccctaatagcctgggagtgtccgccctgtgtgccatctgtggcgatagagccaccggcaagcactacggcgccagctcttgtgatggctgcaagggcttcttccggcggagcgtgcggaagaaccacatgtacagctgccggttcagccggcagtgcgtggtggacaaggataagcggaaccagtgccggtactgcagactgaagaagtgcttcagagccggcatgaagaaagaagccgtgcagaacgagcgggaccggatcagcaccagaagaagcagctacgaggacagcagcctgcccagcatcaacgccctgctgcaggccgaggtgctgagcagacagatcaccagcccagtgtccggcatcaacggcgacatccgggccaagaagatcgccagcattgccgacgtgtgcgagagcatgaaggaacagctgctggtgctggtggaatgggccaagtacatccccgccttttgcgagctgcccctggacgatcaggtggccctgctgagagcacacgccggcgaacatctgctgctgggagccaccaagcggagcatggtgttcaaggacgtgctgctgctgggcaacgactacatcgtgcccagacactgccctgagctggccgagatgagccgggtgtccatcagaatcctggacgaactggtgctgccgtttcaggaactgcagatcgacgacaacgagtacgcctacctgaaggccatcatctttttcgaccccgacgccaagggcctgagcgaccctggcaagatcaagcggctgagagcccaggtgcaagtgtccctggaagattacatcaacgaccggcagtacgacagccggggcagatttggcgaactgctcctgctgctgcccaccctgcagagcatcacctggcagatgatcgagcagatccagttcatcaagctgttcggcatggccaagatcgacaatctgctgcaggaaatgctgctcgggggcagcccttctgatgcccctcatgcccaccaccctctgcaccctcacctgatgcaagaacacatgggcaccaatgtgatcgtggccaacacaatgcccacccacctgagcaacggccagatgtgcgagtggcccagacctagaggacaggccgccacacctgagacacctcagccttctccacctggcggctctggcagcgagccttacaaactgctgcctggcgctgtggccaccatcgtgaaacctctgagcgccatcccccagcccaccatcaccaagcaggaagtgatctga

SEQ ID NO: 1529 - RNA, 1314 nt, synthetic construct
  misc_feature 1..1314: note = CDS (opt29) from Homo sapiens__NP_000448.3__HNF4A(39-474)(S313E)
  source 1..1314: mol_type = other RNA
atggacaccagccctagcgagggcaccaacctgaacgcccctaatagcctgggagtgtccgccctgtgtgccatctgtggcgatagagccaccggcaagcactacggcgccagctcttgtgatggctgcaagggcttcttccggcggagcgtgcggaagaaccacatgtacagctgccggttcagccggcagtgcgtggtggacaaggataagcggaaccagtgccggtactgcagactgaagaagtgcttcagagccggcatgaagaaagaagccgtgcagaacgagcgggaccggatcagcaccagaagaagcagctacgaggacagcagcctgcccagcatcaacgccctgctgcaggccgaggtgctgagcagacagatcaccagcccagtgtccggcatcaacggcgacatccgggccaagaagatcgccagcattgccgacgtgtgcgagagcatgaaggaacagctgctggtgctggtggaatgggccaagtacatccccgccttttgcgagctgcccctggacgatcaggtggccctgctgagagcacacgccggcgaacatctgctgctgggagccaccaagcggagcatggtgttcaaggacgtgctgctgctgggcaacgactacatcgtgcccagacactgccctgagctggccgagatgagccgggtgtccatcagaatcctggacgaactggtgctgccgtttcaggaactgcagatcgacgacaacgagtacgcctacctgaaggccatcatctttttcgaccccgacgccaagggcctgagcgaccctggcaagatcaagcggctgagagaacaggtgcaagtgtccctggaagattacatcaacgaccggcagtacgacagccggggcagatttggcgaactgctcctgctgctgcccaccctgcagagcatcacctggcagatgatcgagcagatccagttcatcaagctgttcggcatggccaagatcgacaatctgctgcaggaaatgctgctcgggggcagcccttctgatgcccctcatgcccaccaccctctgcaccctcacctgatgcaagaacacatgggcaccaatgtgatcgtggccaacacaatgcccacccacctgagcaacggccagatgtgcgagtggcccagacctagaggacaggccgccacacctgagacacctcagccttctccacctggcggctctggcagcgagccttacaaactgctgcctggcgctgtggccaccatcgtgaaacctctgagcgccatcccccagcccaccatcaccaagcaggaagtgatctga

SEQ ID NO: 1530 - RNA, 1314 nt, synthetic construct
  misc_feature 1..1314: note = CDS (opt29) from Homo sapiens__NP_000448.3__HNF4A(39-474)(S142A_S143A)
  source 1..1314: mol_type = other RNA
atggacaccagccctagcgagggcaccaacctgaacgcccctaatagcctgggagtgtccgccctgtgtgccatctgtggcgatagagccaccggcaagcactacggcgccagctcttgtgatggctgcaagggcttcttccggcggagcgtgcggaagaaccacatgtacagctgccggttcagccggcagtgcgtggtggacaaggataagcggaaccagtgccggtactgcagactgaagaagtgcttcagagccggcatgaagaaagaagccgtgcagaacgagcgggaccggatcagcaccagaagagccgcctacgaggacagcagcctgcccagcatcaacgccctgctgcaggccgaggtgctgagcagacagatcaccagcccagtgtccggcatcaacggcgacatccgggccaagaagatcgccagcattgccgacgtgtgcgagagcatgaaggaacagctgctggtgctggtggaatgggccaagtacatccccgccttttgcgagctgcccctggacgatcaggtggccctgctgagagcacacgccggcgaacatctgctgctgggagccaccaagcggagcatggtgttcaaggacgtgctgctgctgggcaacgactacatcgtgcccagacactgccctgagctggccgagatgagccgggtgtccatcagaatcctggacgaactggtgctgccgtttcaggaactgcagatcgacgacaacgagtacgcctacctgaaggccatcatctttttcgaccccgacgccaagggcctgagcgaccctggcaagatcaagcggctgagaagccaggtgcaagtgtccctggaagattacatcaacgaccggcagtacgacagccggggcagatttggcgaactgctcctgctgctgcccaccctgcagagcatcacctggcagatgatcgagcagatccagttcatcaagctgttcggcatggccaagatcgacaatctgctgcaggaaatgctgctcgggggcagcccttctgatgcccctcatgcccaccaccctctgcaccctcacctgatgcaagaacacatgggcaccaatgtgatcgtggccaacacaatgcccacccacctgagcaacggccagatgtgcgagtggcccagacctagaggacaggccgccacacctgagacacctcagccttctccacctggcggctctggcagcgagccttacaaactgctgcctggcgctgtggccaccatcgtgaaacctctgagcgccatcccccagcccaccatcaccaagcaggaagtgatctga

SEQ ID NO: 1531 - RNA, 1314 nt, synthetic construct
  misc_feature 1..1314: note = CDS (opt29) from Homo sapiens__NP_000448.3__HNF4A(39-474)(S142E_S143E)
  source 1..1314: mol_type = other RNA
atggacaccagccctagcgagggcaccaacctgaacgcccctaatagcctgggagtgtccgccctgtgtgccatctgtggcgatagagccaccggcaagcactacggcgccagctcttgtgatggctgcaagggcttcttccggcggagcgtgcggaagaaccacatgtacagctgccggttcagccggcagtgcgtggtggacaaggataagcggaaccagtgccggtactgcagactgaagaagtgcttcagagccggcatgaagaaagaagccgtgcagaacgagcgggaccggatcagcaccagaagagaagagtacgaggacagcagcctgcccagcatcaacgccctgctgcaggccgaggtgctgagcagacagatcaccagcccagtgtccggcatcaacggcgacatccgggccaagaagatcgccagcattgccgacgtgtgcgagagcatgaaggaacagctgctggtgctggtggaatgggccaagtacatccccgccttttgcgagctgcccctggacgatcaggtggccctgctgagagcacacgccggcgaacatctgctgctgggagccaccaagcggagcatggtgttcaaggacgtgctgctgctgggcaacgactacatcgtgcccagacactgccctgagctggccgagatgagccgggtgtccatcagaatcctggacgaactggtgctgccgtttcaggaactgcagatcgacgacaacgagtacgcctacctgaaggccatcatctttttcgaccccgacgccaagggcctgagcgaccctggcaagatcaagcggctgagaagccaggtgcaagtgtccctggaagattacatcaacgaccggcagtacgacagccggggcagatttggcgaactgctcctgctgctgcccaccctgcagagcatcacctggcagatgatcgagcagatccagttcatcaagctgttcggcatggccaagatcgacaatctgctgcaggaaatgctgctcgggggcagcccttctgatgcccctcatgcccaccaccctctgcaccctcacctgatgcaagaacacatgggcaccaatgtgatcgtggccaacacaatgcccacccacctgagcaacggccagatgtgcgagtggcccagacctagaggacaggccgccacacctgagacacctcagccttctccacctggcggctctggcagcgagccttacaaactgctgcctggcgctgtggccaccatcgtgaaacctctgagcgccatcccccagcccaccatcaccaagcaggaagtgatctga

SEQ ID NO: 1532 - RNA, 1314 nt, synthetic construct
  misc_feature 1..1314: note = CDS (opt29) from Homo sapiens__NP_000448.3__HNF4A(39-474)(S143A)
  source 1..1314: mol_type = other RNA
atggacaccagccctagcgagggcaccaacctgaacgcccctaatagcctgggagtgtccgccctgtgtgccatctgtggcgatagagccaccggcaagcactacggcgccagctcttgtgatggctgcaagggcttcttccggcggagcgtgcggaagaaccacatgtacagctgccggttcagccggcagtgcgtggtggacaaggataagcggaaccagtgccggtactgcagactgaagaagtgcttcagagccggcatgaagaaagaagccgtgcagaacgagcgggaccggatcagcaccagaagaagcgcctacgaggacagcagcctgcccagcatcaacgccctgctgcaggccgaggtgctgagcagacagatcaccagcccagtgtccggcatcaacggcgacatccgggccaagaagatcgccagcattgccgacgtgtgcgagagcatgaaggaacagctgctggtgctggtggaatgggccaagtacatccccgccttttgcgagctgcccctggacgatcaggtggccctgctgagagcacacgccggcgaacatctgctgctgggagccaccaagcggagcatggtgttcaaggacgtgctgctgctgggcaacgactacatcgtgcccagacactgccctgagctggccgagatgagccgggtgtccatcagaatcctggacgaactggtgctgccgtttcaggaactgcagatcgacgacaacgagtacgcctacctgaaggccatcatctttttcgaccccgacgccaagggcctgagcgaccctggcaagatcaagcggctgagaagccaggtgcaagtgtccctggaagattacatcaacgaccggcagtacgacagccggggcagatttggcgaactgctcctgctgctgcccaccctgcagagcatcacctggcagatgatcgagcagatccagttcatcaagctgttcggcatggccaagatcgacaatctgctgcaggaaatgctgctcgggggcagcccttctgatgcccctcatgcccaccaccctctgcaccctcacctgatgcaagaacacatgggcaccaatgtgatcgtggccaacacaatgcccacccacctgagcaacggccagatgtgcgagtggcccagacctagaggacaggccgccacacctgagacacctcagccttctccacctggcggctctggcagcgagccttacaaactgctgcctggcgctgtggccaccatcgtgaaacctctgagcgccatcccccagcccaccatcaccaagcaggaagtgatctga

SEQ ID NO: 1533 - RNA, 1314 nt, synthetic construct
  misc_feature 1..1314: note = CDS (opt29) from Homo sapiens__NP_000448.3__HNF4A(39-474)(T166A)
  source 1..1314: mol_type = other RNA
atggacaccagccctagcgagggcaccaacctgaacgcccctaatagcctgggagtgtccgccctgtgtgccatctgtggcgatagagccaccggcaagcactacggcgccagctcttgtgatggctgcaagggcttcttccggcggagcgtgcggaagaaccacatgtacagctgccggttcagccggcagtgcgtggtggacaaggataagcggaaccagtgccggtactgcagactgaagaagtgcttcagagccggcatgaagaaagaagccgtgcagaacgagcgggaccggatcagcaccagaagaagcagctacgaggacagcagcctgcccagcatcaacgccctgctgcaggccgaggtgctgagcagacagatcgccagcccagtgtccggcatcaacggcgacatccgggccaagaagatcgccagcattgccgacgtgtgcgagagcatgaaggaacagctgctggtgctggtggaatgggccaagtacatccccgccttttgcgagctgcccctggacgatcaggtggccctgctgagagcacacgccggcgaacatctgctgctgggagccaccaagcggagcatggtgttcaaggacgtgctgctgctgggcaacgactacatcgtgcccagacactgccctgagctggccgagatgagccgggtgtccatcagaatcctggacgaactggtgctgccgtttcaggaactgcagatcgacgacaacgagtacgcctacctgaaggccatcatctttttcgaccccgacgccaagggcctgagcgaccctggcaagatcaagcggctgagaagccaggtgcaagtgtccctggaagattacatcaacgaccggcagtacgacagccggggcagatttggcgaactgctcctgctgctgcccaccctgcagagcatcacctggcagatgatcgagcagatccagttcatcaagctgttcggcatggccaagatcgacaatctgctgcaggaaatgctgctcgggggcagcccttctgatgcccctcatgcccaccaccctctgcaccctcacctgatgcaagaacacatgggcaccaatgtgatcgtggccaacacaatgcccacccacctgagcaacggccagatgtgcgagtggcccagacctagaggacaggccgccacacctgagacacctcagccttctccacctggcggctctggcagcgagccttacaaactgctgcctggcgctgtggccaccatcgtgaaacctctgagcgccatcccccagcccaccatcaccaagcaggaagtgatctga

SEQ ID NO: 1534 - RNA, 1314 nt, synthetic construct
  misc_feature 1..1314: note = CDS (opt29) from Homo sapiens__NP_000448.3__HNF4A(39-474)(S167E)
  source 1..1314: mol_type = other RNA
atggacaccagccctagcgagggcaccaacctgaacgcccctaatagcctgggagtgtccgccctgtgtgccatctgtggcgatagagccaccggcaagcactacggcgccagctcttgtgatggctgcaagggcttcttccggcggagcgtgcggaagaaccacatgtacagctgccggttcagccggcagtgcgtggtggacaaggataagcggaaccagtgccggtactgcagactgaagaagtgcttcagagccggcatgaagaaagaagccgtgcagaacgagcgggaccggatcagcaccagaagaagcagctacgaggacagcagcctgcccagcatcaacgccctgctgcaggccgaggtgctgagcagacagatcaccgaaccagtgtccggcatcaacggcgacatccgggccaagaagatcgccagcattgccgacgtgtgcgagagcatgaaggaacagctgctggtgctggtggaatgggccaagtacatccccgccttttgcgagctgcccctggacgatcaggtggccctgctgagagcacacgccggcgaacatctgctgctgggagccaccaagcggagcatggtgttcaaggacgtgctgctgctgggcaacgactacatcgtgcccagacactgccctgagctggccgagatgagccgggtgtccatcagaatcctggacgaactggtgctgccgtttcaggaactgcagatcgacgacaacgagtacgcctacctgaaggccatcatctttttcgaccccgacgccaagggcctgagcgaccctggcaagatcaagcggctgagaagccaggtgcaagtgtccctggaagattacatcaacgaccggcagtacgacagccggggcagatttggcgaactgctcctgctgctgcccaccctgcagagcatcacctggcagatgatcgagcagatccagttcatcaagctgttcggcatggccaagatcgacaatctgctgcaggaaatgctgctcgggggcagcccttctgatgcccctcatgcccaccaccctctgcaccctcacctgatgcaagaacacatgggcaccaatgtgatcgtggccaacacaatgcccacccacctgagcaacggccagatgtgcgagtggcccagacctagaggacaggccgccacacctgagacacctcagccttctccacctggcggctctggcagcgagccttacaaactgctgcctggcgctgtggccaccatcgtgaaacctctgagcgccatcccccagcccaccatcaccaagcaggaagtgatctga

SEQ ID NO: 1535 - RNA, 1314 nt, synthetic construct
  misc_feature 1..1314: note = CDS (opt29) from Homo sapiens__NP_000448.3__HNF4A(39-474)(S167A)
  source 1..1314: mol_type = other RNA
atggacaccagccctagcgagggcaccaacctgaacgcccctaatagcctgggagtgtccgccctgtgtgccatctgtggcgatagagccaccggcaagcactacggcgccagctcttgtgatggctgcaagggcttcttccggcggagcgtgcggaagaaccacatgtacagctgccggttcagccggcagtgcgtggtggacaaggataagcggaaccagtgccggtactgcagactgaagaagtgcttcagagccggcatgaagaaagaagccgtgcagaacgagcgggaccggatcagcaccagaagaagcagctacgaggacagcagcctgcccagcatcaacgccctgctgcaggccgaggtgctgagcagacagatcaccgccccagtgtccggcatcaacggcgacatccgggccaagaagatcgccagcattgccgacgtgtgcgagagcatgaaggaacagctgctggtgctggtggaatgggccaagtacatccccgccttttgcgagctgcccctggacgatcaggtggccctgctgagagcacacgccggcgaacatctgctgctgggagccaccaagcggagcatggtgttcaaggacgtgctgctgctgggcaacgactacatcgtgcccagacactgccctgagctggccgagatgagccgggtgtccatcagaatcctggacgaactggtgctgccgtttcaggaactgcagatcgacgacaacgagtacgcctacctgaaggccatcatctttttcgaccccgacgccaagggcctgagcgaccctggcaagatcaagcggctgagaagccaggtgcaagtgtccctggaagattacatcaacgaccggcagtacgacagccggggcagatttggcgaactgctcctgctgctgcccaccctgcagagcatcacctggcagatgatcgagcagatccagttcatcaagctgttcggcatggccaagatcgacaatctgctgcaggaaatgctgctcgggggcagcccttctgatgcccctcatgcccaccaccctctgcaccctcacctgatgcaagaacacatgggcaccaatgtgatcgtggccaacacaatgcccacccacctgagcaacggccagatgtgcgagtggcccagacctagaggacaggccgccacacctgagacacctcagccttctccacctggcggctctggcagcgagccttacaaactgctgcctggcgctgtggccaccatcgtgaaacctctgagcgccatcccccagcccaccatcaccaagcaggaagtgatctga

SEQ ID NO: 1536 - RNA, 1314 nt, synthetic construct
  misc_feature 1..1314: note = CDS (opt29) from Homo sapiens__NP_000448.3__HNF4A(39-474)(S167A_S378A_T429A_T432A _S436A)
  source 1..1314: mol_type = other RNA
atggacaccagccctagcgagggcaccaacctgaacgcccctaatagcctgggagtgtccgccctgtgtgccatctgtggcgatagagccaccggcaagcactacggcgccagctcttgtgatggctgcaagggcttcttccggcggagcgtgcggaagaaccacatgtacagctgccggttcagccggcagtgcgtggtggacaaggataagcggaaccagtgccggtactgcagactgaagaagtgcttcagagccggcatgaagaaagaagccgtgcagaacgagcgggaccggatcagcaccagaagaagcagctacgaggacagcagcctgcccagcatcaacgccctgctgcaggccgaggtgctgagcagacagatcaccgccccagtgtccggcatcaacggcgacatccgggccaagaagatcgccagcattgccgacgtgtgcgagagcatgaaggaacagctgctggtgctggtggaatgggccaagtacatccccgccttttgcgagctgcccctggacgatcaggtggccctgctgagagcacacgccggcgaacatctgctgctgggagccaccaagcggagcatggtgttcaaggacgtgctgctgctgggcaacgactacatcgtgcccagacactgccctgagctggccgagatgagccgggtgtccatcagaatcctggacgaactggtgctgccgtttcaggaactgcagatcgacgacaacgagtacgcctacctgaaggccatcatctttttcgaccccgacgccaagggcctgagcgaccctggcaagatcaagcggctgagaagccaggtgcaagtgtccctggaagattacatcaacgaccggcagtacgacagccggggcagatttggcgaactgctcctgctgctgcccaccctgcagagcatcacctggcagatgatcgagcagatccagttcatcaagctgttcggcatggccaagatcgacaatctgctgcaggaaatgctgctcgggggcgccccttctgatgcccctcatgcccaccaccctctgcaccctcacctgatgcaagaacacatgggcaccaatgtgatcgtggccaacacaatgcccacccacctgagcaacggccagatgtgcgagtggcccagacctagaggacaggccgccgcccctgaggcccctcagcctgccccacctggcggctctggcagcgagccttacaaactgctgcctggcgctgtggccaccatcgtgaaacctctgagcgccatcccccagcccaccatcaccaagcaggaagtgatctga

SEQ ID NO: 1537 - RNA, 1314 nt, synthetic construct
  misc_feature 1..1314: note = CDS (opt29) from Homo sapiens__NP_000448.3__HNF4A(39-474)(S167E_S378E_T429E_T432E _S436E)
  source 1..1314: mol_type = other RNA
atggacaccagccctagcgagggcaccaacctgaacgcccctaatagcctgggagtgtccgccctgtgtgccatctgtggcgatagagccaccggcaagcactacggcgccagctcttgtgatggctgcaagggcttcttccggcggagcgtgcggaagaaccacatgtacagctgccggttcagccggcagtgcgtggtggacaaggataagcggaaccagtgccggtactgcagactgaagaagtgcttcagagccggcatgaagaaagaagccgtgcagaacgagcgggaccggatcagcaccagaagaagcagctacgaggacagcagcctgcccagcatcaacgccctgctgcaggccgaggtgctgagcagacagatcaccgaaccagtgtccggcatcaacggcgacatccgggccaagaagatcgccagcattgccgacgtgtgcgagagcatgaaggaacagctgctggtgctggtggaatgggccaagtacatccccgccttttgcgagctgcccctggacgatcaggtggccctgctgagagcacacgccggcgaacatctgctgctgggagccaccaagcggagcatggtgttcaaggacgtgctgctgctgggcaacgactacatcgtgcccagacactgccctgagctggccgagatgagccgggtgtccatcagaatcctggacgaactggtgctgccgtttcaggaactgcagatcgacgacaacgagtacgcctacctgaaggccatcatctttttcgaccccgacgccaagggcctgagcgaccctggcaagatcaagcggctgagaagccaggtgcaagtgtccctggaagattacatcaacgaccggcagtacgacagccggggcagatttggcgaactgctcctgctgctgcccaccctgcagagcatcacctggcagatgatcgagcagatccagttcatcaagctgttcggcatggccaagatcgacaatctgctgcaggaaatgctgctcgggggcgagccttctgatgcccctcatgcccaccaccctctgcaccctcacctgatgcaagaacacatgggcaccaatgtgatcgtggccaacacaatgcccacccacctgagcaacggccagatgtgcgagtggcccagacctagaggacaggccgccgaacctgaggagcctcagcctgaaccacctggcggctctggcagcgagccttacaaactgctgcctggcgctgtggccaccatcgtgaaacctctgagcgccatcccccagcccaccatcaccaagcaggaagtgatctga

SEQ ID NO: 1538 - RNA, 1314 nt, synthetic construct
  misc_feature 1..1314: note = CDS (opt29) from Homo sapiens__NP_000448.3__HNF4A(39-474)(S87A)
  source 1..1314: mol_type = other RNA
atggacaccagccctagcgagggcaccaacctgaacgcccctaatagcctgggagtgtccgccctgtgtgccatctgtggcgatagagccaccggcaagcactacggcgccagctcttgtgatggctgcaagggcttcttccggcgggccgtgcggaagaaccacatgtacagctgccggttcagccggcagtgcgtggtggacaaggataagcggaaccagtgccggtactgcagactgaagaagtgcttcagagccggcatgaagaaagaagccgtgcagaacgagcgggaccggatcagcaccagaagaagcagctacgaggacagcagcctgcccagcatcaacgccctgctgcaggccgaggtgctgagcagacagatcaccagcccagtgtccggcatcaacggcgacatccgggccaagaagatcgccagcattgccgacgtgtgcgagagcatgaaggaacagctgctggtgctggtggaatgggccaagtacatccccgccttttgcgagctgcccctggacgatcaggtggccctgctgagagcacacgccggcgaacatctgctgctgggagccaccaagcggagcatggtgttcaaggacgtgctgctgctgggcaacgactacatcgtgcccagacactgccctgagctggccgagatgagccgggtgtccatcagaatcctggacgaactggtgctgccgtttcaggaactgcagatcgacgacaacgagtacgcctacctgaaggccatcatctttttcgaccccgacgccaagggcctgagcgaccctggcaagatcaagcggctgagaagccaggtgcaagtgtccctggaagattacatcaacgaccggcagtacgacagccggggcagatttggcgaactgctcctgctgctgcccaccctgcagagcatcacctggcagatgatcgagcagatccagttcatcaagctgttcggcatggccaagatcgacaatctgctgcaggaaatgctgctcgggggcagcccttctgatgcccctcatgcccaccaccctctgcaccctcacctgatgcaagaacacatgggcaccaatgtgatcgtggccaacacaatgcccacccacctgagcaacggccagatgtgcgagtggcccagacctagaggacaggccgccacacctgagacacctcagccttctccacctggcggctctggcagcgagccttacaaactgctgcctggcgctgtggccaccatcgtgaaacctctgagcgccatcccccagcccaccatcaccaagcaggaagtgatctga

SEQ ID NO: 1539 - RNA, 1314 nt, synthetic construct
  misc_feature 1..1314: note = CDS (opt29) from Homo sapiens__NP_000448.3__HNF4A(39-474)(S87E)
  source 1..1314: mol_type = other RNA
atggacaccagccctagcgagggcaccaacctgaacgcccctaatagcctgggagtgtccgccctgtgtgccatctgtggcgatagagccaccggcaagcactacggcgccagctcttgtgatggctgcaagggcttcttccggcgggaggtgcggaagaaccacatgtacagctgccggttcagccggcagtgcgtggtggacaaggataagcggaaccagtgccggtactgcagactgaagaagtgcttcagagccggcatgaagaaagaagccgtgcagaacgagcgggaccggatcagcaccagaagaagcagctacgaggacagcagcctgcccagcatcaacgccctgctgcaggccgaggtgctgagcagacagatcaccagcccagtgtccggcatcaacggcgacatccgggccaagaagatcgccagcattgccgacgtgtgcgagagcatgaaggaacagctgctggtgctggtggaatgggccaagtacatccccgccttttgcgagctgcccctggacgatcaggtggccctgctgagagcacacgccggcgaacatctgctgctgggagccaccaagcggagcatggtgttcaaggacgtgctgctgctgggcaacgactacatcgtgcccagacactgccctgagctggccgagatgagccgggtgtccatcagaatcctggacgaactggtgctgccgtttcaggaactgcagatcgacgacaacgagtacgcctacctgaaggccatcatctttttcgaccccgacgccaagggcctgagcgaccctggcaagatcaagcggctgagaagccaggtgcaagtgtccctggaagattacatcaacgaccggcagtacgacagccggggcagatttggcgaactgctcctgctgctgcccaccctgcagagcatcacctggcagatgatcgagcagatccagttcatcaagctgttcggcatggccaagatcgacaatctgctgcaggaaatgctgctcgggggcagcccttctgatgcccctcatgcccaccaccctctgcaccctcacctgatgcaagaacacatgggcaccaatgtgatcgtggccaacacaatgcccacccacctgagcaacggccagatgtgcgagtggcccagacctagaggacaggccgccacacctgagacacctcagccttctccacctggcggctctggcagcgagccttacaaactgctgcctggcgctgtggccaccatcgtgaaacctctgagcgccatcccccagcccaccatcaccaagcaggaagtgatctga

SEQ ID NO: 1540 - RNA, 1314 nt, synthetic construct; identical to SEQ ID NO: 1527
  misc_feature 1..1314: note = CDS (opt29) from Homo sapiens__NP_000448.3__HNF4A(39-474)(R2V)
  source 1..1314: mol_type = other RNA

SEQ ID NO: 1541 - RNA, 1314 nt, synthetic construct; identical to SEQ ID NO: 1527
  misc_feature 1..1314: note = CDS (opt29) from Homo sapiens__NP_000448.3__HNF4A(39-474)(R2V_K5V)
  source 1..1314: mol_type = other RNA

SEQ ID NO: 1542 - RNA, 1314 nt, synthetic construct
  misc_feature 1..1314: note = CDS (opt29) from Homo sapiens__NP_000448.3__HNF4A(39-474)(K179R_K180R)
  source 1..1314: mol_type = other RNA
atggacaccagccctagcgagggcaccaacctgaacgcccctaatagcctgggagtgtccgccctgtgtgccatctgtggcgatagagccaccggcaagcactacggcgccagctcttgtgatggctgcaagggcttcttccggcggagcgtgcggaagaaccacatgtacagctgccggttcagccggcagtgcgtggtggacaaggataagcggaaccagtgccggtactgcagactgaagaagtgcttcagagccggcatgaagaaagaagccgtgcagaacgagcgggaccggatcagcaccagaagaagcagctacgaggacagcagcctgcccagcatcaacgccctgctgcaggccgaggtgctgagcagacagatcaccagcccagtgtccggcatcaacggcgacatccgggcccggagaatcgccagcattgccgacgtgtgcgagagcatgaaggaacagctgctggtgctggtggaatgggccaagtacatccccgccttttgcgagctgcccctggacgatcaggtggccctgctgagagcacacgccggcgaacatctgctgctgggagccaccaagcggagcatggtgttcaaggacgtgctgctgctgggcaacgactacatcgtgcccagacactgccctgagctggccgagatgagccgggtgtccatcagaatcctggacgaactggtgctgccgtttcaggaactgcagatcgacgacaacgagtacgcctacctgaaggccatcatctttttcgaccccgacgccaagggcctgagcgaccctggcaagatcaagcggctgagaagccaggtgcaagtgtccctggaagattacatcaacgaccggcagtacgacagccggggcagatttggcgaactgctcctgctgctgcccaccctgcagagcatcacctggcagatgatcgagcagatccagttcatcaagctgttcggcatggccaagatcgacaatctgctgcaggaaatgctgctcgggggcagcccttctgatgcccctcatgcccaccaccctctgcaccctcacctgatgcaagaacacatgggcaccaatgtgatcgtggccaacacaatgcccacccacctgagcaacggccagatgtgcgagtggcccagacctagaggacaggccgccacacctgagacacctcagccttctccacctggcggctctggcagcgagccttacaaactgctgcctggcgctgtggccaccatcgtgaaacctctgagcgccatcccccagcccaccatcaccaagcaggaagtgatctga

SEQ ID NO: 1543 - RNA, 1314 nt, synthetic construct
  misc_feature 1..1314: note = CDS (opt29) from Homo sapiens__NP_000448.3__HNF4A(39-474)(K234R)
  source 1..1314: mol_type = other RNA
atggacaccagccctagcgagggcaccaacctgaacgcccctaatagcctgggagtgtccgccctgtgtgccatctgtggcgatagagccaccggcaagcactacggcgccagctcttgtgatggctgcaagggcttcttccggcggagcgtgcggaagaaccacatgtacagctgccggttcagccggcagtgcgtggtggacaaggataagcggaaccagtgccggtactgcagactgaagaagtgcttcagagccggcatgaagaaagaagccgtgcagaacgagcgggaccggatcagcaccagaagaagcagctacgaggacagcagcctgcccagcatcaacgccctgctgcaggccgaggtgctgagcagacagatcaccagcccagtgtccggcatcaacggcgacatccgggccaagaagatcgccagcattgccgacgtgtgcgagagcatgaaggaacagctgctggtgctggtggaatgggccaagtacatccccgccttttgcgagctgcccctggacgatcaggtggccctgctgagagcacacgccggcgaacatctgctgctgggagccacccggcggagcatggtgttcaaggacgtgctgctgctgggcaacgactacatcgtgcccagacactgccctgagctggccgagatgagccgggtgtccatcagaatcctggacgaactggtgctgccgtttcaggaactgcagatcgacgacaacgagtacgcctacctgaaggccatcatctttttcgaccccgacgccaagggcctgagcgaccctggcaagatcaagcggctgagaagccaggtgcaagtgtccctggaagattacatcaacgaccggcagtacgacagccggggcagatttggcgaactgctcctgctgctgcccaccctgcagagcatcacctggcagatgatcgagcagatccagttcatcaagctgttcggcatggccaagatcgacaatctgctgcaggaaatgctgctcgggggcagcccttctgatgcccctcatgcccaccaccctctgcaccctcacctgatgcaagaacacatgggcaccaatgtgatcgtggccaacacaatgcccacccacctgagcaacggccagatgtgcgagtggcccagacctagaggacaggccgccacacctgagacacctcagccttctccacctggcggctctggcagcgagccttacaaactgctgcctggcgctgtggccaccatcgtgaaacctctgagcgccatcccccagcccaccatcaccaagcaggaagtgatctga

SEQ ID NO: 1544 - RNA, 1314 nt, synthetic construct
  misc_feature 1..1314: note = CDS (opt29) from Homo sapiens__NP_000448.3__HNF4A(39-474)(K300R)
  source 1..1314: mol_type = other RNA
atggacaccagccctagcgagggcaccaacctgaacgcccctaatagcctgggagtgtccgccctgtgtgccatctgtggcgatagagccaccggcaagcactacggcgccagctcttgtgatggctgcaagggcttcttccggcggagcgtgcggaagaaccacatgtacagctgccggttcagccggcagtgcgtggtggacaaggataagcggaaccagtgccggtactgcagactgaagaagtgcttcagagccggcatgaagaaagaagccgtgcagaacgagcgggaccggatcagcaccagaagaagcagctacgaggacagcagcctgcccagcatcaacgccctgctgcaggccgaggtgctgagcagacagatcaccagcccagtgtccggcatcaacggcgacatccgggccaagaagatcgccagcattgccgacgtgtgcgagagcatgaaggaacagctgctggtgctggtggaatgggccaagtacatccccgccttttgcgagctgcccctggacgatcaggtggccctgctgagagcacacgccggcgaacatctgctgctgggagccaccaagcggagcatggtgttcaaggacgtgctgctgctgggcaacgactacatcgtgcccagacactgccctgagctggccgagatgagccgggtgtccatcagaatcctggacgaactggtgctgccgtttcaggaactgcagatcgacgacaacgagtacgcctacctgaaggccatcatctttttcgaccccgacgccagaggcctgagcgaccctggcaagatcaagcggctgagaagccaggtgcaagtgtccctggaagattacatcaacgaccggcagtacgacagccggggcagatttggcgaactgctcctgctgctgcccaccctgcagagcatcacctggcagatgatcgagcagatccagttcatcaagctgttcggcatggccaagatcgacaatctgctgcaggaaatgctgctcgggggcagcccttctgatgcccctcatgcccaccaccctctgcaccctcacctgatgcaagaacacatgggcaccaatgtgatcgtggccaacacaatgcccacccacctgagcaacggccagatgtgcgagtggcccagacctagaggacaggccgccacacctgagacacctcagccttctccacctggcggctctggcagcgagccttacaaactgctgcctggcgctgtggccaccatcgtgaaacctctgagcgccatcccccagcccaccatcaccaagcaggaagtgatctga

SEQ ID NO: 1545 - RNA, 1314 nt, synthetic construct
  misc_feature 1..1314: note = CDS (opt29) from Homo sapiens__NP_000448.3__HNF4A(39-474)(K300R_K307R_K309R)
  source 1..1314: mol_type = other RNA
atggacaccagccctagcgagggcaccaacctgaacgcccctaatagcctgggagtgtccgccctgtgtgccatctgtggcgatagagccaccggcaagcactacggcgccagctcttgtgatggctgcaagggcttcttccggcggagcgtgcggaagaaccacatgtacagctgccggttcagccggcagtgcgtggtggacaaggataagcggaaccagtgccggtactgcagactgaagaagtgcttcagagccggcatgaagaaagaagccgtgcagaacgagcgggaccggatcagcaccagaagaagcagctacgaggacagcagcctgcccagcatcaacgccctgctgcaggccgaggtgctgagcagacagatcaccagcccagtgtccggcatcaacggcgacatccgggccaagaagatcgccagcattgccgacgtgtgcgagagcatgaaggaacagctgctggtgctggtggaatgggccaagtacatccccgccttttgcgagctgcccctggacgatcaggtggccctgctgagagcacacgccggcgaacatctgctgctgggagccaccaagcggagcatggtgttcaaggacgtgctgctgctgggcaacgactacatcgtgcccagacactgccctgagctggccgagatgagccgggtgtccatcagaatcctggacgaactggtgctgccgtttcaggaactgcagatcgacgacaacgagtacgcctacctgaaggccatcatctttttcgaccccgacgccagaggcctgagcgaccctggccggatcagacggctgagaagccaggtgcaagtgtccctggaagattacatcaacgaccggcagtacgacagccggggcagatttggcgaactgctcctgctgctgcccaccctgcagagcatcacctggcagatgatcgagcagatccagttcatcaagctgttcggcatggccaagatcgacaatctgctgcaggaaatgctgctcgggggcagcccttctgatgcccctcatgcccaccaccctctgcaccctcacctgatgcaagaacacatgggcaccaatgtgatcgtggccaacacaatgcccacccacctgagcaacggccagatgtgcgagtggcccagacctagaggacaggccgccacacctgagacacctcagccttctccacctggcggctctggcagcgagccttacaaactgctgcctggcgctgtggccaccatcgtgaaacctctgagcgccatcccccagcccaccatcaccaagcaggaagtgatctga

SEQ ID NO: 1546 - RNA, 1314 nt, synthetic construct
  misc_feature 1..1314: note = CDS (opt29) from Homo sapiens__NP_000448.3__HNF4A(39-474)(K447R_K470R)
  source 1..1314: mol_type = other RNA
atggacaccagccctagcgagggcaccaacctgaacgcccctaatagcctgggagtgtccgccctgtgtgccatctgtggcgatagagccaccggcaagcactacggcgccagctcttgtgatggctgcaagggcttcttccggcggagcgtgcggaagaaccacatgtacagctgccggttcagccggcagtgcgtggtggacaaggataagcggaaccagtgccggtactgcagactgaagaagtgcttcagagccggcatgaagaaagaagccgtgcagaacgagcgggaccggatcagcaccagaagaagcagctacgaggacagcagcctgcccagcatcaacgccctgctgcaggccgaggtgctgagcagacagatcaccagcccagtgtccggcatcaacggcgacatccgggccaagaagatcgccagcattgccgacgtgtgcgagagcatgaaggaacagctgctggtgctggtggaatgggccaagtacatccccgccttttgcgagctgcccctggacgatcaggtggccctgctgagagcacacgccggcgaacatctgctgctgggagccaccaagcggagcatggtgttcaaggacgtgctgctgctgggcaacgactacatcgtgcccagacactgccctgagctggccgagatgagccgggtgtccatcagaatcctggacgaactggtgctgccgtttcaggaactgcagatcgacgacaacgagtacgcctacctgaaggccatcatctttttcgaccccgacgccaagggcctgagcgaccctggcaagatcaagcggctgagaagccaggtgcaagtgtccctggaagattacatcaacgaccggcagtacgacagccggggcagatttggcgaactgctcctgctgctgcccaccctgcagagcatcacctggcagatgatcgagcagatccagttcatcaagctgttcggcatggccaagatcgacaatctgctgcaggaaatgctgctcgggggcagcccttctgatgcccctcatgcccaccaccctctgcaccctcacctgatgcaagaacacatgggcaccaatgtgatcgtggccaacacaatgcccacccacctgagcaacggccagatgtgcgagtggcccagacctagaggacaggccgccacacctgagacacctcagccttctccacctggcggctctggcagcgagccttaccggctgctgcctggcgctgtggccaccatcgtgaaacctctgagcgccatcccccagcccaccatcacccggcaggaagtgatctga

SEQ ID NO: 1547 - RNA, 1314 nt, synthetic construct
  misc_feature 1..1314: note = CDS (opt29) from Homo sapiens__NP_000448.3__HNF4A(39-474)(K458R)
  source 1..1314: mol_type = other RNA
atggacaccagccctagcgagggcaccaacctgaacgcccctaatagcctgggagtgtccgccctgtgtgccatctgtggcgatagagccaccggcaagcactacggcgccagctcttgtgatggctgcaagggcttcttccggcggagcgtgcggaagaaccacatgtacagctgccggttcagccggcagtgcgtggtggacaaggataagcggaaccagtgccggtactgcagactgaagaagtgcttcagagccggcatgaagaaagaagccgtgcagaacgagcgggaccggatcagcaccagaagaagcagctacgaggacagcagcctgcccagcatcaacgccctgctgcaggccgaggtgctgagcagacagatcaccagcccagtgtccggcatcaacggcgacatccgggccaagaagatcgccagcattgccgacgtgtgcgagagcatgaaggaacagctgctggtgctggtggaatgggccaagtacatccccgccttttgcgagctgcccctggacgatcaggtggccctgctgagagcacacgccggcgaacatctgctgctgggagccaccaagcggagcatggtgttcaaggacgtgctgctgctgggcaacgactacatcgtgcccagacactgccctgagctggccgagatgagccgggtgtccatcagaatcctggacgaactggtgctgccgtttcaggaactgcagatcgacgacaacgagtacgcctacctgaaggccatcatctttttcgaccccgacgccaagggcctgagcgaccctggcaagatcaagcggctgagaagccaggtgcaagtgtccctggaagattacatcaacgaccggcagtacgacagccggggcagatttggcgaactgctcctgctgctgcccaccctgcagagcatcacctggcagatgatcgagcagatccagttcatcaagctgttcggcatggccaagatcgacaatctgctgcaggaaatgctgctcgggggcagcccttctgatgcccctcatgcccaccaccctctgcaccctcacctgatgcaagaacacatgggcaccaatgtgatcgtggccaacacaatgcccacccacctgagcaacggccagatgtgcgagtggcccagacctagaggacaggccgccacacctgagacacctcagccttctccacctggcggctctggcagcgagccttacaaactgctgcctggcgctgtggccaccatcgtgagacctctgagcgccatcccccagcccaccatcaccaagcaggaagtgatctga

SEQ ID NO: 1548 - RNA, 1314 nt, synthetic construct
  misc_feature 1..1314: note = CDS (opt29) from Homo sapiens__NP_000448.3__HNF4A(39-474)(K106R_K108R_K126R_K127R )
  source 1..1314: mol_type = other RNA
atggacaccagccctagcgagggcaccaacctgaacgcccctaatagcctgggagtgtccgccctgtgtgccatctgtggcgatagagccaccggcaagcactacggcgccagctcttgtgatggctgcaagggcttcttccggcggagcgtgcggaagaaccacatgtacagctgccggttcagccggcagtgcgtggtggaccgggatagacggaaccagtgccggtactgcagactgaagaagtgcttcagagccggcatgcggagagaagccgtgcagaacgagcgggaccggatcagcaccagaagaagcagctacgaggacagcagcctgcccagcatcaacgccctgctgcaggccgaggtgctgagcagacagatcaccagcccagtgtccggcatcaacggcgacatccgggccaagaagatcgccagcattgccgacgtgtgcgagagcatgaaggaacagctgctggtgctggtggaatgggccaagtacatccccgccttttgcgagctgcccctggacgatcaggtggccctgctgagagcacacgccggcgaacatctgctgctgggagccaccaagcggagcatggtgttcaaggacgtgctgctgctgggcaacgactacatcgtgcccagacactgccctgagctggccgagatgagccgggtgtccatcagaatcctggacgaactggtgctgccgtttcaggaactgcagatcgacgacaacgagtacgcctacctgaaggccatcatctttttcgaccccgacgccaagggcctgagcgaccctggcaagatcaagcggctgagaagccaggtgcaagtgtccctggaagattacatcaacgaccggcagtacgacagccggggcagatttggcgaactgctcctgctgctgcccaccctgcagagcatcacctggcagatgatcgagcagatccagttcatcaagctgttcggcatggccaagatcgacaatctgctgcaggaaatgctgctcgggggcagcccttctgatgcccctcatgcccaccaccctctgcaccctcacctgatgcaagaacacatgggcaccaatgtgatcgtggccaacacaatgcccacccacctgagcaacggccagatgtgcgagtggcccagacctagaggacaggccgccacacctgagacacctcagccttctccacctggcggctctggcagcgagccttacaaactgctgcctggcgctgtggccaccatcgtgaaacctctgagcgccatcccccagcccaccatcaccaagcaggaagtgatctga

SEQ ID NO: 1549 - RNA, 1314 nt, synthetic construct
  misc_feature 1..1314: note = CDS (opt29) from Homo sapiens__NP_000448.3__HNF4A(39-474)(E285Q)
  source 1..1314: mol_type = other RNA
atggacaccagccctagcgagggcaccaacctgaacgcccctaatagcctgggagtgtccgccctgtgtgccatctgtggcgatagagccaccggcaagcactacggcgccagctcttgtgatggctgcaagggcttcttccggcggagcgtgcggaagaaccacatgtacagctgccggttcagccggcagtgcgtggtggacaaggataagcggaaccagtgccggtactgcagactgaagaagtgcttcagagccggcatgaagaaagaagccgtgcagaacgagcgggaccggatcagcaccagaagaagcagctacgaggacagcagcctgcccagcatcaacgccctgctgcaggccgaggtgctgagcagacagatcaccagcccagtgtccggcatcaacggcgacatccgggccaagaagatcgccagcattgccgacgtgtgcgagagcatgaaggaacagctgctggtgctggtggaatgggccaagtacatccccgccttttgcgagctgcccctggacgatcaggtggccctgctgagagcacacgccggcgaacatctgctgctgggagccaccaagcggagcatggtgttcaaggacgtgctgctgctgggcaacgactacatcgtgcccagacactgccctgagctggccgagatgagccgggtgtccatcagaatcctggacgaactggtgctgccgtttcaggaactgcagatcgacgacaaccagtacgcctacctgaaggccatcatctttttcgaccccgacgccaagggcctgagcgaccctggcaagatcaagcggctgagaagccaggtgcaagtgtccctggaagattacatcaacgaccggcagtacgacagccggggcagatttggcgaactgctcctgctgctgcccaccctgcagagcatcacctggcagatgatcgagcagatccagttcatcaagctgttcggcatggccaagatcgacaatctgctgcaggaaatgctgctcgggggcagcccttctgatgcccctcatgcccaccaccctctgcaccctcacctgatgcaagaacacatgggcaccaatgtgatcgtggccaacacaatgcccacccacctgagcaacggccagatgtgcgagtggcccagacctagaggacaggccgccacacctgagacacctcagccttctccacctggcggctctggcagcgagccttacaaactgctgcctggcgctgtggccaccatcgtgaaacctctgagcgccatcccccagcccaccatcaccaagcaggaagtgatctga

SEQ ID NO: 1550 - RNA, 1314 nt, synthetic construct
  misc_feature 1..1314: note = CDS (opt29) from Homo sapiens__NP_000448.3__HNF4A(39-474)(T166E)
  source 1..1314: mol_type = other RNA
atggacaccagccctagcgagggcaccaacctgaacgcccctaatagcctgggagtgtccgccctgtgtgccatctgtggcgatagagccaccggcaagcactacggcgccagctcttgtgatggctgcaagggcttcttccggcggagcgtgcggaagaaccacatgtacagctgccggttcagccggcagtgcgtggtggacaaggataagcggaaccagtgccggtactgcagactgaagaagtgcttcagagccggcatgaagaaagaagccgtgcagaacgagcgggaccggatcagcaccagaagaagcagctacgaggacagcagcctgcccagcatcaacgccctgctgcaggccgaggtgctgagcagacagatcgagagcccagtgtccggcatcaacggcgacatccgggccaagaagatcgccagcattgccgacgtgtgcgagagcatgaaggaacagctgctggtgctggtggaatgggccaagtacatccccgccttttgcgagctgcccctggacgatcaggtggccctgctgagagcacacgccggcgaacatctgctgctgggagccaccaagcggagcatggtgttcaaggacgtgctgctgctgggcaacgactacatcgtgcccagacactgccctgagctggccgagatgagccgggtgtccatcagaatcctggacgaactggtgctgccgtttcaggaactgcagatcgacgacaacgagtacgcctacctgaaggccatcatctttttcgaccccgacgccaagggcctgagcgaccctggcaagatcaagcggctgagaagccaggtgcaagtgtccctggaagattacatcaacgaccggcagtacgacagccggggcagatttggcgaactgctcctgctgctgcccaccctgcagagcatcacctggcagatgatcgagcagatccagttcatcaagctgttcggcatggccaagatcgacaatctgctgcaggaaatgctgctcgggggcagcccttctgatgcccctcatgcccaccaccctctgcaccctcacctgatgcaagaacacatgggcaccaatgtgatcgtggccaacacaatgcccacccacctgagcaacggccagatgtgcgagtggcccagacctagaggacaggccgccacacctgagacacctcagccttctccacctggcggctctggcagcgagccttacaaactgctgcctggcgctgtggccaccatcgtgaaacctctgagcgccatcccccagcccaccatcaccaagcaggaagtgatctga

SEQ ID NO: 1551 - RNA, 1314 nt, synthetic construct
  misc_feature 1..1314: note = CDS (opt29) from Homo sapiens__NP_000448.3__HNF4A(39-474)(S148A)
  source 1..1314: mol_type = other RNA
atggacaccagccctagcgagggcaccaacctgaacgcccctaatagcctgggagtgtccgccctgtgtgccatctgtggcgatagagccaccggcaagcactacggcgccagctcttgtgatggctgcaagggcttcttccggcggagcgtgcggaagaaccacatgtacagctgccggttcagccggcagtgcgtggtggacaaggataagcggaaccagtgccggtactgcagactgaagaagtgcttcagagccggcatgaagaaagaagccgtgcagaacgagcgggaccggatcagcaccagaagaagcagctacgaggacagcgccctgcccagcatcaacgccctgctgcaggccgaggtgctgagcagacagatcaccagcccagtgtccggcatcaacggcgacatccgggccaagaagatcgccagcattgccgacgtgtgcgagagcatgaaggaacagctgctggtgctggtggaatgggccaagtacatccccgccttttgcgagctgcccctggacgatcaggtggccctgctgagagcacacgccggcgaacatctgctgctgggagccaccaagcggagcatggtgttcaaggacgtgctgctgctgggcaacgactacatcgtgcccagacactgccctgagctggccgagatgagccgggtgtccatcagaatcctggacgaactggtgctgccgtttcaggaactgcagatcgacgacaacgagtacgcctacctgaaggccatcatctttttcgaccccgacgccaagggcctgagcgaccctggcaagatcaagcggctgagaagccaggtgcaagtgtccctggaagattacatcaacgaccggcagtacgacagccggggcagatttggcgaactgctcctgctgctgcccaccctgcagagcatcacctggcagatgatcgagcagatccagttcatcaagctgttcggcatggccaagatcgacaatctgctgcaggaaatgctgctcgggggcagcccttctgatgcccctcatgcccaccaccctctgcaccctcacctgatgcaagaacacatgggcaccaatgtgatcgtggccaacacaatgcccacccacctgagcaacggccagatgtgcgagtggcccagacctagaggacaggccgccacacctgagacacctcagccttctccacctggcggctctggcagcgagccttacaaactgctgcctggcgctgtggccaccatcgtgaaacctctgagcgccatcccccagcccaccatcaccaagcaggaagtgatctga

SEQ ID NO: 1552 - RNA, 1314 nt, synthetic construct
  misc_feature 1..1314: note = CDS (opt29) from Homo sapiens__NP_000448.3__HNF4A(39-474)(S148E)
  source 1..1314: mol_type = other RNA
atggacaccagccctagcgagggcaccaacctgaacgcccctaatagcctgggagtgtccgccctgtgtgccatctgtggcgatagagccaccggcaagcactacggcgccagctcttgtgatggctgcaagggcttcttccggcggagcgtgcggaagaaccacatgtacagctgccggttcagccggcagtgcgtggtggacaaggataagcggaaccagtgccggtactgcagactgaagaagtgcttcagagccggcatgaagaaagaagccgtgcagaacgagcgggaccggatcagcaccagaagaagcagctacgaggacagcgaactgcccagcatcaacgccctgctgcaggccgaggtgctgagcagacagatcaccagcccagtgtccggcatcaacggcgacatccgggccaagaagatcgccagcattgccgacgtgtgcgagagcatgaaggaacagctgctggtgctggtggaatgggccaagtacatccccgccttttgcgagctgcccctggacgatcaggtggccctgctgagagcacacgccggcgaacatctgctgctgggagccaccaagcggagcatggtgttcaaggacgtgctgctgctgggcaacgactacatcgtgcccagacactgccctgagctggccgagatgagccgggtgtccatcagaatcctggacgaactggtgctgccgtttcaggaactgcagatcgacgacaacgagtacgcctacctgaaggccatcatctttttcgaccccgacgccaagggcctgagcgaccctggcaagatcaagcggctgagaagccaggtgcaagtgtccctggaagattacatcaacgaccggcagtacgacagccggggcagatttggcgaactgctcctgctgctgcccaccctgcagagcatcacctggcagatgatcgagcagatccagttcatcaagctgttcggcatggccaagatcgacaatctgctgcaggaaatgctgctcgggggcagcccttctgatgcccctcatgcccaccaccctctgcaccctcacctgatgcaagaacacatgggcaccaatgtgatcgtggccaacacaatgcccacccacctgagcaacggccagatgtgcgagtggcccagacctagaggacaggccgccacacctgagacacctcagccttctccacctggcggctctggcagcgagccttacaaactgctgcctggcgctgtggccaccatcgtgaaacctctgagcgccatcccccagcccaccatcaccaagcaggaagtgatctga

SEQ ID NO: 1553 - RNA, 1314 nt, synthetic construct
  misc_feature 1..1314: note = CDS (opt29) from Homo sapiens__NP_000448.3__HNF4A(39-474)(S183A)
  source 1..1314: mol_type = other RNA
atggacaccagccctagcgagggcaccaacctgaacgcccctaatagcctgggagtgtccgccctgtgtgccatctgtggcgatagagccaccggcaagcactacggcgccagctcttgtgatggctgcaagggcttcttccggcggagcgtgcggaagaaccacatgtacagctgccggttcagccggcagtgcgtggtggacaaggataagcggaaccagtgccggtactgcagactgaagaagtgcttcagagccggcatgaagaaagaagccgtgcagaacgagcgggaccggatcagcaccagaagaagcagctacgaggacagcagcctgcccagcatcaacgccctgctgcaggccgaggtgctgagcagacagatcaccagcccagtgtccggcatcaacggcgacatccgggccaagaagatcgccgccattgccgacgtgtgcgagagcatgaaggaacagctgctggtgctggtggaatgggccaagtacatccccgccttttgcgagctgcccctggacgatcaggtggccctgctgagagcacacgccggcgaacatctgctgctgggagccaccaagcggagcatggtgttcaaggacgtgctgctgctgggcaacgactacatcgtgcccagacactgccctgagctggccgagatgagccgggtgtccatcagaatcctggacgaactggtgctgccgtttcaggaactgcagatcgacgacaacgagtacgcctacctgaaggccatcatctttttcgaccccgacgccaagggcctgagcgaccctggcaagatcaagcggctgagaagccaggtgcaagtgtccctggaagattacatcaacgaccggcagtacgacagccggggcagatttggcgaactgctcctgctgctgcccaccctgcagagcatcacctggcagatgatcgagcagatccagttcatcaagctgttcggcatggccaagatcgacaatctgctgcaggaaatgctgctcgggggcagcccttctgatgcccctcatgcccaccaccctctgcaccctcacctgatgcaagaacacatgggcaccaatgtgatcgtggccaacacaatgcccacccacctgagcaacggccagatgtgcgagtggcccagacctagaggacaggccgccacacctgagacacctcagccttctccacctggcggctctggcagcgagccttacaaactgctgcctggcgctgtggccaccatcgtgaaacctctgagcgccatcccccagcccaccatcaccaagcaggaagtgatctga

SEQ ID NO: 1554 - RNA, 1314 nt, synthetic construct
  misc_feature 1..1314: note = CDS (opt29) from Homo sapiens__NP_000448.3__HNF4A(39-474)(S183E)
  source 1..1314: mol_type = other RNA
atggacaccagccctagcgagggcaccaacctgaacgcccctaatagcctgggagtgtccgccctgtgtgccatctgtggcgatagagccaccggcaagcactacggcgccagctcttgtgatggctgcaagggcttcttccggcggagcgtgcggaagaaccacatgtacagctgccggttcagccggcagtgcgtggtggacaaggataagcggaaccagtgccggtactgcagactgaagaagtgcttcagagccggcatgaagaaagaagccgtgcagaacgagcgggaccggatcagcaccagaagaagcagctacgaggacagcagcctgcccagcatcaacgccctgctgcaggccgaggtgctgagcagacagatcaccagcccagtgtccggcatcaacggcgacatccgggccaagaagatcgccgagattgccgacgtgtgcgagagcatgaaggaacagctgctggtgctggtggaatgggccaagtacatccccgccttttgcgagctgcccctggacgatcaggtggccctgctgagagcacacgccggcgaacatctgctgctgggagccaccaagcggagcatggtgttcaaggacgtgctgctgctgggcaacgactacatcgtgcccagacactgccctgagctggccgagatgagccgggtgtccatcagaatcctggacgaactggtgctgccgtttcaggaactgcagatcgacgacaacgagtacgcctacctgaaggccatcatctttttcgaccccgacgccaagggcctgagcgaccctggcaagatcaagcggctgagaagccaggtgcaagtgtccctggaagattacatcaacgaccggcagtacgacagccggggcagatttggcgaactgctcctgctgctgcccaccctgcagagcatcacctggcagatgatcgagcagatccagttcatcaagctgttcggcatggccaagatcgacaatctgctgcaggaaatgctgctcgggggcagcccttctgatgcccctcatgcccaccaccctctgcaccctcacctgatgcaagaacacatgggcaccaatgtgatcgtggccaacacaatgcccacccacctgagcaacggccagatgtgcgagtggcccagacctagaggacaggccgccacacctgagacacctcagccttctccacctggcggctctggcagcgagccttacaaactgctgcctggcgctgtggccaccatcgtgaaacctctgagcgccatcccccagcccaccatcaccaagcaggaagtgatctga

SEQ ID NO: 1555 - RNA, 1314 nt, synthetic construct
  misc_feature 1..1314: note = CDS (opt29) from Homo sapiens__NP_000448.3__HNF4A(39-474)(S461A)
  source 1..1314: mol_type = other RNA
atggacaccagccctagcgagggcaccaacctgaacgcccctaatagcctgggagtgtccgccctgtgtgccatctgtggcgatagagccaccggcaagcactacggcgccagctcttgtgatggctgcaagggcttcttccggcggagcgtgcggaagaaccacatgtacagctgccggttcagccggcagtgcgtggtggacaaggataagcggaaccagtgccggtactgcagactgaagaagtgcttcagagccggcatgaagaaagaagccgtgcagaacgagcgggaccggatcagcaccagaagaagcagctacgaggacagcagcctgcccagcatcaacgccctgctgcaggccgaggtgctgagcagacagatcaccagcccagtgtccggcatcaacggcgacatccgggccaagaagatcgccagcattgccgacgtgtgcgagagcatgaaggaacagctgctggtgctggtggaatgggccaagtacatccccgccttttgcgagctgcccctggacgatcaggtggccctgctgagagcacacgccggcgaacatctgctgctgggagccaccaagcggagcatggtgttcaaggacgtgctgctgctgggcaacgactacatcgtgcccagacactgccctgagctggccgagatgagccgggtgtccatcagaatcctggacgaactggtgctgccgtttcaggaactgcagatcgacgacaacgagtacgcctacctgaaggccatcatctttttcgaccccgacgccaagggcctgagcgaccctggcaagatcaagcggctgagaagccaggtgcaagtgtccctggaagattacatcaacgaccggcagtacgacagccggggcagatttggcgaactgctcctgctgctgcccaccctgcagagcatcacctggcagatgatcgagcagatccagttcatcaagctgttcggcatggccaagatcgacaatctgctgcaggaaatgctgctcgggggcagcccttctgatgcccctcatgcccaccaccctctgcaccctcacctgatgcaagaacacatgggcaccaatgtgatcgtggccaacacaatgcccacccacctgagcaacggccagatgtgcgagtggcccagacctagaggacaggccgccacacctgagacacctcagccttctccacctggcggctctggcagcgagccttacaaactgctgcctggcgctgtggccaccatcgtgaaacctctggccgccatcccccagcccaccatcaccaagcaggaagtgatctga

SEQ ID NO: 1556 - RNA, 1314 nt, synthetic construct
  misc_feature 1..1314: note = CDS (opt29) from Homo sapiens__NP_000448.3__HNF4A(39-474)(S461E)
  source 1..1314: mol_type = other RNA
atggacaccagccctagcgagggcaccaacctgaacgcccctaatagcctgggagtgtccgccctgtgtgccatctgtggcgatagagccaccggcaagcactacggcgccagctcttgtgatggctgcaagggcttcttccggcggagcgtgcggaagaaccacatgtacagctgccggttcagccggcagtgcgtggtggacaaggataagcggaaccagtgccggtactgcagactgaagaagtgcttcagagccggcatgaagaaagaagccgtgcagaacgagcgggaccggatcagcaccagaagaagcagctacgaggacagcagcctgcccagcatcaacgccctgctgcaggccgaggtgctgagcagacagatcaccagcccagtgtccggcatcaacggcgacatccgggccaagaagatcgccagcattgccgacgtgtgcgagagcatgaaggaacagctgctggtgctggtggaatgggccaagtacatccccgccttttgcgagctgcccctggacgatcaggtggccctgctgagagcacacgccggcgaacatctgctgctgggagccaccaagcggagcatggtgttcaaggacgtgctgctgctgggcaacgactacatcgtgcccagacactgccctgagctggccgagatgagccgggtgtccatcagaatcctggacgaactggtgctgccgtttcaggaactgcagatcgacgacaacgagtacgcctacctgaaggccatcatctttttcgaccccgacgccaagggcctgagcgaccctggcaagatcaagcggctgagaagccaggtgcaagtgtccctggaagattacatcaacgaccggcagtacgacagccggggcagatttggcgaactgctcctgctgctgcccaccctgcagagcatcacctggcagatgatcgagcagatccagttcatcaagctgttcggcatggccaagatcgacaatctgctgcaggaaatgctgctcgggggcagcccttctgatgcccctcatgcccaccaccctctgcaccctcacctgatgcaagaacacatgggcaccaatgtgatcgtggccaacacaatgcccacccacctgagcaacggccagatgtgcgagtggcccagacctagaggacaggccgccacacctgagacacctcagccttctccacctggcggctctggcagcgagccttacaaactgctgcctggcgctgtggccaccatcgtgaaacctctggaggccatcccccagcccaccatcaccaagcaggaagtgatctga

SEQ ID NO: 1557 - RNA, 1314 nt, synthetic construct
  misc_feature 1..1314: note = CDS (opt29) from Homo sapiens__NP_000448.3__HNF4A(39-474)(S142A_S143A_S313A)
  source 1..1314: mol_type = other RNA
atggacaccagccctagcgagggcaccaacctgaacgcccctaatagcctgggagtgtccgccctgtgtgccatctgtggcgatagagccaccggcaagcactacggcgccagctcttgtgatggctgcaagggcttcttccggcggagcgtgcggaagaaccacatgtacagctgccggttcagccggcagtgcgtggtggacaaggataagcggaaccagtgccggtactgcagactgaagaagtgcttcagagccggcatgaagaaagaagccgtgcagaacgagcgggaccggatcagcaccagaagagccgcctacgaggacagcagcctgcccagcatcaacgccctgctgcaggccgaggtgctgagcagacagatcaccagcccagtgtccggcatcaacggcgacatccgggccaagaagatcgccagcattgccgacgtgtgcgagagcatgaaggaacagctgctggtgctggtggaatgggccaagtacatccccgccttttgcgagctgcccctggacgatcaggtggccctgctgagagcacacgccggcgaacatctgctgctgggagccaccaagcggagcatggtgttcaaggacgtgctgctgctgggcaacgactacatcgtgcccagacactgccctgagctggccgagatgagccgggtgtccatcagaatcctggacgaactggtgctgccgtttcaggaactgcagatcgacgacaacgagtacgcctacctgaaggccatcatctttttcgaccccgacgccaagggcctgagcgaccctggcaagatcaagcggctgagagcccaggtgcaagtgtccctggaagattacatcaacgaccggcagtacgacagccggggcagatttggcgaactgctcctgctgctgcccaccctgcagagcatcacctggcagatgatcgagcagatccagttcatcaagctgttcggcatggccaagatcgacaatctgctgcaggaaatgctgctcgggggcagcccttctgatgcccctcatgcccaccaccctctgcaccctcacctgatgcaagaacacatgggcaccaatgtgatcgtggccaacacaatgcccacccacctgagcaacggccagatgtgcgagtggcccagacctagaggacaggccgccacacctgagacacctcagccttctccacctggcggctctggcagcgagccttacaaactgctgcctggcgctgtggccaccatcgtgaaacctctgagcgccatcccccagcccaccatcaccaagcaggaagtgatctga

SEQ ID NO: 1558 - RNA, 1314 nt, synthetic construct
  misc_feature 1..1314: note = CDS (opt29) from Homo sapiens__NP_000448.3__HNF4A(39-474)(S142A_S143A_S313A_K458R )
  source 1..1314: mol_type = other RNA
atggacaccagccctagcgagggcaccaacctgaacgcccctaatagcctgggagtgtccgccctgtgtgccatctgtggcgatagagccaccggcaagcactacggcgccagctcttgtgatggctgcaagggcttcttccggcggagcgtgcggaagaaccacatgtacagctgccggttcagccggcagtgcgtggtggacaaggataagcggaaccagtgccggtactgcagactgaagaagtgcttcagagccggcatgaagaaagaagccgtgcagaacgagcgggaccggatcagcaccagaagagccgcctacgaggacagcagcctgcccagcatcaacgccctgctgcaggccgaggtgctgagcagacagatcaccagcccagtgtccggcatcaacggcgacatccgggccaagaagatcgccagcattgccgacgtgtgcgagagcatgaaggaacagctgctggtgctggtggaatgggccaagtacatccccgccttttgcgagctgcccctggacgatcaggtggccctgctgagagcacacgccggcgaacatctgctgctgggagccaccaagcggagcatggtgttcaaggacgtgctgctgctgggcaacgactacatcgtgcccagacactgccctgagctggccgagatgagccgggtgtccatcagaatcctggacgaactggtgctgccgtttcaggaactgcagatcgacgacaacgagtacgcctacctgaaggccatcatctttttcgaccccgacgccaagggcctgagcgaccctggcaagatcaagcggctgagagcccaggtgcaagtgtccctggaagattacatcaacgaccggcagtacgacagccggggcagatttggcgaactgctcctgctgctgcccaccctgcagagcatcacctggcagatgatcgagcagatccagttcatcaagctgttcggcatggccaagatcgacaatctgctgcaggaaatgctgctcgggggcagcccttctgatgcccctcatgcccaccaccctctgcaccctcacctgatgcaagaacacatgggcaccaatgtgatcgtggccaacacaatgcccacccacctgagcaacggccagatgtgcgagtggcccagacctagaggacaggccgccacacctgagacacctcagccttctccacctggcggctctggcagcgagccttacaaactgctgcctggcgctgtggccaccatcgtgagacctctgagcgccatcccccagcccaccatcaccaagcaggaagtgatctga

SEQ ID NO: 1559 - RNA, 1314 nt, synthetic construct
  misc_feature 1..1314: note = CDS (opt29) from Homo sapiens__NP_000448.3__HNF4A(39-474)(S142A_S143A_S167A_S313A _S378A_T429A_T432A_S436A_K458R)
  source 1..1314: mol_type = other RNA
atggacaccagccctagcgagggcaccaacctgaacgcccctaatagcctgggagtgtccgccctgtgtgccatctgtggcgatagagccaccggcaagcactacggcgccagctcttgtgatggctgcaagggcttcttccggcggagcgtgcggaagaaccacatgtacagctgccggttcagccggcagtgcgtggtggacaaggataagcggaaccagtgccggtactgcagactgaagaagtgcttcagagccggcatgaagaaagaagccgtgcagaacgagcgggaccggatcagcaccagaagagccgcctacgaggacagcagcctgcccagcatcaacgccctgctgcaggccgaggtgctgagcagacagatcaccgccccagtgtccggcatcaacggcgacatccgggccaagaagatcgccagcattgccgacgtgtgcgagagcatgaaggaacagctgctggtgctggtggaatgggccaagtacatccccgccttttgcgagctgcccctggacgatcaggtggccctgctgagagcacacgccggcgaacatctgctgctgggagccaccaagcggagcatggtgttcaaggacgtgctgctgctgggcaacgactacatcgtgcccagacactgccctgagctggccgagatgagccgggtgtccatcagaatcctggacgaactggtgctgccgtttcaggaactgcagatcgacgacaacgagtacgcctacctgaaggccatcatctttttcgaccccgacgccaagggcctgagcgaccctggcaagatcaagcggctgagagcccaggtgcaagtgtccctggaagattacatcaacgaccggcagtacgacagccggggcagatttggcgaactgctcctgctgctgcccaccctgcagagcatcacctggcagatgatcgagcagatccagttcatcaagctgttcggcatggccaagatcgacaatctgctgcaggaaatgctgctcgggggcgccccttctgatgcccctcatgcccaccaccctctgcaccctcacctgatgcaagaacacatgggcaccaatgtgatcgtggccaacacaatgcccacccacctgagcaacggccagatgtgcgagtggcccagacctagaggacaggccgccgcccctgaggcccctcagcctgccccacctggcggctctggcagcgagccttacaaactgctgcctggcgctgtggccaccatcgtgagacctctgagcgccatcccccagcccaccatcaccaagcaggaagtgatctga

SEQ ID NO: 1560 - RNA, 1314 nt, synthetic construct
  misc_feature 1..1314: note = CDS (opt29) from Homo sapiens__NP_000448.3__HNF4A(39-474)(S142A_S143A_S148A_S167A _S313A_S378A_T429A_T432A_S436A_K458R)
  source 1..1314: mol_type = other RNA
atggacaccagccctagcgagggcaccaacctgaacgcccctaatagcctgggagtgtccgccctgtgtgccatctgtggcgatagagccaccggcaagcactacggcgccagctcttgtgatggctgcaagggcttcttccggcggagcgtgcggaagaaccacatgtacagctgccggttcagccggcagtgcgtggtggacaaggataagcggaaccagtgccggtactgcagactgaagaagtgcttcagagccggcatgaagaaagaagccgtgcagaacgagcgggaccggatcagcaccagaagagccgcctacgaggacagcgccctgcccagcatcaacgccctgctgcaggccgaggtgctgagcagacagatcaccgccccagtgtccggcatcaacggcgacatccgggccaagaagatcgccagcattgccgacgtgtgcgagagcatgaaggaacagctgctggtgctggtggaatgggccaagtacatccccgccttttgcgagctgcccctggacgatcaggtggccctgctgagagcacacgccggcgaacatctgctgctgggagccaccaagcggagcatggtgttcaaggacgtgctgctgctgggcaacgactacatcgtgcccagacactgccctgagctggccgagatgagccgggtgtccatcagaatcctggacgaactggtgctgccgtttcaggaactgcagatcgacgacaacgagtacgcctacctgaaggccatcatctttttcgaccccgacgccaagggcctgagcgaccctggcaagatcaagcggctgagagcccaggtgcaagtgtccctggaagattacatcaacgaccggcagtacgacagccggggcagatttggcgaactgctcctgctgctgcccaccctgcagagcatcacctggcagatgatcgagcagatccagttcatcaagctgttcggcatggccaagatcgacaatctgctgcaggaaatgctgctcgggggcgccccttctgatgcccctcatgcccaccaccctctgcaccctcacctgatgcaagaacacatgggcaccaatgtgatcgtggccaacacaatgcccacccacctgagcaacggccagatgtgcgagtggcccagacctagaggacaggccgccgcccctgaggcccctcagcctgccccacctggcggctctggcagcgagccttacaaactgctgcctggcgctgtggccaccatcgtgagacctctgagcgccatcccccagcccaccatcaccaagcaggaagtgatctga

SEQ ID NO: 1561 - RNA, 1314 nt, synthetic construct
  misc_feature 1..1314: note = CDS (opt29) from Homo sapiens__NP_000448.3__HNF4A(39-474)(K106R_K108R_K126R_K127R _S142A_S143A_S148A_S167A_S313A_S378A_T429A_T432A_S436A_K458 R)
  source 1..1314: mol_type = other RNA
atggacaccagccctagcgagggcaccaacctgaacgcccctaatagcctgggagtgtccgccctgtgtgccatctgtggcgatagagccaccggcaagcactacggcgccagctcttgtgatggctgcaagggcttcttccggcggagcgtgcggaagaaccacatgtacagctgccggttcagccggcagtgcgtggtggaccgggatagacggaaccagtgccggtactgcagactgaagaagtgcttcagagccggcatgcggagagaagccgtgcagaacgagcgggaccggatcagcaccagaagagccgcctacgaggacagcgccctgcccagcatcaacgccctgctgcaggccgaggtgctgagcagacagatcaccgccccagtgtccggcatcaacggcgacatccgggccaagaagatcgccagcattgccgacgtgtgcgagagcatgaaggaacagctgctggtgctggtggaatgggccaagtacatccccgccttttgcgagctgcccctggacgatcaggtggccctgctgagagcacacgccggcgaacatctgctgctgggagccaccaagcggagcatggtgttcaaggacgtgctgctgctgggcaacgactacatcgtgcccagacactgccctgagctggccgagatgagccgggtgtccatcagaatcctggacgaactggtgctgccgtttcaggaactgcagatcgacgacaacgagtacgcctacctgaaggccatcatctttttcgaccccgacgccaagggcctgagcgaccctggcaagatcaagcggctgagagcccaggtgcaagtgtccctggaagattacatcaacgaccggcagtacgacagccggggcagatttggcgaactgctcctgctgctgcccaccctgcagagcatcacctggcagatgatcgagcagatccagttcatcaagctgttcggcatggccaagatcgacaatctgctgcaggaaatgctgctcgggggcgccccttctgatgcccctcatgcccaccaccctctgcaccctcacctgatgcaagaacacatgggcaccaatgtgatcgtggccaacacaatgcccacccacctgagcaacggccagatgtgcgagtggcccagacctagaggacaggccgccgcccctgaggcccctcagcctgccccacctggcggctctggcagcgagccttacaaactgctgcctggcgctgtggccaccatcgtgagacctctgagcgccatcccccagcccaccatcaccaagcaggaagtgatctga

SEQ ID NO: 1562 - RNA, 1314 nt, synthetic construct
  misc_feature 1..1314: note = CDS (opt29) from Homo sapiens__NP_000448.3__HNF4A(39-474)(S142A_S143A_S148A_T166A _S167A_S313A_S378A_T429A_T432A_S436A_K458R)
  source 1..1314: mol_type = other RNA
atggacaccagccctagcgagggcaccaacctgaacgcccctaatagcctgggagtgtccgccctgtgtgccatctgtggcgatagagccaccggcaagcactacggcgccagctcttgtgatggctgcaagggcttcttccggcggagcgtgcggaagaaccacatgtacagctgccggttcagccggcagtgcgtggtggacaaggataagcggaaccagtgccggtactgcagactgaagaagtgcttcagagccggcatgaagaaagaagccgtgcagaacgagcgggaccggatcagcaccagaagagccgcctacgaggacagcgccctgcccagcatcaacgccctgctgcaggccgaggtgctgagcagacagatcgccgccccagtgtccggcatcaacggcgacatccgggccaagaagatcgccagcattgccgacgtgtgcgagagcatgaaggaacagctgctggtgctggtggaatgggccaagtacatccccgccttttgcgagctgcccctggacgatcaggtggccctgctgagagcacacgccggcgaacatctgctgctgggagccaccaagcggagcatggtgttcaaggacgtgctgctgctgggcaacgactacatcgtgcccagacactgccctgagctggccgagatgagccgggtgtccatcagaatcctggacgaactggtgctgccgtttcaggaactgcagatcgacgacaacgagtacgcctacctgaaggccatcatctttttcgaccccgacgccaagggcctgagcgaccctggcaagatcaagcggctgagagcccaggtgcaagtgtccctggaagattacatcaacgaccggcagtacgacagccggggcagatttggcgaactgctcctgctgctgcccaccctgcagagcatcacctggcagatgatcgagcagatccagttcatcaagctgttcggcatggccaagatcgacaatctgctgcaggaaatgctgctcgggggcgccccttctgatgcccctcatgcccaccaccctctgcaccctcacctgatgcaagaacacatgggcaccaatgtgatcgtggccaacacaatgcccacccacctgagcaacggccagatgtgcgagtggcccagacctagaggacaggccgccgcccctgaggcccctcagcctgccccacctggcggctctggcagcgagccttacaaactgctgcctggcgctgtggccaccatcgtgagacctctgagcgccatcccccagcccaccatcaccaagcaggaagtgatctga

SEQ ID NO: 1563 - RNA, 1314 nt, synthetic construct
  misc_feature 1..1314: note = CDS (opt29) from Homo sapiens__NP_000448.3__HNF4A(39-474)(S87A_S142A_S143A_S148A_ T166A_S167A_S313A_S378A_T429A_T432A_S436A_K458R)
  source 1..1314: mol_type = other RNA
atggacaccagccctagcgagggcaccaacctgaacgcccctaatagcctgggagtgtccgccctgtgtgccatctgtggcgatagagccaccggcaagcactacggcgccagctcttgtgatggctgcaagggcttcttccggcgggccgtgcggaagaaccacatgtacagctgccggttcagccggcagtgcgtggtggacaaggataagcggaaccagtgccggtactgcagactgaagaagtgcttcagagccggcatgaagaaagaagccgtgcagaacgagcgggaccggatcagcaccagaagagccgcctacgaggacagcgccctgcccagcatcaacgccctgctgcaggccgaggtgctgagcagacagatcgccgccccagtgtccggcatcaacggcgacatccgggccaagaagatcgccagcattgccgacgtgtgcgagagcatgaaggaacagctgctggtgctggtggaatgggccaagtacatccccgccttttgcgagctgcccctggacgatcaggtggccctgctgagagcacacgccggcgaacatctgctgctgggagccaccaagcggagcatggtgttcaaggacgtgctgctgctgggcaacgactacatcgtgcccagacactgccctgagctggccgagatgagccgggtgtccatcagaatcctggacgaactggtgctgccgtttcaggaactgcagatcgacgacaacgagtacgcctacctgaaggccatcatctttttcgaccccgacgccaagggcctgagcgaccctggcaagatcaagcggctgagagcccaggtgcaagtgtccctggaagattacatcaacgaccggcagtacgacagccggggcagatttggcgaactgctcctgctgctgcccaccctgcagagcatcacctggcagatgatcgagcagatccagttcatcaagctgttcggcatggccaagatcgacaatctgctgcaggaaatgctgctcgggggcgccccttctgatgcccctcatgcccaccaccctctgcaccctcacctgatgcaagaacacatgggcaccaatgtgatcgtggccaacacaatgcccacccacctgagcaacggccagatgtgcgagtggcccagacctagaggacaggccgccgcccctgaggcccctcagcctgccccacctggcggctctggcagcgagccttacaaactgctgcctggcgctgtggccaccatcgtgagacctctgagcgccatcccccagcccaccatcaccaagcaggaagtgatctga

SEQ ID NO: 1564 - RNA, 1314 nt, synthetic construct
  misc_feature 1..1314: note = CDS (opt29) from Homo sapiens__NP_000448.3__HNF4A(39-474)(S87A_K106R_K108R_K126R_ K127R_S142A_S143A_S148A_T166A_S167A_S313A_S378A_T429A_T432A _S436A_K458R)
  source 1..1314: mol_type = other RNA
atggacaccagccctagcgagggcaccaacctgaacgcccctaatagcctgggagtgtccgccctgtgtgccatctgtggcgatagagccaccggcaagcactacggcgccagctcttgtgatggctgcaagggcttcttccggcgggccgtgcggaagaaccacatgtacagctgccggttcagccggcagtgcgtggtggaccgggatagacggaaccagtgccggtactgcagactgaagaagtgcttcagagccggcatgcggagagaagccgtgcagaacgagcgggaccggatcagcaccagaagagccgcctacgaggacagcgccctgcccagcatcaacgccctgctgcaggccgaggtgctgagcagacagatcgccgccccagtgtccggcatcaacggcgacatccgggccaagaagatcgccagcattgccgacgtgtgcgagagcatgaaggaacagctgctggtgctggtggaatgggccaagtacatccccgccttttgcgagctgcccctggacgatcaggtggccctgctgagagcacacgccggcgaacatctgctgctgggagccaccaagcggagcatggtgttcaaggacgtgctgctgctgggcaacgactacatcgtgcccagacactgccctgagctggccgagatgagccgggtgtccatcagaatcctggacgaactggtgctgccgtttcaggaactgcagatcgacgacaacgagtacgcctacctgaaggccatcatctttttcgaccccgacgccaagggcctgagcgaccctggcaagatcaagcggctgagagcccaggtgcaagtgtccctggaagattacatcaacgaccggcagtacgacagccggggcagatttggcgaactgctcctgctgctgcccaccctgcagagcatcacctggcagatgatcgagcagatccagttcatcaagctgttcggcatggccaagatcgacaatctgctgcaggaaatgctgctcgggggcgccccttctgatgcccctcatgcccaccaccctctgcaccctcacctgatgcaagaacacatgggcaccaatgtgatcgtggccaacacaatgcccacccacctgagcaacggccagatgtgcgagtggcccagacctagaggacaggccgccgcccctgaggcccctcagcctgccccacctggcggctctggcagcgagccttacaaactgctgcctggcgctgtggccaccatcgtgagacctctgagcgccatcccccagcccaccatcaccaagcaggaagtgatctga

SEQ ID NO: 1565 - RNA, 1314 nt, synthetic construct
  misc_feature 1..1314: note = CDS (opt29) from Homo sapiens__NP_000448.3__HNF4A(39-474)(S87A_K106R_K108R_K126R_ K127R)
  source 1..1314: mol_type = other RNA
atggacaccagccctagcgagggcaccaacctgaacgcccctaatagcctgggagtgtccgccctgtgtgccatctgtggcgatagagccaccggcaagcactacggcgccagctcttgtgatggctgcaagggcttcttccggcgggccgtgcggaagaaccacatgtacagctgccggttcagccggcagtgcgtggtggaccgggatagacggaaccagtgccggtactgcagactgaagaagtgcttcagagccggcatgcggagagaagccgtgcagaacgagcgggaccggatcagcaccagaagaagcagctacgaggacagcagcctgcccagcatcaacgccctgctgcaggccgaggtgctgagcagacagatcaccagcccagtgtccggcatcaacggcgacatccgggccaagaagatcgccagcattgccgacgtgtgcgagagcatgaaggaacagctgctggtgctggtggaatgggccaagtacatccccgccttttgcgagctgcccctggacgatcaggtggccctgctgagagcacacgccggcgaacatctgctgctgggagccaccaagcggagcatggtgttcaaggacgtgctgctgctgggcaacgactacatcgtgcccagacactgccctgagctggccgagatgagccgggtgtccatcagaatcctggacgaactggtgctgccgtttcaggaactgcagatcgacgacaacgagtacgcctacctgaaggccatcatctttttcgaccccgacgccaagggcctgagcgaccctggcaagatcaagcggctgagaagccaggtgcaagtgtccctggaagattacatcaacgaccggcagtacgacagccggggcagatttggcgaactgctcctgctgctgcccaccctgcagagcatcacctggcagatgatcgagcagatccagttcatcaagctgttcggcatggccaagatcgacaatctgctgcaggaaatgctgctcgggggcagcccttctgatgcccctcatgcccaccaccctctgcaccctcacctgatgcaagaacacatgggcaccaatgtgatcgtggccaacacaatgcccacccacctgagcaacggccagatgtgcgagtggcccagacctagaggacaggccgccacacctgagacacctcagccttctccacctggcggctctggcagcgagccttacaaactgctgcctggcgctgtggccaccatcgtgaaacctctgagcgccatcccccagcccaccatcaccaagcaggaagtgatctga

SEQ ID NO: 1566 - RNA, 1314 nt, synthetic construct
  misc_feature 1..1314: note = CDS (opt29) from Homo sapiens__NP_000448.3__HNF4A(39-474)(S87A_K106R_K108R_K126R_ K127R_S142A_S143A_S148A_T166A_S167A_S313A_S378A_T429A_T432A _S436A_K458R_S461A)
  source 1..1314: mol_type = other RNA
atggacaccagccctagcgagggcaccaacctgaacgcccctaatagcctgggagtgtccgccctgtgtgccatctgtggcgatagagccaccggcaagcactacggcgccagctcttgtgatggctgcaagggcttcttccggcgggccgtgcggaagaaccacatgtacagctgccggttcagccggcagtgcgtggtggaccgggatagacggaaccagtgccggtactgcagactgaagaagtgcttcagagccggcatgcggagagaagccgtgcagaacgagcgggaccggatcagcaccagaagagccgcctacgaggacagcgccctgcccagcatcaacgccctgctgcaggccgaggtgctgagcagacagatcgccgccccagtgtccggcatcaacggcgacatccgggccaagaagatcgccagcattgccgacgtgtgcgagagcatgaaggaacagctgctggtgctggtggaatgggccaagtacatccccgccttttgcgagctgcccctggacgatcaggtggccctgctgagagcacacgccggcgaacatctgctgctgggagccaccaagcggagcatggtgttcaaggacgtgctgctgctgggcaacgactacatcgtgcccagacactgccctgagctggccgagatgagccgggtgtccatcagaatcctggacgaactggtgctgccgtttcaggaactgcagatcgacgacaacgagtacgcctacctgaaggccatcatctttttcgaccccgacgccaagggcctgagcgaccctggcaagatcaagcggctgagagcccaggtgcaagtgtccctggaagattacatcaacgaccggcagtacgacagccggggcagatttggcgaactgctcctgctgctgcccaccctgcagagcatcacctggcagatgatcgagcagatccagttcatcaagctgttcggcatggccaagatcgacaatctgctgcaggaaatgctgctcgggggcgccccttctgatgcccctcatgcccaccaccctctgcaccctcacctgatgcaagaacacatgggcaccaatgtgatcgtggccaacacaatgcccacccacctgagcaacggccagatgtgcgagtggcccagacctagaggacaggccgccgcccctgaggcccctcagcctgccccacctggcggctctggcagcgagccttacaaactgctgcctggcgctgtggccaccatcgtgagacctctggccgccatcccccagcccaccatcaccaagcaggaagtgatctga

SEQ ID NO: 1567 - RNA, 1314 nt, synthetic construct
  misc_feature 1..1314: note = CDS (opt29) from Homo sapiens__NP_000448.3__HNF4A(39-474)(S87A_K106R_K108R_K126R_ K127R_S142A_S143A_S148A_T166A_S167A_S313A_S378A_T429A_T432A _S436A_K458R_S461E)
  source 1..1314: mol_type = other RNA
atggacaccagccctagcgagggcaccaacctgaacgcccctaatagcctgggagtgtccgccctgtgtgccatctgtggcgatagagccaccggcaagcactacggcgccagctcttgtgatggctgcaagggcttcttccggcgggccgtgcggaagaaccacatgtacagctgccggttcagccggcagtgcgtggtggaccgggatagacggaaccagtgccggtactgcagactgaagaagtgcttcagagccggcatgcggagagaagccgtgcagaacgagcgggaccggatcagcaccagaagagccgcctacgaggacagcgccctgcccagcatcaacgccctgctgcaggccgaggtgctgagcagacagatcgccgccccagtgtccggcatcaacggcgacatccgggccaagaagatcgccagcattgccgacgtgtgcgagagcatgaaggaacagctgctggtgctggtggaatgggccaagtacatccccgccttttgcgagctgcccctggacgatcaggtggccctgctgagagcacacgccggcgaacatctgctgctgggagccaccaagcggagcatggtgttcaaggacgtgctgctgctgggcaacgactacatcgtgcccagacactgccctgagctggccgagatgagccgggtgtccatcagaatcctggacgaactggtgctgccgtttcaggaactgcagatcgacgacaacgagtacgcctacctgaaggccatcatctttttcgaccccgacgccaagggcctgagcgaccctggcaagatcaagcggctgagagcccaggtgcaagtgtccctggaagattacatcaacgaccggcagtacgacagccggggcagatttggcgaactgctcctgctgctgcccaccctgcagagcatcacctggcagatgatcgagcagatccagttcatcaagctgttcggcatggccaagatcgacaatctgctgcaggaaatgctgctcgggggcgccccttctgatgcccctcatgcccaccaccctctgcaccctcacctgatgcaagaacacatgggcaccaatgtgatcgtggccaacacaatgcccacccacctgagcaacggccagatgtgcgagtggcccagacctagaggacaggccgccgcccctgaggcccctcagcctgccccacctggcggctctggcagcgagccttacaaactgctgcctggcgctgtggccaccatcgtgagacctctggaggccatcccccagcccaccatcaccaagcaggaagtgatctga

SEQ ID NO: 1568 - RNA, 1314 nt, synthetic construct
  misc_feature 1..1314: note = CDS (opt29) from Homo sapiens__NP_000448.3__HNF4A(39-474)(S87A_K106R_K108R_K126R_ K127R_S142A_S143A_S148E_T166A_S167E_S313A_S378E_T429E_T432E _S436E_K458R_S461E)
  source 1..1314: mol_type = other RNA
atggacaccagccctagcgagggcaccaacctgaacgcccctaatagcctgggagtgtccgccctgtgtgccatctgtggcgatagagccaccggcaagcactacggcgccagctcttgtgatggctgcaagggcttcttccggcgggccgtgcggaagaaccacatgtacagctgccggttcagccggcagtgcgtggtggaccgggatagacggaaccagtgccggtactgcagactgaagaagtgcttcagagccggcatgcggagagaagccgtgcagaacgagcgggaccggatcagcaccagaagagccgcctacgaggacagcgaactgcccagcatcaacgccctgctgcaggccgaggtgctgagcagacagatcgccgaaccagtgtccggcatcaacggcgacatccgggccaagaagatcgccagcattgccgacgtgtgcgagagcatgaaggaacagctgctggtgctggtggaatgggccaagtacatccccgccttttgcgagctgcccctggacgatcaggtggccctgctgagagcacacgccggcgaacatctgctgctgggagccaccaagcggagcatggtgttcaaggacgtgctgctgctgggcaacgactacatcgtgcccagacactgccctgagctggccgagatgagccgggtgtccatcagaatcctggacgaactggtgctgccgtttcaggaactgcagatcgacgacaacgagtacgcctacctgaaggccatcatctttttcgaccccgacgccaagggcctgagcgaccctggcaagatcaagcggctgagagcccaggtgcaagtgtccctggaagattacatcaacgaccggcagtacgacagccggggcagatttggcgaactgctcctgctgctgcccaccctgcagagcatcacctggcagatgatcgagcagatccagttcatcaagctgttcggcatggccaagatcgacaatctgctgcaggaaatgctgctcgggggcgagccttctgatgcccctcatgcccaccaccctctgcaccctcacctgatgcaagaacacatgggcaccaatgtgatcgtggccaacacaatgcccacccacctgagcaacggccagatgtgcgagtggcccagacctagaggacaggccgccgaacctgaggagcctcagcctgaaccacctggcggctctggcagcgagccttacaaactgctgcctggcgctgtggccaccatcgtgagacctctggaggccatcccccagcccaccatcaccaagcaggaagtgatctga

SEQ ID NO: 1569 - RNA, 1314 nt, synthetic construct
  misc_feature 1..1314: note = CDS (opt29) from Homo sapiens__NP_000448.3__HNF4A(39-474)(S87A_K106R_K108R_K126R_ K127R_S142A_S143A_S148A_T166A_S167A_K179R_K180R_S313A_S378A _T429A_T432A_S436A_K458R_S461E)
  source 1..1314: mol_type = other RNA
atggacaccagccctagcgagggcaccaacctgaacgcccctaatagcctgggagtgtccgccctgtgtgccatctgtggcgatagagccaccggcaagcactacggcgccagctcttgtgatggctgcaagggcttcttccggcgggccgtgcggaagaaccacatgtacagctgccggttcagccggcagtgcgtggtggaccgggatagacggaaccagtgccggtactgcagactgaagaagtgcttcagagccggcatgcggagagaagccgtgcagaacgagcgggaccggatcagcaccagaagagccgcctacgaggacagcgccctgcccagcatcaacgccctgctgcaggccgaggtgctgagcagacagatcgccgccccagtgtccggcatcaacggcgacatccgggcccggagaatcgccagcattgccgacgtgtgcgagagcatgaaggaacagctgctggtgctggtggaatgggccaagtacatccccgccttttgcgagctgcccctggacgatcaggtggccctgctgagagcacacgccggcgaacatctgctgctgggagccaccaagcggagcatggtgttcaaggacgtgctgctgctgggcaacgactacatcgtgcccagacactgccctgagctggccgagatgagccgggtgtccatcagaatcctggacgaactggtgctgccgtttcaggaactgcagatcgacgacaacgagtacgcctacctgaaggccatcatctttttcgaccccgacgccaagggcctgagcgaccctggcaagatcaagcggctgagagcccaggtgcaagtgtccctggaagattacatcaacgaccggcagtacgacagccggggcagatttggcgaactgctcctgctgctgcccaccctgcagagcatcacctggcagatgatcgagcagatccagttcatcaagctgttcggcatggccaagatcgacaatctgctgcaggaaatgctgctcgggggcgccccttctgatgcccctcatgcccaccaccctctgcaccctcacctgatgcaagaacacatgggcaccaatgtgatcgtggccaacacaatgcccacccacctgagcaacggccagatgtgcgagtggcccagacctagaggacaggccgccgcccctgaggcccctcagcctgccccacctggcggctctggcagcgagccttacaaactgctgcctggcgctgtggccaccatcgtgagacctctggaggccatcccccagcccaccatcaccaagcaggaagtgatctga

SEQ ID NO: 1570 - RNA, 1314 nt, synthetic construct
  misc_feature 1..1314: note = CDS (opt29) from Homo sapiens__NP_000448.3__HNF4A(39-474)(S87A_K106R_K108R_K126R_ K127R_S142A_S143A_S148A_T166A_S167A_K300R_K307R_K309R_S313A _S378A_T429A_T432A_S436A_K458R_S461E)
  source 1..1314: mol_type = other RNA
atggacaccagccctagcgagggcaccaacctgaacgcccctaatagcctgggagtgtccgccctgtgtgccatctgtggcgatagagccaccggcaagcactacggcgccagctcttgtgatggctgcaagggcttcttccggcgggccgtgcggaagaaccacatgtacagctgccggttcagccggcagtgcgtggtggaccgggatagacggaaccagtgccggtactgcagactgaagaagtgcttcagagccggcatgcggagagaagccgtgcagaacgagcgggaccggatcagcaccagaagagccgcctacgaggacagcgccctgcccagcatcaacgccctgctgcaggccgaggtgctgagcagacagatcgccgccccagtgtccggcatcaacggcgacatccgggccaagaagatcgccagcattgccgacgtgtgcgagagcatgaaggaacagctgctggtgctggtggaatgggccaagtacatccccgccttttgcgagctgcccctggacgatcaggtggccctgctgagagcacacgccggcgaacatctgctgctgggagccaccaagcggagcatggtgttcaaggacgtgctgctgctgggcaacgactacatcgtgcccagacactgccctgagctggccgagatgagccgggtgtccatcagaatcctggacgaactggtgctgccgtttcaggaactgcagatcgacgacaacgagtacgcctacctgaaggccatcatctttttcgaccccgacgccagaggcctgagcgaccctggccggatcagacggctgagagcccaggtgcaagtgtccctggaagattacatcaacgaccggcagtacgacagccggggcagatttggcgaactgctcctgctgctgcccaccctgcagagcatcacctggcagatgatcgagcagatccagttcatcaagctgttcggcatggccaagatcgacaatctgctgcaggaaatgctgctcgggggcgccccttctgatgcccctcatgcccaccaccctctgcaccctcacctgatgcaagaacacatgggcaccaatgtgatcgtggccaacacaatgcccacccacctgagcaacggccagatgtgcgagtggcccagacctagaggacaggccgccgcccctgaggcccctcagcctgccccacctggcggctctggcagcgagccttacaaactgctgcctggcgctgtggccaccatcgtgagacctctggaggccatcccccagcccaccatcaccaagcaggaagtgatctga

SEQ ID NO: 1571 - RNA, 1314 nt, synthetic construct
  misc_feature 1..1314: note = CDS (opt29) from Homo sapiens__NP_000448.3__HNF4A(39-474)(S87A_K106R_K108R_K126R_ K127R_S142A_S143A_S148A_T166A_S167A_S313A_S378A_T429A_T432A _S436A_K447R_K458R_S461E_K470R)
  source 1..1314: mol_type = other RNA
atggacaccagccctagcgagggcaccaacctgaacgcccctaatagcctgggagtgtccgccctgtgtgccatctgtggcgatagagccaccggcaagcactacggcgccagctcttgtgatggctgcaagggcttcttccggcgggccgtgcggaagaaccacatgtacagctgccggttcagccggcagtgcgtggtggaccgggatagacggaaccagtgccggtactgcagactgaagaagtgcttcagagccggcatgcggagagaagccgtgcagaacgagcgggaccggatcagcaccagaagagccgcctacgaggacagcgccctgcccagcatcaacgccctgctgcaggccgaggtgctgagcagacagatcgccgccccagtgtccggcatcaacggcgacatccgggccaagaagatcgccagcattgccgacgtgtgcgagagcatgaaggaacagctgctggtgctggtggaatgggccaagtacatccccgccttttgcgagctgcccctggacgatcaggtggccctgctgagagcacacgccggcgaacatctgctgctgggagccaccaagcggagcatggtgttcaaggacgtgctgctgctgggcaacgactacatcgtgcccagacactgccctgagctggccgagatgagccgggtgtccatcagaatcctggacgaactggtgctgccgtttcaggaactgcagatcgacgacaacgagtacgcctacctgaaggccatcatctttttcgaccccgacgccaagggcctgagcgaccctggcaagatcaagcggctgagagcccaggtgcaagtgtccctggaagattacatcaacgaccggcagtacgacagccggggcagatttggcgaactgctcctgctgctgcccaccctgcagagcatcacctggcagatgatcgagcagatccagttcatcaagctgttcggcatggccaagatcgacaatctgctgcaggaaatgctgctcgggggcgccccttctgatgcccctcatgcccaccaccctctgcaccctcacctgatgcaagaacacatgggcaccaatgtgatcgtggccaacacaatgcccacccacctgagcaacggccagatgtgcgagtggcccagacctagaggacaggccgccgcccctgaggcccctcagcctgccccacctggcggctctggcagcgagccttaccggctgctgcctggcgctgtggccaccatcgtgagacctctggaggccatcccccagcccaccatcacccggcaggaagtgatctga

SEQ ID NO: 1572 - RNA, 1314 nt, synthetic construct
  misc_feature 1..1314: note = CDS (opt29) from Homo sapiens__NP_000448.3__HNF4A(39-474)(S87A_K106R_K108R_K126R_ K127R_S142A_S143A_S148A_T166A_S167A_K179R_K180R_K234R_K300R _K307R_K309R_S313A_S378A_T429A_T432A_S436A_K447R_K458R_S461 E_K470R)
  source 1..1314: mol_type = other RNA
atggacaccagccctagcgagggcaccaacctgaacgcccctaatagcctgggagtgtccgccctgtgtgccatctgtggcgatagagccaccggcaagcactacggcgccagctcttgtgatggctgcaagggcttcttccggcgggccgtgcggaagaaccacatgtacagctgccggttcagccggcagtgcgtggtggaccgggatagacggaaccagtgccggtactgcagactgaagaagtgcttcagagccggcatgcggagagaagccgtgcagaacgagcgggaccggatcagcaccagaagagccgcctacgaggacagcgccctgcccagcatcaacgccctgctgcaggccgaggtgctgagcagacagatcgccgccccagtgtccggcatcaacggcgacatccgggcccggagaatcgccagcattgccgacgtgtgcgagagcatgaaggaacagctgctggtgctggtggaatgggccaagtacatccccgccttttgcgagctgcccctggacgatcaggtggccctgctgagagcacacgccggcgaacatctgctgctgggagccacccggcggagcatggtgttcaaggacgtgctgctgctgggcaacgactacatcgtgcccagacactgccctgagctggccgagatgagccgggtgtccatcagaatcctggacgaactggtgctgccgtttcaggaactgcagatcgacgacaacgagtacgcctacctgaaggccatcatctttttcgaccccgacgccagaggcctgagcgaccctggccggatcagacggctgagagcccaggtgcaagtgtccctggaagattacatcaacgaccggcagtacgacagccggggcagatttggcgaactgctcctgctgctgcccaccctgcagagcatcacctggcagatgatcgagcagatccagttcatcaagctgttcggcatggccaagatcgacaatctgctgcaggaaatgctgctcgggggcgccccttctgatgcccctcatgcccaccaccctctgcaccctcacctgatgcaagaacacatgggcaccaatgtgatcgtggccaacacaatgcccacccacctgagcaacggccagatgtgcgagtggcccagacctagaggacaggccgccgcccctgaggcccctcagcctgccccacctggcggctctggcagcgagccttaccggctgctgcctggcgctgtggccaccatcgtgagacctctggaggccatcccccagcccaccatcacccggcaggaagtgatctga

SEQ ID NO: 1573 - RNA, 1314 nt, synthetic construct
  misc_feature 1..1314: note = CDS (opt29) from Homo sapiens__NP_000448.3__HNF4A(39-474)(S87A_S95A_S99A_K106R_K1 08R_K126R_K127R_S142A_S143A_S148A_T166A_S167A_S313A_S378A_T 429A_T432A_S436A_K458R_S461E)
  source 1..1314: mol_type = other RNA
atggacaccagccctagcgagggcaccaacctgaacgcccctaatagcctgggagtgtccgccctgtgtgccatctgtggcgatagagccaccggcaagcactacggcgccagctcttgtgatggctgcaagggcttcttccggcgggccgtgcggaagaaccacatgtacgcctgccggttcgcccggcagtgcgtggtggaccgggatagacggaaccagtgccggtactgcagactgaagaagtgcttcagagccggcatgcggagagaagccgtgcagaacgagcgggaccggatcagcaccagaagagccgcctacgaggacagcgccctgcccagcatcaacgccctgctgcaggccgaggtgctgagcagacagatcgccgccccagtgtccggcatcaacggcgacatccgggccaagaagatcgccagcattgccgacgtgtgcgagagcatgaaggaacagctgctggtgctggtggaatgggccaagtacatccccgccttttgcgagctgcccctggacgatcaggtggccctgctgagagcacacgccggcgaacatctgctgctgggagccaccaagcggagcatggtgttcaaggacgtgctgctgctgggcaacgactacatcgtgcccagacactgccctgagctggccgagatgagccgggtgtccatcagaatcctggacgaactggtgctgccgtttcaggaactgcagatcgacgacaacgagtacgcctacctgaaggccatcatctttttcgaccccgacgccaagggcctgagcgaccctggcaagatcaagcggctgagagcccaggtgcaagtgtccctggaagattacatcaacgaccggcagtacgacagccggggcagatttggcgaactgctcctgctgctgcccaccctgcagagcatcacctggcagatgatcgagcagatccagttcatcaagctgttcggcatggccaagatcgacaatctgctgcaggaaatgctgctcgggggcgccccttctgatgcccctcatgcccaccaccctctgcaccctcacctgatgcaagaacacatgggcaccaatgtgatcgtggccaacacaatgcccacccacctgagcaacggccagatgtgcgagtggcccagacctagaggacaggccgccgcccctgaggcccctcagcctgccccacctggcggctctggcagcgagccttacaaactgctgcctggcgctgtggccaccatcgtgagacctctggaggccatcccccagcccaccatcaccaagcaggaagtgatctga

SEQ ID NO: 1574 - RNA, 1314 nt, synthetic construct
  misc_feature 1..1314: note = CDS (opt29) from Homo sapiens__NP_000448.3__HNF4A(39-474)(S87A_K106R_K108R_K126R_ K127R_S138A_T139A_S142A_S143A_S148A_T166A_S167A_S313A_S378A _T429A_T432A_S436A_K458R_S461E)
  source 1..1314: mol_type = other RNA
atggacaccagccctagcgagggcaccaacctgaacgcccctaatagcctgggagtgtccgccctgtgtgccatctgtggcgatagagccaccggcaagcactacggcgccagctcttgtgatggctgcaagggcttcttccggcgggccgtgcggaagaaccacatgtacagctgccggttcagccggcagtgcgtggtggaccgggatagacggaaccagtgccggtactgcagactgaagaagtgcttcagagccggcatgcggagagaagccgtgcagaacgagcgggaccggatcgccgccagaagagccgcctacgaggacagcgccctgcccagcatcaacgccctgctgcaggccgaggtgctgagcagacagatcgccgccccagtgtccggcatcaacggcgacatccgggccaagaagatcgccagcattgccgacgtgtgcgagagcatgaaggaacagctgctggtgctggtggaatgggccaagtacatccccgccttttgcgagctgcccctggacgatcaggtggccctgctgagagcacacgccggcgaacatctgctgctgggagccaccaagcggagcatggtgttcaaggacgtgctgctgctgggcaacgactacatcgtgcccagacactgccctgagctggccgagatgagccgggtgtccatcagaatcctggacgaactggtgctgccgtttcaggaactgcagatcgacgacaacgagtacgcctacctgaaggccatcatctttttcgaccccgacgccaagggcctgagcgaccctggcaagatcaagcggctgagagcccaggtgcaagtgtccctggaagattacatcaacgaccggcagtacgacagccggggcagatttggcgaactgctcctgctgctgcccaccctgcagagcatcacctggcagatgatcgagcagatccagttcatcaagctgttcggcatggccaagatcgacaatctgctgcaggaaatgctgctcgggggcgccccttctgatgcccctcatgcccaccaccctctgcaccctcacctgatgcaagaacacatgggcaccaatgtgatcgtggccaacacaatgcccacccacctgagcaacggccagatgtgcgagtggcccagacctagaggacaggccgccgcccctgaggcccctcagcctgccccacctggcggctctggcagcgagccttacaaactgctgcctggcgctgtggccaccatcgtgagacctctggaggccatcccccagcccaccatcaccaagcaggaagtgatctga

SEQ ID NO: 1575 - RNA, 1314 nt, synthetic construct
  misc_feature 1..1314: note = CDS (opt29) from Homo sapiens__NP_000448.3__HNF4A(39-474)(S87A_S95A_S99A_K106R_K1 08R_K126R_K127R_S138A_T139A_S142A_S143A_S148A_T166A_S167A_S 313A_S378A_T429A_T432A_S436A_K458R_S461E)
  source 1..1314: mol_type = other RNA
atggacaccagccctagcgagggcaccaacctgaacgcccctaatagcctgggagtgtccgccctgtgtgccatctgtggcgatagagccaccggcaagcactacggcgccagctcttgtgatggctgcaagggcttcttccggcgggccgtgcggaagaaccacatgtacgcctgccggttcgcccggcagtgcgtggtggaccgggatagacggaaccagtgccggtactgcagactgaagaagtgcttcagagccggcatgcggagagaagccgtgcagaacgagcgggaccggatcgccgccagaagagccgcctacgaggacagcgccctgcccagcatcaacgccctgctgcaggccgaggtgctgagcagacagatcgccgccccagtgtccggcatcaacggcgacatccgggccaagaagatcgccagcattgccgacgtgtgcgagagcatgaaggaacagctgctggtgctggtggaatgggccaagtacatccccgccttttgcgagctgcccctggacgatcaggtggccctgctgagagcacacgccggcgaacatctgctgctgggagccaccaagcggagcatggtgttcaaggacgtgctgctgctgggcaacgactacatcgtgcccagacactgccctgagctggccgagatgagccgggtgtccatcagaatcctggacgaactggtgctgccgtttcaggaactgcagatcgacgacaacgagtacgcctacctgaaggccatcatctttttcgaccccgacgccaagggcctgagcgaccctggcaagatcaagcggctgagagcccaggtgcaagtgtccctggaagattacatcaacgaccggcagtacgacagccggggcagatttggcgaactgctcctgctgctgcccaccctgcagagcatcacctggcagatgatcgagcagatccagttcatcaagctgttcggcatggccaagatcgacaatctgctgcaggaaatgctgctcgggggcgccccttctgatgcccctcatgcccaccaccctctgcaccctcacctgatgcaagaacacatgggcaccaatgtgatcgtggccaacacaatgcccacccacctgagcaacggccagatgtgcgagtggcccagacctagaggacaggccgccgcccctgaggcccctcagcctgccccacctggcggctctggcagcgagccttacaaactgctgcctggcgctgtggccaccatcgtgagacctctggaggccatcccccagcccaccatcaccaagcaggaagtgatctga

SEQ ID NO: 1576 - RNA, 1642 nt, synthetic construct
  misc_feature 1..1642: note = mRNA i-3 (A64-N5-C30-hSL-N5) (wt) from Homo sapiens__NP_000448.3__HNF4A(1-474)
  source 1..1642: mol_type = other RNA
aggagaaagcttaccatgcgactctccaaaaccctcgtcgacatggacatggccgactacagtgctgcactggacccagcctacaccaccctggaatttgagaatgtgcaggtgttgacgatgggcaatgacacgtccccatcagaaggcaccaacctcaacgcgcccaacagcctgggtgtcagcgccctgtgtgccatctgcggggaccgggccacgggcaaacactacggtgcctcgagctgtgacggctgcaagggcttcttccggaggagcgtgcggaagaaccacatgtactcctgcagatttagccggcagtgcgtggtggacaaagacaagaggaaccagtgccgctactgcaggctcaagaaatgcttccgggctggcatgaagaaggaagccgtccagaatgagcgggaccggatcagcactcgaaggtcaagctatgaggacagcagcctgccctccatcaatgcgctcctgcaggcggaggtcctgtcccgacagatcacctcccccgtctccgggatcaacggcgacattcgggcgaagaagattgccagcatcgcagatgtgtgtgagtccatgaaggagcagctgctggttctcgttgagtgggccaagtacatcccagctttctgcgagctccccctggacgaccaggtggccctgctcagagcccatgctggcgagcacctgctgctcggagccaccaagagatccatggtgttcaaggacgtgctgctcctaggcaatgactacattgtccctcggcactgcccggagctggcggagatgagccgggtgtccatacgcatccttgacgagctggtgctgcccttccaggagctgcagatcgatgacaatgagtatgcctacctcaaagccatcatcttctttgacccagatgccaaggggctgagcgatccagggaagatcaagcggctgcgttcccaggtgcaggtgagcttggaggactacatcaacgaccgccagtatgactcgcgtggccgctttggagagctgctgctgctgctgcccaccttgcagagcatcacctggcagatgatcgagcagatccagttcatcaagctcttcggcatggccaagattgacaacctgttgcaggagatgctgctgggagggtcccccagcgatgcaccccatgcccaccaccccctgcaccctcacctgatgcaggaacatatgggaaccaacgtcatcgttgccaacacaatgcccactcacctcagcaacggacagatgtgtgagtggccccgacccaggggacaggcagccacccctgagaccccacagccctcaccgccaggtggctcagggtctgagccctataagctcctgccgggagccgtcgccacaatcgtcaagcccctctctgccatcccccagccgaccatcaccaagcaggaagttatctagggactagttataagactgactagcccgatgggcctcccaacgggccctcctcccctccttgcaccgagattaataaaaaaaaaaaaaaaaaaaaaaaaaaaaaaaaaaaaaaaaaaaaaaaaaaaaaaaaaaaaaaaatgcatcccccccccccccccccccccccccccccccaaaggctcttttcagagccaccagaatt

SEQ ID NO: 1577 - RNA, 1642 nt, synthetic construct
  misc_feature 1..1642: note = mRNA i-3 (A64-N5-C30-hSL-N5) (wt mod) from Homo sapiens__NP_000448.3__HNF4A(1-474)
  source 1..1642: mol_type = other RNA
aggagaaagcttaccatgcgactctccaaaaccctcgtcgacatggacatggccgactacagtgctgcactggacccagcctacaccaccctggaatttgagaatgtccaggtgttgacgatgggcaatgacacgtccccatcagaaggcaccaacctcaacgcgcccaacagcctgggtgtgagcgccctgtgtgccatctgcggggaccgggccacgggcaaacactacggtgcctcgagctgtgacggctgcaagggcttcttccggaggagcgtgcggaagaaccacatgtactcctgcagatttagccggcagtgcgtggtggacaaagacaagaggaaccagtgccgctactgcaggctcaagaaatgcttccgggctggcatgaagaaggaagccgtccagaatgagcgggaccggatcagcactcgaaggtcaagctatgaggacagcagcctgccctccatcaatgcgctcctgcaggcggaggtcctgtcccgacagatcacctcccccgtctccgggatcaacggcgacattcgggcgaagaagattgccagcatcgcagatgtgtgtgagtccatgaaggagcagctgctggttctcgttgagtgggccaagtacatcccagctttctgcgagctccccctggacgaccaggtggccctgctcagagcccatgctggcgagcacctcctgctcggagccaccaagagatccatggtgttcaaggacgtgctgctcctaggcaatgactacattgtccctcggcactgcccggagctggcggagatgagccgggtgtccatacgcatccttgacgagctggtgctgcccttccaggagctgcagatcgatgacaatgagtatgcctacctcaaagccatcatcttctttgacccagatgccaaggggctgagcgatccagggaagatcaagcggctgcgttcccaggtccaggtgagcttggaggactacatcaacgaccgccagtatgactcgcgtggccgctttggagagctgctgctgctgctgcccaccttgcagagcatcacctggcagatgatcgagcagatccagttcatcaagctgttcggcatggccaagattgacaacctgttgcaggagatgctgctgggagggtcccccagcgatgcaccccatgcccaccaccccctgcaccctcacctgatgcaggaacatatgggaaccaacgtgatcgttgccaacacaatgcccactcacctcagcaacggacagatgtgtgagtggccccgacccaggggacaggcagccacccctgagaccccacagccctcaccgccaggtggctcagggtctgagccctataagctcctgccgggagccgtcgccacaatcgtcaagcccctctctgccatcccccagccgaccatcaccaagcaggaagttatctgaggactagttataagactgactagcccgatgggcctcccaacgggccctcctcccctccttgcaccgagattaataaaaaaaaaaaaaaaaaaaaaaaaaaaaaaaaaaaaaaaaaaaaaaaaaaaaaaaaaaaaaaaatgcatcccccccccccccccccccccccccccccccaaaggctcttttcagagccaccagaatt

SEQ ID NO: 1578 - RNA, 1642 nt, synthetic construct
  misc_feature 1..1642: note = mRNA i-3 (A64-N5-C30-hSL-N5) (opt1) from Homo sapiens__NP_000448.3__HNF4A(1-474)
  source 1..1642: mol_type = other RNA
aggagaaagcttaccatgcgcctgagcaagaccctcgtggacatggacatggccgactactccgccgcgctggaccccgcctacaccacgctggagttcgagaacgtccaggtgctcaccatgggcaacgacaccagcccgtccgaggggaccaacctgaacgcccccaacagcctgggcgtgtccgccctctgcgccatctgcggggaccgggcgacgggcaagcactacggggccagctcctgcgacggctgcaagggcttcttccgccggagcgtccgcaagaaccacatgtactcctgccggttcagccgccagtgcgtggtggacaaggacaagcggaaccagtgccgctactgccggctgaagaagtgcttccgcgccgggatgaagaaggaggccgtccagaacgagcgggaccgcatctccacccggcgcagctcctacgaggacagctccctgcccagcatcaacgcgctcctgcaggccgaggtgctgtcccggcagatcaccagccccgtgtccggcatcaacggggacatccgcgccaagaagatcgccagcatcgccgacgtctgcgagagcatgaaggagcagctcctggtgctggtggagtgggcgaagtacatcccggccttctgcgagctccccctggacgaccaggtcgccctgctccgggcccacgccggcgagcacctcctgctgggggcgaccaagcgctccatggtgttcaaggacgtgctgctgctcggcaacgactacatcgtcccccggcactgccccgagctggccgagatgagccgcgtgtccatccggatcctggacgagctcgtgctgccgttccaggagctgcagatcgacgacaacgagtacgcctacctcaaggccatcatcttcttcgaccccgacgccaagggcctgagcgaccccgggaagatcaagcgcctgcgctcccaggtccaggtgagcctcgaggactacatcaacgaccggcagtacgactcccgcggccggttcggggagctgctgctcctgctgcccacgctccagagcatcacctggcagatgatcgagcagatccagttcatcaagctgttcggcatggcgaagatcgacaacctgctccaggagatgctgctgggcgggtccccgagcgacgcgccccacgcccaccaccccctccacccccacctgatgcaggagcacatgggcaccaacgtgatcgtcgccaacaccatgccgacgcacctgtccaacgggcagatgtgcgagtggccccgcccccggggccaggccgccacccccgagaccccgcagcccagcccgcccgggggctccggcagcgagccctacaagctgctccccggggccgtggccaccatcgtgaagcccctgtccgccatcccccagccgacgatcaccaagcaggaggtcatctgaggactagttataagactgactagcccgatgggcctcccaacgggccctcctcccctccttgcaccgagattaataaaaaaaaaaaaaaaaaaaaaaaaaaaaaaaaaaaaaaaaaaaaaaaaaaaaaaaaaaaaaaaatgcatcccccccccccccccccccccccccccccccaaaggctcttttcagagccaccagaatt

SEQ ID NO: 1579 - RNA, 1642 nt, synthetic construct
  misc_feature 1..1642: note = mRNA i-3 (A64-N5-C30-hSL-N5) (opt1) from Homo sapiens__NP_000448.3__HNF4A(1-474)(S313A)
  source 1..1642: mol_type = other RNA
aggagaaagcttaccatgcgcctgagcaagaccctcgtggacatggacatggccgactactccgccgcgctggaccccgcctacaccacgctggagttcgagaacgtccaggtgctcaccatgggcaacgacaccagcccgtccgaggggaccaacctgaacgcccccaacagcctgggcgtgtccgccctctgcgccatctgcggggaccgggcgacgggcaagcactacggggccagctcctgcgacggctgcaagggcttcttccgccggagcgtccgcaagaaccacatgtactcctgccggttcagccgccagtgcgtggtggacaaggacaagcggaaccagtgccgctactgccggctgaagaagtgcttccgcgccgggatgaagaaggaggccgtccagaacgagcgggaccgcatctccacccggcgcagctcctacgaggacagctccctgcccagcatcaacgcgctcctgcaggccgaggtgctgtcccggcagatcaccagccccgtgtccggcatcaacggggacatccgcgccaagaagatcgccagcatcgccgacgtctgcgagagcatgaaggagcagctcctggtgctggtggagtgggcgaagtacatcccggccttctgcgagctccccctggacgaccaggtcgccctgctccgggcccacgccggcgagcacctcctgctgggggcgaccaagcgctccatggtgttcaaggacgtgctgctgctcggcaacgactacatcgtcccccggcactgccccgagctggccgagatgagccgcgtgtccatccggatcctggacgagctcgtgctgccgttccaggagctgcagatcgacgacaacgagtacgcctacctcaaggccatcatcttcttcgaccccgacgccaagggcctgagcgaccccgggaagatcaagcgcctgcgcgcgcaggtccaggtgagcctcgaggactacatcaacgaccggcagtacgactcccgcggccggttcggggagctgctgctcctgctgcccacgctccagagcatcacctggcagatgatcgagcagatccagttcatcaagctgttcggcatggcgaagatcgacaacctgctccaggagatgctgctgggcgggtccccgagcgacgcgccccacgcccaccaccccctccacccccacctgatgcaggagcacatgggcaccaacgtgatcgtcgccaacaccatgccgacgcacctgtccaacgggcagatgtgcgagtggccccgcccccggggccaggccgccacccccgagaccccgcagcccagcccgcccgggggctccggcagcgagccctacaagctgctccccggggccgtggccaccatcgtgaagcccctgtccgccatcccccagccgacgatcaccaagcaggaggtcatctgaggactagttataagactgactagcccgatgggcctcccaacgggccctcctcccctccttgcaccgagattaataaaaaaaaaaaaaaaaaaaaaaaaaaaaaaaaaaaaaaaaaaaaaaaaaaaaaaaaaaaaaaaatgcatcccccccccccccccccccccccccccccccaaaggctcttttcagagccaccagaatt

SEQ ID NO: 1580 - RNA, 1642 nt, synthetic construct
  misc_feature 1..1642: note = mRNA i-3 (A64-N5-C30-hSL-N5) (opt1) from Homo sapiens__NP_000448.3__HNF4A(1-474)(S313E)
  source 1..1642: mol_type = other RNA
aggagaaagcttaccatgcgcctgagcaagaccctcgtggacatggacatggccgactactccgccgcgctggaccccgcctacaccacgctggagttcgagaacgtccaggtgctcaccatgggcaacgacaccagcccgtccgaggggaccaacctgaacgcccccaacagcctgggcgtgtccgccctctgcgccatctgcggggaccgggcgacgggcaagcactacggggccagctcctgcgacggctgcaagggcttcttccgccggagcgtccgcaagaaccacatgtactcctgccggttcagccgccagtgcgtggtggacaaggacaagcggaaccagtgccgctactgccggctgaagaagtgcttccgcgccgggatgaagaaggaggccgtccagaacgagcgggaccgcatctccacccggcgcagctcctacgaggacagctccctgcccagcatcaacgcgctcctgcaggccgaggtgctgtcccggcagatcaccagccccgtgtccggcatcaacggggacatccgcgccaagaagatcgccagcatcgccgacgtctgcgagagcatgaaggagcagctcctggtgctggtggagtgggcgaagtacatcccggccttctgcgagctccccctggacgaccaggtcgccctgctccgggcccacgccggcgagcacctcctgctgggggcgaccaagcgctccatggtgttcaaggacgtgctgctgctcggcaacgactacatcgtcccccggcactgccccgagctggccgagatgagccgcgtgtccatccggatcctggacgagctcgtgctgccgttccaggagctgcagatcgacgacaacgagtacgcctacctcaaggccatcatcttcttcgaccccgacgccaagggcctgagcgaccccgggaagatcaagcgcctgcgcgagcaggtccaggtgagcctcgaggactacatcaacgaccggcagtacgactcccgcggccggttcggggagctgctgctcctgctgcccacgctccagagcatcacctggcagatgatcgagcagatccagttcatcaagctgttcggcatggcgaagatcgacaacctgctccaggagatgctgctgggcgggtccccgagcgacgcgccccacgcccaccaccccctccacccccacctgatgcaggagcacatgggcaccaacgtgatcgtcgccaacaccatgccgacgcacctgtccaacgggcagatgtgcgagtggccccgcccccggggccaggccgccacccccgagaccccgcagcccagcccgcccgggggctccggcagcgagccctacaagctgctccccggggccgtggccaccatcgtgaagcccctgtccgccatcccccagccgacgatcaccaagcaggaggtcatctgaggactagttataagactgactagcccgatgggcctcccaacgggccctcctcccctccttgcaccgagattaataaaaaaaaaaaaaaaaaaaaaaaaaaaaaaaaaaaaaaaaaaaaaaaaaaaaaaaaaaaaaaaatgcatcccccccccccccccccccccccccccccccaaaggctcttttcagagccaccagaatt

SEQ ID NO: 1581 - RNA, 1642 nt, synthetic construct
  misc_feature 1..1642: note = mRNA i-3 (A64-N5-C30-hSL-N5) (opt1) from Homo sapiens__NP_000448.3__HNF4A(1-474)(S142A_S143A)
  source 1..1642: mol_type = other RNA
aggagaaagcttaccatgcgcctgagcaagaccctcgtggacatggacatggccgactactccgccgcgctggaccccgcctacaccacgctggagttcgagaacgtccaggtgctcaccatgggcaacgacaccagcccgtccgaggggaccaacctgaacgcccccaacagcctgggcgtgtccgccctctgcgccatctgcggggaccgggcgacgggcaagcactacggggccagctcctgcgacggctgcaagggcttcttccgccggagcgtccgcaagaaccacatgtactcctgccggttcagccgccagtgcgtggtggacaaggacaagcggaaccagtgccgctactgccggctgaagaagtgcttccgcgccgggatgaagaaggaggccgtccagaacgagcgggaccgcatctccacccggcgcgcggcctacgaggacagctccctgcccagcatcaacgcgctcctgcaggccgaggtgctgtcccggcagatcaccagccccgtgtccggcatcaacggggacatccgcgccaagaagatcgccagcatcgccgacgtctgcgagagcatgaaggagcagctcctggtgctggtggagtgggcgaagtacatcccggccttctgcgagctccccctggacgaccaggtcgccctgctccgggcccacgccggcgagcacctcctgctgggggcgaccaagcgctccatggtgttcaaggacgtgctgctgctcggcaacgactacatcgtcccccggcactgccccgagctggccgagatgagccgcgtgtccatccggatcctggacgagctcgtgctgccgttccaggagctgcagatcgacgacaacgagtacgcctacctcaaggccatcatcttcttcgaccccgacgccaagggcctgagcgaccccgggaagatcaagcgcctgcgctcccaggtccaggtgagcctcgaggactacatcaacgaccggcagtacgactcccgcggccggttcggggagctgctgctcctgctgcccacgctccagagcatcacctggcagatgatcgagcagatccagttcatcaagctgttcggcatggcgaagatcgacaacctgctccaggagatgctgctgggcgggtccccgagcgacgcgccccacgcccaccaccccctccacccccacctgatgcaggagcacatgggcaccaacgtgatcgtcgccaacaccatgccgacgcacctgtccaacgggcagatgtgcgagtggccccgcccccggggccaggccgccacccccgagaccccgcagcccagcccgcccgggggctccggcagcgagccctacaagctgctccccggggccgtggccaccatcgtgaagcccctgtccgccatcccccagccgacgatcaccaagcaggaggtcatctgaggactagttataagactgactagcccgatgggcctcccaacgggccctcctcccctccttgcaccgagattaataaaaaaaaaaaaaaaaaaaaaaaaaaaaaaaaaaaaaaaaaaaaaaaaaaaaaaaaaaaaaaaatgcatcccccccccccccccccccccccccccccccaaaggctcttttcagagccaccagaatt

SEQ ID NO: 1582 - RNA, 1642 nt, synthetic construct
  misc_feature 1..1642: note = mRNA i-3 (A64-N5-C30-hSL-N5) (opt1) from Homo sapiens__NP_000448.3__HNF4A(1-474)(S142E_S143E)
  source 1..1642: mol_type = other RNA
aggagaaagcttaccatgcgcctgagcaagaccctcgtggacatggacatggccgactactccgccgcgctggaccccgcctacaccacgctggagttcgagaacgtccaggtgctcaccatgggcaacgacaccagcccgtccgaggggaccaacctgaacgcccccaacagcctgggcgtgtccgccctctgcgccatctgcggggaccgggcgacgggcaagcactacggggccagctcctgcgacggctgcaagggcttcttccgccggagcgtccgcaagaaccacatgtactcctgccggttcagccgccagtgcgtggtggacaaggacaagcggaaccagtgccgctactgccggctgaagaagtgcttccgcgccgggatgaagaaggaggccgtccagaacgagcgggaccgcatctccacccggcgcgaggagtacgaggacagctccctgcccagcatcaacgcgctcctgcaggccgaggtgctgtcccggcagatcaccagccccgtgtccggcatcaacggggacatccgcgccaagaagatcgccagcatcgccgacgtctgcgagagcatgaaggagcagctcctggtgctggtggagtgggcgaagtacatcccggccttctgcgagctccccctggacgaccaggtcgccctgctccgggcccacgccggcgagcacctcctgctgggggcgaccaagcgctccatggtgttcaaggacgtgctgctgctcggcaacgactacatcgtcccccggcactgccccgagctggccgagatgagccgcgtgtccatccggatcctggacgagctcgtgctgccgttccaggagctgcagatcgacgacaacgagtacgcctacctcaaggccatcatcttcttcgaccccgacgccaagggcctgagcgaccccgggaagatcaagcgcctgcgctcccaggtccaggtgagcctcgaggactacatcaacgaccggcagtacgactcccgcggccggttcggggagctgctgctcctgctgcccacgctccagagcatcacctggcagatgatcgagcagatccagttcatcaagctgttcggcatggcgaagatcgacaacctgctccaggagatgctgctgggcgggtccccgagcgacgcgccccacgcccaccaccccctccacccccacctgatgcaggagcacatgggcaccaacgtgatcgtcgccaacaccatgccgacgcacctgtccaacgggcagatgtgcgagtggccccgcccccggggccaggccgccacccccgagaccccgcagcccagcccgcccgggggctccggcagcgagccctacaagctgctccccggggccgtggccaccatcgtgaagcccctgtccgccatcccccagccgacgatcaccaagcaggaggtcatctgaggactagttataagactgactagcccgatgggcctcccaacgggccctcctcccctccttgcaccgagattaataaaaaaaaaaaaaaaaaaaaaaaaaaaaaaaaaaaaaaaaaaaaaaaaaaaaaaaaaaaaaaaatgcatcccccccccccccccccccccccccccccccaaaggctcttttcagagccaccagaatt

SEQ ID NO: 1583 - RNA, 1642 nt, synthetic construct
  misc_feature 1..1642: note = mRNA i-3 (A64-N5-C30-hSL-N5) (opt1) from Homo sapiens__NP_000448.3__HNF4A(1-474)(S143A)
  source 1..1642: mol_type = other RNA
aggagaaagcttaccatgcgcctgagcaagaccctcgtggacatggacatggccgactactccgccgcgctggaccccgcctacaccacgctggagttcgagaacgtccaggtgctcaccatgggcaacgacaccagcccgtccgaggggaccaacctgaacgcccccaacagcctgggcgtgtccgccctctgcgccatctgcggggaccgggcgacgggcaagcactacggggccagctcctgcgacggctgcaagggcttcttccgccggagcgtccgcaagaaccacatgtactcctgccggttcagccgccagtgcgtggtggacaaggacaagcggaaccagtgccgctactgccggctgaagaagtgcttccgcgccgggatgaagaaggaggccgtccagaacgagcgggaccgcatctccacccggcgcagcgcgtacgaggacagctccctgcccagcatcaacgcgctcctgcaggccgaggtgctgtcccggcagatcaccagccccgtgtccggcatcaacggggacatccgcgccaagaagatcgccagcatcgccgacgtctgcgagagcatgaaggagcagctcctggtgctggtggagtgggcgaagtacatcccggccttctgcgagctccccctggacgaccaggtcgccctgctccgggcccacgccggcgagcacctcctgctgggggcgaccaagcgctccatggtgttcaaggacgtgctgctgctcggcaacgactacatcgtcccccggcactgccccgagctggccgagatgagccgcgtgtccatccggatcctggacgagctcgtgctgccgttccaggagctgcagatcgacgacaacgagtacgcctacctcaaggccatcatcttcttcgaccccgacgccaagggcctgagcgaccccgggaagatcaagcgcctgcgctcccaggtccaggtgagcctcgaggactacatcaacgaccggcagtacgactcccgcggccggttcggggagctgctgctcctgctgcccacgctccagagcatcacctggcagatgatcgagcagatccagttcatcaagctgttcggcatggcgaagatcgacaacctgctccaggagatgctgctgggcgggtccccgagcgacgcgccccacgcccaccaccccctccacccccacctgatgcaggagcacatgggcaccaacgtgatcgtcgccaacaccatgccgacgcacctgtccaacgggcagatgtgcgagtggccccgcccccggggccaggccgccacccccgagaccccgcagcccagcccgcccgggggctccggcagcgagccctacaagctgctccccggggccgtggccaccatcgtgaagcccctgtccgccatcccccagccgacgatcaccaagcaggaggtcatctgaggactagttataagactgactagcccgatgggcctcccaacgggccctcctcccctccttgcaccgagattaataaaaaaaaaaaaaaaaaaaaaaaaaaaaaaaaaaaaaaaaaaaaaaaaaaaaaaaaaaaaaaaatgcatcccccccccccccccccccccccccccccccaaaggctcttttcagagccaccagaatt

SEQ ID NO: 1584 - RNA, 1642 nt, synthetic construct
  misc_feature 1..1642: note = mRNA i-3 (A64-N5-C30-hSL-N5) (opt1) from Homo sapiens__NP_000448.3__HNF4A(1-474)(T166A)
  source 1..1642: mol_type = other RNA
aggagaaagcttaccatgcgcctgagcaagaccctcgtggacatggacatggccgactactccgccgcgctggaccccgcctacaccacgctggagttcgagaacgtccaggtgctcaccatgggcaacgacaccagcccgtccgaggggaccaacctgaacgcccccaacagcctgggcgtgtccgccctctgcgccatctgcggggaccgggcgacgggcaagcactacggggccagctcctgcgacggctgcaagggcttcttccgccggagcgtccgcaagaaccacatgtactcctgccggttcagccgccagtgcgtggtggacaaggacaagcggaaccagtgccgctactgccggctgaagaagtgcttccgcgccgggatgaagaaggaggccgtccagaacgagcgggaccgcatctccacccggcgcagctcctacgaggacagctccctgcccagcatcaacgcgctcctgcaggccgaggtgctgtcccggcagatcgcgagccccgtgtccggcatcaacggggacatccgcgccaagaagatcgccagcatcgccgacgtctgcgagagcatgaaggagcagctcctggtgctggtggagtgggcgaagtacatcccggccttctgcgagctccccctggacgaccaggtcgccctgctccgggcccacgccggcgagcacctcctgctgggggcgaccaagcgctccatggtgttcaaggacgtgctgctgctcggcaacgactacatcgtcccccggcactgccccgagctggccgagatgagccgcgtgtccatccggatcctggacgagctcgtgctgccgttccaggagctgcagatcgacgacaacgagtacgcctacctcaaggccatcatcttcttcgaccccgacgccaagggcctgagcgaccccgggaagatcaagcgcctgcgctcccaggtccaggtgagcctcgaggactacatcaacgaccggcagtacgactcccgcggccggttcggggagctgctgctcctgctgcccacgctccagagcatcacctggcagatgatcgagcagatccagttcatcaagctgttcggcatggcgaagatcgacaacctgctccaggagatgctgctgggcgggtccccgagcgacgcgccccacgcccaccaccccctccacccccacctgatgcaggagcacatgggcaccaacgtgatcgtcgccaacaccatgccgacgcacctgtccaacgggcagatgtgcgagtggccccgcccccggggccaggccgccacccccgagaccccgcagcccagcccgcccgggggctccggcagcgagccctacaagctgctccccggggccgtggccaccatcgtgaagcccctgtccgccatcccccagccgacgatcaccaagcaggaggtcatctgaggactagttataagactgactagcccgatgggcctcccaacgggccctcctcccctccttgcaccgagattaataaaaaaaaaaaaaaaaaaaaaaaaaaaaaaaaaaaaaaaaaaaaaaaaaaaaaaaaaaaaaaaatgcatcccccccccccccccccccccccccccccccaaaggctcttttcagagccaccagaatt

SEQ ID NO: 1585 - RNA, 1642 nt, synthetic construct
  misc_feature 1..1642: note = mRNA i-3 (A64-N5-C30-hSL-N5) (opt1) from Homo sapiens__NP_000448.3__HNF4A(1-474)(S167E)
  source 1..1642: mol_type = other RNA
aggagaaagcttaccatgcgcctgagcaagaccctcgtggacatggacatggccgactactccgccgcgctggaccccgcctacaccacgctggagttcgagaacgtccaggtgctcaccatgggcaacgacaccagcccgtccgaggggaccaacctgaacgcccccaacagcctgggcgtgtccgccctctgcgccatctgcggggaccgggcgacgggcaagcactacggggccagctcctgcgacggctgcaagggcttcttccgccggagcgtccgcaagaaccacatgtactcctgccggttcagccgccagtgcgtggtggacaaggacaagcggaaccagtgccgctactgccggctgaagaagtgcttccgcgccgggatgaagaaggaggccgtccagaacgagcgggaccgcatctccacccggcgcagctcctacgaggacagctccctgcccagcatcaacgcgctcctgcaggccgaggtgctgtcccggcagatcaccgagcccgtgtccggcatcaacggggacatccgcgccaagaagatcgccagcatcgccgacgtctgcgagagcatgaaggagcagctcctggtgctggtggagtgggcgaagtacatcccggccttctgcgagctccccctggacgaccaggtcgccctgctccgggcccacgccggcgagcacctcctgctgggggcgaccaagcgctccatggtgttcaaggacgtgctgctgctcggcaacgactacatcgtcccccggcactgccccgagctggccgagatgagccgcgtgtccatccggatcctggacgagctcgtgctgccgttccaggagctgcagatcgacgacaacgagtacgcctacctcaaggccatcatcttcttcgaccccgacgccaagggcctgagcgaccccgggaagatcaagcgcctgcgctcccaggtccaggtgagcctcgaggactacatcaacgaccggcagtacgactcccgcggccggttcggggagctgctgctcctgctgcccacgctccagagcatcacctggcagatgatcgagcagatccagttcatcaagctgttcggcatggcgaagatcgacaacctgctccaggagatgctgctgggcgggtccccgagcgacgcgccccacgcccaccaccccctccacccccacctgatgcaggagcacatgggcaccaacgtgatcgtcgccaacaccatgccgacgcacctgtccaacgggcagatgtgcgagtggccccgcccccggggccaggccgccacccccgagaccccgcagcccagcccgcccgggggctccggcagcgagccctacaagctgctccccggggccgtggccaccatcgtgaagcccctgtccgccatcccccagccgacgatcaccaagcaggaggtcatctgaggactagttataagactgactagcccgatgggcctcccaacgggccctcctcccctccttgcaccgagattaataaaaaaaaaaaaaaaaaaaaaaaaaaaaaaaaaaaaaaaaaaaaaaaaaaaaaaaaaaaaaaaatgcatcccccccccccccccccccccccccccccccaaaggctcttttcagagccaccagaatt

SEQ ID NO: 1586 - RNA, 1642 nt, synthetic construct
  misc_feature 1..1642: note = mRNA i-3 (A64-N5-C30-hSL-N5) (opt1) from Homo sapiens__NP_000448.3__HNF4A(1-474)(S167A)
  source 1..1642: mol_type = other RNA
aggagaaagcttaccatgcgcctgagcaagaccctcgtggacatggacatggccgactactccgccgcgctggaccccgcctacaccacgctggagttcgagaacgtccaggtgctcaccatgggcaacgacaccagcccgtccgaggggaccaacctgaacgcccccaacagcctgggcgtgtccgccctctgcgccatctgcggggaccgggcgacgggcaagcactacggggccagctcctgcgacggctgcaagggcttcttccgccggagcgtccgcaagaaccacatgtactcctgccggttcagccgccagtgcgtggtggacaaggacaagcggaaccagtgccgctactgccggctgaagaagtgcttccgcgccgggatgaagaaggaggccgtccagaacgagcgggaccgcatctccacccggcgcagctcctacgaggacagctccctgcccagcatcaacgcgctcctgcaggccgaggtgctgtcccggcagatcaccgcgcccgtgtccggcatcaacggggacatccgcgccaagaagatcgccagcatcgccgacgtctgcgagagcatgaaggagcagctcctggtgctggtggagtgggcgaagtacatcccggccttctgcgagctccccctggacgaccaggtcgccctgctccgggcccacgccggcgagcacctcctgctgggggcgaccaagcgctccatggtgttcaaggacgtgctgctgctcggcaacgactacatcgtcccccggcactgccccgagctggccgagatgagccgcgtgtccatccggatcctggacgagctcgtgctgccgttccaggagctgcagatcgacgacaacgagtacgcctacctcaaggccatcatcttcttcgaccccgacgccaagggcctgagcgaccccgggaagatcaagcgcctgcgctcccaggtccaggtgagcctcgaggactacatcaacgaccggcagtacgactcccgcggccggttcggggagctgctgctcctgctgcccacgctccagagcatcacctggcagatgatcgagcagatccagttcatcaagctgttcggcatggcgaagatcgacaacctgctccaggagatgctgctgggcgggtccccgagcgacgcgccccacgcccaccaccccctccacccccacctgatgcaggagcacatgggcaccaacgtgatcgtcgccaacaccatgccgacgcacctgtccaacgggcagatgtgcgagtggccccgcccccggggccaggccgccacccccgagaccccgcagcccagcccgcccgggggctccggcagcgagccctacaagctgctccccggggccgtggccaccatcgtgaagcccctgtccgccatcccccagccgacgatcaccaagcaggaggtcatctgaggactagttataagactgactagcccgatgggcctcccaacgggccctcctcccctccttgcaccgagattaataaaaaaaaaaaaaaaaaaaaaaaaaaaaaaaaaaaaaaaaaaaaaaaaaaaaaaaaaaaaaaaatgcatcccccccccccccccccccccccccccccccaaaggctcttttcagagccaccagaatt

SEQ ID NO: 1587 - RNA, 1642 nt, synthetic construct
  misc_feature 1..1642: note = mRNA i-3 (A64-N5-C30-hSL-N5) (opt1) from Homo sapiens__NP_000448.3__HNF4A(1-474)(S167A_S378A_T429A_T432A_ S436A)
  source 1..1642: mol_type = other RNA
aggagaaagcttaccatgcgcctgagcaagaccctcgtggacatggacatggccgactactccgccgcgctggaccccgcctacaccacgctggagttcgagaacgtccaggtgctcaccatgggcaacgacaccagcccgtccgaggggaccaacctgaacgcccccaacagcctgggcgtgtccgccctctgcgccatctgcggggaccgggcgacgggcaagcactacggggccagctcctgcgacggctgcaagggcttcttccgccggagcgtccgcaagaaccacatgtactcctgccggttcagccgccagtgcgtggtggacaaggacaagcggaaccagtgccgctactgccggctgaagaagtgcttccgcgccgggatgaagaaggaggccgtccagaacgagcgggaccgcatctccacccggcgcagctcctacgaggacagctccctgcccagcatcaacgcgctcctgcaggccgaggtgctgtcccggcagatcaccgcgcccgtgtccggcatcaacggggacatccgcgccaagaagatcgccagcatcgccgacgtctgcgagagcatgaaggagcagctcctggtgctggtggagtgggcgaagtacatcccggccttctgcgagctccccctggacgaccaggtcgccctgctccgggcccacgccggcgagcacctcctgctgggggcgaccaagcgctccatggtgttcaaggacgtgctgctgctcggcaacgactacatcgtcccccggcactgccccgagctggccgagatgagccgcgtgtccatccggatcctggacgagctcgtgctgccgttccaggagctgcagatcgacgacaacgagtacgcctacctcaaggccatcatcttcttcgaccccgacgccaagggcctgagcgaccccgggaagatcaagcgcctgcgctcccaggtccaggtgagcctcgaggactacatcaacgaccggcagtacgactcccgcggccggttcggggagctgctgctcctgctgcccacgctccagagcatcacctggcagatgatcgagcagatccagttcatcaagctgttcggcatggcgaagatcgacaacctgctccaggagatgctgctgggcggggcgccgagcgacgcgccccacgcccaccaccccctccacccccacctgatgcaggagcacatgggcaccaacgtgatcgtcgccaacaccatgccgacgcacctgtccaacgggcagatgtgcgagtggccccgcccccggggccaggccgccgcgcccgaggcgccgcagcccgcgccgcccgggggctccggcagcgagccctacaagctgctccccggggccgtggccaccatcgtgaagcccctgtccgccatcccccagccgacgatcaccaagcaggaggtcatctgaggactagttataagactgactagcccgatgggcctcccaacgggccctcctcccctccttgcaccgagattaataaaaaaaaaaaaaaaaaaaaaaaaaaaaaaaaaaaaaaaaaaaaaaaaaaaaaaaaaaaaaaaatgcatcccccccccccccccccccccccccccccccaaaggctcttttcagagccaccagaatt

SEQ ID NO: 1588 - RNA, 1642 nt, synthetic construct
  misc_feature 1..1642: note = mRNA i-3 (A64-N5-C30-hSL-N5) (opt1) from Homo sapiens__NP_000448.3__HNF4A(1-474)(S167E_S378E_T429E_T432E_ S436E)
  source 1..1642: mol_type = other RNA
aggagaaagcttaccatgcgcctgagcaagaccctcgtggacatggacatggccgactactccgccgcgctggaccccgcctacaccacgctggagttcgagaacgtccaggtgctcaccatgggcaacgacaccagcccgtccgaggggaccaacctgaacgcccccaacagcctgggcgtgtccgccctctgcgccatctgcggggaccgggcgacgggcaagcactacggggccagctcctgcgacggctgcaagggcttcttccgccggagcgtccgcaagaaccacatgtactcctgccggttcagccgccagtgcgtggtggacaaggacaagcggaaccagtgccgctactgccggctgaagaagtgcttccgcgccgggatgaagaaggaggccgtccagaacgagcgggaccgcatctccacccggcgcagctcctacgaggacagctccctgcccagcatcaacgcgctcctgcaggccgaggtgctgtcccggcagatcaccgagcccgtgtccggcatcaacggggacatccgcgccaagaagatcgccagcatcgccgacgtctgcgagagcatgaaggagcagctcctggtgctggtggagtgggcgaagtacatcccggccttctgcgagctccccctggacgaccaggtcgccctgctccgggcccacgccggcgagcacctcctgctgggggcgaccaagcgctccatggtgttcaaggacgtgctgctgctcggcaacgactacatcgtcccccggcactgccccgagctggccgagatgagccgcgtgtccatccggatcctggacgagctcgtgctgccgttccaggagctgcagatcgacgacaacgagtacgcctacctcaaggccatcatcttcttcgaccccgacgccaagggcctgagcgaccccgggaagatcaagcgcctgcgctcccaggtccaggtgagcctcgaggactacatcaacgaccggcagtacgactcccgcggccggttcggggagctgctgctcctgctgcccacgctccagagcatcacctggcagatgatcgagcagatccagttcatcaagctgttcggcatggcgaagatcgacaacctgctccaggagatgctgctgggcggggagccgagcgacgcgccccacgcccaccaccccctccacccccacctgatgcaggagcacatgggcaccaacgtgatcgtcgccaacaccatgccgacgcacctgtccaacgggcagatgtgcgagtggccccgcccccggggccaggccgccgagcccgaggagccgcagcccgagccgcccgggggctccggcagcgagccctacaagctgctccccggggccgtggccaccatcgtgaagcccctgtccgccatcccccagccgacgatcaccaagcaggaggtcatctgaggactagttataagactgactagcccgatgggcctcccaacgggccctcctcccctccttgcaccgagattaataaaaaaaaaaaaaaaaaaaaaaaaaaaaaaaaaaaaaaaaaaaaaaaaaaaaaaaaaaaaaaaatgcatcccccccccccccccccccccccccccccccaaaggctcttttcagagccaccagaatt

SEQ ID NO: 1589 - RNA, 1642 nt, synthetic construct
  misc_feature 1..1642: note = mRNA i-3 (A64-N5-C30-hSL-N5) (opt1) from Homo sapiens__NP_000448.3__HNF4A(1-474)(S87A)
  source 1..1642: mol_type = other RNA
aggagaaagcttaccatgcgcctgagcaagaccctcgtggacatggacatggccgactactccgccgcgctggaccccgcctacaccacgctggagttcgagaacgtccaggtgctcaccatgggcaacgacaccagcccgtccgaggggaccaacctgaacgcccccaacagcctgggcgtgtccgccctctgcgccatctgcggggaccgggcgacgggcaagcactacggggccagctcctgcgacggctgcaagggcttcttccgccgggcggtccgcaagaaccacatgtactcctgccggttcagccgccagtgcgtggtggacaaggacaagcggaaccagtgccgctactgccggctgaagaagtgcttccgcgccgggatgaagaaggaggccgtccagaacgagcgggaccgcatctccacccggcgcagctcctacgaggacagctccctgcccagcatcaacgcgctcctgcaggccgaggtgctgtcccggcagatcaccagccccgtgtccggcatcaacggggacatccgcgccaagaagatcgccagcatcgccgacgtctgcgagagcatgaaggagcagctcctggtgctggtggagtgggcgaagtacatcccggccttctgcgagctccccctggacgaccaggtcgccctgctccgggcccacgccggcgagcacctcctgctgggggcgaccaagcgctccatggtgttcaaggacgtgctgctgctcggcaacgactacatcgtcccccggcactgccccgagctggccgagatgagccgcgtgtccatccggatcctggacgagctcgtgctgccgttccaggagctgcagatcgacgacaacgagtacgcctacctcaaggccatcatcttcttcgaccccgacgccaagggcctgagcgaccccgggaagatcaagcgcctgcgctcccaggtccaggtgagcctcgaggactacatcaacgaccggcagtacgactcccgcggccggttcggggagctgctgctcctgctgcccacgctccagagcatcacctggcagatgatcgagcagatccagttcatcaagctgttcggcatggcgaagatcgacaacctgctccaggagatgctgctgggcgggtccccgagcgacgcgccccacgcccaccaccccctccacccccacctgatgcaggagcacatgggcaccaacgtgatcgtcgccaacaccatgccgacgcacctgtccaacgggcagatgtgcgagtggccccgcccccggggccaggccgccacccccgagaccccgcagcccagcccgcccgggggctccggcagcgagccctacaagctgctccccggggccgtggccaccatcgtgaagcccctgtccgccatcccccagccgacgatcaccaagcaggaggtcatctgaggactagttataagactgactagcccgatgggcctcccaacgggccctcctcccctccttgcaccgagattaataaaaaaaaaaaaaaaaaaaaaaaaaaaaaaaaaaaaaaaaaaaaaaaaaaaaaaaaaaaaaaaatgcatcccccccccccccccccccccccccccccccaaaggctcttttcagagccaccagaatt

SEQ ID NO: 1590 - RNA, 1642 nt, synthetic construct
  misc_feature 1..1642: note = mRNA i-3 (A64-N5-C30-hSL-N5) (opt1) from Homo sapiens__NP_000448.3__HNF4A(1-474)(S87E)
  source 1..1642: mol_type = other RNA
aggagaaagcttaccatgcgcctgagcaagaccctcgtggacatggacatggccgactactccgccgcgctggaccccgcctacaccacgctggagttcgagaacgtccaggtgctcaccatgggcaacgacaccagcccgtccgaggggaccaacctgaacgcccccaacagcctgggcgtgtccgccctctgcgccatctgcggggaccgggcgacgggcaagcactacggggccagctcctgcgacggctgcaagggcttcttccgccgggaggtccgcaagaaccacatgtactcctgccggttcagccgccagtgcgtggtggacaaggacaagcggaaccagtgccgctactgccggctgaagaagtgcttccgcgccgggatgaagaaggaggccgtccagaacgagcgggaccgcatctccacccggcgcagctcctacgaggacagctccctgcccagcatcaacgcgctcctgcaggccgaggtgctgtcccggcagatcaccagccccgtgtccggcatcaacggggacatccgcgccaagaagatcgccagcatcgccgacgtctgcgagagcatgaaggagcagctcctggtgctggtggagtgggcgaagtacatcccggccttctgcgagctccccctggacgaccaggtcgccctgctccgggcccacgccggcgagcacctcctgctgggggcgaccaagcgctccatggtgttcaaggacgtgctgctgctcggcaacgactacatcgtcccccggcactgccccgagctggccgagatgagccgcgtgtccatccggatcctggacgagctcgtgctgccgttccaggagctgcagatcgacgacaacgagtacgcctacctcaaggccatcatcttcttcgaccccgacgccaagggcctgagcgaccccgggaagatcaagcgcctgcgctcccaggtccaggtgagcctcgaggactacatcaacgaccggcagtacgactcccgcggccggttcggggagctgctgctcctgctgcccacgctccagagcatcacctggcagatgatcgagcagatccagttcatcaagctgttcggcatggcgaagatcgacaacctgctccaggagatgctgctgggcgggtccccgagcgacgcgccccacgcccaccaccccctccacccccacctgatgcaggagcacatgggcaccaacgtgatcgtcgccaacaccatgccgacgcacctgtccaacgggcagatgtgcgagtggccccgcccccggggccaggccgccacccccgagaccccgcagcccagcccgcccgggggctccggcagcgagccctacaagctgctccccggggccgtggccaccatcgtgaagcccctgtccgccatcccccagccgacgatcaccaagcaggaggtcatctgaggactagttataagactgactagcccgatgggcctcccaacgggccctcctcccctccttgcaccgagattaataaaaaaaaaaaaaaaaaaaaaaaaaaaaaaaaaaaaaaaaaaaaaaaaaaaaaaaaaaaaaaaatgcatcccccccccccccccccccccccccccccccaaaggctcttttcagagccaccagaatt

SEQ ID NO: 1591 - RNA, 1642 nt, synthetic construct
  misc_feature 1..1642: note = mRNA i-3 (A64-N5-C30-hSL-N5) (opt1) from Homo sapiens__NP_000448.3__HNF4A(1-474)(R2V)
  source 1..1642: mol_type = other RNA
aggagaaagcttaccatggtgctgagcaagaccctcgtggacatggacatggccgactactccgccgcgctggaccccgcctacaccacgctggagttcgagaacgtccaggtgctcaccatgggcaacgacaccagcccgtccgaggggaccaacctgaacgcccccaacagcctgggcgtgtccgccctctgcgccatctgcggggaccgggcgacgggcaagcactacggggccagctcctgcgacggctgcaagggcttcttccgccggagcgtccgcaagaaccacatgtactcctgccggttcagccgccagtgcgtggtggacaaggacaagcggaaccagtgccgctactgccggctgaagaagtgcttccgcgccgggatgaagaaggaggccgtccagaacgagcgggaccgcatctccacccggcgcagctcctacgaggacagctccctgcccagcatcaacgcgctcctgcaggccgaggtgctgtcccggcagatcaccagccccgtgtccggcatcaacggggacatccgcgccaagaagatcgccagcatcgccgacgtctgcgagagcatgaaggagcagctcctggtgctggtggagtgggcgaagtacatcccggccttctgcgagctccccctggacgaccaggtcgccctgctccgggcccacgccggcgagcacctcctgctgggggcgaccaagcgctccatggtgttcaaggacgtgctgctgctcggcaacgactacatcgtcccccggcactgccccgagctggccgagatgagccgcgtgtccatccggatcctggacgagctcgtgctgccgttccaggagctgcagatcgacgacaacgagtacgcctacctcaaggccatcatcttcttcgaccccgacgccaagggcctgagcgaccccgggaagatcaagcgcctgcgctcccaggtccaggtgagcctcgaggactacatcaacgaccggcagtacgactcccgcggccggttcggggagctgctgctcctgctgcccacgctccagagcatcacctggcagatgatcgagcagatccagttcatcaagctgttcggcatggcgaagatcgacaacctgctccaggagatgctgctgggcgggtccccgagcgacgcgccccacgcccaccaccccctccacccccacctgatgcaggagcacatgggcaccaacgtgatcgtcgccaacaccatgccgacgcacctgtccaacgggcagatgtgcgagtggccccgcccccggggccaggccgccacccccgagaccccgcagcccagcccgcccgggggctccggcagcgagccctacaagctgctccccggggccgtggccaccatcgtgaagcccctgtccgccatcccccagccgacgatcaccaagcaggaggtcatctgaggactagttataagactgactagcccgatgggcctcccaacgggccctcctcccctccttgcaccgagattaataaaaaaaaaaaaaaaaaaaaaaaaaaaaaaaaaaaaaaaaaaaaaaaaaaaaaaaaaaaaaaaatgcatcccccccccccccccccccccccccccccccaaaggctcttttcagagccaccagaatt

SEQ ID NO: 1592 - RNA, 1642 nt, synthetic construct
  misc_feature 1..1642: note = mRNA i-3 (A64-N5-C30-hSL-N5) (opt1) from Homo sapiens__NP_000448.3__HNF4A(1-474)(R2V_K5V)
  source 1..1642: mol_type = other RNA
aggagaaagcttaccatggtgctgagcgtgaccctcgtggacatggacatggccgactactccgccgcgctggaccccgcctacaccacgctggagttcgagaacgtccaggtgctcaccatgggcaacgacaccagcccgtccgaggggaccaacctgaacgcccccaacagcctgggcgtgtccgccctctgcgccatctgcggggaccgggcgacgggcaagcactacggggccagctcctgcgacggctgcaagggcttcttccgccggagcgtccgcaagaaccacatgtactcctgccggttcagccgccagtgcgtggtggacaaggacaagcggaaccagtgccgctactgccggctgaagaagtgcttccgcgccgggatgaagaaggaggccgtccagaacgagcgggaccgcatctccacccggcgcagctcctacgaggacagctccctgcccagcatcaacgcgctcctgcaggccgaggtgctgtcccggcagatcaccagccccgtgtccggcatcaacggggacatccgcgccaagaagatcgccagcatcgccgacgtctgcgagagcatgaaggagcagctcctggtgctggtggagtgggcgaagtacatcccggccttctgcgagctccccctggacgaccaggtcgccctgctccgggcccacgccggcgagcacctcctgctgggggcgaccaagcgctccatggtgttcaaggacgtgctgctgctcggcaacgactacatcgtcccccggcactgccccgagctggccgagatgagccgcgtgtccatccggatcctggacgagctcgtgctgccgttccaggagctgcagatcgacgacaacgagtacgcctacctcaaggccatcatcttcttcgaccccgacgccaagggcctgagcgaccccgggaagatcaagcgcctgcgctcccaggtccaggtgagcctcgaggactacatcaacgaccggcagtacgactcccgcggccggttcggggagctgctgctcctgctgcccacgctccagagcatcacctggcagatgatcgagcagatccagttcatcaagctgttcggcatggcgaagatcgacaacctgctccaggagatgctgctgggcgggtccccgagcgacgcgccccacgcccaccaccccctccacccccacctgatgcaggagcacatgggcaccaacgtgatcgtcgccaacaccatgccgacgcacctgtccaacgggcagatgtgcgagtggccccgcccccggggccaggccgccacccccgagaccccgcagcccagcccgcccgggggctccggcagcgagccctacaagctgctccccggggccgtggccaccatcgtgaagcccctgtccgccatcccccagccgacgatcaccaagcaggaggtcatctgaggactagttataagactgactagcccgatgggcctcccaacgggccctcctcccctccttgcaccgagattaataaaaaaaaaaaaaaaaaaaaaaaaaaaaaaaaaaaaaaaaaaaaaaaaaaaaaaaaaaaaaaaatgcatcccccccccccccccccccccccccccccccaaaggctcttttcagagccaccagaatt

SEQ ID NO: 1593 - RNA, 1642 nt, synthetic construct
  misc_feature 1..1642: note = mRNA i-3 (A64-N5-C30-hSL-N5) (opt1) from Homo sapiens__NP_000448.3__HNF4A(1-474)(K179R_K180R)
  source 1..1642: mol_type = other RNA
aggagaaagcttaccatgcgcctgagcaagaccctcgtggacatggacatggccgactactccgccgcgctggaccccgcctacaccacgctggagttcgagaacgtccaggtgctcaccatgggcaacgacaccagcccgtccgaggggaccaacctgaacgcccccaacagcctgggcgtgtccgccctctgcgccatctgcggggaccgggcgacgggcaagcactacggggccagctcctgcgacggctgcaagggcttcttccgccggagcgtccgcaagaaccacatgtactcctgccggttcagccgccagtgcgtggtggacaaggacaagcggaaccagtgccgctactgccggctgaagaagtgcttccgcgccgggatgaagaaggaggccgtccagaacgagcgggaccgcatctccacccggcgcagctcctacgaggacagctccctgcccagcatcaacgcgctcctgcaggccgaggtgctgtcccggcagatcaccagccccgtgtccggcatcaacggggacatccgcgcccggcgcatcgccagcatcgccgacgtctgcgagagcatgaaggagcagctcctggtgctggtggagtgggcgaagtacatcccggccttctgcgagctccccctggacgaccaggtcgccctgctccgggcccacgccggcgagcacctcctgctgggggcgaccaagcgctccatggtgttcaaggacgtgctgctgctcggcaacgactacatcgtcccccggcactgccccgagctggccgagatgagccgcgtgtccatccggatcctggacgagctcgtgctgccgttccaggagctgcagatcgacgacaacgagtacgcctacctcaaggccatcatcttcttcgaccccgacgccaagggcctgagcgaccccgggaagatcaagcgcctgcgctcccaggtccaggtgagcctcgaggactacatcaacgaccggcagtacgactcccgcggccggttcggggagctgctgctcctgctgcccacgctccagagcatcacctggcagatgatcgagcagatccagttcatcaagctgttcggcatggcgaagatcgacaacctgctccaggagatgctgctgggcgggtccccgagcgacgcgccccacgcccaccaccccctccacccccacctgatgcaggagcacatgggcaccaacgtgatcgtcgccaacaccatgccgacgcacctgtccaacgggcagatgtgcgagtggccccgcccccggggccaggccgccacccccgagaccccgcagcccagcccgcccgggggctccggcagcgagccctacaagctgctccccggggccgtggccaccatcgtgaagcccctgtccgccatcccccagccgacgatcaccaagcaggaggtcatctgaggactagttataagactgactagcccgatgggcctcccaacgggccctcctcccctccttgcaccgagattaataaaaaaaaaaaaaaaaaaaaaaaaaaaaaaaaaaaaaaaaaaaaaaaaaaaaaaaaaaaaaaaatgcatcccccccccccccccccccccccccccccccaaaggctcttttcagagccaccagaatt

SEQ ID NO: 1594 - RNA, 1642 nt, synthetic construct
  misc_feature 1..1642: note = mRNA i-3 (A64-N5-C30-hSL-N5) (opt1) from Homo sapiens__NP_000448.3__HNF4A(1-474)(K234R)
  source 1..1642: mol_type = other RNA
aggagaaagcttaccatgcgcctgagcaagaccctcgtggacatggacatggccgactactccgccgcgctggaccccgcctacaccacgctggagttcgagaacgtccaggtgctcaccatgggcaacgacaccagcccgtccgaggggaccaacctgaacgcccccaacagcctgggcgtgtccgccctctgcgccatctgcggggaccgggcgacgggcaagcactacggggccagctcctgcgacggctgcaagggcttcttccgccggagcgtccgcaagaaccacatgtactcctgccggttcagccgccagtgcgtggtggacaaggacaagcggaaccagtgccgctactgccggctgaagaagtgcttccgcgccgggatgaagaaggaggccgtccagaacgagcgggaccgcatctccacccggcgcagctcctacgaggacagctccctgcccagcatcaacgcgctcctgcaggccgaggtgctgtcccggcagatcaccagccccgtgtccggcatcaacggggacatccgcgccaagaagatcgccagcatcgccgacgtctgcgagagcatgaaggagcagctcctggtgctggtggagtgggcgaagtacatcccggccttctgcgagctccccctggacgaccaggtcgccctgctccgggcccacgccggcgagcacctcctgctgggggcgacccgccgctccatggtgttcaaggacgtgctgctgctcggcaacgactacatcgtcccccggcactgccccgagctggccgagatgagccgcgtgtccatccggatcctggacgagctcgtgctgccgttccaggagctgcagatcgacgacaacgagtacgcctacctcaaggccatcatcttcttcgaccccgacgccaagggcctgagcgaccccgggaagatcaagcgcctgcgctcccaggtccaggtgagcctcgaggactacatcaacgaccggcagtacgactcccgcggccggttcggggagctgctgctcctgctgcccacgctccagagcatcacctggcagatgatcgagcagatccagttcatcaagctgttcggcatggcgaagatcgacaacctgctccaggagatgctgctgggcgggtccccgagcgacgcgccccacgcccaccaccccctccacccccacctgatgcaggagcacatgggcaccaacgtgatcgtcgccaacaccatgccgacgcacctgtccaacgggcagatgtgcgagtggccccgcccccggggccaggccgccacccccgagaccccgcagcccagcccgcccgggggctccggcagcgagccctacaagctgctccccggggccgtggccaccatcgtgaagcccctgtccgccatcccccagccgacgatcaccaagcaggaggtcatctgaggactagttataagactgactagcccgatgggcctcccaacgggccctcctcccctccttgcaccgagattaataaaaaaaaaaaaaaaaaaaaaaaaaaaaaaaaaaaaaaaaaaaaaaaaaaaaaaaaaaaaaaaatgcatcccccccccccccccccccccccccccccccaaaggctcttttcagagccaccagaatt

SEQ ID NO: 1595 - RNA, 1642 nt, synthetic construct
  misc_feature 1..1642: note = mRNA i-3 (A64-N5-C30-hSL-N5) (opt1) from Homo sapiens__NP_000448.3__HNF4A(1-474)(K300R)
  source 1..1642: mol_type = other RNA
aggagaaagcttaccatgcgcctgagcaagaccctcgtggacatggacatggccgactactccgccgcgctggaccccgcctacaccacgctggagttcgagaacgtccaggtgctcaccatgggcaacgacaccagcccgtccgaggggaccaacctgaacgcccccaacagcctgggcgtgtccgccctctgcgccatctgcggggaccgggcgacgggcaagcactacggggccagctcctgcgacggctgcaagggcttcttccgccggagcgtccgcaagaaccacatgtactcctgccggttcagccgccagtgcgtggtggacaaggacaagcggaaccagtgccgctactgccggctgaagaagtgcttccgcgccgggatgaagaaggaggccgtccagaacgagcgggaccgcatctccacccggcgcagctcctacgaggacagctccctgcccagcatcaacgcgctcctgcaggccgaggtgctgtcccggcagatcaccagccccgtgtccggcatcaacggggacatccgcgccaagaagatcgccagcatcgccgacgtctgcgagagcatgaaggagcagctcctggtgctggtggagtgggcgaagtacatcccggccttctgcgagctccccctggacgaccaggtcgccctgctccgggcccacgccggcgagcacctcctgctgggggcgaccaagcgctccatggtgttcaaggacgtgctgctgctcggcaacgactacatcgtcccccggcactgccccgagctggccgagatgagccgcgtgtccatccggatcctggacgagctcgtgctgccgttccaggagctgcagatcgacgacaacgagtacgcctacctcaaggccatcatcttcttcgaccccgacgcccgcggcctgagcgaccccgggaagatcaagcgcctgcgctcccaggtccaggtgagcctcgaggactacatcaacgaccggcagtacgactcccgcggccggttcggggagctgctgctcctgctgcccacgctccagagcatcacctggcagatgatcgagcagatccagttcatcaagctgttcggcatggcgaagatcgacaacctgctccaggagatgctgctgggcgggtccccgagcgacgcgccccacgcccaccaccccctccacccccacctgatgcaggagcacatgggcaccaacgtgatcgtcgccaacaccatgccgacgcacctgtccaacgggcagatgtgcgagtggccccgcccccggggccaggccgccacccccgagaccccgcagcccagcccgcccgggggctccggcagcgagccctacaagctgctccccggggccgtggccaccatcgtgaagcccctgtccgccatcccccagccgacgatcaccaagcaggaggtcatctgaggactagttataagactgactagcccgatgggcctcccaacgggccctcctcccctccttgcaccgagattaataaaaaaaaaaaaaaaaaaaaaaaaaaaaaaaaaaaaaaaaaaaaaaaaaaaaaaaaaaaaaaaatgcatcccccccccccccccccccccccccccccccaaaggctcttttcagagccaccagaatt

SEQ ID NO: 1596 - RNA, 1642 nt, synthetic construct
  misc_feature 1..1642: note = mRNA i-3 (A64-N5-C30-hSL-N5) (opt1) from Homo sapiens__NP_000448.3__HNF4A(1-474)(K300R_K307R_K309R)
  source 1..1642: mol_type = other RNA
aggagaaagcttaccatgcgcctgagcaagaccctcgtggacatggacatggccgactactccgccgcgctggaccccgcctacaccacgctggagttcgagaacgtccaggtgctcaccatgggcaacgacaccagcccgtccgaggggaccaacctgaacgcccccaacagcctgggcgtgtccgccctctgcgccatctgcggggaccgggcgacgggcaagcactacggggccagctcctgcgacggctgcaagggcttcttccgccggagcgtccgcaagaaccacatgtactcctgccggttcagccgccagtgcgtggtggacaaggacaagcggaaccagtgccgctactgccggctgaagaagtgcttccgcgccgggatgaagaaggaggccgtccagaacgagcgggaccgcatctccacccggcgcagctcctacgaggacagctccctgcccagcatcaacgcgctcctgcaggccgaggtgctgtcccggcagatcaccagccccgtgtccggcatcaacggggacatccgcgccaagaagatcgccagcatcgccgacgtctgcgagagcatgaaggagcagctcctggtgctggtggagtgggcgaagtacatcccggccttctgcgagctccccctggacgaccaggtcgccctgctccgggcccacgccggcgagcacctcctgctgggggcgaccaagcgctccatggtgttcaaggacgtgctgctgctcggcaacgactacatcgtcccccggcactgccccgagctggccgagatgagccgcgtgtccatccggatcctggacgagctcgtgctgccgttccaggagctgcagatcgacgacaacgagtacgcctacctcaaggccatcatcttcttcgaccccgacgcccgcggcctgagcgaccccgggcgcatccggcgcctgcgctcccaggtccaggtgagcctcgaggactacatcaacgaccggcagtacgactcccgcggccggttcggggagctgctgctcctgctgcccacgctccagagcatcacctggcagatgatcgagcagatccagttcatcaagctgttcggcatggcgaagatcgacaacctgctccaggagatgctgctgggcgggtccccgagcgacgcgccccacgcccaccaccccctccacccccacctgatgcaggagcacatgggcaccaacgtgatcgtcgccaacaccatgccgacgcacctgtccaacgggcagatgtgcgagtggccccgcccccggggccaggccgccacccccgagaccccgcagcccagcccgcccgggggctccggcagcgagccctacaagctgctccccggggccgtggccaccatcgtgaagcccctgtccgccatcccccagccgacgatcaccaagcaggaggtcatctgaggactagttataagactgactagcccgatgggcctcccaacgggccctcctcccctccttgcaccgagattaataaaaaaaaaaaaaaaaaaaaaaaaaaaaaaaaaaaaaaaaaaaaaaaaaaaaaaaaaaaaaaaatgcatcccccccccccccccccccccccccccccccaaaggctcttttcagagccaccagaatt

SEQ ID NO: 1597 - RNA, 1642 nt, synthetic construct
  misc_feature 1..1642: note = mRNA i-3 (A64-N5-C30-hSL-N5) (opt1) from Homo sapiens__NP_000448.3__HNF4A(1-474)(K447R_K470R)
  source 1..1642: mol_type = other RNA
aggagaaagcttaccatgcgcctgagcaagaccctcgtggacatggacatggccgactactccgccgcgctggaccccgcctacaccacgctggagttcgagaacgtccaggtgctcaccatgggcaacgacaccagcccgtccgaggggaccaacctgaacgcccccaacagcctgggcgtgtccgccctctgcgccatctgcggggaccgggcgacgggcaagcactacggggccagctcctgcgacggctgcaagggcttcttccgccggagcgtccgcaagaaccacatgtactcctgccggttcagccgccagtgcgtggtggacaaggacaagcggaaccagtgccgctactgccggctgaagaagtgcttccgcgccgggatgaagaaggaggccgtccagaacgagcgggaccgcatctccacccggcgcagctcctacgaggacagctccctgcccagcatcaacgcgctcctgcaggccgaggtgctgtcccggcagatcaccagccccgtgtccggcatcaacggggacatccgcgccaagaagatcgccagcatcgccgacgtctgcgagagcatgaaggagcagctcctggtgctggtggagtgggcgaagtacatcccggccttctgcgagctccccctggacgaccaggtcgccctgctccgggcccacgccggcgagcacctcctgctgggggcgaccaagcgctccatggtgttcaaggacgtgctgctgctcggcaacgactacatcgtcccccggcactgccccgagctggccgagatgagccgcgtgtccatccggatcctggacgagctcgtgctgccgttccaggagctgcagatcgacgacaacgagtacgcctacctcaaggccatcatcttcttcgaccccgacgccaagggcctgagcgaccccgggaagatcaagcgcctgcgctcccaggtccaggtgagcctcgaggactacatcaacgaccggcagtacgactcccgcggccggttcggggagctgctgctcctgctgcccacgctccagagcatcacctggcagatgatcgagcagatccagttcatcaagctgttcggcatggcgaagatcgacaacctgctccaggagatgctgctgggcgggtccccgagcgacgcgccccacgcccaccaccccctccacccccacctgatgcaggagcacatgggcaccaacgtgatcgtcgccaacaccatgccgacgcacctgtccaacgggcagatgtgcgagtggccccgcccccggggccaggccgccacccccgagaccccgcagcccagcccgcccgggggctccggcagcgagccctaccggctgctccccggggccgtggccaccatcgtgaagcccctgtccgccatcccccagccgacgatcacccggcaggaggtcatctgaggactagttataagactgactagcccgatgggcctcccaacgggccctcctcccctccttgcaccgagattaataaaaaaaaaaaaaaaaaaaaaaaaaaaaaaaaaaaaaaaaaaaaaaaaaaaaaaaaaaaaaaaatgcatcccccccccccccccccccccccccccccccaaaggctcttttcagagccaccagaatt

SEQ ID NO: 1598 - RNA, 1642 nt, synthetic construct
  misc_feature 1..1642: note = mRNA i-3 (A64-N5-C30-hSL-N5) (opt1) from Homo sapiens__NP_000448.3__HNF4A(1-474)(K458R)
  source 1..1642: mol_type = other RNA
aggagaaagcttaccatgcgcctgagcaagaccctcgtggacatggacatggccgactactccgccgcgctggaccccgcctacaccacgctggagttcgagaacgtccaggtgctcaccatgggcaacgacaccagcccgtccgaggggaccaacctgaacgcccccaacagcctgggcgtgtccgccctctgcgccatctgcggggaccgggcgacgggcaagcactacggggccagctcctgcgacggctgcaagggcttcttccgccggagcgtccgcaagaaccacatgtactcctgccggttcagccgccagtgcgtggtggacaaggacaagcggaaccagtgccgctactgccggctgaagaagtgcttccgcgccgggatgaagaaggaggccgtccagaacgagcgggaccgcatctccacccggcgcagctcctacgaggacagctccctgcccagcatcaacgcgctcctgcaggccgaggtgctgtcccggcagatcaccagccccgtgtccggcatcaacggggacatccgcgccaagaagatcgccagcatcgccgacgtctgcgagagcatgaaggagcagctcctggtgctggtggagtgggcgaagtacatcccggccttctgcgagctccccctggacgaccaggtcgccctgctccgggcccacgccggcgagcacctcctgctgggggcgaccaagcgctccatggtgttcaaggacgtgctgctgctcggcaacgactacatcgtcccccggcactgccccgagctggccgagatgagccgcgtgtccatccggatcctggacgagctcgtgctgccgttccaggagctgcagatcgacgacaacgagtacgcctacctcaaggccatcatcttcttcgaccccgacgccaagggcctgagcgaccccgggaagatcaagcgcctgcgctcccaggtccaggtgagcctcgaggactacatcaacgaccggcagtacgactcccgcggccggttcggggagctgctgctcctgctgcccacgctccagagcatcacctggcagatgatcgagcagatccagttcatcaagctgttcggcatggcgaagatcgacaacctgctccaggagatgctgctgggcgggtccccgagcgacgcgccccacgcccaccaccccctccacccccacctgatgcaggagcacatgggcaccaacgtgatcgtcgccaacaccatgccgacgcacctgtccaacgggcagatgtgcgagtggccccgcccccggggccaggccgccacccccgagaccccgcagcccagcccgcccgggggctccggcagcgagccctacaagctgctccccggggccgtggccaccatcgtgcggcccctgtccgccatcccccagccgacgatcaccaagcaggaggtcatctgaggactagttataagactgactagcccgatgggcctcccaacgggccctcctcccctccttgcaccgagattaataaaaaaaaaaaaaaaaaaaaaaaaaaaaaaaaaaaaaaaaaaaaaaaaaaaaaaaaaaaaaaaatgcatcccccccccccccccccccccccccccccccaaaggctcttttcagagccaccagaatt

SEQ ID NO: 1599 - RNA, 1642 nt, synthetic construct
  misc_feature 1..1642: note = mRNA i-3 (A64-N5-C30-hSL-N5) (opt1) from Homo sapiens__NP_000448.3__HNF4A(1-474)(K106R_K108R_K126R_K127R)
  source 1..1642: mol_type = other RNA
aggagaaagcttaccatgcgcctgagcaagaccctcgtggacatggacatggccgactactccgccgcgctggaccccgcctacaccacgctggagttcgagaacgtccaggtgctcaccatgggcaacgacaccagcccgtccgaggggaccaacctgaacgcccccaacagcctgggcgtgtccgccctctgcgccatctgcggggaccgggcgacgggcaagcactacggggccagctcctgcgacggctgcaagggcttcttccgccggagcgtccgcaagaaccacatgtactcctgccggttcagccgccagtgcgtggtggaccgcgaccggcggaaccagtgccgctactgccggctgaagaagtgcttccgcgccgggatgcgccgcgaggccgtccagaacgagcgggaccgcatctccacccggcgcagctcctacgaggacagctccctgcccagcatcaacgcgctcctgcaggccgaggtgctgtcccggcagatcaccagccccgtgtccggcatcaacggggacatccgcgccaagaagatcgccagcatcgccgacgtctgcgagagcatgaaggagcagctcctggtgctggtggagtgggcgaagtacatcccggccttctgcgagctccccctggacgaccaggtcgccctgctccgggcccacgccggcgagcacctcctgctgggggcgaccaagcgctccatggtgttcaaggacgtgctgctgctcggcaacgactacatcgtcccccggcactgccccgagctggccgagatgagccgcgtgtccatccggatcctggacgagctcgtgctgccgttccaggagctgcagatcgacgacaacgagtacgcctacctcaaggccatcatcttcttcgaccccgacgccaagggcctgagcgaccccgggaagatcaagcgcctgcgctcccaggtccaggtgagcctcgaggactacatcaacgaccggcagtacgactcccgcggccggttcggggagctgctgctcctgctgcccacgctccagagcatcacctggcagatgatcgagcagatccagttcatcaagctgttcggcatggcgaagatcgacaacctgctccaggagatgctgctgggcgggtccccgagcgacgcgccccacgcccaccaccccctccacccccacctgatgcaggagcacatgggcaccaacgtgatcgtcgccaacaccatgccgacgcacctgtccaacgggcagatgtgcgagtggccccgcccccggggccaggccgccacccccgagaccccgcagcccagcccgcccgggggctccggcagcgagccctacaagctgctccccggggccgtggccaccatcgtgaagcccctgtccgccatcccccagccgacgatcaccaagcaggaggtcatctgaggactagttataagactgactagcccgatgggcctcccaacgggccctcctcccctccttgcaccgagattaataaaaaaaaaaaaaaaaaaaaaaaaaaaaaaaaaaaaaaaaaaaaaaaaaaaaaaaaaaaaaaaatgcatcccccccccccccccccccccccccccccccaaaggctcttttcagagccaccagaatt

SEQ ID NO: 1600 - RNA, 1642 nt, synthetic construct
  misc_feature 1..1642: note = mRNA i-3 (A64-N5-C30-hSL-N5) (opt1) from Homo sapiens__NP_000448.3__HNF4A(1-474)(E285Q)
  source 1..1642: mol_type = other RNA
aggagaaagcttaccatgcgcctgagcaagaccctcgtggacatggacatggccgactactccgccgcgctggaccccgcctacaccacgctggagttcgagaacgtccaggtgctcaccatgggcaacgacaccagcccgtccgaggggaccaacctgaacgcccccaacagcctgggcgtgtccgccctctgcgccatctgcggggaccgggcgacgggcaagcactacggggccagctcctgcgacggctgcaagggcttcttccgccggagcgtccgcaagaaccacatgtactcctgccggttcagccgccagtgcgtggtggacaaggacaagcggaaccagtgccgctactgccggctgaagaagtgcttccgcgccgggatgaagaaggaggccgtccagaacgagcgggaccgcatctccacccggcgcagctcctacgaggacagctccctgcccagcatcaacgcgctcctgcaggccgaggtgctgtcccggcagatcaccagccccgtgtccggcatcaacggggacatccgcgccaagaagatcgccagcatcgccgacgtctgcgagagcatgaaggagcagctcctggtgctggtggagtgggcgaagtacatcccggccttctgcgagctccccctggacgaccaggtcgccctgctccgggcccacgccggcgagcacctcctgctgggggcgaccaagcgctccatggtgttcaaggacgtgctgctgctcggcaacgactacatcgtcccccggcactgccccgagctggccgagatgagccgcgtgtccatccggatcctggacgagctcgtgctgccgttccaggagctgcagatcgacgacaaccagtacgcctacctcaaggccatcatcttcttcgaccccgacgccaagggcctgagcgaccccgggaagatcaagcgcctgcgctcccaggtccaggtgagcctcgaggactacatcaacgaccggcagtacgactcccgcggccggttcggggagctgctgctcctgctgcccacgctccagagcatcacctggcagatgatcgagcagatccagttcatcaagctgttcggcatggcgaagatcgacaacctgctccaggagatgctgctgggcgggtccccgagcgacgcgccccacgcccaccaccccctccacccccacctgatgcaggagcacatgggcaccaacgtgatcgtcgccaacaccatgccgacgcacctgtccaacgggcagatgtgcgagtggccccgcccccggggccaggccgccacccccgagaccccgcagcccagcccgcccgggggctccggcagcgagccctacaagctgctccccggggccgtggccaccatcgtgaagcccctgtccgccatcccccagccgacgatcaccaagcaggaggtcatctgaggactagttataagactgactagcccgatgggcctcccaacgggccctcctcccctccttgcaccgagattaataaaaaaaaaaaaaaaaaaaaaaaaaaaaaaaaaaaaaaaaaaaaaaaaaaaaaaaaaaaaaaaatgcatcccccccccccccccccccccccccccccccaaaggctcttttcagagccaccagaatt

SEQ ID NO: 1601 - RNA, 1642 nt, synthetic construct
  misc_feature 1..1642: note = mRNA i-3 (A64-N5-C30-hSL-N5) (opt1) from Homo sapiens__NP_000448.3__HNF4A(1-474)(T166E)
  source 1..1642: mol_type = other RNA
aggagaaagcttaccatgcgcctgagcaagaccctcgtggacatggacatggccgactactccgccgcgctggaccccgcctacaccacgctggagttcgagaacgtccaggtgctcaccatgggcaacgacaccagcccgtccgaggggaccaacctgaacgcccccaacagcctgggcgtgtccgccctctgcgccatctgcggggaccgggcgacgggcaagcactacggggccagctcctgcgacggctgcaagggcttcttccgccggagcgtccgcaagaaccacatgtactcctgccggttcagccgccagtgcgtggtggacaaggacaagcggaaccagtgccgctactgccggctgaagaagtgcttccgcgccgggatgaagaaggaggccgtccagaacgagcgggaccgcatctccacccggcgcagctcctacgaggacagctccctgcccagcatcaacgcgctcctgcaggccgaggtgctgtcccggcagatcgagagccccgtgtccggcatcaacggggacatccgcgccaagaagatcgccagcatcgccgacgtctgcgagagcatgaaggagcagctcctggtgctggtggagtgggcgaagtacatcccggccttctgcgagctccccctggacgaccaggtcgccctgctccgggcccacgccggcgagcacctcctgctgggggcgaccaagcgctccatggtgttcaaggacgtgctgctgctcggcaacgactacatcgtcccccggcactgccccgagctggccgagatgagccgcgtgtccatccggatcctggacgagctcgtgctgccgttccaggagctgcagatcgacgacaacgagtacgcctacctcaaggccatcatcttcttcgaccccgacgccaagggcctgagcgaccccgggaagatcaagcgcctgcgctcccaggtccaggtgagcctcgaggactacatcaacgaccggcagtacgactcccgcggccggttcggggagctgctgctcctgctgcccacgctccagagcatcacctggcagatgatcgagcagatccagttcatcaagctgttcggcatggcgaagatcgacaacctgctccaggagatgctgctgggcgggtccccgagcgacgcgccccacgcccaccaccccctccacccccacctgatgcaggagcacatgggcaccaacgtgatcgtcgccaacaccatgccgacgcacctgtccaacgggcagatgtgcgagtggccccgcccccggggccaggccgccacccccgagaccccgcagcccagcccgcccgggggctccggcagcgagccctacaagctgctccccggggccgtggccaccatcgtgaagcccctgtccgccatcccccagccgacgatcaccaagcaggaggtcatctgaggactagttataagactgactagcccgatgggcctcccaacgggccctcctcccctccttgcaccgagattaataaaaaaaaaaaaaaaaaaaaaaaaaaaaaaaaaaaaaaaaaaaaaaaaaaaaaaaaaaaaaaaatgcatcccccccccccccccccccccccccccccccaaaggctcttttcagagccaccagaatt

SEQ ID NO: 1602 - RNA, 1642 nt, synthetic construct
  misc_feature 1..1642: note = mRNA i-3 (A64-N5-C30-hSL-N5) (opt1) from Homo sapiens__NP_000448.3__HNF4A(1-474)(S148A)
  source 1..1642: mol_type = other RNA
aggagaaagcttaccatgcgcctgagcaagaccctcgtggacatggacatggccgactactccgccgcgctggaccccgcctacaccacgctggagttcgagaacgtccaggtgctcaccatgggcaacgacaccagcccgtccgaggggaccaacctgaacgcccccaacagcctgggcgtgtccgccctctgcgccatctgcggggaccgggcgacgggcaagcactacggggccagctcctgcgacggctgcaagggcttcttccgccggagcgtccgcaagaaccacatgtactcctgccggttcagccgccagtgcgtggtggacaaggacaagcggaaccagtgccgctactgccggctgaagaagtgcttccgcgccgggatgaagaaggaggccgtccagaacgagcgggaccgcatctccacccggcgcagctcctacgaggacagcgcgctgcccagcatcaacgcgctcctgcaggccgaggtgctgtcccggcagatcaccagccccgtgtccggcatcaacggggacatccgcgccaagaagatcgccagcatcgccgacgtctgcgagagcatgaaggagcagctcctggtgctggtggagtgggcgaagtacatcccggccttctgcgagctccccctggacgaccaggtcgccctgctccgggcccacgccggcgagcacctcctgctgggggcgaccaagcgctccatggtgttcaaggacgtgctgctgctcggcaacgactacatcgtcccccggcactgccccgagctggccgagatgagccgcgtgtccatccggatcctggacgagctcgtgctgccgttccaggagctgcagatcgacgacaacgagtacgcctacctcaaggccatcatcttcttcgaccccgacgccaagggcctgagcgaccccgggaagatcaagcgcctgcgctcccaggtccaggtgagcctcgaggactacatcaacgaccggcagtacgactcccgcggccggttcggggagctgctgctcctgctgcccacgctccagagcatcacctggcagatgatcgagcagatccagttcatcaagctgttcggcatggcgaagatcgacaacctgctccaggagatgctgctgggcgggtccccgagcgacgcgccccacgcccaccaccccctccacccccacctgatgcaggagcacatgggcaccaacgtgatcgtcgccaacaccatgccgacgcacctgtccaacgggcagatgtgcgagtggccccgcccccggggccaggccgccacccccgagaccccgcagcccagcccgcccgggggctccggcagcgagccctacaagctgctccccggggccgtggccaccatcgtgaagcccctgtccgccatcccccagccgacgatcaccaagcaggaggtcatctgaggactagttataagactgactagcccgatgggcctcccaacgggccctcctcccctccttgcaccgagattaataaaaaaaaaaaaaaaaaaaaaaaaaaaaaaaaaaaaaaaaaaaaaaaaaaaaaaaaaaaaaaaatgcatcccccccccccccccccccccccccccccccaaaggctcttttcagagccaccagaatt

SEQ ID NO: 1603 - RNA, 1642 nt, synthetic construct
  misc_feature 1..1642: note = mRNA i-3 (A64-N5-C30-hSL-N5) (opt1) from Homo sapiens__NP_000448.3__HNF4A(1-474)(S148E)
  source 1..1642: mol_type = other RNA
aggagaaagcttaccatgcgcctgagcaagaccctcgtggacatggacatggccgactactccgccgcgctggaccccgcctacaccacgctggagttcgagaacgtccaggtgctcaccatgggcaacgacaccagcccgtccgaggggaccaacctgaacgcccccaacagcctgggcgtgtccgccctctgcgccatctgcggggaccgggcgacgggcaagcactacggggccagctcctgcgacggctgcaagggcttcttccgccggagcgtccgcaagaaccacatgtactcctgccggttcagccgccagtgcgtggtggacaaggacaagcggaaccagtgccgctactgccggctgaagaagtgcttccgcgccgggatgaagaaggaggccgtccagaacgagcgggaccgcatctccacccggcgcagctcctacgaggacagcgagctgcccagcatcaacgcgctcctgcaggccgaggtgctgtcccggcagatcaccagccccgtgtccggcatcaacggggacatccgcgccaagaagatcgccagcatcgccgacgtctgcgagagcatgaaggagcagctcctggtgctggtggagtgggcgaagtacatcccggccttctgcgagctccccctggacgaccaggtcgccctgctccgggcccacgccggcgagcacctcctgctgggggcgaccaagcgctccatggtgttcaaggacgtgctgctgctcggcaacgactacatcgtcccccggcactgccccgagctggccgagatgagccgcgtgtccatccggatcctggacgagctcgtgctgccgttccaggagctgcagatcgacgacaacgagtacgcctacctcaaggccatcatcttcttcgaccccgacgccaagggcctgagcgaccccgggaagatcaagcgcctgcgctcccaggtccaggtgagcctcgaggactacatcaacgaccggcagtacgactcccgcggccggttcggggagctgctgctcctgctgcccacgctccagagcatcacctggcagatgatcgagcagatccagttcatcaagctgttcggcatggcgaagatcgacaacctgctccaggagatgctgctgggcgggtccccgagcgacgcgccccacgcccaccaccccctccacccccacctgatgcaggagcacatgggcaccaacgtgatcgtcgccaacaccatgccgacgcacctgtccaacgggcagatgtgcgagtggccccgcccccggggccaggccgccacccccgagaccccgcagcccagcccgcccgggggctccggcagcgagccctacaagctgctccccggggccgtggccaccatcgtgaagcccctgtccgccatcccccagccgacgatcaccaagcaggaggtcatctgaggactagttataagactgactagcccgatgggcctcccaacgggccctcctcccctccttgcaccgagattaataaaaaaaaaaaaaaaaaaaaaaaaaaaaaaaaaaaaaaaaaaaaaaaaaaaaaaaaaaaaaaaatgcatcccccccccccccccccccccccccccccccaaaggctcttttcagagccaccagaatt

SEQ ID NO: 1604 - RNA, 1642 nt, synthetic construct
  misc_feature 1..1642: note = mRNA i-3 (A64-N5-C30-hSL-N5) (opt1) from Homo sapiens__NP_000448.3__HNF4A(1-474)(S183A)
  source 1..1642: mol_type = other RNA
aggagaaagcttaccatgcgcctgagcaagaccctcgtggacatggacatggccgactactccgccgcgctggaccccgcctacaccacgctggagttcgagaacgtccaggtgctcaccatgggcaacgacaccagcccgtccgaggggaccaacctgaacgcccccaacagcctgggcgtgtccgccctctgcgccatctgcggggaccgggcgacgggcaagcactacggggccagctcctgcgacggctgcaagggcttcttccgccggagcgtccgcaagaaccacatgtactcctgccggttcagccgccagtgcgtggtggacaaggacaagcggaaccagtgccgctactgccggctgaagaagtgcttccgcgccgggatgaagaaggaggccgtccagaacgagcgggaccgcatctccacccggcgcagctcctacgaggacagctccctgcccagcatcaacgcgctcctgcaggccgaggtgctgtcccggcagatcaccagccccgtgtccggcatcaacggggacatccgcgccaagaagatcgccgcgatcgccgacgtctgcgagagcatgaaggagcagctcctggtgctggtggagtgggcgaagtacatcccggccttctgcgagctccccctggacgaccaggtcgccctgctccgggcccacgccggcgagcacctcctgctgggggcgaccaagcgctccatggtgttcaaggacgtgctgctgctcggcaacgactacatcgtcccccggcactgccccgagctggccgagatgagccgcgtgtccatccggatcctggacgagctcgtgctgccgttccaggagctgcagatcgacgacaacgagtacgcctacctcaaggccatcatcttcttcgaccccgacgccaagggcctgagcgaccccgggaagatcaagcgcctgcgctcccaggtccaggtgagcctcgaggactacatcaacgaccggcagtacgactcccgcggccggttcggggagctgctgctcctgctgcccacgctccagagcatcacctggcagatgatcgagcagatccagttcatcaagctgttcggcatggcgaagatcgacaacctgctccaggagatgctgctgggcgggtccccgagcgacgcgccccacgcccaccaccccctccacccccacctgatgcaggagcacatgggcaccaacgtgatcgtcgccaacaccatgccgacgcacctgtccaacgggcagatgtgcgagtggccccgcccccggggccaggccgccacccccgagaccccgcagcccagcccgcccgggggctccggcagcgagccctacaagctgctccccggggccgtggccaccatcgtgaagcccctgtccgccatcccccagccgacgatcaccaagcaggaggtcatctgaggactagttataagactgactagcccgatgggcctcccaacgggccctcctcccctccttgcaccgagattaataaaaaaaaaaaaaaaaaaaaaaaaaaaaaaaaaaaaaaaaaaaaaaaaaaaaaaaaaaaaaaaatgcatcccccccccccccccccccccccccccccccaaaggctcttttcagagccaccagaatt

SEQ ID NO: 1605 - RNA, 1642 nt, synthetic construct
  misc_feature 1..1642: note = mRNA i-3 (A64-N5-C30-hSL-N5) (opt1) from Homo sapiens__NP_000448.3__HNF4A(1-474)(S183E)
  source 1..1642: mol_type = other RNA
aggagaaagcttaccatgcgcctgagcaagaccctcgtggacatggacatggccgactactccgccgcgctggaccccgcctacaccacgctggagttcgagaacgtccaggtgctcaccatgggcaacgacaccagcccgtccgaggggaccaacctgaacgcccccaacagcctgggcgtgtccgccctctgcgccatctgcggggaccgggcgacgggcaagcactacggggccagctcctgcgacggctgcaagggcttcttccgccggagcgtccgcaagaaccacatgtactcctgccggttcagccgccagtgcgtggtggacaaggacaagcggaaccagtgccgctactgccggctgaagaagtgcttccgcgccgggatgaagaaggaggccgtccagaacgagcgggaccgcatctccacccggcgcagctcctacgaggacagctccctgcccagcatcaacgcgctcctgcaggccgaggtgctgtcccggcagatcaccagccccgtgtccggcatcaacggggacatccgcgccaagaagatcgccgagatcgccgacgtctgcgagagcatgaaggagcagctcctggtgctggtggagtgggcgaagtacatcccggccttctgcgagctccccctggacgaccaggtcgccctgctccgggcccacgccggcgagcacctcctgctgggggcgaccaagcgctccatggtgttcaaggacgtgctgctgctcggcaacgactacatcgtcccccggcactgccccgagctggccgagatgagccgcgtgtccatccggatcctggacgagctcgtgctgccgttccaggagctgcagatcgacgacaacgagtacgcctacctcaaggccatcatcttcttcgaccccgacgccaagggcctgagcgaccccgggaagatcaagcgcctgcgctcccaggtccaggtgagcctcgaggactacatcaacgaccggcagtacgactcccgcggccggttcggggagctgctgctcctgctgcccacgctccagagcatcacctggcagatgatcgagcagatccagttcatcaagctgttcggcatggcgaagatcgacaacctgctccaggagatgctgctgggcgggtccccgagcgacgcgccccacgcccaccaccccctccacccccacctgatgcaggagcacatgggcaccaacgtgatcgtcgccaacaccatgccgacgcacctgtccaacgggcagatgtgcgagtggccccgcccccggggccaggccgccacccccgagaccccgcagcccagcccgcccgggggctccggcagcgagccctacaagctgctccccggggccgtggccaccatcgtgaagcccctgtccgccatcccccagccgacgatcaccaagcaggaggtcatctgaggactagttataagactgactagcccgatgggcctcccaacgggccctcctcccctccttgcaccgagattaataaaaaaaaaaaaaaaaaaaaaaaaaaaaaaaaaaaaaaaaaaaaaaaaaaaaaaaaaaaaaaaatgcatcccccccccccccccccccccccccccccccaaaggctcttttcagagccaccagaatt

SEQ ID NO: 1606 - RNA, 1642 nt, synthetic construct
  misc_feature 1..1642: note = mRNA i-3 (A64-N5-C30-hSL-N5) (opt1) from Homo sapiens__NP_000448.3__HNF4A(1-474)(S461A)
  source 1..1642: mol_type = other RNA
aggagaaagcttaccatgcgcctgagcaagaccctcgtggacatggacatggccgactactccgccgcgctggaccccgcctacaccacgctggagttcgagaacgtccaggtgctcaccatgggcaacgacaccagcccgtccgaggggaccaacctgaacgcccccaacagcctgggcgtgtccgccctctgcgccatctgcggggaccgggcgacgggcaagcactacggggccagctcctgcgacggctgcaagggcttcttccgccggagcgtccgcaagaaccacatgtactcctgccggttcagccgccagtgcgtggtggacaaggacaagcggaaccagtgccgctactgccggctgaagaagtgcttccgcgccgggatgaagaaggaggccgtccagaacgagcgggaccgcatctccacccggcgcagctcctacgaggacagctccctgcccagcatcaacgcgctcctgcaggccgaggtgctgtcccggcagatcaccagccccgtgtccggcatcaacggggacatccgcgccaagaagatcgccagcatcgccgacgtctgcgagagcatgaaggagcagctcctggtgctggtggagtgggcgaagtacatcccggccttctgcgagctccccctggacgaccaggtcgccctgctccgggcccacgccggcgagcacctcctgctgggggcgaccaagcgctccatggtgttcaaggacgtgctgctgctcggcaacgactacatcgtcccccggcactgccccgagctggccgagatgagccgcgtgtccatccggatcctggacgagctcgtgctgccgttccaggagctgcagatcgacgacaacgagtacgcctacctcaaggccatcatcttcttcgaccccgacgccaagggcctgagcgaccccgggaagatcaagcgcctgcgctcccaggtccaggtgagcctcgaggactacatcaacgaccggcagtacgactcccgcggccggttcggggagctgctgctcctgctgcccacgctccagagcatcacctggcagatgatcgagcagatccagttcatcaagctgttcggcatggcgaagatcgacaacctgctccaggagatgctgctgggcgggtccccgagcgacgcgccccacgcccaccaccccctccacccccacctgatgcaggagcacatgggcaccaacgtgatcgtcgccaacaccatgccgacgcacctgtccaacgggcagatgtgcgagtggccccgcccccggggccaggccgccacccccgagaccccgcagcccagcccgcccgggggctccggcagcgagccctacaagctgctccccggggccgtggccaccatcgtgaagcccctggcggccatcccccagccgacgatcaccaagcaggaggtcatctgaggactagttataagactgactagcccgatgggcctcccaacgggccctcctcccctccttgcaccgagattaataaaaaaaaaaaaaaaaaaaaaaaaaaaaaaaaaaaaaaaaaaaaaaaaaaaaaaaaaaaaaaaatgcatcccccccccccccccccccccccccccccccaaaggctcttttcagagccaccagaatt

SEQ ID NO: 1607 - RNA, 1642 nt, synthetic construct
  misc_feature 1..1642: note = mRNA i-3 (A64-N5-C30-hSL-N5) (opt1) from Homo sapiens__NP_000448.3__HNF4A(1-474)(S461E)
  source 1..1642: mol_type = other RNA
aggagaaagcttaccatgcgcctgagcaagaccctcgtggacatggacatggccgactactccgccgcgctggaccccgcctacaccacgctggagttcgagaacgtccaggtgctcaccatgggcaacgacaccagcccgtccgaggggaccaacctgaacgcccccaacagcctgggcgtgtccgccctctgcgccatctgcggggaccgggcgacgggcaagcactacggggccagctcctgcgacggctgcaagggcttcttccgccggagcgtccgcaagaaccacatgtactcctgccggttcagccgccagtgcgtggtggacaaggacaagcggaaccagtgccgctactgccggctgaagaagtgcttccgcgccgggatgaagaaggaggccgtccagaacgagcgggaccgcatctccacccggcgcagctcctacgaggacagctccctgcccagcatcaacgcgctcctgcaggccgaggtgctgtcccggcagatcaccagccccgtgtccggcatcaacggggacatccgcgccaagaagatcgccagcatcgccgacgtctgcgagagcatgaaggagcagctcctggtgctggtggagtgggcgaagtacatcccggccttctgcgagctccccctggacgaccaggtcgccctgctccgggcccacgccggcgagcacctcctgctgggggcgaccaagcgctccatggtgttcaaggacgtgctgctgctcggcaacgactacatcgtcccccggcactgccccgagctggccgagatgagccgcgtgtccatccggatcctggacgagctcgtgctgccgttccaggagctgcagatcgacgacaacgagtacgcctacctcaaggccatcatcttcttcgaccccgacgccaagggcctgagcgaccccgggaagatcaagcgcctgcgctcccaggtccaggtgagcctcgaggactacatcaacgaccggcagtacgactcccgcggccggttcggggagctgctgctcctgctgcccacgctccagagcatcacctggcagatgatcgagcagatccagttcatcaagctgttcggcatggcgaagatcgacaacctgctccaggagatgctgctgggcgggtccccgagcgacgcgccccacgcccaccaccccctccacccccacctgatgcaggagcacatgggcaccaacgtgatcgtcgccaacaccatgccgacgcacctgtccaacgggcagatgtgcgagtggccccgcccccggggccaggccgccacccccgagaccccgcagcccagcccgcccgggggctccggcagcgagccctacaagctgctccccggggccgtggccaccatcgtgaagcccctggaggccatcccccagccgacgatcaccaagcaggaggtcatctgaggactagttataagactgactagcccgatgggcctcccaacgggccctcctcccctccttgcaccgagattaataaaaaaaaaaaaaaaaaaaaaaaaaaaaaaaaaaaaaaaaaaaaaaaaaaaaaaaaaaaaaaaatgcatcccccccccccccccccccccccccccccccaaaggctcttttcagagccaccagaatt

SEQ ID NO: 1608 - RNA, 1642 nt, synthetic construct
  misc_feature 1..1642: note = mRNA i-3 (A64-N5-C30-hSL-N5) (opt1) from Homo sapiens__NP_000448.3__HNF4A(1-474)(S142A_S143A_S313A)
  source 1..1642: mol_type = other RNA
aggagaaagcttaccatgcgcctgagcaagaccctcgtggacatggacatggccgactactccgccgcgctggaccccgcctacaccacgctggagttcgagaacgtccaggtgctcaccatgggcaacgacaccagcccgtccgaggggaccaacctgaacgcccccaacagcctgggcgtgtccgccctctgcgccatctgcggggaccgggcgacgggcaagcactacggggccagctcctgcgacggctgcaagggcttcttccgccggagcgtccgcaagaaccacatgtactcctgccggttcagccgccagtgcgtggtggacaaggacaagcggaaccagtgccgctactgccggctgaagaagtgcttccgcgccgggatgaagaaggaggccgtccagaacgagcgggaccgcatctccacccggcgcgcggcctacgaggacagctccctgcccagcatcaacgcgctcctgcaggccgaggtgctgtcccggcagatcaccagccccgtgtccggcatcaacggggacatccgcgccaagaagatcgccagcatcgccgacgtctgcgagagcatgaaggagcagctcctggtgctggtggagtgggcgaagtacatcccggccttctgcgagctccccctggacgaccaggtcgccctgctccgggcccacgccggcgagcacctcctgctgggggcgaccaagcgctccatggtgttcaaggacgtgctgctgctcggcaacgactacatcgtcccccggcactgccccgagctggccgagatgagccgcgtgtccatccggatcctggacgagctcgtgctgccgttccaggagctgcagatcgacgacaacgagtacgcctacctcaaggccatcatcttcttcgaccccgacgccaagggcctgagcgaccccgggaagatcaagcgcctgcgcgcgcaggtccaggtgagcctcgaggactacatcaacgaccggcagtacgactcccgcggccggttcggggagctgctgctcctgctgcccacgctccagagcatcacctggcagatgatcgagcagatccagttcatcaagctgttcggcatggcgaagatcgacaacctgctccaggagatgctgctgggcgggtccccgagcgacgcgccccacgcccaccaccccctccacccccacctgatgcaggagcacatgggcaccaacgtgatcgtcgccaacaccatgccgacgcacctgtccaacgggcagatgtgcgagtggccccgcccccggggccaggccgccacccccgagaccccgcagcccagcccgcccgggggctccggcagcgagccctacaagctgctccccggggccgtggccaccatcgtgaagcccctgtccgccatcccccagccgacgatcaccaagcaggaggtcatctgaggactagttataagactgactagcccgatgggcctcccaacgggccctcctcccctccttgcaccgagattaataaaaaaaaaaaaaaaaaaaaaaaaaaaaaaaaaaaaaaaaaaaaaaaaaaaaaaaaaaaaaaaatgcatcccccccccccccccccccccccccccccccaaaggctcttttcagagccaccagaatt

SEQ ID NO: 1609 - RNA, 1642 nt, synthetic construct
  misc_feature 1..1642: note = mRNA i-3 (A64-N5-C30-hSL-N5) (opt1) from Homo sapiens__NP_000448.3__HNF4A(1-474)(S142A_S143A_S313A_K458R)
  source 1..1642: mol_type = other RNA
aggagaaagcttaccatgcgcctgagcaagaccctcgtggacatggacatggccgactactccgccgcgctggaccccgcctacaccacgctggagttcgagaacgtccaggtgctcaccatgggcaacgacaccagcccgtccgaggggaccaacctgaacgcccccaacagcctgggcgtgtccgccctctgcgccatctgcggggaccgggcgacgggcaagcactacggggccagctcctgcgacggctgcaagggcttcttccgccggagcgtccgcaagaaccacatgtactcctgccggttcagccgccagtgcgtggtggacaaggacaagcggaaccagtgccgctactgccggctgaagaagtgcttccgcgccgggatgaagaaggaggccgtccagaacgagcgggaccgcatctccacccggcgcgcggcctacgaggacagctccctgcccagcatcaacgcgctcctgcaggccgaggtgctgtcccggcagatcaccagccccgtgtccggcatcaacggggacatccgcgccaagaagatcgccagcatcgccgacgtctgcgagagcatgaaggagcagctcctggtgctggtggagtgggcgaagtacatcccggccttctgcgagctccccctggacgaccaggtcgccctgctccgggcccacgccggcgagcacctcctgctgggggcgaccaagcgctccatggtgttcaaggacgtgctgctgctcggcaacgactacatcgtcccccggcactgccccgagctggccgagatgagccgcgtgtccatccggatcctggacgagctcgtgctgccgttccaggagctgcagatcgacgacaacgagtacgcctacctcaaggccatcatcttcttcgaccccgacgccaagggcctgagcgaccccgggaagatcaagcgcctgcgcgcgcaggtccaggtgagcctcgaggactacatcaacgaccggcagtacgactcccgcggccggttcggggagctgctgctcctgctgcccacgctccagagcatcacctggcagatgatcgagcagatccagttcatcaagctgttcggcatggcgaagatcgacaacctgctccaggagatgctgctgggcgggtccccgagcgacgcgccccacgcccaccaccccctccacccccacctgatgcaggagcacatgggcaccaacgtgatcgtcgccaacaccatgccgacgcacctgtccaacgggcagatgtgcgagtggccccgcccccggggccaggccgccacccccgagaccccgcagcccagcccgcccgggggctccggcagcgagccctacaagctgctccccggggccgtggccaccatcgtgcggcccctgtccgccatcccccagccgacgatcaccaagcaggaggtcatctgaggactagttataagactgactagcccgatgggcctcccaacgggccctcctcccctccttgcaccgagattaataaaaaaaaaaaaaaaaaaaaaaaaaaaaaaaaaaaaaaaaaaaaaaaaaaaaaaaaaaaaaaaatgcatcccccccccccccccccccccccccccccccaaaggctcttttcagagccaccagaatt

SEQ ID NO: 1610 - RNA, 1642 nt, synthetic construct
  misc_feature 1..1642: note = mRNA i-3 (A64-N5-C30-hSL-N5) (opt1) from Homo sapiens__NP_000448.3__HNF4A(1-474)(S142A_S143A_S167A_S313A_ S378A_T429A_T432A_S436A_K458R)
  source 1..1642: mol_type = other RNA
aggagaaagcttaccatgcgcctgagcaagaccctcgtggacatggacatggccgactactccgccgcgctggaccccgcctacaccacgctggagttcgagaacgtccaggtgctcaccatgggcaacgacaccagcccgtccgaggggaccaacctgaacgcccccaacagcctgggcgtgtccgccctctgcgccatctgcggggaccgggcgacgggcaagcactacggggccagctcctgcgacggctgcaagggcttcttccgccggagcgtccgcaagaaccacatgtactcctgccggttcagccgccagtgcgtggtggacaaggacaagcggaaccagtgccgctactgccggctgaagaagtgcttccgcgccgggatgaagaaggaggccgtccagaacgagcgggaccgcatctccacccggcgcgcggcctacgaggacagctccctgcccagcatcaacgcgctcctgcaggccgaggtgctgtcccggcagatcaccgcgcccgtgtccggcatcaacggggacatccgcgccaagaagatcgccagcatcgccgacgtctgcgagagcatgaaggagcagctcctggtgctggtggagtgggcgaagtacatcccggccttctgcgagctccccctggacgaccaggtcgccctgctccgggcccacgccggcgagcacctcctgctgggggcgaccaagcgctccatggtgttcaaggacgtgctgctgctcggcaacgactacatcgtcccccggcactgccccgagctggccgagatgagccgcgtgtccatccggatcctggacgagctcgtgctgccgttccaggagctgcagatcgacgacaacgagtacgcctacctcaaggccatcatcttcttcgaccccgacgccaagggcctgagcgaccccgggaagatcaagcgcctgcgcgcgcaggtccaggtgagcctcgaggactacatcaacgaccggcagtacgactcccgcggccggttcggggagctgctgctcctgctgcccacgctccagagcatcacctggcagatgatcgagcagatccagttcatcaagctgttcggcatggcgaagatcgacaacctgctccaggagatgctgctgggcggggcgccgagcgacgcgccccacgcccaccaccccctccacccccacctgatgcaggagcacatgggcaccaacgtgatcgtcgccaacaccatgccgacgcacctgtccaacgggcagatgtgcgagtggccccgcccccggggccaggccgccgcgcccgaggcgccgcagcccgcgccgcccgggggctccggcagcgagccctacaagctgctccccggggccgtggccaccatcgtgcggcccctgtccgccatcccccagccgacgatcaccaagcaggaggtcatctgaggactagttataagactgactagcccgatgggcctcccaacgggccctcctcccctccttgcaccgagattaataaaaaaaaaaaaaaaaaaaaaaaaaaaaaaaaaaaaaaaaaaaaaaaaaaaaaaaaaaaaaaaatgcatcccccccccccccccccccccccccccccccaaaggctcttttcagagccaccagaatt

SEQ ID NO: 1611 - RNA, 1642 nt, synthetic construct
  misc_feature 1..1642: note = mRNA i-3 (A64-N5-C30-hSL-N5) (opt1) from Homo sapiens__NP_000448.3__HNF4A(1-474)(S142A_S143A_S148A_S167A_ S313A_S378A_T429A_T432A_S436A_K458R)
  source 1..1642: mol_type = other RNA
aggagaaagcttaccatgcgcctgagcaagaccctcgtggacatggacatggccgactactccgccgcgctggaccccgcctacaccacgctggagttcgagaacgtccaggtgctcaccatgggcaacgacaccagcccgtccgaggggaccaacctgaacgcccccaacagcctgggcgtgtccgccctctgcgccatctgcggggaccgggcgacgggcaagcactacggggccagctcctgcgacggctgcaagggcttcttccgccggagcgtccgcaagaaccacatgtactcctgccggttcagccgccagtgcgtggtggacaaggacaagcggaaccagtgccgctactgccggctgaagaagtgcttccgcgccgggatgaagaaggaggccgtccagaacgagcgggaccgcatctccacccggcgcgcggcctacgaggacagcgcgctgcccagcatcaacgcgctcctgcaggccgaggtgctgtcccggcagatcaccgcgcccgtgtccggcatcaacggggacatccgcgccaagaagatcgccagcatcgccgacgtctgcgagagcatgaaggagcagctcctggtgctggtggagtgggcgaagtacatcccggccttctgcgagctccccctggacgaccaggtcgccctgctccgggcccacgccggcgagcacctcctgctgggggcgaccaagcgctccatggtgttcaaggacgtgctgctgctcggcaacgactacatcgtcccccggcactgccccgagctggccgagatgagccgcgtgtccatccggatcctggacgagctcgtgctgccgttccaggagctgcagatcgacgacaacgagtacgcctacctcaaggccatcatcttcttcgaccccgacgccaagggcctgagcgaccccgggaagatcaagcgcctgcgcgcgcaggtccaggtgagcctcgaggactacatcaacgaccggcagtacgactcccgcggccggttcggggagctgctgctcctgctgcccacgctccagagcatcacctggcagatgatcgagcagatccagttcatcaagctgttcggcatggcgaagatcgacaacctgctccaggagatgctgctgggcggggcgccgagcgacgcgccccacgcccaccaccccctccacccccacctgatgcaggagcacatgggcaccaacgtgatcgtcgccaacaccatgccgacgcacctgtccaacgggcagatgtgcgagtggccccgcccccggggccaggccgccgcgcccgaggcgccgcagcccgcgccgcccgggggctccggcagcgagccctacaagctgctccccggggccgtggccaccatcgtgcggcccctgtccgccatcccccagccgacgatcaccaagcaggaggtcatctgaggactagttataagactgactagcccgatgggcctcccaacgggccctcctcccctccttgcaccgagattaataaaaaaaaaaaaaaaaaaaaaaaaaaaaaaaaaaaaaaaaaaaaaaaaaaaaaaaaaaaaaaaatgcatcccccccccccccccccccccccccccccccaaaggctcttttcagagccaccagaatt

SEQ ID NO: 1612 - RNA, 1642 nt, synthetic construct
  misc_feature 1..1642: note = mRNA i-3 (A64-N5-C30-hSL-N5) (opt1) from Homo sapiens__NP_000448.3__HNF4A(1-474)(K106R_K108R_K126R_K127R_ S142A_S143A_S148A_S167A_S313A_S378A_T429A_T432A_S436A_K458R )
  source 1..1642: mol_type = other RNA
aggagaaagcttaccatgcgcctgagcaagaccctcgtggacatggacatggccgactactccgccgcgctggaccccgcctacaccacgctggagttcgagaacgtccaggtgctcaccatgggcaacgacaccagcccgtccgaggggaccaacctgaacgcccccaacagcctgggcgtgtccgccctctgcgccatctgcggggaccgggcgacgggcaagcactacggggccagctcctgcgacggctgcaagggcttcttccgccggagcgtccgcaagaaccacatgtactcctgccggttcagccgccagtgcgtggtggaccgcgaccggcggaaccagtgccgctactgccggctgaagaagtgcttccgcgccgggatgcgccgcgaggccgtccagaacgagcgggaccgcatctccacccggcgcgcggcctacgaggacagcgcgctgcccagcatcaacgcgctcctgcaggccgaggtgctgtcccggcagatcaccgcgcccgtgtccggcatcaacggggacatccgcgccaagaagatcgccagcatcgccgacgtctgcgagagcatgaaggagcagctcctggtgctggtggagtgggcgaagtacatcccggccttctgcgagctccccctggacgaccaggtcgccctgctccgggcccacgccggcgagcacctcctgctgggggcgaccaagcgctccatggtgttcaaggacgtgctgctgctcggcaacgactacatcgtcccccggcactgccccgagctggccgagatgagccgcgtgtccatccggatcctggacgagctcgtgctgccgttccaggagctgcagatcgacgacaacgagtacgcctacctcaaggccatcatcttcttcgaccccgacgccaagggcctgagcgaccccgggaagatcaagcgcctgcgcgcgcaggtccaggtgagcctcgaggactacatcaacgaccggcagtacgactcccgcggccggttcggggagctgctgctcctgctgcccacgctccagagcatcacctggcagatgatcgagcagatccagttcatcaagctgttcggcatggcgaagatcgacaacctgctccaggagatgctgctgggcggggcgccgagcgacgcgccccacgcccaccaccccctccacccccacctgatgcaggagcacatgggcaccaacgtgatcgtcgccaacaccatgccgacgcacctgtccaacgggcagatgtgcgagtggccccgcccccggggccaggccgccgcgcccgaggcgccgcagcccgcgccgcccgggggctccggcagcgagccctacaagctgctccccggggccgtggccaccatcgtgcggcccctgtccgccatcccccagccgacgatcaccaagcaggaggtcatctgaggactagttataagactgactagcccgatgggcctcccaacgggccctcctcccctccttgcaccgagattaataaaaaaaaaaaaaaaaaaaaaaaaaaaaaaaaaaaaaaaaaaaaaaaaaaaaaaaaaaaaaaaatgcatcccccccccccccccccccccccccccccccaaaggctcttttcagagccaccagaatt

SEQ ID NO: 1613 - RNA, 1642 nt, synthetic construct
  misc_feature 1..1642: note = mRNA i-3 (A64-N5-C30-hSL-N5) (opt1) from Homo sapiens__NP_000448.3__HNF4A(1-474)(S142A_S143A_S148A_T166A_ S167A_S313A_S378A_T429A_T432A_S436A_K458R)
  source 1..1642: mol_type = other RNA
aggagaaagcttaccatgcgcctgagcaagaccctcgtggacatggacatggccgactactccgccgcgctggaccccgcctacaccacgctggagttcgagaacgtccaggtgctcaccatgggcaacgacaccagcccgtccgaggggaccaacctgaacgcccccaacagcctgggcgtgtccgccctctgcgccatctgcggggaccgggcgacgggcaagcactacggggccagctcctgcgacggctgcaagggcttcttccgccggagcgtccgcaagaaccacatgtactcctgccggttcagccgccagtgcgtggtggacaaggacaagcggaaccagtgccgctactgccggctgaagaagtgcttccgcgccgggatgaagaaggaggccgtccagaacgagcgggaccgcatctccacccggcgcgcggcctacgaggacagcgcgctgcccagcatcaacgcgctcctgcaggccgaggtgctgtcccggcagatcgcggcgcccgtgtccggcatcaacggggacatccgcgccaagaagatcgccagcatcgccgacgtctgcgagagcatgaaggagcagctcctggtgctggtggagtgggcgaagtacatcccggccttctgcgagctccccctggacgaccaggtcgccctgctccgggcccacgccggcgagcacctcctgctgggggcgaccaagcgctccatggtgttcaaggacgtgctgctgctcggcaacgactacatcgtcccccggcactgccccgagctggccgagatgagccgcgtgtccatccggatcctggacgagctcgtgctgccgttccaggagctgcagatcgacgacaacgagtacgcctacctcaaggccatcatcttcttcgaccccgacgccaagggcctgagcgaccccgggaagatcaagcgcctgcgcgcgcaggtccaggtgagcctcgaggactacatcaacgaccggcagtacgactcccgcggccggttcggggagctgctgctcctgctgcccacgctccagagcatcacctggcagatgatcgagcagatccagttcatcaagctgttcggcatggcgaagatcgacaacctgctccaggagatgctgctgggcggggcgccgagcgacgcgccccacgcccaccaccccctccacccccacctgatgcaggagcacatgggcaccaacgtgatcgtcgccaacaccatgccgacgcacctgtccaacgggcagatgtgcgagtggccccgcccccggggccaggccgccgcgcccgaggcgccgcagcccgcgccgcccgggggctccggcagcgagccctacaagctgctccccggggccgtggccaccatcgtgcggcccctgtccgccatcccccagccgacgatcaccaagcaggaggtcatctgaggactagttataagactgactagcccgatgggcctcccaacgggccctcctcccctccttgcaccgagattaataaaaaaaaaaaaaaaaaaaaaaaaaaaaaaaaaaaaaaaaaaaaaaaaaaaaaaaaaaaaaaaatgcatcccccccccccccccccccccccccccccccaaaggctcttttcagagccaccagaatt

SEQ ID NO: 1614 - RNA, 1642 nt, synthetic construct
  misc_feature 1..1642: note = mRNA i-3 (A64-N5-C30-hSL-N5) (opt1) from Homo sapiens__NP_000448.3__HNF4A(1-474)(S87A_S142A_S143A_S148A_T 166A_S167A_S313A_S378A_T429A_T432A_S436A_K458R)
  source 1..1642: mol_type = other RNA
aggagaaagcttaccatgcgcctgagcaagaccctcgtggacatggacatggccgactactccgccgcgctggaccccgcctacaccacgctggagttcgagaacgtccaggtgctcaccatgggcaacgacaccagcccgtccgaggggaccaacctgaacgcccccaacagcctgggcgtgtccgccctctgcgccatctgcggggaccgggcgacgggcaagcactacggggccagctcctgcgacggctgcaagggcttcttccgccgggcggtccgcaagaaccacatgtactcctgccggttcagccgccagtgcgtggtggacaaggacaagcggaaccagtgccgctactgccggctgaagaagtgcttccgcgccgggatgaagaaggaggccgtccagaacgagcgggaccgcatctccacccggcgcgcggcctacgaggacagcgcgctgcccagcatcaacgcgctcctgcaggccgaggtgctgtcccggcagatcgcggcgcccgtgtccggcatcaacggggacatccgcgccaagaagatcgccagcatcgccgacgtctgcgagagcatgaaggagcagctcctggtgctggtggagtgggcgaagtacatcccggccttctgcgagctccccctggacgaccaggtcgccctgctccgggcccacgccggcgagcacctcctgctgggggcgaccaagcgctccatggtgttcaaggacgtgctgctgctcggcaacgactacatcgtcccccggcactgccccgagctggccgagatgagccgcgtgtccatccggatcctggacgagctcgtgctgccgttccaggagctgcagatcgacgacaacgagtacgcctacctcaaggccatcatcttcttcgaccccgacgccaagggcctgagcgaccccgggaagatcaagcgcctgcgcgcgcaggtccaggtgagcctcgaggactacatcaacgaccggcagtacgactcccgcggccggttcggggagctgctgctcctgctgcccacgctccagagcatcacctggcagatgatcgagcagatccagttcatcaagctgttcggcatggcgaagatcgacaacctgctccaggagatgctgctgggcggggcgccgagcgacgcgccccacgcccaccaccccctccacccccacctgatgcaggagcacatgggcaccaacgtgatcgtcgccaacaccatgccgacgcacctgtccaacgggcagatgtgcgagtggccccgcccccggggccaggccgccgcgcccgaggcgccgcagcccgcgccgcccgggggctccggcagcgagccctacaagctgctccccggggccgtggccaccatcgtgcggcccctgtccgccatcccccagccgacgatcaccaagcaggaggtcatctgaggactagttataagactgactagcccgatgggcctcccaacgggccctcctcccctccttgcaccgagattaataaaaaaaaaaaaaaaaaaaaaaaaaaaaaaaaaaaaaaaaaaaaaaaaaaaaaaaaaaaaaaaatgcatcccccccccccccccccccccccccccccccaaaggctcttttcagagccaccagaatt

SEQ ID NO: 1615 - RNA, 1642 nt, synthetic construct
  misc_feature 1..1642: note = mRNA i-3 (A64-N5-C30-hSL-N5) (opt1) from Homo sapiens__NP_000448.3__HNF4A(1-474)(S87A_K106R_K108R_K126R_K 127R_S142A_S143A_S148A_T166A_S167A_S313A_S378A_T429A_T432A_ S436A_K458R)
  source 1..1642: mol_type = other RNA
aggagaaagcttaccatgcgcctgagcaagaccctcgtggacatggacatggccgactactccgccgcgctggaccccgcctacaccacgctggagttcgagaacgtccaggtgctcaccatgggcaacgacaccagcccgtccgaggggaccaacctgaacgcccccaacagcctgggcgtgtccgccctctgcgccatctgcggggaccgggcgacgggcaagcactacggggccagctcctgcgacggctgcaagggcttcttccgccgggcggtccgcaagaaccacatgtactcctgccggttcagccgccagtgcgtggtggaccgcgaccggcggaaccagtgccgctactgccggctgaagaagtgcttccgcgccgggatgcgccgcgaggccgtccagaacgagcgggaccgcatctccacccggcgcgcggcctacgaggacagcgcgctgcccagcatcaacgcgctcctgcaggccgaggtgctgtcccggcagatcgcggcgcccgtgtccggcatcaacggggacatccgcgccaagaagatcgccagcatcgccgacgtctgcgagagcatgaaggagcagctcctggtgctggtggagtgggcgaagtacatcccggccttctgcgagctccccctggacgaccaggtcgccctgctccgggcccacgccggcgagcacctcctgctgggggcgaccaagcgctccatggtgttcaaggacgtgctgctgctcggcaacgactacatcgtcccccggcactgccccgagctggccgagatgagccgcgtgtccatccggatcctggacgagctcgtgctgccgttccaggagctgcagatcgacgacaacgagtacgcctacctcaaggccatcatcttcttcgaccccgacgccaagggcctgagcgaccccgggaagatcaagcgcctgcgcgcgcaggtccaggtgagcctcgaggactacatcaacgaccggcagtacgactcccgcggccggttcggggagctgctgctcctgctgcccacgctccagagcatcacctggcagatgatcgagcagatccagttcatcaagctgttcggcatggcgaagatcgacaacctgctccaggagatgctgctgggcggggcgccgagcgacgcgccccacgcccaccaccccctccacccccacctgatgcaggagcacatgggcaccaacgtgatcgtcgccaacaccatgccgacgcacctgtccaacgggcagatgtgcgagtggccccgcccccggggccaggccgccgcgcccgaggcgccgcagcccgcgccgcccgggggctccggcagcgagccctacaagctgctccccggggccgtggccaccatcgtgcggcccctgtccgccatcccccagccgacgatcaccaagcaggaggtcatctgaggactagttataagactgactagcccgatgggcctcccaacgggccctcctcccctccttgcaccgagattaataaaaaaaaaaaaaaaaaaaaaaaaaaaaaaaaaaaaaaaaaaaaaaaaaaaaaaaaaaaaaaaatgcatcccccccccccccccccccccccccccccccaaaggctcttttcagagccaccagaatt

SEQ ID NO: 1616 - RNA, 1642 nt, synthetic construct
  misc_feature 1..1642: note = mRNA i-3 (A64-N5-C30-hSL-N5) (opt1) from Homo sapiens__NP_000448.3__HNF4A(1-474)(S87A_K106R_K108R_K126R_K 127R)
  source 1..1642: mol_type = other RNA
aggagaaagcttaccatgcgcctgagcaagaccctcgtggacatggacatggccgactactccgccgcgctggaccccgcctacaccacgctggagttcgagaacgtccaggtgctcaccatgggcaacgacaccagcccgtccgaggggaccaacctgaacgcccccaacagcctgggcgtgtccgccctctgcgccatctgcggggaccgggcgacgggcaagcactacggggccagctcctgcgacggctgcaagggcttcttccgccgggcggtccgcaagaaccacatgtactcctgccggttcagccgccagtgcgtggtggaccgcgaccggcggaaccagtgccgctactgccggctgaagaagtgcttccgcgccgggatgcgccgggaggccgtccagaacgagcgggaccgcatctccacccggcgcagctcctacgaggacagctccctgcccagcatcaacgcgctcctgcaggccgaggtgctgtcccggcagatcaccagccccgtgtccggcatcaacggggacatccgcgccaagaagatcgccagcatcgccgacgtctgcgagagcatgaaggagcagctcctggtgctggtggagtgggcgaagtacatcccggccttctgcgagctccccctggacgaccaggtcgccctgctccgggcccacgccggcgagcacctcctgctgggggcgaccaagcgctccatggtgttcaaggacgtgctgctgctcggcaacgactacatcgtcccccggcactgccccgagctggccgagatgagccgcgtgtccatccggatcctggacgagctcgtgctgccgttccaggagctgcagatcgacgacaacgagtacgcctacctcaaggccatcatcttcttcgaccccgacgccaagggcctgagcgaccccgggaagatcaagcgcctgcgctcccaggtccaggtgagcctcgaggactacatcaacgaccggcagtacgactcccgcggccggttcggggagctgctgctcctgctgcccacgctccagagcatcacctggcagatgatcgagcagatccagttcatcaagctgttcggcatggcgaagatcgacaacctgctccaggagatgctgctgggcgggtccccgagcgacgcgccccacgcccaccaccccctccacccccacctgatgcaggagcacatgggcaccaacgtgatcgtcgccaacaccatgccgacgcacctgtccaacgggcagatgtgcgagtggccccgcccccggggccaggccgccacccccgagaccccgcagcccagcccgcccgggggctccggcagcgagccctacaagctgctccccggggccgtggccaccatcgtgaagcccctgtccgccatcccccagccgacgatcaccaagcaggaggtcatctgaggactagttataagactgactagcccgatgggcctcccaacgggccctcctcccctccttgcaccgagattaataaaaaaaaaaaaaaaaaaaaaaaaaaaaaaaaaaaaaaaaaaaaaaaaaaaaaaaaaaaaaaaatgcatcccccccccccccccccccccccccccccccaaaggctcttttcagagccaccagaatt

SEQ ID NO: 1617 - RNA, 1642 nt, synthetic construct
  misc_feature 1..1642: note = mRNA i-3 (A64-N5-C30-hSL-N5) (opt1) from Homo sapiens__NP_000448.3__HNF4A(1-474)(S87A_K106R_K108R_K126R_K 127R_S142A_S143A_S148A_T166A_S167A_S313A_S378A_T429A_T432A_ S436A_K458R_S461A)
  source 1..1642: mol_type = other RNA
aggagaaagcttaccatgcgcctgagcaagaccctcgtggacatggacatggccgactactccgccgcgctggaccccgcctacaccacgctggagttcgagaacgtccaggtgctcaccatgggcaacgacaccagcccgtccgaggggaccaacctgaacgcccccaacagcctgggcgtgtccgccctctgcgccatctgcggggaccgggcgacgggcaagcactacggggccagctcctgcgacggctgcaagggcttcttccgccgggcggtccgcaagaaccacatgtactcctgccggttcagccgccagtgcgtggtggaccgcgaccggcggaaccagtgccgctactgccggctgaagaagtgcttccgcgccgggatgcgccgggaggccgtccagaacgagcgggaccgcatctccacccggcgcgccgcctacgaggacagcgccctgcccagcatcaacgcgctcctgcaggccgaggtgctgtcccggcagatcgccgcgcccgtgtccggcatcaacggggacatccgcgccaagaagatcgccagcatcgccgacgtctgcgagagcatgaaggagcagctcctggtgctggtggagtgggcgaagtacatcccggccttctgcgagctccccctggacgaccaggtcgccctgctccgggcccacgccggcgagcacctcctgctgggggcgaccaagcgctccatggtgttcaaggacgtgctgctgctcggcaacgactacatcgtcccccggcactgccccgagctggccgagatgagccgcgtgtccatccggatcctggacgagctcgtgctgccgttccaggagctgcagatcgacgacaacgagtacgcctacctcaaggccatcatcttcttcgaccccgacgccaagggcctgagcgaccccgggaagatcaagcgcctgcgcgcccaggtccaggtgagcctcgaggactacatcaacgaccggcagtacgactcccgcggccggttcggggagctgctgctcctgctgcccacgctccagagcatcacctggcagatgatcgagcagatccagttcatcaagctgttcggcatggcgaagatcgacaacctgctccaggagatgctgctgggcggggccccgagcgacgcgccccacgcccaccaccccctccacccccacctgatgcaggagcacatgggcaccaacgtgatcgtcgccaacaccatgccgacgcacctgtccaacgggcagatgtgcgagtggccccgcccccggggccaggccgccgcccccgaggccccgcagcccgcgccgcccgggggctccggcagcgagccctacaagctgctccccggggccgtggccaccatcgtgcggcccctggccgccatcccccagccgacgatcaccaagcaggaggtcatctgaggactagttataagactgactagcccgatgggcctcccaacgggccctcctcccctccttgcaccgagattaataaaaaaaaaaaaaaaaaaaaaaaaaaaaaaaaaaaaaaaaaaaaaaaaaaaaaaaaaaaaaaaatgcatcccccccccccccccccccccccccccccccaaaggctcttttcagagccaccagaatt

SEQ ID NO: 1618 - RNA, 1642 nt, synthetic construct
  misc_feature 1..1642: note = mRNA i-3 (A64-N5-C30-hSL-N5) (opt1) from Homo sapiens__NP_000448.3__HNF4A(1-474)(S87A_K106R_K108R_K126R_K 127R_S142A_S143A_S148A_T166A_S167A_S313A_S378A_T429A_T432A_ S436A_K458R_S461E)
  source 1..1642: mol_type = other RNA
aggagaaagcttaccatgcgcctgagcaagaccctcgtggacatggacatggccgactactccgccgcgctggaccccgcctacaccacgctggagttcgagaacgtccaggtgctcaccatgggcaacgacaccagcccgtccgaggggaccaacctgaacgcccccaacagcctgggcgtgtccgccctctgcgccatctgcggggaccgggcgacgggcaagcactacggggccagctcctgcgacggctgcaagggcttcttccgccgggcggtccgcaagaaccacatgtactcctgccggttcagccgccagtgcgtggtggaccgcgaccggcggaaccagtgccgctactgccggctgaagaagtgcttccgcgccgggatgcgccgggaggccgtccagaacgagcgggaccgcatctccacccggcgcgccgcctacgaggacagcgccctgcccagcatcaacgcgctcctgcaggccgaggtgctgtcccggcagatcgccgcgcccgtgtccggcatcaacggggacatccgcgccaagaagatcgccagcatcgccgacgtctgcgagagcatgaaggagcagctcctggtgctggtggagtgggcgaagtacatcccggccttctgcgagctccccctggacgaccaggtcgccctgctccgggcccacgccggcgagcacctcctgctgggggcgaccaagcgctccatggtgttcaaggacgtgctgctgctcggcaacgactacatcgtcccccggcactgccccgagctggccgagatgagccgcgtgtccatccggatcctggacgagctcgtgctgccgttccaggagctgcagatcgacgacaacgagtacgcctacctcaaggccatcatcttcttcgaccccgacgccaagggcctgagcgaccccgggaagatcaagcgcctgcgcgcccaggtccaggtgagcctcgaggactacatcaacgaccggcagtacgactcccgcggccggttcggggagctgctgctcctgctgcccacgctccagagcatcacctggcagatgatcgagcagatccagttcatcaagctgttcggcatggcgaagatcgacaacctgctccaggagatgctgctgggcggggccccgagcgacgcgccccacgcccaccaccccctccacccccacctgatgcaggagcacatgggcaccaacgtgatcgtcgccaacaccatgccgacgcacctgtccaacgggcagatgtgcgagtggccccgcccccggggccaggccgccgcccccgaggccccgcagcccgcgccgcccgggggctccggcagcgagccctacaagctgctccccggggccgtggccaccatcgtgcggcccctggaggccatcccccagccgacgatcaccaagcaggaggtcatctgaggactagttataagactgactagcccgatgggcctcccaacgggccctcctcccctccttgcaccgagattaataaaaaaaaaaaaaaaaaaaaaaaaaaaaaaaaaaaaaaaaaaaaaaaaaaaaaaaaaaaaaaaatgcatcccccccccccccccccccccccccccccccaaaggctcttttcagagccaccagaatt

SEQ ID NO: 1619 - RNA, 1642 nt, synthetic construct
  misc_feature 1..1642: note = mRNA i-3 (A64-N5-C30-hSL-N5) (opt1) from Homo sapiens__NP_000448.3__HNF4A(1-474)(S87A_K106R_K108R_K126R_K 127R_S142A_S143A_S148E_T166A_S167E_S313A_S378E_T429E_T432E_ S436E_K458R_S461E)
  source 1..1642: mol_type = other RNA
aggagaaagcttaccatgcgcctgagcaagaccctcgtggacatggacatggccgactactccgccgcgctggaccccgcctacaccacgctggagttcgagaacgtccaggtgctcaccatgggcaacgacaccagcccgtccgaggggaccaacctgaacgcccccaacagcctgggcgtgtccgccctctgcgccatctgcggggaccgggcgacgggcaagcactacggggccagctcctgcgacggctgcaagggcttcttccgccgggcggtccgcaagaaccacatgtactcctgccggttcagccgccagtgcgtggtggaccgcgaccggcggaaccagtgccgctactgccggctgaagaagtgcttccgcgccgggatgcgccgggaggccgtccagaacgagcgggaccgcatctccacccggcgcgccgcctacgaggacagcgagctgcccagcatcaacgcgctcctgcaggccgaggtgctgtcccggcagatcgccgagcccgtgtccggcatcaacggggacatccgcgccaagaagatcgccagcatcgccgacgtctgcgagagcatgaaggagcagctcctggtgctggtggagtgggcgaagtacatcccggccttctgcgagctccccctggacgaccaggtcgccctgctccgggcccacgccggcgagcacctcctgctgggggcgaccaagcgctccatggtgttcaaggacgtgctgctgctcggcaacgactacatcgtcccccggcactgccccgagctggccgagatgagccgcgtgtccatccggatcctggacgagctcgtgctgccgttccaggagctgcagatcgacgacaacgagtacgcctacctcaaggccatcatcttcttcgaccccgacgccaagggcctgagcgaccccgggaagatcaagcgcctgcgcgcccaggtccaggtgagcctcgaggactacatcaacgaccggcagtacgactcccgcggccggttcggggagctgctgctcctgctgcccacgctccagagcatcacctggcagatgatcgagcagatccagttcatcaagctgttcggcatggcgaagatcgacaacctgctccaggagatgctgctgggcggggagccgagcgacgcgccccacgcccaccaccccctccacccccacctgatgcaggagcacatgggcaccaacgtgatcgtcgccaacaccatgccgacgcacctgtccaacgggcagatgtgcgagtggccccgcccccggggccaggccgccgagcccgaggagccgcagcccgagccgcccgggggctccggcagcgagccctacaagctgctccccggggccgtggccaccatcgtgcggcccctggaggccatcccccagccgacgatcaccaagcaggaggtcatctgaggactagttataagactgactagcccgatgggcctcccaacgggccctcctcccctccttgcaccgagattaataaaaaaaaaaaaaaaaaaaaaaaaaaaaaaaaaaaaaaaaaaaaaaaaaaaaaaaaaaaaaaaatgcatcccccccccccccccccccccccccccccccaaaggctcttttcagagccaccagaatt

SEQ ID NO: 1620 - RNA, 1642 nt, synthetic construct
  misc_feature 1..1642: note = mRNA i-3 (A64-N5-C30-hSL-N5) (opt1) from Homo sapiens__NP_000448.3__HNF4A(1-474)(S87A_K106R_K108R_K126R_K 127R_S142A_S143A_S148A_T166A_S167A_K179R_K180R_S313A_S378A_ T429A_T432A_S436A_K458R_S461E)
  source 1..1642: mol_type = other RNA
aggagaaagcttaccatgcgcctgagcaagaccctcgtggacatggacatggccgactactccgccgcgctggaccccgcctacaccacgctggagttcgagaacgtccaggtgctcaccatgggcaacgacaccagcccgtccgaggggaccaacctgaacgcccccaacagcctgggcgtgtccgccctctgcgccatctgcggggaccgggcgacgggcaagcactacggggccagctcctgcgacggctgcaagggcttcttccgccgggcggtccgcaagaaccacatgtactcctgccggttcagccgccagtgcgtggtggaccgcgaccggcggaaccagtgccgctactgccggctgaagaagtgcttccgcgccgggatgcgccgggaggccgtccagaacgagcgggaccgcatctccacccggcgcgccgcctacgaggacagcgccctgcccagcatcaacgcgctcctgcaggccgaggtgctgtcccggcagatcgccgcgcccgtgtccggcatcaacggggacatccgcgcccgccggatcgccagcatcgccgacgtctgcgagagcatgaaggagcagctcctggtgctggtggagtgggcgaagtacatcccggccttctgcgagctccccctggacgaccaggtcgccctgctccgggcccacgccggcgagcacctcctgctgggggcgaccaagcgctccatggtgttcaaggacgtgctgctgctcggcaacgactacatcgtcccccggcactgccccgagctggccgagatgagccgcgtgtccatccggatcctggacgagctcgtgctgccgttccaggagctgcagatcgacgacaacgagtacgcctacctcaaggccatcatcttcttcgaccccgacgccaagggcctgagcgaccccgggaagatcaagcgcctgcgcgcccaggtccaggtgagcctcgaggactacatcaacgaccggcagtacgactcccgcggccggttcggggagctgctgctcctgctgcccacgctccagagcatcacctggcagatgatcgagcagatccagttcatcaagctgttcggcatggcgaagatcgacaacctgctccaggagatgctgctgggcggggccccgagcgacgcgccccacgcccaccaccccctccacccccacctgatgcaggagcacatgggcaccaacgtgatcgtcgccaacaccatgccgacgcacctgtccaacgggcagatgtgcgagtggccccgcccccggggccaggccgccgcccccgaggccccgcagcccgcgccgcccgggggctccggcagcgagccctacaagctgctccccggggccgtggccaccatcgtgcggcccctggaggccatcccccagccgacgatcaccaagcaggaggtcatctgaggactagttataagactgactagcccgatgggcctcccaacgggccctcctcccctccttgcaccgagattaataaaaaaaaaaaaaaaaaaaaaaaaaaaaaaaaaaaaaaaaaaaaaaaaaaaaaaaaaaaaaaaatgcatcccccccccccccccccccccccccccccccaaaggctcttttcagagccaccagaatt

SEQ ID NO: 1621 - RNA, 1642 nt, synthetic construct
  misc_feature 1..1642: note = mRNA i-3 (A64-N5-C30-hSL-N5) (opt1) from Homo sapiens__NP_000448.3__HNF4A(1-474)(S87A_K106R_K108R_K126R_K 127R_S142A_S143A_S148A_T166A_S167A_K300R_K307R_K309R_S313A_ S378A_T429A_T432A_S436A_K458R_S461E)
  source 1..1642: mol_type = other RNA
aggagaaagcttaccatgcgcctgagcaagaccctcgtggacatggacatggccgactactccgccgcgctggaccccgcctacaccacgctggagttcgagaacgtccaggtgctcaccatgggcaacgacaccagcccgtccgaggggaccaacctgaacgcccccaacagcctgggcgtgtccgccctctgcgccatctgcggggaccgggcgacgggcaagcactacggggccagctcctgcgacggctgcaagggcttcttccgccgggcggtccgcaagaaccacatgtactcctgccggttcagccgccagtgcgtggtggaccgcgaccggcggaaccagtgccgctactgccggctgaagaagtgcttccgcgccgggatgcgccgggaggccgtccagaacgagcgggaccgcatctccacccggcgcgccgcctacgaggacagcgccctgcccagcatcaacgcgctcctgcaggccgaggtgctgtcccggcagatcgccgcgcccgtgtccggcatcaacggggacatccgcgccaagaagatcgccagcatcgccgacgtctgcgagagcatgaaggagcagctcctggtgctggtggagtgggcgaagtacatcccggccttctgcgagctccccctggacgaccaggtcgccctgctccgggcccacgccggcgagcacctcctgctgggggcgaccaagcgctccatggtgttcaaggacgtgctgctgctcggcaacgactacatcgtcccccggcactgccccgagctggccgagatgagccgcgtgtccatccggatcctggacgagctcgtgctgccgttccaggagctgcagatcgacgacaacgagtacgcctacctcaaggccatcatcttcttcgaccccgacgcccgcggcctgagcgaccccgggcggatccgccgcctgcgcgcccaggtccaggtgagcctcgaggactacatcaacgaccggcagtacgactcccgcggccggttcggggagctgctgctcctgctgcccacgctccagagcatcacctggcagatgatcgagcagatccagttcatcaagctgttcggcatggcgaagatcgacaacctgctccaggagatgctgctgggcggggccccgagcgacgcgccccacgcccaccaccccctccacccccacctgatgcaggagcacatgggcaccaacgtgatcgtcgccaacaccatgccgacgcacctgtccaacgggcagatgtgcgagtggccccgcccccggggccaggccgccgcccccgaggccccgcagcccgcgccgcccgggggctccggcagcgagccctacaagctgctccccggggccgtggccaccatcgtgcggcccctggaggccatcccccagccgacgatcaccaagcaggaggtcatctgaggactagttataagactgactagcccgatgggcctcccaacgggccctcctcccctccttgcaccgagattaataaaaaaaaaaaaaaaaaaaaaaaaaaaaaaaaaaaaaaaaaaaaaaaaaaaaaaaaaaaaaaaatgcatcccccccccccccccccccccccccccccccaaaggctcttttcagagccaccagaatt

SEQ ID NO: 1622 - RNA, 1642 nt, synthetic construct
  misc_feature 1..1642: note = mRNA i-3 (A64-N5-C30-hSL-N5) (opt1) from Homo sapiens__NP_000448.3__HNF4A(1-474)(S87A_K106R_K108R_K126R_K 127R_S142A_S143A_S148A_T166A_S167A_S313A_S378A_T429A_T432A_ S436A_K447R_K458R_S461E_K470R)
  source 1..1642: mol_type = other RNA
aggagaaagcttaccatgcgcctgagcaagaccctcgtggacatggacatggccgactactccgccgcgctggaccccgcctacaccacgctggagttcgagaacgtccaggtgctcaccatgggcaacgacaccagcccgtccgaggggaccaacctgaacgcccccaacagcctgggcgtgtccgccctctgcgccatctgcggggaccgggcgacgggcaagcactacggggccagctcctgcgacggctgcaagggcttcttccgccgggcggtccgcaagaaccacatgtactcctgccggttcagccgccagtgcgtggtggaccgcgaccggcggaaccagtgccgctactgccggctgaagaagtgcttccgcgccgggatgcgccgggaggccgtccagaacgagcgggaccgcatctccacccggcgcgccgcctacgaggacagcgccctgcccagcatcaacgcgctcctgcaggccgaggtgctgtcccggcagatcgccgcgcccgtgtccggcatcaacggggacatccgcgccaagaagatcgccagcatcgccgacgtctgcgagagcatgaaggagcagctcctggtgctggtggagtgggcgaagtacatcccggccttctgcgagctccccctggacgaccaggtcgccctgctccgggcccacgccggcgagcacctcctgctgggggcgaccaagcgctccatggtgttcaaggacgtgctgctgctcggcaacgactacatcgtcccccggcactgccccgagctggccgagatgagccgcgtgtccatccggatcctggacgagctcgtgctgccgttccaggagctgcagatcgacgacaacgagtacgcctacctcaaggccatcatcttcttcgaccccgacgccaagggcctgagcgaccccgggaagatcaagcgcctgcgcgcccaggtccaggtgagcctcgaggactacatcaacgaccggcagtacgactcccgcggccggttcggggagctgctgctcctgctgcccacgctccagagcatcacctggcagatgatcgagcagatccagttcatcaagctgttcggcatggcgaagatcgacaacctgctccaggagatgctgctgggcggggccccgagcgacgcgccccacgcccaccaccccctccacccccacctgatgcaggagcacatgggcaccaacgtgatcgtcgccaacaccatgccgacgcacctgtccaacgggcagatgtgcgagtggccccgcccccggggccaggccgccgcccccgaggccccgcagcccgcgccgcccgggggctccggcagcgagccctaccgcctgctccccggggccgtggccaccatcgtgcggcccctggaggccatcccccagccgacgatcacccggcaggaggtcatctgaggactagttataagactgactagcccgatgggcctcccaacgggccctcctcccctccttgcaccgagattaataaaaaaaaaaaaaaaaaaaaaaaaaaaaaaaaaaaaaaaaaaaaaaaaaaaaaaaaaaaaaaaatgcatcccccccccccccccccccccccccccccccaaaggctcttttcagagccaccagaatt

SEQ ID NO: 1623 - RNA, 1642 nt, synthetic construct
  misc_feature 1..1642: note = mRNA i-3 (A64-N5-C30-hSL-N5) (opt1) from Homo sapiens__NP_000448.3__HNF4A(1-474)(S87A_K106R_K108R_K126R_K 127R_S142A_S143A_S148A_T166A_S167A_K179R_K180R_K234R_K300R_ K307R_K309R_S313A_S378A_T429A_T432A_S436A_K447R_K458R_S461E _K470R)
  source 1..1642: mol_type = other RNA
aggagaaagcttaccatgcgcctgagcaagaccctcgtggacatggacatggccgactactccgccgcgctggaccccgcctacaccacgctggagttcgagaacgtccaggtgctcaccatgggcaacgacaccagcccgtccgaggggaccaacctgaacgcccccaacagcctgggcgtgtccgccctctgcgccatctgcggggaccgggcgacgggcaagcactacggggccagctcctgcgacggctgcaagggcttcttccgccgggcggtccgcaagaaccacatgtactcctgccggttcagccgccagtgcgtggtggaccgcgaccggcggaaccagtgccgctactgccggctgaagaagtgcttccgcgccgggatgcgccgggaggccgtccagaacgagcgggaccgcatctccacccggcgcgccgcctacgaggacagcgccctgcccagcatcaacgcgctcctgcaggccgaggtgctgtcccggcagatcgccgcgcccgtgtccggcatcaacggggacatccgcgcccgccggatcgccagcatcgccgacgtctgcgagagcatgaaggagcagctcctggtgctggtggagtgggcgaagtacatcccggccttctgcgagctccccctggacgaccaggtcgccctgctccgggcccacgccggcgagcacctcctgctgggggcgacccggcgctccatggtgttcaaggacgtgctgctgctcggcaacgactacatcgtcccccggcactgccccgagctggccgagatgagccgcgtgtccatccggatcctggacgagctcgtgctgccgttccaggagctgcagatcgacgacaacgagtacgcctacctcaaggccatcatcttcttcgaccccgacgcccgcggcctgagcgaccccgggcggatccgccgcctgcgcgcccaggtccaggtgagcctcgaggactacatcaacgaccggcagtacgactcccgcggccggttcggggagctgctgctcctgctgcccacgctccagagcatcacctggcagatgatcgagcagatccagttcatcaagctgttcggcatggcgaagatcgacaacctgctccaggagatgctgctgggcggggccccgagcgacgcgccccacgcccaccaccccctccacccccacctgatgcaggagcacatgggcaccaacgtgatcgtcgccaacaccatgccgacgcacctgtccaacgggcagatgtgcgagtggccccgcccccggggccaggccgccgcccccgaggccccgcagcccgcgccgcccgggggctccggcagcgagccctaccgcctgctccccggggccgtggccaccatcgtgcggcccctggaggccatcccccagccgacgatcacccggcaggaggtcatctgaggactagttataagactgactagcccgatgggcctcccaacgggccctcctcccctccttgcaccgagattaataaaaaaaaaaaaaaaaaaaaaaaaaaaaaaaaaaaaaaaaaaaaaaaaaaaaaaaaaaaaaaaatgcatcccccccccccccccccccccccccccccccaaaggctcttttcagagccaccagaatt

SEQ ID NO: 1624 - RNA, 1642 nt, synthetic construct
  misc_feature 1..1642: note = mRNA i-3 (A64-N5-C30-hSL-N5) (opt1) from Homo sapiens__NP_000448.3__HNF4A(1-474)(S87A_S95A_S99A_K106R_K10 8R_K126R_K127R_S142A_S143A_S148A_T166A_S167A_S313A_S378A_T4 29A_T432A_S436A_K458R_S461E)
  source 1..1642: mol_type = other RNA
aggagaaagcttaccatgcgcctgagcaagaccctcgtggacatggacatggccgactactccgccgcgctggaccccgcctacaccacgctggagttcgagaacgtccaggtgctcaccatgggcaacgacaccagcccgtccgaggggaccaacctgaacgcccccaacagcctgggcgtgtccgccctctgcgccatctgcggggaccgggcgacgggcaagcactacggggccagctcctgcgacggctgcaagggcttcttccgccgggcggtccgcaagaaccacatgtacgcctgccggttcgcccgccagtgcgtggtggaccgcgaccggcggaaccagtgccgctactgccggctgaagaagtgcttccgcgccgggatgcgccgggaggccgtccagaacgagcgggaccgcatctccacccggcgcgccgcctacgaggacagcgccctgcccagcatcaacgcgctcctgcaggccgaggtgctgtcccggcagatcgccgcgcccgtgtccggcatcaacggggacatccgcgccaagaagatcgccagcatcgccgacgtctgcgagagcatgaaggagcagctcctggtgctggtggagtgggcgaagtacatcccggccttctgcgagctccccctggacgaccaggtcgccctgctccgggcccacgccggcgagcacctcctgctgggggcgaccaagcgctccatggtgttcaaggacgtgctgctgctcggcaacgactacatcgtcccccggcactgccccgagctggccgagatgagccgcgtgtccatccggatcctggacgagctcgtgctgccgttccaggagctgcagatcgacgacaacgagtacgcctacctcaaggccatcatcttcttcgaccccgacgccaagggcctgagcgaccccgggaagatcaagcgcctgcgcgcccaggtccaggtgagcctcgaggactacatcaacgaccggcagtacgactcccgcggccggttcggggagctgctgctcctgctgcccacgctccagagcatcacctggcagatgatcgagcagatccagttcatcaagctgttcggcatggcgaagatcgacaacctgctccaggagatgctgctgggcggggccccgagcgacgcgccccacgcccaccaccccctccacccccacctgatgcaggagcacatgggcaccaacgtgatcgtcgccaacaccatgccgacgcacctgtccaacgggcagatgtgcgagtggccccgcccccggggccaggccgccgcccccgaggccccgcagcccgcgccgcccgggggctccggcagcgagccctacaagctgctccccggggccgtggccaccatcgtgcggcccctggaggccatcccccagccgacgatcaccaagcaggaggtcatctgaggactagttataagactgactagcccgatgggcctcccaacgggccctcctcccctccttgcaccgagattaataaaaaaaaaaaaaaaaaaaaaaaaaaaaaaaaaaaaaaaaaaaaaaaaaaaaaaaaaaaaaaaatgcatcccccccccccccccccccccccccccccccaaaggctcttttcagagccaccagaatt

SEQ ID NO: 1625 - RNA, 1642 nt, synthetic construct
  misc_feature 1..1642: note = mRNA i-3 (A64-N5-C30-hSL-N5) (opt1) from Homo sapiens__NP_000448.3__HNF4A(1-474)(S87A_K106R_K108R_K126R_K 127R_S138A_T139A_S142A_S143A_S148A_T166A_S167A_S313A_S378A_ T429A_T432A_S436A_K458R_S461E)
  source 1..1642: mol_type = other RNA
aggagaaagcttaccatgcgcctgagcaagaccctcgtggacatggacatggccgactactccgccgcgctggaccccgcctacaccacgctggagttcgagaacgtccaggtgctcaccatgggcaacgacaccagcccgtccgaggggaccaacctgaacgcccccaacagcctgggcgtgtccgccctctgcgccatctgcggggaccgggcgacgggcaagcactacggggccagctcctgcgacggctgcaagggcttcttccgccgggcggtccgcaagaaccacatgtactcctgccggttcagccgccagtgcgtggtggaccgcgaccggcggaaccagtgccgctactgccggctgaagaagtgcttccgcgccgggatgcgccgggaggccgtccagaacgagcgggaccgcatcgccgcccggcgcgccgcctacgaggacagcgccctgcccagcatcaacgcgctcctgcaggccgaggtgctgtcccggcagatcgccgcgcccgtgtccggcatcaacggggacatccgcgccaagaagatcgccagcatcgccgacgtctgcgagagcatgaaggagcagctcctggtgctggtggagtgggcgaagtacatcccggccttctgcgagctccccctggacgaccaggtcgccctgctccgggcccacgccggcgagcacctcctgctgggggcgaccaagcgctccatggtgttcaaggacgtgctgctgctcggcaacgactacatcgtcccccggcactgccccgagctggccgagatgagccgcgtgtccatccggatcctggacgagctcgtgctgccgttccaggagctgcagatcgacgacaacgagtacgcctacctcaaggccatcatcttcttcgaccccgacgccaagggcctgagcgaccccgggaagatcaagcgcctgcgcgcccaggtccaggtgagcctcgaggactacatcaacgaccggcagtacgactcccgcggccggttcggggagctgctgctcctgctgcccacgctccagagcatcacctggcagatgatcgagcagatccagttcatcaagctgttcggcatggcgaagatcgacaacctgctccaggagatgctgctgggcggggccccgagcgacgcgccccacgcccaccaccccctccacccccacctgatgcaggagcacatgggcaccaacgtgatcgtcgccaacaccatgccgacgcacctgtccaacgggcagatgtgcgagtggccccgcccccggggccaggccgccgcccccgaggccccgcagcccgcgccgcccgggggctccggcagcgagccctacaagctgctccccggggccgtggccaccatcgtgcggcccctggaggccatcccccagccgacgatcaccaagcaggaggtcatctgaggactagttataagactgactagcccgatgggcctcccaacgggccctcctcccctccttgcaccgagattaataaaaaaaaaaaaaaaaaaaaaaaaaaaaaaaaaaaaaaaaaaaaaaaaaaaaaaaaaaaaaaaatgcatcccccccccccccccccccccccccccccccaaaggctcttttcagagccaccagaatt

SEQ ID NO: 1626 - RNA, 1642 nt, synthetic construct
  misc_feature 1..1642: note = mRNA i-3 (A64-N5-C30-hSL-N5) (opt1) from Homo sapiens__NP_000448.3__HNF4A(1-474)(S87A_S95A_S99A_K106R_K10 8R_K126R_K127R_S138A_T139A_S142A_S143A_S148A_T166A_S167A_S3 13A_S378A_T429A_T432A_S436A_K458R_S461E)
  source 1..1642: mol_type = other RNA
aggagaaagcttaccatgcgcctgagcaagaccctcgtggacatggacatggccgactactccgccgcgctggaccccgcctacaccacgctggagttcgagaacgtccaggtgctcaccatgggcaacgacaccagcccgtccgaggggaccaacctgaacgcccccaacagcctgggcgtgtccgccctctgcgccatctgcggggaccgggcgacgggcaagcactacggggccagctcctgcgacggctgcaagggcttcttccgccgggcggtccgcaagaaccacatgtacgcctgccggttcgcccgccagtgcgtggtggaccgcgaccggcggaaccagtgccgctactgccggctgaagaagtgcttccgcgccgggatgcgccgggaggccgtccagaacgagcgggaccgcatcgccgcccggcgcgccgcctacgaggacagcgccctgcccagcatcaacgcgctcctgcaggccgaggtgctgtcccggcagatcgccgcgcccgtgtccggcatcaacggggacatccgcgccaagaagatcgccagcatcgccgacgtctgcgagagcatgaaggagcagctcctggtgctggtggagtgggcgaagtacatcccggccttctgcgagctccccctggacgaccaggtcgccctgctccgggcccacgccggcgagcacctcctgctgggggcgaccaagcgctccatggtgttcaaggacgtgctgctgctcggcaacgactacatcgtcccccggcactgccccgagctggccgagatgagccgcgtgtccatccggatcctggacgagctcgtgctgccgttccaggagctgcagatcgacgacaacgagtacgcctacctcaaggccatcatcttcttcgaccccgacgccaagggcctgagcgaccccgggaagatcaagcgcctgcgcgcccaggtccaggtgagcctcgaggactacatcaacgaccggcagtacgactcccgcggccggttcggggagctgctgctcctgctgcccacgctccagagcatcacctggcagatgatcgagcagatccagttcatcaagctgttcggcatggcgaagatcgacaacctgctccaggagatgctgctgggcggggccccgagcgacgcgccccacgcccaccaccccctccacccccacctgatgcaggagcacatgggcaccaacgtgatcgtcgccaacaccatgccgacgcacctgtccaacgggcagatgtgcgagtggccccgcccccggggccaggccgccgcccccgaggccccgcagcccgcgccgcccgggggctccggcagcgagccctacaagctgctccccggggccgtggccaccatcgtgcggcccctggaggccatcccccagccgacgatcaccaagcaggaggtcatctgaggactagttataagactgactagcccgatgggcctcccaacgggccctcctcccctccttgcaccgagattaataaaaaaaaaaaaaaaaaaaaaaaaaaaaaaaaaaaaaaaaaaaaaaaaaaaaaaaaaaaaaaaatgcatcccccccccccccccccccccccccccccccaaaggctcttttcagagccaccagaatt

SEQ ID NO: 1627 - RNA, 1642 nt, synthetic construct
  misc_feature 1..1642: note = mRNA i-3 (A64-N5-C30-hSL-N5) (opt1) from Homo sapiens__NP_000448.3__HNF4A(1-474)
  source 1..1642: mol_type = other RNA
aggagaaagcttaccatgcgcctgagcaagaccctcgtggacatggacatggccgactactccgccgcgctggaccccgcctacaccacgctggagttcgagaacgtccaggtgctcaccatgggcaacgacaccagcccgtccgaggggaccaacctgaacgcccccaacagcctgggcgtgtccgccctctgcgccatctgcggggaccgggcgacgggcaagcactacggggccagctcctgcgacggctgcaagggcttcttccgccggagcgtccgcaagaaccacatgtactcctgccggttcagccgccagtgcgtggtggacaaggacaagcggaaccagtgccgctactgccggctgaagaagtgcttccgcgccgggatgaagaaggaggccgtccagaacgagcgggaccgcatctccacccggcgcagctcctacgaggacagctccctgcccagcatcaacgcgctcctgcaggccgaggtgctgtcccggcagatcaccagccccgtgtccggcatcaacggggacatccgcgccaagaagatcgccagcatcgccgacgtctgcgagagcatgaaggagcagctcctggtgctggtggagtgggcgaagtacatcccggccttctgcgagctccccctggacgaccaggtcgccctgctccgggcccacgccggcgagcacctcctgctgggggcgaccaagcgctccatggtgttcaaggacgtgctgctgctcggcaacgactacatcgtcccccggcactgccccgagctggccgagatgagccgcgtgtccatccggatcctggacgagctcgtgctgccgttccaggagctgcagatcgacgacaacgagtacgcctacctcaaggccatcatcttcttcgaccccgacgccaagggcctgagcgaccccgggaagatcaagcgcctgcgctcccaggtccaggtgagcctcgaggactacatcaacgaccggcagtacgactcccgcggccggttcggggagctgctgctcctgctgcccacgctccagagcatcacctggcagatgatcgagcagatccagttcatcaagctgttcggcatggcgaagatcgacaacctgctccaggagatgctgctgggcgggtccccgagcgacgcgccccacgcccaccaccccctccacccccacctgatgcaggagcacatgggcaccaacgtgatcgtcgccaacaccatgccgacgcacctgtccaacgggcagatgtgcgagtggccccgcccccggggccaggccgccacccccgagaccccgcagcccagcccgcccgggggctccggcagcgagccctacaagctcctgcccggggccgtggccaccatcgtgaagcccctgtccgccatcccccagccgacgatcaccaagcaggaggtcatctgaggactagttataagactgactagcccgatgggcctcccaacgggccctcctcccctccttgcaccgagattaataaaaaaaaaaaaaaaaaaaaaaaaaaaaaaaaaaaaaaaaaaaaaaaaaaaaaaaaaaaaaaaatgcatcccccccccccccccccccccccccccccccaaaggctcttttcagagccaccagaatt

SEQ ID NO: 1628 - RNA, 1642 nt, synthetic construct
  misc_feature 1..1642: note = mRNA i-3 (A64-N5-C30-hSL-N5) (opt1) from Homo sapiens__NP_000448.3__HNF4A(1-474)(S313A)
  source 1..1642: mol_type = other RNA
aggagaaagcttaccatgcgcctgagcaagaccctcgtggacatggacatggccgactactccgccgcgctggaccccgcctacaccacgctggagttcgagaacgtccaggtgctcaccatgggcaacgacaccagcccgtccgaggggaccaacctgaacgcccccaacagcctgggcgtgtccgccctctgcgccatctgcggggaccgggcgacgggcaagcactacggggccagctcctgcgacggctgcaagggcttcttccgccggagcgtccgcaagaaccacatgtactcctgccggttcagccgccagtgcgtggtggacaaggacaagcggaaccagtgccgctactgccggctgaagaagtgcttccgcgccgggatgaagaaggaggccgtccagaacgagcgggaccgcatctccacccggcgcagctcctacgaggacagctccctgcccagcatcaacgcgctcctgcaggccgaggtgctgtcccggcagatcaccagccccgtgtccggcatcaacggggacatccgcgccaagaagatcgccagcatcgccgacgtctgcgagagcatgaaggagcagctcctggtgctggtggagtgggcgaagtacatcccggccttctgcgagctccccctggacgaccaggtcgccctgctccgggcccacgccggcgagcacctcctgctgggggcgaccaagcgctccatggtgttcaaggacgtgctgctgctcggcaacgactacatcgtcccccggcactgccccgagctggccgagatgagccgcgtgtccatccggatcctggacgagctcgtgctgccgttccaggagctgcagatcgacgacaacgagtacgcctacctcaaggccatcatcttcttcgaccccgacgccaagggcctgagcgaccccgggaagatcaagcgcctgcgcgcgcaggtccaggtgtccctcgaggactacatcaacgaccggcagtacgacagccgcggccggttcggggagctgctgctcctgctgcccacgctccagtccatcacctggcagatgatcgagcagatccagttcatcaagctgttcggcatggccaagatcgacaacctgctccaggagatgctgctgggcgggagcccgtccgacgcgccccacgcccaccaccccctccacccccacctgatgcaggagcacatgggcaccaacgtgatcgtcgccaacaccatgccgacgcacctgagcaacgggcagatgtgcgagtggccccgcccccggggccaggccgccacccccgagaccccgcagccctccccgcccgggggcagcggctccgagccctacaagctgctccccggggccgtggccaccatcgtgaagcccctgagcgcgatcccccagccgacgatcaccaagcaggaggtcatctgaggactagttataagactgactagcccgatgggcctcccaacgggccctcctcccctccttgcaccgagattaataaaaaaaaaaaaaaaaaaaaaaaaaaaaaaaaaaaaaaaaaaaaaaaaaaaaaaaaaaaaaaaatgcatcccccccccccccccccccccccccccccccaaaggctcttttcagagccaccagaatt

SEQ ID NO: 1629 - RNA, 1642 nt, synthetic construct
  misc_feature 1..1642: note = mRNA i-3 (A64-N5-C30-hSL-N5) (opt1) from Homo sapiens__NP_000448.3__HNF4A(1-474)(S313E)
  source 1..1642: mol_type = other RNA
aggagaaagcttaccatgcgcctgagcaagaccctcgtggacatggacatggccgactactccgccgcgctggaccccgcctacaccacgctggagttcgagaacgtccaggtgctcaccatgggcaacgacaccagcccgtccgaggggaccaacctgaacgcccccaacagcctgggcgtgtccgccctctgcgccatctgcggggaccgggcgacgggcaagcactacggggccagctcctgcgacggctgcaagggcttcttccgccggagcgtccgcaagaaccacatgtactcctgccggttcagccgccagtgcgtggtggacaaggacaagcggaaccagtgccgctactgccggctgaagaagtgcttccgcgccgggatgaagaaggaggccgtccagaacgagcgggaccgcatctccacccggcgcagctcctacgaggacagctccctgcccagcatcaacgcgctcctgcaggccgaggtgctgtcccggcagatcaccagccccgtgtccggcatcaacggggacatccgcgccaagaagatcgccagcatcgccgacgtctgcgagagcatgaaggagcagctcctggtgctggtggagtgggcgaagtacatcccggccttctgcgagctccccctggacgaccaggtcgccctgctccgggcccacgccggcgagcacctcctgctgggggcgaccaagcgctccatggtgttcaaggacgtgctgctgctcggcaacgactacatcgtcccccggcactgccccgagctggccgagatgagccgcgtgtccatccggatcctggacgagctcgtgctgccgttccaggagctgcagatcgacgacaacgagtacgcctacctcaaggccatcatcttcttcgaccccgacgccaagggcctgagcgaccccgggaagatcaagcgcctgcgcgagcaggtccaggtgtccctcgaggactacatcaacgaccggcagtacgacagccgcggccggttcggggagctgctgctcctgctgcccacgctccagtccatcacctggcagatgatcgagcagatccagttcatcaagctgttcggcatggcgaagatcgacaacctgctccaggagatgctgctgggcgggagcccgtccgacgcgccccacgcccaccaccccctccacccccacctgatgcaggagcacatgggcaccaacgtgatcgtcgccaacaccatgccgacgcacctgagcaacgggcagatgtgcgagtggccccgcccccggggccaggccgccacccccgagaccccgcagccctccccgcccgggggcagcggctccgagccctacaagctgctccccggggccgtggccaccatcgtgaagcccctgagcgccatcccccagccgacgatcaccaagcaggaggtcatctgaggactagttataagactgactagcccgatgggcctcccaacgggccctcctcccctccttgcaccgagattaataaaaaaaaaaaaaaaaaaaaaaaaaaaaaaaaaaaaaaaaaaaaaaaaaaaaaaaaaaaaaaaatgcatcccccccccccccccccccccccccccccccaaaggctcttttcagagccaccagaatt

SEQ ID NO: 1630 - RNA, 1642 nt, synthetic construct
  misc_feature 1..1642: note = mRNA i-3 (A64-N5-C30-hSL-N5) (opt1) from Homo sapiens__NP_000448.3__HNF4A(1-474)(S142A_S143A)
  source 1..1642: mol_type = other RNA
aggagaaagcttaccatgcgcctgagcaagaccctcgtggacatggacatggccgactactccgccgcgctggaccccgcctacaccacgctggagttcgagaacgtccaggtgctcaccatgggcaacgacaccagcccgtccgaggggaccaacctgaacgcccccaacagcctgggcgtgtccgccctctgcgccatctgcggggaccgggcgacgggcaagcactacggggccagctcctgcgacggctgcaagggcttcttccgccggagcgtccgcaagaaccacatgtactcctgccggttcagccgccagtgcgtggtggacaaggacaagcggaaccagtgccgctactgccggctgaagaagtgcttccgcgccgggatgaagaaggaggccgtccagaacgagcgggaccgcatctccacccggcgcgcggcctacgaggacagctccctgcccagcatcaacgccctcctgcaggccgaggtgctgtcccggcagatcaccagccccgtgtccggcatcaacggggacatccgcgccaagaagatcgcgagcatcgccgacgtctgcgagtccatgaaggagcagctcctggtgctggtggagtgggccaagtacatcccggccttctgcgagctccccctggacgaccaggtcgccctgctccgggcgcacgccggcgagcacctcctgctgggggccaccaagcgcagcatggtgttcaaggacgtgctgctgctcggcaacgactacatcgtcccccggcactgccccgagctggccgagatgagccgcgtgtccatccggatcctggacgagctcgtgctgccgttccaggagctgcagatcgacgacaacgagtacgcctacctcaaggcgatcatcttcttcgaccccgacgccaagggcctgagcgaccccgggaagatcaagcgcctgcgctcccaggtccaggtgagcctcgaggactacatcaacgaccggcagtacgactcccgcggccggttcggggagctgctgctcctgctgcccacgctccagagcatcacctggcagatgatcgagcagatccagttcatcaagctgttcggcatggccaagatcgacaacctgctccaggagatgctgctgggcgggtccccgagcgacgcgccccacgcccaccaccccctccacccccacctgatgcaggagcacatgggcaccaacgtgatcgtcgccaacaccatgccgacgcacctgtccaacgggcagatgtgcgagtggccccgcccccggggccaggccgccacccccgagaccccgcagcccagcccgcccgggggctccggcagcgagccctacaagctgctccccggggccgtggcgaccatcgtgaagcccctgtccgccatcccccagccgacgatcaccaagcaggaggtcatctgaggactagttataagactgactagcccgatgggcctcccaacgggccctcctcccctccttgcaccgagattaataaaaaaaaaaaaaaaaaaaaaaaaaaaaaaaaaaaaaaaaaaaaaaaaaaaaaaaaaaaaaaaatgcatcccccccccccccccccccccccccccccccaaaggctcttttcagagccaccagaatt

SEQ ID NO: 1631 - RNA, 1642 nt, synthetic construct
  misc_feature 1..1642: note = mRNA i-3 (A64-N5-C30-hSL-N5) (opt1) from Homo sapiens__NP_000448.3__HNF4A(1-474)(S142E_S143E)
  source 1..1642: mol_type = other RNA
aggagaaagcttaccatgcgcctgagcaagaccctcgtggacatggacatggccgactactccgccgcgctggaccccgcctacaccacgctggagttcgagaacgtccaggtgctcaccatgggcaacgacaccagcccgtccgaggggaccaacctgaacgcccccaacagcctgggcgtgtccgccctctgcgccatctgcggggaccgggcgacgggcaagcactacggggccagctcctgcgacggctgcaagggcttcttccgccggagcgtccgcaagaaccacatgtactcctgccggttcagccgccagtgcgtggtggacaaggacaagcggaaccagtgccgctactgccggctgaagaagtgcttccgcgccgggatgaagaaggaggccgtccagaacgagcgggaccgcatctccacccggcgcgaggagtacgaggacagctccctgcccagcatcaacgcgctcctgcaggccgaggtgctgtcccggcagatcaccagccccgtgtccggcatcaacggggacatccgcgccaagaagatcgccagcatcgccgacgtctgcgagtccatgaaggagcagctcctggtgctggtggagtgggcgaagtacatcccggccttctgcgagctccccctggacgaccaggtcgccctgctccgggcccacgccggcgagcacctcctgctgggggcgaccaagcgcagcatggtgttcaaggacgtgctgctgctcggcaacgactacatcgtcccccggcactgccccgagctggccgagatgagccgcgtgtccatccggatcctggacgagctcgtgctgccgttccaggagctgcagatcgacgacaacgagtacgcctacctcaaggccatcatcttcttcgaccccgacgccaagggcctgagcgaccccgggaagatcaagcgcctgcgctcccaggtccaggtgagcctcgaggactacatcaacgaccggcagtacgactcccgcggccggttcggggagctgctgctcctgctgcccacgctccagagcatcacctggcagatgatcgagcagatccagttcatcaagctgttcggcatggcgaagatcgacaacctgctccaggagatgctgctgggcgggtccccgagcgacgcgccccacgcccaccaccccctccacccccacctgatgcaggagcacatgggcaccaacgtgatcgtcgccaacaccatgccgacgcacctgtccaacgggcagatgtgcgagtggccccgcccccggggccaggccgccacccccgagaccccgcagcccagcccgcccgggggctccggcagcgagccctacaagctgctccccggggccgtggccaccatcgtgaagcccctgtccgccatcccccagccgacgatcaccaagcaggaggtcatctgaggactagttataagactgactagcccgatgggcctcccaacgggccctcctcccctccttgcaccgagattaataaaaaaaaaaaaaaaaaaaaaaaaaaaaaaaaaaaaaaaaaaaaaaaaaaaaaaaaaaaaaaaatgcatcccccccccccccccccccccccccccccccaaaggctcttttcagagccaccagaatt

SEQ ID NO: 1632 - RNA, 1642 nt, synthetic construct
  misc_feature 1..1642: note = mRNA i-3 (A64-N5-C30-hSL-N5) (opt1) from Homo sapiens__NP_000448.3__HNF4A(1-474)(S143A)
  source 1..1642: mol_type = other RNA
aggagaaagcttaccatgcgcctgagcaagaccctcgtggacatggacatggccgactactccgccgcgctggaccccgcctacaccacgctggagttcgagaacgtccaggtgctcaccatgggcaacgacaccagcccgtccgaggggaccaacctgaacgcccccaacagcctgggcgtgtccgccctctgcgccatctgcggggaccgggcgacgggcaagcactacggggccagctcctgcgacggctgcaagggcttcttccgccggagcgtccgcaagaaccacatgtactcctgccggttcagccgccagtgcgtggtggacaaggacaagcggaaccagtgccgctactgccggctgaagaagtgcttccgcgccgggatgaagaaggaggccgtccagaacgagcgggaccgcatctccacccggcgcagcgcgtacgaggactccagcctgccctccatcaacgccctcctgcaggccgaggtgctgagccggcagatcacctcccccgtgagcggcatcaacggggacatccgcgccaagaagatcgcctccatcgcggacgtctgcgagagcatgaaggagcagctcctggtgctggtggagtgggccaagtacatcccggccttctgcgagctccccctggacgaccaggtcgccctgctccgggcccacgcgggcgagcacctcctgctgggggccaccaagcgcagcatggtgttcaaggacgtgctgctgctcggcaacgactacatcgtcccccggcactgccccgagctggccgagatgtcccgcgtgagcatccggatcctggacgagctcgtgctgccgttccaggagctgcagatcgacgacaacgagtacgcctacctcaaggccatcatcttcttcgaccccgacgcgaagggcctgtccgaccccgggaagatcaagcgcctgcgcagccaggtccaggtgtccctcgaggactacatcaacgaccggcagtacgacagccgcggccggttcggggagctgctgctcctgctgcccacgctccagtccatcacctggcagatgatcgagcagatccagttcatcaagctgttcggcatggccaagatcgacaacctgctccaggagatgctgctgggcgggagcccgtccgacgcgccccacgcccaccaccccctccacccccacctgatgcaggagcacatgggcaccaacgtgatcgtcgccaacaccatgccgacgcacctgagcaacgggcagatgtgcgagtggccccgcccccggggccaggccgccacccccgagaccccgcagccctccccgcccgggggcagcggctccgagccctacaagctgctccccggggccgtggccaccatcgtgaagcccctgagcgcgatcccccagccgacgatcaccaagcaggaggtcatctgaggactagttataagactgactagcccgatgggcctcccaacgggccctcctcccctccttgcaccgagattaataaaaaaaaaaaaaaaaaaaaaaaaaaaaaaaaaaaaaaaaaaaaaaaaaaaaaaaaaaaaaaaatgcatcccccccccccccccccccccccccccccccaaaggctcttttcagagccaccagaatt

SEQ ID NO: 1633 - RNA, 1642 nt, synthetic construct
  misc_feature 1..1642: note = mRNA i-3 (A64-N5-C30-hSL-N5) (opt1) from Homo sapiens__NP_000448.3__HNF4A(1-474)(T166A)
  source 1..1642: mol_type = other RNA
aggagaaagcttaccatgcgcctgagcaagaccctcgtggacatggacatggccgactactccgccgcgctggaccccgcctacaccacgctggagttcgagaacgtccaggtgctcaccatgggcaacgacaccagcccgtccgaggggaccaacctgaacgcccccaacagcctgggcgtgtccgccctctgcgccatctgcggggaccgggcgacgggcaagcactacggggccagctcctgcgacggctgcaagggcttcttccgccggagcgtccgcaagaaccacatgtactcctgccggttcagccgccagtgcgtggtggacaaggacaagcggaaccagtgccgctactgccggctgaagaagtgcttccgcgccgggatgaagaaggaggccgtccagaacgagcgggaccgcatctccacccggcgcagctcctacgaggacagctccctgcccagcatcaacgcgctcctgcaggccgaggtgctgtcccggcagatcgccagccccgtgtccggcatcaacggggacatccgcgccaagaagatcgccagcatcgcggacgtctgcgagagcatgaaggagcagctcctggtgctggtggagtgggccaagtacatcccggccttctgcgagctccccctggacgaccaggtcgccctgctccgggcccacgcgggcgagcacctcctgctgggggccaccaagcgctccatggtgttcaaggacgtgctgctgctcggcaacgactacatcgtcccccggcactgccccgagctggccgagatgagccgcgtgtccatccggatcctggacgagctcgtgctgccgttccaggagctgcagatcgacgacaacgagtacgcctacctcaaggccatcatcttcttcgaccccgacgcgaagggcctgagcgaccccgggaagatcaagcgcctgcgctcccaggtccaggtgagcctcgaggactacatcaacgaccggcagtacgactcccgcggccggttcggggagctgctgctcctgctgcccaccctccagagcatcacgtggcagatgatcgagcagatccagttcatcaagctgttcggcatggccaagatcgacaacctgctccaggagatgctgctgggcgggtccccgagcgacgcgccccacgcccaccaccccctccacccccacctgatgcaggagcacatgggcaccaacgtgatcgtcgccaacaccatgccgacccacctgtccaacgggcagatgtgcgagtggccccgcccccggggccaggccgccacgcccgagaccccgcagcccagcccgcccgggggctccggcagcgagccctacaagctgctccccggggccgtggccaccatcgtgaagcccctgtccgcgatcccccagccgaccatcacgaagcaggaggtcatctgaggactagttataagactgactagcccgatgggcctcccaacgggccctcctcccctccttgcaccgagattaataaaaaaaaaaaaaaaaaaaaaaaaaaaaaaaaaaaaaaaaaaaaaaaaaaaaaaaaaaaaaaaatgcatcccccccccccccccccccccccccccccccaaaggctcttttcagagccaccagaatt

SEQ ID NO: 1634 - RNA, 1642 nt, synthetic construct
  misc_feature 1..1642: note = mRNA i-3 (A64-N5-C30-hSL-N5) (opt1) from Homo sapiens__NP_000448.3__HNF4A(1-474)(S167E)
  source 1..1642: mol_type = other RNA
aggagaaagcttaccatgcgcctgagcaagaccctcgtggacatggacatggccgactactccgccgcgctggaccccgcctacaccacgctggagttcgagaacgtccaggtgctcaccatgggcaacgacaccagcccgtccgaggggaccaacctgaacgcccccaacagcctgggcgtgtccgccctctgcgccatctgcggggaccgggcgacgggcaagcactacggggccagctcctgcgacggctgcaagggcttcttccgccggagcgtccgcaagaaccacatgtactcctgccggttcagccgccagtgcgtggtggacaaggacaagcggaaccagtgccgctactgccggctgaagaagtgcttccgcgccgggatgaagaaggaggccgtccagaacgagcgggaccgcatctccacccggcgcagctcctacgaggacagctccctgcccagcatcaacgcgctcctgcaggccgaggtgctgtcccggcagatcaccgagcccgtgagcggcatcaacggggacatccgcgccaagaagatcgcctccatcgccgacgtctgcgagagcatgaaggagcagctcctggtgctggtggagtgggcgaagtacatcccggccttctgcgagctccccctggacgaccaggtcgccctgctccgggcccacgccggcgagcacctcctgctgggggcgaccaagcgcagcatggtgttcaaggacgtgctgctgctcggcaacgactacatcgtcccccggcactgccccgagctggccgagatgtcccgcgtgagcatccggatcctggacgagctcgtgctgccgttccaggagctgcagatcgacgacaacgagtacgcctacctcaaggccatcatcttcttcgaccccgacgccaagggcctgtccgaccccgggaagatcaagcgcctgcgcagccaggtccaggtgtccctcgaggactacatcaacgaccggcagtacgacagccgcggccggttcggggagctgctgctcctgctgcccacgctccagtccatcacctggcagatgatcgagcagatccagttcatcaagctgttcggcatggcgaagatcgacaacctgctccaggagatgctgctgggcgggagcccgtccgacgcgccccacgcccaccaccccctccacccccacctgatgcaggagcacatgggcaccaacgtgatcgtcgccaacaccatgccgacgcacctgagcaacgggcagatgtgcgagtggccccgcccccggggccaggccgccacccccgagaccccgcagccctccccgcccgggggcagcggctccgagccctacaagctgctccccggggccgtggccaccatcgtgaagcccctgagcgccatcccccagccgacgatcaccaagcaggaggtcatctgaggactagttataagactgactagcccgatgggcctcccaacgggccctcctcccctccttgcaccgagattaataaaaaaaaaaaaaaaaaaaaaaaaaaaaaaaaaaaaaaaaaaaaaaaaaaaaaaaaaaaaaaaatgcatcccccccccccccccccccccccccccccccaaaggctcttttcagagccaccagaatt

SEQ ID NO: 1635 - RNA, 1642 nt, synthetic construct
  misc_feature 1..1642: note = mRNA i-3 (A64-N5-C30-hSL-N5) (opt1) from Homo sapiens__NP_000448.3__HNF4A(1-474)(S167A)
  source 1..1642: mol_type = other RNA
aggagaaagcttaccatgcgcctgagcaagaccctcgtggacatggacatggccgactactccgccgcgctggaccccgcctacaccacgctggagttcgagaacgtccaggtgctcaccatgggcaacgacaccagcccgtccgaggggaccaacctgaacgcccccaacagcctgggcgtgtccgccctctgcgccatctgcggggaccgggcgacgggcaagcactacggggccagctcctgcgacggctgcaagggcttcttccgccggagcgtccgcaagaaccacatgtactcctgccggttcagccgccagtgcgtggtggacaaggacaagcggaaccagtgccgctactgccggctgaagaagtgcttccgcgccgggatgaagaaggaggccgtccagaacgagcgggaccgcatctccacccggcgcagctcctacgaggacagctccctgcccagcatcaacgcgctcctgcaggccgaggtgctgtcccggcagatcaccgcccccgtgagcggcatcaacggggacatccgcgccaagaagatcgcctccatcgcggacgtctgcgagagcatgaaggagcagctcctggtgctggtggagtgggccaagtacatcccggccttctgcgagctccccctggacgaccaggtcgccctgctccgggcccacgcgggcgagcacctcctgctgggggccaccaagcgcagcatggtgttcaaggacgtgctgctgctcggcaacgactacatcgtcccccggcactgccccgagctggccgagatgtcccgcgtgagcatccggatcctggacgagctcgtgctgccgttccaggagctgcagatcgacgacaacgagtacgcctacctcaaggccatcatcttcttcgaccccgacgcgaagggcctgtccgaccccgggaagatcaagcgcctgcgcagccaggtccaggtgtccctcgaggactacatcaacgaccggcagtacgacagccgcggccggttcggggagctgctgctcctgctgcccacgctccagtccatcacctggcagatgatcgagcagatccagttcatcaagctgttcggcatggccaagatcgacaacctgctccaggagatgctgctgggcgggagcccgtccgacgcgccccacgcccaccaccccctccacccccacctgatgcaggagcacatgggcaccaacgtgatcgtcgccaacaccatgccgacgcacctgagcaacgggcagatgtgcgagtggccccgcccccggggccaggccgccacccccgagaccccgcagccctccccgcccgggggcagcggctccgagccctacaagctgctccccggggccgtggccaccatcgtgaagcccctgagcgcgatcccccagccgacgatcaccaagcaggaggtcatctgaggactagttataagactgactagcccgatgggcctcccaacgggccctcctcccctccttgcaccgagattaataaaaaaaaaaaaaaaaaaaaaaaaaaaaaaaaaaaaaaaaaaaaaaaaaaaaaaaaaaaaaaaatgcatcccccccccccccccccccccccccccccccaaaggctcttttcagagccaccagaatt

SEQ ID NO: 1636 - RNA, 1642 nt, synthetic construct
  misc_feature 1..1642: note = mRNA i-3 (A64-N5-C30-hSL-N5) (opt1) from Homo sapiens__NP_000448.3__HNF4A(1-474)(S167A_S378A_T429A_T432A_ S436A)
  source 1..1642: mol_type = other RNA
aggagaaagcttaccatgcgcctgagcaagaccctcgtggacatggacatggccgactactccgccgcgctggaccccgcctacaccacgctggagttcgagaacgtccaggtgctcaccatgggcaacgacaccagcccgtccgaggggaccaacctgaacgcccccaacagcctgggcgtgtccgccctctgcgccatctgcggggaccgggcgacgggcaagcactacggggccagctcctgcgacggctgcaagggcttcttccgccggagcgtccgcaagaaccacatgtactcctgccggttcagccgccagtgcgtggtggacaaggacaagcggaaccagtgccgctactgccggctgaagaagtgcttccgcgccgggatgaagaaggaggccgtccagaacgagcgggaccgcatctccacccggcgcagctcctacgaggacagctccctgcccagcatcaacgcgctcctgcaggccgaggtgctgtcccggcagatcaccgcccccgtgagcggcatcaacggggacatccgcgccaagaagatcgcctccatcgcggacgtctgcgagagcatgaaggagcagctcctggtgctggtggagtgggccaagtacatcccggccttctgcgagctccccctggacgaccaggtcgccctgctccgggcccacgcgggcgagcacctcctgctgggggccaccaagcgcagcatggtgttcaaggacgtgctgctgctcggcaacgactacatcgtcccccggcactgccccgagctggccgagatgtcccgcgtgagcatccggatcctggacgagctcgtgctgccgttccaggagctgcagatcgacgacaacgagtacgcctacctcaaggccatcatcttcttcgaccccgacgcgaagggcctgtccgaccccgggaagatcaagcgcctgcgcagccaggtccaggtgtccctcgaggactacatcaacgaccggcagtacgacagccgcggccggttcggggagctgctgctcctgctgcccacgctccagtccatcacctggcagatgatcgagcagatccagttcatcaagctgttcggcatggccaagatcgacaacctgctccaggagatgctgctgggcggggccccgagcgacgcgccccacgcccaccaccccctccacccccacctgatgcaggagcacatgggcaccaacgtgatcgtcgccaacaccatgccgacgcacctgtccaacgggcagatgtgcgagtggccccgcccccggggccaggccgccgcccccgaggcgccgcagcccgccccgcccgggggcagcggctccgagccctacaagctgctccccggggccgtggccaccatcgtgaagcccctgagcgccatcccccagccgaccatcaccaagcaggaggtcatctgaggactagttataagactgactagcccgatgggcctcccaacgggccctcctcccctccttgcaccgagattaataaaaaaaaaaaaaaaaaaaaaaaaaaaaaaaaaaaaaaaaaaaaaaaaaaaaaaaaaaaaaaaatgcatcccccccccccccccccccccccccccccccaaaggctcttttcagagccaccagaatt

SEQ ID NO: 1637 - RNA, 1642 nt, synthetic construct
  misc_feature 1..1642: note = mRNA i-3 (A64-N5-C30-hSL-N5) (opt1) from Homo sapiens__NP_000448.3__HNF4A(1-474)(S167E_S378E_T429E_T432E_ S436E)
  source 1..1642: mol_type = other RNA
aggagaaagcttaccatgcgcctgagcaagaccctcgtggacatggacatggccgactactccgccgcgctggaccccgcctacaccacgctggagttcgagaacgtccaggtgctcaccatgggcaacgacaccagcccgtccgaggggaccaacctgaacgcccccaacagcctgggcgtgtccgccctctgcgccatctgcggggaccgggcgacgggcaagcactacggggccagctcctgcgacggctgcaagggcttcttccgccggagcgtccgcaagaaccacatgtactcctgccggttcagccgccagtgcgtggtggacaaggacaagcggaaccagtgccgctactgccggctgaagaagtgcttccgcgccgggatgaagaaggaggccgtccagaacgagcgggaccgcatctccacccggcgcagctcctacgaggacagctccctgcccagcatcaacgcgctcctgcaggccgaggtgctgtcccggcagatcaccgagcccgtgagcggcatcaacggggacatccgcgccaagaagatcgcctccatcgccgacgtctgcgagagcatgaaggagcagctcctggtgctggtggagtgggcgaagtacatcccggccttctgcgagctccccctggacgaccaggtcgccctgctccgggcccacgccggcgagcacctcctgctgggggcgaccaagcgcagcatggtgttcaaggacgtgctgctgctcggcaacgactacatcgtcccccggcactgccccgagctggccgagatgtcccgcgtgagcatccggatcctggacgagctcgtgctgccgttccaggagctgcagatcgacgacaacgagtacgcctacctcaaggccatcatcttcttcgaccccgacgccaagggcctgtccgaccccgggaagatcaagcgcctgcgcagccaggtccaggtgtccctcgaggactacatcaacgaccggcagtacgacagccgcggccggttcggggagctgctgctcctgctgcccacgctccagtccatcacctggcagatgatcgagcagatccagttcatcaagctgttcggcatggcgaagatcgacaacctgctccaggagatgctgctgggcggggagccgagcgacgcgccccacgcccaccaccccctccacccccacctgatgcaggagcacatgggcaccaacgtgatcgtcgccaacaccatgccgacgcacctgtccaacgggcagatgtgcgagtggccccgcccccggggccaggccgccgagcccgaggagccgcagcccgagccgcccgggggcagcggctccgagccctacaagctgctccccggggccgtggccaccatcgtgaagcccctgagcgccatcccccagccgaccatcaccaagcaggaggtcatctgaggactagttataagactgactagcccgatgggcctcccaacgggccctcctcccctccttgcaccgagattaataaaaaaaaaaaaaaaaaaaaaaaaaaaaaaaaaaaaaaaaaaaaaaaaaaaaaaaaaaaaaaaatgcatcccccccccccccccccccccccccccccccaaaggctcttttcagagccaccagaatt

SEQ ID NO: 1638 - RNA, 1642 nt, synthetic construct
  misc_feature 1..1642: note = mRNA i-3 (A64-N5-C30-hSL-N5) (opt1) from Homo sapiens__NP_000448.3__HNF4A(1-474)(S87A)
  source 1..1642: mol_type = other RNA
aggagaaagcttaccatgcgcctgagcaagaccctcgtggacatggacatggccgactactccgccgcgctggaccccgcctacaccacgctggagttcgagaacgtccaggtgctcaccatgggcaacgacaccagcccgtccgaggggaccaacctgaacgcccccaacagcctgggcgtgtccgccctctgcgccatctgcggggaccgggcgacgggcaagcactacggggccagctcctgcgacggctgcaagggcttcttccgccgggccgtccgcaagaaccacatgtacagctgccggttctcccgccagtgcgtggtggacaaggacaagcggaaccagtgccgctactgccggctgaagaagtgcttccgcgccgggatgaagaaggaggcggtccagaacgagcgggaccgcatcagcacccggcgctccagctacgaggactccagcctgccctccatcaacgccctcctgcaggccgaggtgctgagccggcagatcacctcccccgtgagcggcatcaacggggacatccgcgccaagaagatcgcctccatcgcggacgtctgcgagagcatgaaggagcagctcctggtgctggtggagtgggccaagtacatcccggccttctgcgagctccccctggacgaccaggtcgccctgctccgggcccacgcgggcgagcacctcctgctgggggccaccaagcgcagcatggtgttcaaggacgtgctgctgctcggcaacgactacatcgtcccccggcactgccccgagctggccgagatgtcccgcgtgagcatccggatcctggacgagctcgtgctgccgttccaggagctgcagatcgacgacaacgagtacgcctacctcaaggccatcatcttcttcgaccccgacgcgaagggcctgtccgaccccgggaagatcaagcgcctgcgcagccaggtccaggtgtccctcgaggactacatcaacgaccggcagtacgacagccgcggccggttcggggagctgctgctcctgctgcccacgctccagtccatcacctggcagatgatcgagcagatccagttcatcaagctgttcggcatggccaagatcgacaacctgctccaggagatgctgctgggcgggagcccgtccgacgcgccccacgcccaccaccccctccacccccacctgatgcaggagcacatgggcaccaacgtgatcgtcgccaacaccatgccgacgcacctgagcaacgggcagatgtgcgagtggccccgcccccggggccaggccgccacccccgagaccccgcagccctccccgcccgggggcagcggctccgagccctacaagctgctccccggggccgtggccaccatcgtgaagcccctgagcgcgatcccccagccgacgatcaccaagcaggaggtcatctgaggactagttataagactgactagcccgatgggcctcccaacgggccctcctcccctccttgcaccgagattaataaaaaaaaaaaaaaaaaaaaaaaaaaaaaaaaaaaaaaaaaaaaaaaaaaaaaaaaaaaaaaaatgcatcccccccccccccccccccccccccccccccaaaggctcttttcagagccaccagaatt

SEQ ID NO: 1639 - RNA, 1642 nt, synthetic construct
  misc_feature 1..1642: note = mRNA i-3 (A64-N5-C30-hSL-N5) (opt1) from Homo sapiens__NP_000448.3__HNF4A(1-474)(S87E)
  source 1..1642: mol_type = other RNA
aggagaaagcttaccatgcgcctgagcaagaccctcgtggacatggacatggccgactactccgccgcgctggaccccgcctacaccacgctggagttcgagaacgtccaggtgctcaccatgggcaacgacaccagcccgtccgaggggaccaacctgaacgcccccaacagcctgggcgtgtccgccctctgcgccatctgcggggaccgggcgacgggcaagcactacggggccagctcctgcgacggctgcaagggcttcttccgccgggaggtccgcaagaaccacatgtacagctgccggttctcccgccagtgcgtggtggacaaggacaagcggaaccagtgccgctactgccggctgaagaagtgcttccgcgccgggatgaagaaggaggccgtccagaacgagcgggaccgcatcagcacccggcgctccagctacgaggactccagcctgccctccatcaacgcgctcctgcaggccgaggtgctgagccggcagatcacctcccccgtgagcggcatcaacggggacatccgcgccaagaagatcgcctccatcgccgacgtctgcgagagcatgaaggagcagctcctggtgctggtggagtgggcgaagtacatcccggccttctgcgagctccccctggacgaccaggtcgccctgctccgggcccacgccggcgagcacctcctgctgggggcgaccaagcgcagcatggtgttcaaggacgtgctgctgctcggcaacgactacatcgtcccccggcactgccccgagctggccgagatgtcccgcgtgagcatccggatcctggacgagctcgtgctgccgttccaggagctgcagatcgacgacaacgagtacgcctacctcaaggccatcatcttcttcgaccccgacgccaagggcctgtccgaccccgggaagatcaagcgcctgcgcagccaggtccaggtgtccctcgaggactacatcaacgaccggcagtacgacagccgcggccggttcggggagctgctgctcctgctgcccacgctccagtccatcacctggcagatgatcgagcagatccagttcatcaagctgttcggcatggcgaagatcgacaacctgctccaggagatgctgctgggcgggagcccgtccgacgcgccccacgcccaccaccccctccacccccacctgatgcaggagcacatgggcaccaacgtgatcgtcgccaacaccatgccgacgcacctgagcaacgggcagatgtgcgagtggccccgcccccggggccaggccgccacccccgagaccccgcagccctccccgcccgggggcagcggctccgagccctacaagctgctccccggggccgtggccaccatcgtgaagcccctgagcgccatcccccagccgacgatcaccaagcaggaggtcatctgaggactagttataagactgactagcccgatgggcctcccaacgggccctcctcccctccttgcaccgagattaataaaaaaaaaaaaaaaaaaaaaaaaaaaaaaaaaaaaaaaaaaaaaaaaaaaaaaaaaaaaaaaatgcatcccccccccccccccccccccccccccccccaaaggctcttttcagagccaccagaatt

SEQ ID NO: 1640 - RNA, 1642 nt, synthetic construct
  misc_feature 1..1642: note = mRNA i-3 (A64-N5-C30-hSL-N5) (opt1) from Homo sapiens__NP_000448.3__HNF4A(1-474)(R2V)
  source 1..1642: mol_type = other RNA
aggagaaagcttaccatggtgctgagcaagaccctcgtcgacatggacatggccgactactccgccgcgctggaccccgcctacaccacgctggagttcgagaacgtccaggtgctcaccatgggcaacgacaccagcccgtccgaggggaccaacctgaacgcccccaacagcctgggcgtgtccgccctctgcgccatctgcggggaccgcgcgacgggcaagcactacggggccagctcctgcgacggctgcaagggcttcttccggcgcagcgtgcggaagaaccacatgtactcctgccgcttcagccggcagtgcgtggtcgacaaggacaagcgcaaccagtgccggtactgccgcctgaagaagtgcttccgggccgggatgaagaaggaggccgtgcagaacgagcgcgaccggatctccacccgccggagctcctacgaggacagctccctgcccagcatcaacgcgctcctgcaggccgaggtgctgtcccgccagatcaccagccccgtctccggcatcaacggggacatccgggccaagaagatcgccagcatcgccgacgtgtgcgagagcatgaaggagcagctcctggtgctggtcgagtgggcgaagtacatcccggccttctgcgagctccccctggacgaccaggtggccctgctccgcgcccacgccggcgagcacctcctgctgggggcgaccaagcggtccatggtgttcaaggacgtcctgctgctcggcaacgactacatcgtgccccgccactgccccgagctggccgagatgagccgggtgtccatccgcatcctggacgagctcgtcctgccgttccaggagctgcagatcgacgacaacgagtacgcctacctcaaggccatcatcttcttcgaccccgacgccaagggcctgagcgaccccgggaagatcaagcggctgcgctcccaggtccaggtgagcctcgaggactacatcaacgaccgccagtacgactcccggggccgcttcggggagctgctgctcctgctgcccacgctccagagcatcacctggcagatgatcgagcagatccagttcatcaagctgttcggcatggcgaagatcgacaacctgctccaggagatgctgctgggcgggtccccgagcgacgcgccccacgcccaccaccccctccacccccacctgatgcaggagcacatgggcaccaacgtgatcgtggccaacaccatgccgacgcacctgtccaacgggcagatgtgcgagtggccccggccccgcggccaggccgccacccccgagaccccgcagcccagcccgcccgggggctccggcagcgagccctacaagctgctccccggggccgtggccaccatcgtcaagcccctgtccgccatcccccagccgacgatcaccaagcaggaggtgatctgaggactagttataagactgactagcccgatgggcctcccaacgggccctcctcccctccttgcaccgagattaataaaaaaaaaaaaaaaaaaaaaaaaaaaaaaaaaaaaaaaaaaaaaaaaaaaaaaaaaaaaaaaatgcatcccccccccccccccccccccccccccccccaaaggctcttttcagagccaccagaatt

SEQ ID NO: 1641 - RNA, 1642 nt, synthetic construct
  misc_feature 1..1642: note = mRNA i-3 (A64-N5-C30-hSL-N5) (opt1) from Homo sapiens__NP_000448.3__HNF4A(1-474)(R2V_K5V)
  source 1..1642: mol_type = other RNA
aggagaaagcttaccatggtgctgagcgtcaccctcgtggacatggacatggccgactactccgccgcgctggaccccgcctacaccacgctggagttcgagaacgtgcaggtcctcaccatgggcaacgacaccagcccgtccgaggggaccaacctgaacgcccccaacagcctgggcgtgtccgccctctgcgccatctgcggggaccgcgcgacgggcaagcactacggggccagctcctgcgacggctgcaagggcttcttccggcgcagcgtgcggaagaaccacatgtactcctgccgcttcagccggcagtgcgtcgtggacaaggacaagcgcaaccagtgccggtactgccgcctgaagaagtgcttccgggccgggatgaagaaggaggccgtgcagaacgagcgcgaccggatctccacccgccggagctcctacgaggacagctccctgcccagcatcaacgcgctcctgcaggccgaggtcctgtcccgccagatcaccagccccgtgtccggcatcaacggggacatccgggccaagaagatcgccagcatcgccgacgtgtgcgagagcatgaaggagcagctcctggtcctggtggagtgggcgaagtacatcccggccttctgcgagctccccctggacgaccaggtggccctgctccgcgcccacgccggcgagcacctcctgctgggggcgaccaagcggtccatggtcttcaaggacgtgctgctgctcggcaacgactacatcgtgccccgccactgccccgagctggccgagatgagccgggtctccatccgcatcctggacgagctcgtgctgccgttccaggagctgcagatcgacgacaacgagtacgcctacctcaaggccatcatcttcttcgaccccgacgccaagggcctgagcgaccccgggaagatcaagcggctgcgctcccaggtgcaggtcagcctcgaggactacatcaacgaccgccagtacgactcccggggccgcttcggggagctgctgctcctgctgcccacgctccagagcatcacctggcagatgatcgagcagatccagttcatcaagctgttcggcatggcgaagatcgacaacctgctccaggagatgctgctgggcgggtccccgagcgacgcgccccacgcccaccaccccctccacccccacctgatgcaggagcacatgggcaccaacgtgatcgtggccaacaccatgccgacgcacctgtccaacgggcagatgtgcgagtggccccggccccgcggccaggccgccacccccgagaccccgcagcccagcccgcccgggggctccggcagcgagccctacaagctgctccccggggccgtcgccaccatcgtgaagcccctgtccgccatcccccagccgacgatcaccaagcaggaggtcatctgaggactagttataagactgactagcccgatgggcctcccaacgggccctcctcccctccttgcaccgagattaataaaaaaaaaaaaaaaaaaaaaaaaaaaaaaaaaaaaaaaaaaaaaaaaaaaaaaaaaaaaaaaatgcatcccccccccccccccccccccccccccccccaaaggctcttttcagagccaccagaatt

SEQ ID NO: 1642 - RNA, 1642 nt, synthetic construct
  misc_feature 1..1642: note = mRNA i-3 (A64-N5-C30-hSL-N5) (opt1) from Homo sapiens__NP_000448.3__HNF4A(1-474)(K179R_K180R)
  source 1..1642: mol_type = other RNA
aggagaaagcttaccatgcgcctgagcaagaccctcgtggacatggacatggccgactactccgccgcgctggaccccgcctacaccacgctggagttcgagaacgtccaggtgctcaccatgggcaacgacaccagcccgtccgaggggaccaacctgaacgcccccaacagcctgggcgtgtccgccctctgcgccatctgcggggaccgggcgacgggcaagcactacggggccagctcctgcgacggctgcaagggcttcttccgccggagcgtccgcaagaaccacatgtactcctgccggttcagccgccagtgcgtggtggacaaggacaagcggaaccagtgccgctactgccggctgaagaagtgcttccgcgccgggatgaagaaggaggccgtccagaacgagcgggaccgcatctccacccggcgcagctcctacgaggacagctccctgcccagcatcaacgcgctcctgcaggccgaggtgctgtcccggcagatcaccagccccgtgtccggcatcaacggggacatccgcgcccggcgcatcgccagcatcgccgacgtctgcgagagcatgaaggagcagctcctggtgctggtggagtgggcgaagtacatcccggccttctgcgagctccccctggacgaccaggtcgccctgctccgggcccacgccggcgagcacctcctgctgggggcgaccaagcgctccatggtgttcaaggacgtgctgctgctcggcaacgactacatcgtcccccggcactgccccgagctggccgagatgagccgcgtgtccatccgcatcctggacgagctcgtgctgccgttccaggagctgcagatcgacgacaacgagtacgcctacctcaaggccatcatcttcttcgaccccgacgccaagggcctgagcgaccccgggaagatcaagcggctgcgctcccaggtccaggtgagcctcgaggactacatcaacgaccggcagtacgactcccgcggccggttcggggagctgctgctcctgctgcccacgctccagagcatcacctggcagatgatcgagcagatccagttcatcaagctgttcggcatggcgaagatcgacaacctgctccaggagatgctgctgggcgggtccccgagcgacgcgccccacgcccaccaccccctccacccccacctgatgcaggagcacatgggcaccaacgtgatcgtcgccaacaccatgccgacgcacctgtccaacgggcagatgtgcgagtggccccgcccccggggccaggccgccacccccgagaccccgcagcccagcccgcccgggggctccggcagcgagccctacaagctgctccccggggccgtggccaccatcgtgaagcccctgtccgccatcccccagccgacgatcaccaagcaggaggtcatctgaggactagttataagactgactagcccgatgggcctcccaacgggccctcctcccctccttgcaccgagattaataaaaaaaaaaaaaaaaaaaaaaaaaaaaaaaaaaaaaaaaaaaaaaaaaaaaaaaaaaaaaaaatgcatcccccccccccccccccccccccccccccccaaaggctcttttcagagccaccagaatt

SEQ ID NO: 1643 - RNA, 1642 nt, synthetic construct
  misc_feature 1..1642: note = mRNA i-3 (A64-N5-C30-hSL-N5) (opt1) from Homo sapiens__NP_000448.3__HNF4A(1-474)(K234R)
  source 1..1642: mol_type = other RNA
aggagaaagcttaccatgcgcctgagcaagaccctcgtggacatggacatggccgactactccgccgcgctggaccccgcctacaccacgctggagttcgagaacgtccaggtgctcaccatgggcaacgacaccagcccgtccgaggggaccaacctgaacgcccccaacagcctgggcgtgtccgccctctgcgccatctgcggggaccgggcgacgggcaagcactacggggccagctcctgcgacggctgcaagggcttcttccgccggagcgtccgcaagaaccacatgtactcctgccggttcagccgccagtgcgtggtggacaaggacaagcggaaccagtgccgctactgccggctgaagaagtgcttccgcgccgggatgaagaaggaggccgtccagaacgagcgggaccgcatctccacccggcgcagctcctacgaggacagctccctgcccagcatcaacgcgctcctgcaggccgaggtgctgtcccggcagatcaccagccccgtgtccggcatcaacggggacatccgcgccaagaagatcgccagcatcgccgacgtctgcgagagcatgaaggagcagctcctggtgctggtggagtgggcgaagtacatcccggccttctgcgagctccccctggacgaccaggtcgccctgctccgggcccacgccggcgagcacctcctgctgggggcgacccgccggtccatggtgttcaaggacgtgctgctgctcggcaacgactacatcgtcccccgccactgccccgagctggccgagatgagccgggtgtccatccgcatcctggacgagctcgtgctgccgttccaggagctgcagatcgacgacaacgagtacgcctacctcaaggccatcatcttcttcgaccccgacgccaagggcctgagcgaccccgggaagatcaagcgcctgcggtcccaggtccaggtgagcctcgaggactacatcaacgaccgccagtacgactcccggggccgcttcggggagctgctgctcctgctgcccacgctccagagcatcacctggcagatgatcgagcagatccagttcatcaagctgttcggcatggcgaagatcgacaacctgctccaggagatgctgctgggcgggtccccgagcgacgcgccccacgcccaccaccccctccacccccacctgatgcaggagcacatgggcaccaacgtgatcgtcgccaacaccatgccgacgcacctgtccaacgggcagatgtgcgagtggccccggccccgcggccaggccgccacccccgagaccccgcagcccagcccgcccgggggctccggcagcgagccctacaagctgctccccggggccgtggccaccatcgtgaagcccctgtccgccatcccccagccgacgatcaccaagcaggaggtcatctgaggactagttataagactgactagcccgatgggcctcccaacgggccctcctcccctccttgcaccgagattaataaaaaaaaaaaaaaaaaaaaaaaaaaaaaaaaaaaaaaaaaaaaaaaaaaaaaaaaaaaaaaaatgcatcccccccccccccccccccccccccccccccaaaggctcttttcagagccaccagaatt

SEQ ID NO: 1644 - RNA, 1642 nt, synthetic construct
  misc_feature 1..1642: note = mRNA i-3 (A64-N5-C30-hSL-N5) (opt1) from Homo sapiens__NP_000448.3__HNF4A(1-474)(K300R)
  source 1..1642: mol_type = other RNA
aggagaaagcttaccatgcgcctgagcaagaccctcgtggacatggacatggccgactactccgccgcgctggaccccgcctacaccacgctggagttcgagaacgtccaggtgctcaccatgggcaacgacaccagcccgtccgaggggaccaacctgaacgcccccaacagcctgggcgtgtccgccctctgcgccatctgcggggaccgggcgacgggcaagcactacggggccagctcctgcgacggctgcaagggcttcttccgccggagcgtccgcaagaaccacatgtactcctgccggttcagccgccagtgcgtggtggacaaggacaagcggaaccagtgccgctactgccggctgaagaagtgcttccgcgccgggatgaagaaggaggccgtccagaacgagcgggaccgcatctccacccggcgcagctcctacgaggacagctccctgcccagcatcaacgcgctcctgcaggccgaggtgctgtcccggcagatcaccagccccgtgtccggcatcaacggggacatccgcgccaagaagatcgccagcatcgccgacgtctgcgagagcatgaaggagcagctcctggtgctggtggagtgggcgaagtacatcccggccttctgcgagctccccctggacgaccaggtcgccctgctccgggcccacgccggcgagcacctcctgctgggggcgaccaagcgctccatggtgttcaaggacgtgctgctgctcggcaacgactacatcgtcccccggcactgccccgagctggccgagatgagccgcgtgtccatccggatcctggacgagctcgtgctgccgttccaggagctgcagatcgacgacaacgagtacgcctacctcaaggccatcatcttcttcgaccccgacgcccgcggcctgagcgaccccgggaagatcaagcgcctgcggtcccaggtccaggtgagcctcgaggactacatcaacgaccgccagtacgactcccggggccgcttcggggagctgctgctcctgctgcccacgctccagagcatcacctggcagatgatcgagcagatccagttcatcaagctgttcggcatggcgaagatcgacaacctgctccaggagatgctgctgggcgggtccccgagcgacgcgccccacgcccaccaccccctccacccccacctgatgcaggagcacatgggcaccaacgtgatcgtcgccaacaccatgccgacgcacctgtccaacgggcagatgtgcgagtggccccggccccgcggccaggccgccacccccgagaccccgcagcccagcccgcccgggggctccggcagcgagccctacaagctgctccccggggccgtggccaccatcgtgaagcccctgtccgccatcccccagccgacgatcaccaagcaggaggtcatctgaggactagttataagactgactagcccgatgggcctcccaacgggccctcctcccctccttgcaccgagattaataaaaaaaaaaaaaaaaaaaaaaaaaaaaaaaaaaaaaaaaaaaaaaaaaaaaaaaaaaaaaaaatgcatcccccccccccccccccccccccccccccccaaaggctcttttcagagccaccagaatt

SEQ ID NO: 1645 - RNA, 1642 nt, synthetic construct
  misc_feature 1..1642: note = mRNA i-3 (A64-N5-C30-hSL-N5) (opt1) from Homo sapiens__NP_000448.3__HNF4A(1-474)(K300R_K307R_K309R)
  source 1..1642: mol_type = other RNA
aggagaaagcttaccatgcgcctgagcaagaccctcgtggacatggacatggccgactactccgccgcgctggaccccgcctacaccacgctggagttcgagaacgtccaggtgctcaccatgggcaacgacaccagcccgtccgaggggaccaacctgaacgcccccaacagcctgggcgtgtccgccctctgcgccatctgcggggaccgggcgacgggcaagcactacggggccagctcctgcgacggctgcaagggcttcttccgccggagcgtccgcaagaaccacatgtactcctgccggttcagccgccagtgcgtggtggacaaggacaagcggaaccagtgccgctactgccggctgaagaagtgcttccgcgccgggatgaagaaggaggccgtccagaacgagcgggaccgcatctccacccggcgcagctcctacgaggacagctccctgcccagcatcaacgcgctcctgcaggccgaggtgctgtcccggcagatcaccagccccgtgtccggcatcaacggggacatccgcgccaagaagatcgccagcatcgccgacgtctgcgagagcatgaaggagcagctcctggtgctggtggagtgggcgaagtacatcccggccttctgcgagctccccctggacgaccaggtcgccctgctccgggcccacgccggcgagcacctcctgctgggggcgaccaagcgctccatggtgttcaaggacgtgctgctgctcggcaacgactacatcgtcccccggcactgccccgagctggccgagatgagccgcgtgtccatccggatcctggacgagctcgtgctgccgttccaggagctgcagatcgacgacaacgagtacgcctacctcaaggccatcatcttcttcgaccccgacgcccgcggcctgagcgaccccgggcgcatccggcgcctgcggtcccaggtccaggtgagcctcgaggactacatcaacgaccgccagtacgactcccggggccgcttcggggagctgctgctcctgctgcccacgctccagagcatcacctggcagatgatcgagcagatccagttcatcaagctgttcggcatggcgaagatcgacaacctgctccaggagatgctgctgggcgggtccccgagcgacgcgccccacgcccaccaccccctccacccccacctgatgcaggagcacatgggcaccaacgtgatcgtcgccaacaccatgccgacgcacctgtccaacgggcagatgtgcgagtggccccggccccgcggccaggccgccacccccgagaccccgcagcccagcccgcccgggggctccggcagcgagccctacaagctgctccccggggccgtggccaccatcgtgaagcccctgtccgccatcccccagccgacgatcaccaagcaggaggtcatctgaggactagttataagactgactagcccgatgggcctcccaacgggccctcctcccctccttgcaccgagattaataaaaaaaaaaaaaaaaaaaaaaaaaaaaaaaaaaaaaaaaaaaaaaaaaaaaaaaaaaaaaaaatgcatcccccccccccccccccccccccccccccccaaaggctcttttcagagccaccagaatt

SEQ ID NO: 1646 - RNA, 1642 nt, synthetic construct
  misc_feature 1..1642: note = mRNA i-3 (A64-N5-C30-hSL-N5) (opt1) from Homo sapiens__NP_000448.3__HNF4A(1-474)(K447R_K470R)
  source 1..1642: mol_type = other RNA
aggagaaagcttaccatgcgcctgagcaagaccctcgtggacatggacatggccgactactccgccgcgctggaccccgcctacaccacgctggagttcgagaacgtccaggtgctcaccatgggcaacgacaccagcccgtccgaggggaccaacctgaacgcccccaacagcctgggcgtgtccgccctctgcgccatctgcggggaccgggcgacgggcaagcactacggggccagctcctgcgacggctgcaagggcttcttccgccggagcgtccgcaagaaccacatgtactcctgccggttcagccgccagtgcgtggtggacaaggacaagcggaaccagtgccgctactgccggctgaagaagtgcttccgcgccgggatgaagaaggaggccgtccagaacgagcgggaccgcatctccacccggcgcagctcctacgaggacagctccctgcccagcatcaacgcgctcctgcaggccgaggtgctgtcccggcagatcaccagccccgtgtccggcatcaacggggacatccgcgccaagaagatcgccagcatcgccgacgtctgcgagagcatgaaggagcagctcctggtgctggtggagtgggcgaagtacatcccggccttctgcgagctccccctggacgaccaggtcgccctgctccgggcccacgccggcgagcacctcctgctgggggcgaccaagcgctccatggtgttcaaggacgtgctgctgctcggcaacgactacatcgtcccccggcactgccccgagctggccgagatgagccgcgtgtccatccggatcctggacgagctcgtgctgccgttccaggagctgcagatcgacgacaacgagtacgcctacctcaaggccatcatcttcttcgaccccgacgccaagggcctgagcgaccccgggaagatcaagcgcctgcgctcccaggtccaggtgagcctcgaggactacatcaacgaccggcagtacgactcccgcggccggttcggggagctgctgctcctgctgcccacgctccagagcatcacctggcagatgatcgagcagatccagttcatcaagctgttcggcatggcgaagatcgacaacctgctccaggagatgctgctgggcgggtccccgagcgacgcgccccacgcccaccaccccctccacccccacctgatgcaggagcacatgggcaccaacgtgatcgtcgccaacaccatgccgacgcacctgtccaacgggcagatgtgcgagtggccccgcccccggggccaggccgccacccccgagaccccgcagcccagcccgcccgggggctccggcagcgagccctaccgcctgctccccggggccgtggccaccatcgtgaagcccctgtccgccatcccccagccgacgatcacccggcaggaggtcatctgaggactagttataagactgactagcccgatgggcctcccaacgggccctcctcccctccttgcaccgagattaataaaaaaaaaaaaaaaaaaaaaaaaaaaaaaaaaaaaaaaaaaaaaaaaaaaaaaaaaaaaaaaatgcatcccccccccccccccccccccccccccccccaaaggctcttttcagagccaccagaatt

SEQ ID NO: 1647 - RNA, 1642 nt, synthetic construct
  misc_feature 1..1642: note = mRNA i-3 (A64-N5-C30-hSL-N5) (opt1) from Homo sapiens__NP_000448.3__HNF4A(1-474)(K458R)
  source 1..1642: mol_type = other RNA
aggagaaagcttaccatgcgcctgagcaagaccctcgtggacatggacatggccgactactccgccgcgctggaccccgcctacaccacgctggagttcgagaacgtccaggtgctcaccatgggcaacgacaccagcccgtccgaggggaccaacctgaacgcccccaacagcctgggcgtgtccgccctctgcgccatctgcggggaccgggcgacgggcaagcactacggggccagctcctgcgacggctgcaagggcttcttccgccggagcgtccgcaagaaccacatgtactcctgccggttcagccgccagtgcgtggtggacaaggacaagcggaaccagtgccgctactgccggctgaagaagtgcttccgcgccgggatgaagaaggaggccgtccagaacgagcgggaccgcatctccacccggcgcagctcctacgaggacagctccctgcccagcatcaacgcgctcctgcaggccgaggtgctgtcccggcagatcaccagccccgtgtccggcatcaacggggacatccgcgccaagaagatcgccagcatcgccgacgtctgcgagagcatgaaggagcagctcctggtgctggtggagtgggcgaagtacatcccggccttctgcgagctccccctggacgaccaggtcgccctgctccgggcccacgccggcgagcacctcctgctgggggcgaccaagcgctccatggtgttcaaggacgtgctgctgctcggcaacgactacatcgtcccccggcactgccccgagctggccgagatgagccgcgtgtccatccggatcctggacgagctcgtgctgccgttccaggagctgcagatcgacgacaacgagtacgcctacctcaaggccatcatcttcttcgaccccgacgccaagggcctgagcgaccccgggaagatcaagcgcctgcgctcccaggtccaggtgagcctcgaggactacatcaacgaccggcagtacgactcccgcggccggttcggggagctgctgctcctgctgcccacgctccagagcatcacctggcagatgatcgagcagatccagttcatcaagctgttcggcatggcgaagatcgacaacctgctccaggagatgctgctgggcgggtccccgagcgacgcgccccacgcccaccaccccctccacccccacctgatgcaggagcacatgggcaccaacgtgatcgtcgccaacaccatgccgacgcacctgtccaacgggcagatgtgcgagtggccccgcccccggggccaggccgccacccccgagaccccgcagcccagcccgcccgggggctccggcagcgagccctacaagctgctccccggggccgtggccaccatcgtgcgccccctgtccgccatcccccagccgacgatcaccaagcaggaggtcatctgaggactagttataagactgactagcccgatgggcctcccaacgggccctcctcccctccttgcaccgagattaataaaaaaaaaaaaaaaaaaaaaaaaaaaaaaaaaaaaaaaaaaaaaaaaaaaaaaaaaaaaaaaatgcatcccccccccccccccccccccccccccccccaaaggctcttttcagagccaccagaatt

SEQ ID NO: 1648 - RNA, 1642 nt, synthetic construct
  misc_feature 1..1642: note = mRNA i-3 (A64-N5-C30-hSL-N5) (opt1) from Homo sapiens__NP_000448.3__HNF4A(1-474)(K106R_K108R_K126R_K127R)
  source 1..1642: mol_type = other RNA
aggagaaagcttaccatgcgcctgagcaagaccctcgtggacatggacatggccgactactccgccgcgctggaccccgcctacaccacgctggagttcgagaacgtccaggtgctcaccatgggcaacgacaccagcccgtccgaggggaccaacctgaacgcccccaacagcctgggcgtgtccgccctctgcgccatctgcggggaccgggcgacgggcaagcactacggggccagctcctgcgacggctgcaagggcttcttccgccggagcgtccgcaagaaccacatgtactcctgccggttcagccgccagtgcgtggtggaccgggaccgccggaaccagtgccgctactgccggctgaagaagtgcttccgcgccgggatgcggcgcgaggccgtccagaacgagcgggaccgcatctccacccggcgcagctcctacgaggacagctccctgcccagcatcaacgcgctcctgcaggccgaggtgctgtcccggcagatcaccagccccgtgtccggcatcaacggggacatccgcgccaagaagatcgccagcatcgccgacgtctgcgagagcatgaaggagcagctcctggtgctggtggagtgggcgaagtacatcccggccttctgcgagctccccctggacgaccaggtcgccctgctccgggcccacgccggcgagcacctcctgctgggggcgaccaagcgctccatggtgttcaaggacgtgctgctgctcggcaacgactacatcgtcccccgccactgccccgagctggccgagatgagccgggtgtccatccgcatcctggacgagctcgtgctgccgttccaggagctgcagatcgacgacaacgagtacgcctacctcaaggccatcatcttcttcgaccccgacgccaagggcctgagcgaccccgggaagatcaagcggctgcgctcccaggtccaggtgagcctcgaggactacatcaacgaccggcagtacgactcccgcggccggttcggggagctgctgctcctgctgcccacgctccagagcatcacctggcagatgatcgagcagatccagttcatcaagctgttcggcatggcgaagatcgacaacctgctccaggagatgctgctgggcgggtccccgagcgacgcgccccacgcccaccaccccctccacccccacctgatgcaggagcacatgggcaccaacgtgatcgtcgccaacaccatgccgacgcacctgtccaacgggcagatgtgcgagtggccccgcccccggggccaggccgccacccccgagaccccgcagcccagcccgcccgggggctccggcagcgagccctacaagctgctccccggggccgtggccaccatcgtgaagcccctgtccgccatcccccagccgacgatcaccaagcaggaggtcatctgaggactagttataagactgactagcccgatgggcctcccaacgggccctcctcccctccttgcaccgagattaataaaaaaaaaaaaaaaaaaaaaaaaaaaaaaaaaaaaaaaaaaaaaaaaaaaaaaaaaaaaaaaatgcatcccccccccccccccccccccccccccccccaaaggctcttttcagagccaccagaatt

SEQ ID NO: 1649 - RNA, 1642 nt, synthetic construct; identical to SEQ ID NO: 1600
  misc_feature 1..1642: note = mRNA i-3 (A64-N5-C30-hSL-N5) (opt1) from Homo sapiens__NP_000448.3__HNF4A(1-474)(E285Q)
  source 1..1642: mol_type = other RNA

SEQ ID NO: 1650 - RNA, 1642 nt, synthetic construct
  misc_feature 1..1642: note = mRNA i-3 (A64-N5-C30-hSL-N5) (opt1) from Homo sapiens__NP_000448.3__HNF4A(1-474)(T166E)
  source 1..1642: mol_type = other RNA
aggagaaagcttaccatgcgcctgagcaagaccctcgtggacatggacatggccgactactccgccgcgctggaccccgcctacaccacgctggagttcgagaacgtccaggtgctcaccatgggcaacgacaccagcccgtccgaggggaccaacctgaacgcccccaacagcctgggcgtgtccgccctctgcgccatctgcggggaccgggcgacgggcaagcactacggggccagctcctgcgacggctgcaagggcttcttccgccggagcgtccgcaagaaccacatgtactcctgccggttcagccgccagtgcgtggtggacaaggacaagcggaaccagtgccgctactgccggctgaagaagtgcttccgcgccgggatgaagaaggaggccgtccagaacgagcgggaccgcatctccacccggcgcagctcctacgaggacagctccctgcccagcatcaacgcgctcctgcaggccgaggtgctgtcccggcagatcgagagccccgtgtccggcatcaacggggacatccgcgccaagaagatcgccagcatcgccgacgtctgcgagagcatgaaggagcagctcctggtgctggtggagtgggcgaagtacatcccggccttctgcgagctccccctggacgaccaggtcgccctgctccgggcccacgccggcgagcacctcctgctgggggcgaccaagcgctccatggtgttcaaggacgtgctgctgctcggcaacgactacatcgtcccccggcactgccccgagctggccgagatgagccgcgtgtccatccggatcctggacgagctcgtgctgccgttccaggagctgcagatcgacgacaacgagtacgcctacctcaaggccatcatcttcttcgaccccgacgccaagggcctgagcgaccccgggaagatcaagcgcctgcgctcccaggtccaggtgagcctcgaggactacatcaacgaccggcagtacgactcccgcggccggttcggggagctgctgctcctgctgcccaccctccagagcatcacgtggcagatgatcgagcagatccagttcatcaagctgttcggcatggcgaagatcgacaacctgctccaggagatgctgctgggcgggtccccgagcgacgcgccccacgcccaccaccccctccacccccacctgatgcaggagcacatgggcaccaacgtgatcgtcgccaacaccatgccgacccacctgtccaacgggcagatgtgcgagtggccccgcccccggggccaggccgccacgcccgagaccccgcagcccagcccgcccgggggctccggcagcgagccctacaagctgctccccggggccgtggccaccatcgtgaagcccctgtccgccatcccccagccgaccatcacgaagcaggaggtcatctgaggactagttataagactgactagcccgatgggcctcccaacgggccctcctcccctccttgcaccgagattaataaaaaaaaaaaaaaaaaaaaaaaaaaaaaaaaaaaaaaaaaaaaaaaaaaaaaaaaaaaaaaaatgcatcccccccccccccccccccccccccccccccaaaggctcttttcagagccaccagaatt

SEQ ID NO: 1651 - RNA, 1642 nt, synthetic construct
  misc_feature 1..1642: note = mRNA i-3 (A64-N5-C30-hSL-N5) (opt1) from Homo sapiens__NP_000448.3__HNF4A(1-474)(S148A)
  source 1..1642: mol_type = other RNA
aggagaaagcttaccatgcgcctgagcaagaccctcgtggacatggacatggccgactactccgccgcgctggaccccgcctacaccacgctggagttcgagaacgtccaggtgctcaccatgggcaacgacaccagcccgtccgaggggaccaacctgaacgcccccaacagcctgggcgtgtccgccctctgcgccatctgcggggaccgggcgacgggcaagcactacggggccagctcctgcgacggctgcaagggcttcttccgccggagcgtccgcaagaaccacatgtactcctgccggttcagccgccagtgcgtggtggacaaggacaagcggaaccagtgccgctactgccggctgaagaagtgcttccgcgccgggatgaagaaggaggccgtccagaacgagcgggaccgcatctccacccggcgcagctcctacgaggacagcgcgctgccctccatcaacgccctcctgcaggccgaggtgctgagccggcagatcacctcccccgtgagcggcatcaacggggacatccgcgccaagaagatcgcctccatcgcggacgtctgcgagagcatgaaggagcagctcctggtgctggtggagtgggccaagtacatcccggccttctgcgagctccccctggacgaccaggtcgccctgctccgggcccacgcgggcgagcacctcctgctgggggccaccaagcgcagcatggtgttcaaggacgtgctgctgctcggcaacgactacatcgtcccccggcactgccccgagctggccgagatgtcccgcgtgagcatccggatcctggacgagctcgtgctgccgttccaggagctgcagatcgacgacaacgagtacgcctacctcaaggccatcatcttcttcgaccccgacgcgaagggcctgtccgaccccgggaagatcaagcgcctgcgcagccaggtccaggtgtccctcgaggactacatcaacgaccggcagtacgacagccgcggccggttcggggagctgctgctcctgctgcccacgctccagtccatcacctggcagatgatcgagcagatccagttcatcaagctgttcggcatggccaagatcgacaacctgctccaggagatgctgctgggcgggagcccgtccgacgcgccccacgcccaccaccccctccacccccacctgatgcaggagcacatgggcaccaacgtgatcgtcgccaacaccatgccgacgcacctgagcaacgggcagatgtgcgagtggccccgcccccggggccaggccgccacccccgagaccccgcagccctccccgcccgggggcagcggctccgagccctacaagctgctccccggggccgtggccaccatcgtgaagcccctgagcgcgatcccccagccgacgatcaccaagcaggaggtcatctgaggactagttataagactgactagcccgatgggcctcccaacgggccctcctcccctccttgcaccgagattaataaaaaaaaaaaaaaaaaaaaaaaaaaaaaaaaaaaaaaaaaaaaaaaaaaaaaaaaaaaaaaaatgcatcccccccccccccccccccccccccccccccaaaggctcttttcagagccaccagaatt

SEQ ID NO: 1652 - RNA, 1642 nt, synthetic construct
  misc_feature 1..1642: note = mRNA i-3 (A64-N5-C30-hSL-N5) (opt1) from Homo sapiens__NP_000448.3__HNF4A(1-474)(S148E)
  source 1..1642: mol_type = other RNA
aggagaaagcttaccatgcgcctgagcaagaccctcgtggacatggacatggccgactactccgccgcgctggaccccgcctacaccacgctggagttcgagaacgtccaggtgctcaccatgggcaacgacaccagcccgtccgaggggaccaacctgaacgcccccaacagcctgggcgtgtccgccctctgcgccatctgcggggaccgggcgacgggcaagcactacggggccagctcctgcgacggctgcaagggcttcttccgccggagcgtccgcaagaaccacatgtactcctgccggttcagccgccagtgcgtggtggacaaggacaagcggaaccagtgccgctactgccggctgaagaagtgcttccgcgccgggatgaagaaggaggccgtccagaacgagcgggaccgcatctccacccggcgcagctcctacgaggacagcgagctgccctccatcaacgcgctcctgcaggccgaggtgctgagccggcagatcacctcccccgtgagcggcatcaacggggacatccgcgccaagaagatcgcctccatcgccgacgtctgcgagagcatgaaggagcagctcctggtgctggtggagtgggcgaagtacatcccggccttctgcgagctccccctggacgaccaggtcgccctgctccgggcccacgccggcgagcacctcctgctgggggcgaccaagcgcagcatggtgttcaaggacgtgctgctgctcggcaacgactacatcgtcccccggcactgccccgagctggccgagatgtcccgcgtgagcatccggatcctggacgagctcgtgctgccgttccaggagctgcagatcgacgacaacgagtacgcctacctcaaggccatcatcttcttcgaccccgacgccaagggcctgtccgaccccgggaagatcaagcgcctgcgcagccaggtccaggtgtccctcgaggactacatcaacgaccggcagtacgacagccgcggccggttcggggagctgctgctcctgctgcccacgctccagtccatcacctggcagatgatcgagcagatccagttcatcaagctgttcggcatggcgaagatcgacaacctgctccaggagatgctgctgggcgggagcccgtccgacgcgccccacgcccaccaccccctccacccccacctgatgcaggagcacatgggcaccaacgtgatcgtcgccaacaccatgccgacgcacctgagcaacgggcagatgtgcgagtggccccgcccccggggccaggccgccacccccgagaccccgcagccctccccgcccgggggcagcggctccgagccctacaagctgctccccggggccgtggccaccatcgtgaagcccctgagcgccatcccccagccgacgatcaccaagcaggaggtcatctgaggactagttataagactgactagcccgatgggcctcccaacgggccctcctcccctccttgcaccgagattaataaaaaaaaaaaaaaaaaaaaaaaaaaaaaaaaaaaaaaaaaaaaaaaaaaaaaaaaaaaaaaaatgcatcccccccccccccccccccccccccccccccaaaggctcttttcagagccaccagaatt

SEQ ID NO: 1653 - RNA, 1642 nt, synthetic construct
  misc_feature 1..1642: note = mRNA i-3 (A64-N5-C30-hSL-N5) (opt1) from Homo sapiens__NP_000448.3__HNF4A(1-474)(S183A)
  source 1..1642: mol_type = other RNA
aggagaaagcttaccatgcgcctgagcaagaccctcgtggacatggacatggccgactactccgccgcgctggaccccgcctacaccacgctggagttcgagaacgtccaggtgctcaccatgggcaacgacaccagcccgtccgaggggaccaacctgaacgcccccaacagcctgggcgtgtccgccctctgcgccatctgcggggaccgggcgacgggcaagcactacggggccagctcctgcgacggctgcaagggcttcttccgccggagcgtccgcaagaaccacatgtactcctgccggttcagccgccagtgcgtggtggacaaggacaagcggaaccagtgccgctactgccggctgaagaagtgcttccgcgccgggatgaagaaggaggccgtccagaacgagcgggaccgcatctccacccggcgcagctcctacgaggacagctccctgcccagcatcaacgcgctcctgcaggccgaggtgctgtcccggcagatcaccagccccgtgtccggcatcaacggggacatccgcgccaagaagatcgccgccatcgcggacgtctgcgagagcatgaaggagcagctcctggtgctggtggagtgggccaagtacatcccggccttctgcgagctccccctggacgaccaggtcgccctgctccgggcccacgcgggcgagcacctcctgctgggggccaccaagcgcagcatggtgttcaaggacgtgctgctgctcggcaacgactacatcgtcccccggcactgccccgagctggccgagatgtcccgcgtgagcatccggatcctggacgagctcgtgctgccgttccaggagctgcagatcgacgacaacgagtacgcctacctcaaggccatcatcttcttcgaccccgacgcgaagggcctgtccgaccccgggaagatcaagcgcctgcgcagccaggtccaggtgtccctcgaggactacatcaacgaccggcagtacgacagccgcggccggttcggggagctgctgctcctgctgcccacgctccagtccatcacctggcagatgatcgagcagatccagttcatcaagctgttcggcatggccaagatcgacaacctgctccaggagatgctgctgggcgggagcccgtccgacgcgccccacgcccaccaccccctccacccccacctgatgcaggagcacatgggcaccaacgtgatcgtcgccaacaccatgccgacgcacctgagcaacgggcagatgtgcgagtggccccgcccccggggccaggccgccacccccgagaccccgcagccctccccgcccgggggcagcggctccgagccctacaagctgctccccggggccgtggccaccatcgtgaagcccctgagcgcgatcccccagccgacgatcaccaagcaggaggtcatctgaggactagttataagactgactagcccgatgggcctcccaacgggccctcctcccctccttgcaccgagattaataaaaaaaaaaaaaaaaaaaaaaaaaaaaaaaaaaaaaaaaaaaaaaaaaaaaaaaaaaaaaaaatgcatcccccccccccccccccccccccccccccccaaaggctcttttcagagccaccagaatt

SEQ ID NO: 1654 - RNA, 1642 nt, synthetic construct
  misc_feature 1..1642: note = mRNA i-3 (A64-N5-C30-hSL-N5) (opt1) from Homo sapiens__NP_000448.3__HNF4A(1-474)(S183E)
  source 1..1642: mol_type = other RNA
aggagaaagcttaccatgcgcctgagcaagaccctcgtggacatggacatggccgactactccgccgcgctggaccccgcctacaccacgctggagttcgagaacgtccaggtgctcaccatgggcaacgacaccagcccgtccgaggggaccaacctgaacgcccccaacagcctgggcgtgtccgccctctgcgccatctgcggggaccgggcgacgggcaagcactacggggccagctcctgcgacggctgcaagggcttcttccgccggagcgtccgcaagaaccacatgtactcctgccggttcagccgccagtgcgtggtggacaaggacaagcggaaccagtgccgctactgccggctgaagaagtgcttccgcgccgggatgaagaaggaggccgtccagaacgagcgggaccgcatctccacccggcgcagctcctacgaggacagctccctgcccagcatcaacgcgctcctgcaggccgaggtgctgtcccggcagatcaccagccccgtgtccggcatcaacggggacatccgcgccaagaagatcgccgagatcgccgacgtctgcgagagcatgaaggagcagctcctggtgctggtggagtgggcgaagtacatcccggccttctgcgagctccccctggacgaccaggtcgccctgctccgggcccacgccggcgagcacctcctgctgggggcgaccaagcgcagcatggtgttcaaggacgtgctgctgctcggcaacgactacatcgtcccccggcactgccccgagctggccgagatgtcccgcgtgagcatccggatcctggacgagctcgtgctgccgttccaggagctgcagatcgacgacaacgagtacgcctacctcaaggccatcatcttcttcgaccccgacgccaagggcctgtccgaccccgggaagatcaagcgcctgcgcagccaggtccaggtgtccctcgaggactacatcaacgaccggcagtacgacagccgcggccggttcggggagctgctgctcctgctgcccacgctccagtccatcacctggcagatgatcgagcagatccagttcatcaagctgttcggcatggcgaagatcgacaacctgctccaggagatgctgctgggcgggagcccgtccgacgcgccccacgcccaccaccccctccacccccacctgatgcaggagcacatgggcaccaacgtgatcgtcgccaacaccatgccgacgcacctgagcaacgggcagatgtgcgagtggccccgcccccggggccaggccgccacccccgagaccccgcagccctccccgcccgggggcagcggctccgagccctacaagctgctccccggggccgtggccaccatcgtgaagcccctgagcgccatcccccagccgacgatcaccaagcaggaggtcatctgaggactagttataagactgactagcccgatgggcctcccaacgggccctcctcccctccttgcaccgagattaataaaaaaaaaaaaaaaaaaaaaaaaaaaaaaaaaaaaaaaaaaaaaaaaaaaaaaaaaaaaaaaatgcatcccccccccccccccccccccccccccccccaaaggctcttttcagagccaccagaatt

SEQ ID NO: 1655 - RNA, 1642 nt, synthetic construct
  misc_feature 1..1642: note = mRNA i-3 (A64-N5-C30-hSL-N5) (opt1) from Homo sapiens__NP_000448.3__HNF4A(1-474)(S461A)
  source 1..1642: mol_type = other RNA
aggagaaagcttaccatgcgcctgagcaagaccctcgtggacatggacatggccgactactccgccgcgctggaccccgcctacaccacgctggagttcgagaacgtccaggtgctcaccatgggcaacgacaccagcccgtccgaggggaccaacctgaacgcccccaacagcctgggcgtgtccgccctctgcgccatctgcggggaccgggcgacgggcaagcactacggggccagctcctgcgacggctgcaagggcttcttccgccggagcgtccgcaagaaccacatgtactcctgccggttcagccgccagtgcgtggtggacaaggacaagcggaaccagtgccgctactgccggctgaagaagtgcttccgcgccgggatgaagaaggaggccgtccagaacgagcgggaccgcatctccacccggcgcagctcctacgaggacagctccctgcccagcatcaacgcgctcctgcaggccgaggtgctgtcccggcagatcaccagccccgtgtccggcatcaacggggacatccgcgccaagaagatcgccagcatcgccgacgtctgcgagagcatgaaggagcagctcctggtgctggtggagtgggcgaagtacatcccggccttctgcgagctccccctggacgaccaggtcgccctgctccgggcccacgccggcgagcacctcctgctgggggcgaccaagcgctccatggtgttcaaggacgtgctgctgctcggcaacgactacatcgtcccccggcactgccccgagctggccgagatgagccgcgtgtccatccggatcctggacgagctcgtgctgccgttccaggagctgcagatcgacgacaacgagtacgcctacctcaaggccatcatcttcttcgaccccgacgccaagggcctgagcgaccccgggaagatcaagcgcctgcgctcccaggtccaggtgagcctcgaggactacatcaacgaccggcagtacgactcccgcggccggttcggggagctgctgctcctgctgcccacgctccagagcatcacctggcagatgatcgagcagatccagttcatcaagctgttcggcatggcgaagatcgacaacctgctccaggagatgctgctgggcgggtccccgagcgacgcgccccacgcccaccaccccctccacccccacctgatgcaggagcacatgggcaccaacgtgatcgtcgccaacaccatgccgacgcacctgtccaacgggcagatgtgcgagtggccccgcccccggggccaggccgccacccccgagaccccgcagcccagcccgcccgggggctccggcagcgagccctacaagctgctccccggggccgtggccaccatcgtgaagcccctggccgcgatcccccagccgacgatcaccaagcaggaggtcatctgaggactagttataagactgactagcccgatgggcctcccaacgggccctcctcccctccttgcaccgagattaataaaaaaaaaaaaaaaaaaaaaaaaaaaaaaaaaaaaaaaaaaaaaaaaaaaaaaaaaaaaaaaatgcatcccccccccccccccccccccccccccccccaaaggctcttttcagagccaccagaatt

SEQ ID NO: 1656 - RNA, 1642 nt, synthetic construct; identical to SEQ ID NO: 1607
  misc_feature 1..1642: note = mRNA i-3 (A64-N5-C30-hSL-N5) (opt1) from Homo sapiens__NP_000448.3__HNF4A(1-474)(S461E)
  source 1..1642: mol_type = other RNA

SEQ ID NO: 1657 - RNA, 1642 nt, synthetic construct
  misc_feature 1..1642: note = mRNA i-3 (A64-N5-C30-hSL-N5) (opt1) from Homo sapiens__NP_000448.3__HNF4A(1-474)(S142A_S143A_S313A)
  source 1..1642: mol_type = other RNA
aggagaaagcttaccatgcgcctgagcaagaccctcgtggacatggacatggccgactactccgccgcgctggaccccgcctacaccacgctggagttcgagaacgtccaggtgctcaccatgggcaacgacaccagcccgtccgaggggaccaacctgaacgcccccaacagcctgggcgtgtccgccctctgcgccatctgcggggaccgggcgacgggcaagcactacggggccagctcctgcgacggctgcaagggcttcttccgccggagcgtccgcaagaaccacatgtactcctgccggttcagccgccagtgcgtggtggacaaggacaagcggaaccagtgccgctactgccggctgaagaagtgcttccgcgccgggatgaagaaggaggccgtccagaacgagcgggaccgcatctccacccggcgcgcggcctacgaggacagctccctgcccagcatcaacgccctcctgcaggccgaggtgctgtcccggcagatcaccagccccgtgtccggcatcaacggggacatccgcgccaagaagatcgcgagcatcgccgacgtctgcgagtccatgaaggagcagctcctggtgctggtggagtgggccaagtacatcccggccttctgcgagctccccctggacgaccaggtcgccctgctccgggcgcacgccggcgagcacctcctgctgggggccaccaagcgcagcatggtgttcaaggacgtgctgctgctcggcaacgactacatcgtcccccggcactgccccgagctggccgagatgagccgcgtgtccatccggatcctggacgagctcgtgctgccgttccaggagctgcagatcgacgacaacgagtacgcctacctcaaggcgatcatcttcttcgaccccgacgccaagggcctgagcgaccccgggaagatcaagcgcctgcgcgcccaggtccaggtgtccctcgaggactacatcaacgaccggcagtacgacagccgcggccggttcggggagctgctgctcctgctgcccacgctccagtccatcacctggcagatgatcgagcagatccagttcatcaagctgttcggcatggccaagatcgacaacctgctccaggagatgctgctgggcgggagcccgtccgacgcgccccacgcccaccaccccctccacccccacctgatgcaggagcacatgggcaccaacgtgatcgtcgccaacaccatgccgacgcacctgagcaacgggcagatgtgcgagtggccccgcccccggggccaggccgccacccccgagaccccgcagccctccccgcccgggggcagcggctccgagccctacaagctgctccccggggcggtggccaccatcgtgaagcccctgagcgccatcccccagccgacgatcaccaagcaggaggtcatctgaggactagttataagactgactagcccgatgggcctcccaacgggccctcctcccctccttgcaccgagattaataaaaaaaaaaaaaaaaaaaaaaaaaaaaaaaaaaaaaaaaaaaaaaaaaaaaaaaaaaaaaaaatgcatcccccccccccccccccccccccccccccccaaaggctcttttcagagccaccagaatt

SEQ ID NO: 1658 - RNA, 1642 nt, synthetic construct
  misc_feature 1..1642: note = mRNA i-3 (A64-N5-C30-hSL-N5) (opt1) from Homo sapiens__NP_000448.3__HNF4A(1-474)(S142A_S143A_S313A_K458R)
  source 1..1642: mol_type = other RNA
aggagaaagcttaccatgcgcctgagcaagaccctcgtggacatggacatggccgactactccgccgcgctggaccccgcctacaccacgctggagttcgagaacgtccaggtgctcaccatgggcaacgacaccagcccgtccgaggggaccaacctgaacgcccccaacagcctgggcgtgtccgccctctgcgccatctgcggggaccgggcgacgggcaagcactacggggccagctcctgcgacggctgcaagggcttcttccgccggagcgtccgcaagaaccacatgtactcctgccggttcagccgccagtgcgtggtggacaaggacaagcggaaccagtgccgctactgccggctgaagaagtgcttccgcgccgggatgaagaaggaggccgtccagaacgagcgggaccgcatctccacccggcgcgcggcctacgaggacagctccctgcccagcatcaacgccctcctgcaggccgaggtgctgtcccggcagatcaccagccccgtgtccggcatcaacggggacatccgcgccaagaagatcgcgagcatcgccgacgtctgcgagtccatgaaggagcagctcctggtgctggtggagtgggccaagtacatcccggccttctgcgagctccccctggacgaccaggtcgccctgctccgggcgcacgccggcgagcacctcctgctgggggccaccaagcgcagcatggtgttcaaggacgtgctgctgctcggcaacgactacatcgtcccccggcactgccccgagctggccgagatgagccgcgtgtccatccggatcctggacgagctcgtgctgccgttccaggagctgcagatcgacgacaacgagtacgcctacctcaaggcgatcatcttcttcgaccccgacgccaagggcctgagcgaccccgggaagatcaagcgcctgcgcgcccaggtccaggtgtccctcgaggactacatcaacgaccggcagtacgacagccgcggccggttcggggagctgctgctcctgctgcccacgctccagtccatcacctggcagatgatcgagcagatccagttcatcaagctgttcggcatggccaagatcgacaacctgctccaggagatgctgctgggcgggagcccgtccgacgcgccccacgcccaccaccccctccacccccacctgatgcaggagcacatgggcaccaacgtgatcgtcgccaacaccatgccgacgcacctgagcaacgggcagatgtgcgagtggccccgcccccggggccaggccgccacccccgagaccccgcagccctccccgcccgggggcagcggctccgagccctacaagctgctccccggggcggtggccaccatcgtgcgccccctgagcgccatcccccagccgacgatcaccaagcaggaggtcatctgaggactagttataagactgactagcccgatgggcctcccaacgggccctcctcccctccttgcaccgagattaataaaaaaaaaaaaaaaaaaaaaaaaaaaaaaaaaaaaaaaaaaaaaaaaaaaaaaaaaaaaaaaatgcatcccccccccccccccccccccccccccccccaaaggctcttttcagagccaccagaatt

SEQ ID NO: 1659 - RNA, 1642 nt, synthetic construct
  misc_feature 1..1642: note = mRNA i-3 (A64-N5-C30-hSL-N5) (opt1) from Homo sapiens__NP_000448.3__HNF4A(1-474)(S142A_S143A_S167A_S313A_ S378A_T429A_T432A_S436A_K458R)
  source 1..1642: mol_type = other RNA
aggagaaagcttaccatgcgcctgagcaagaccctcgtggacatggacatggccgactactccgccgcgctggaccccgcctacaccacgctggagttcgagaacgtccaggtgctcaccatgggcaacgacaccagcccgtccgaggggaccaacctgaacgcccccaacagcctgggcgtgtccgccctctgcgccatctgcggggaccgggcgacgggcaagcactacggggccagctcctgcgacggctgcaagggcttcttccgccggagcgtccgcaagaaccacatgtactcctgccggttcagccgccagtgcgtggtggacaaggacaagcggaaccagtgccgctactgccggctgaagaagtgcttccgcgccgggatgaagaaggaggccgtccagaacgagcgggaccgcatctccacccggcgcgcggcctacgaggacagctccctgcccagcatcaacgccctcctgcaggccgaggtgctgtcccggcagatcaccgcccccgtgagcggcatcaacggggacatccgcgcgaagaagatcgcctccatcgccgacgtctgcgagagcatgaaggagcagctcctggtgctggtggagtgggccaagtacatcccggccttctgcgagctccccctggacgaccaggtcgcgctgctccgggcccacgccggcgagcacctcctgctgggggccaccaagcgctccatggtgttcaaggacgtgctgctgctcggcaacgactacatcgtcccccggcactgccccgagctggccgagatgagccgcgtgagcatccggatcctggacgagctcgtgctgccgttccaggagctgcagatcgacgacaacgagtacgcgtacctcaaggccatcatcttcttcgaccccgacgccaagggcctgtccgaccccgggaagatcaagcgcctgcgcgcccaggtccaggtgagcctcgaggactacatcaacgaccggcagtacgactcccgcggccggttcggggagctgctgctcctgctgcccacgctccagagcatcacctggcagatgatcgagcagatccagttcatcaagctgttcggcatggccaagatcgacaacctgctccaggagatgctgctgggcggggcgccgtccgacgcgccccacgcccaccaccccctccacccccacctgatgcaggagcacatgggcaccaacgtgatcgtcgccaacaccatgccgacgcacctgagcaacgggcagatgtgcgagtggccccgcccccggggccaggccgccgcccccgaggccccgcagcccgccccgcccgggggctccggcagcgagccctacaagctgctccccggggcggtggccaccatcgtgcgccccctgtccgccatcccccagccgaccatcaccaagcaggaggtcatctgaggactagttataagactgactagcccgatgggcctcccaacgggccctcctcccctccttgcaccgagattaataaaaaaaaaaaaaaaaaaaaaaaaaaaaaaaaaaaaaaaaaaaaaaaaaaaaaaaaaaaaaaaatgcatcccccccccccccccccccccccccccccccaaaggctcttttcagagccaccagaatt

SEQ ID NO: 1660 - RNA, 1642 nt, synthetic construct
  misc_feature 1..1642: note = mRNA i-3 (A64-N5-C30-hSL-N5) (opt1) from Homo sapiens__NP_000448.3__HNF4A(1-474)(S142A_S143A_S148A_S167A_ S313A_S378A_T429A_T432A_S436A_K458R)
  source 1..1642: mol_type = other RNA
aggagaaagcttaccatgcgcctgagcaagaccctcgtggacatggacatggccgactactccgccgcgctggaccccgcctacaccacgctggagttcgagaacgtccaggtgctcaccatgggcaacgacaccagcccgtccgaggggaccaacctgaacgcccccaacagcctgggcgtgtccgccctctgcgccatctgcggggaccgggcgacgggcaagcactacggggccagctcctgcgacggctgcaagggcttcttccgccggagcgtccgcaagaaccacatgtactcctgccggttcagccgccagtgcgtggtggacaaggacaagcggaaccagtgccgctactgccggctgaagaagtgcttccgcgccgggatgaagaaggaggccgtccagaacgagcgggaccgcatctccacccggcgcgcggcctacgaggacagcgccctgccctccatcaacgccctcctgcaggccgaggtgctgagccggcagatcaccgcgcccgtgtccggcatcaacggggacatccgcgccaagaagatcgccagcatcgccgacgtctgcgagtccatgaaggagcagctcctggtgctggtggagtgggccaagtacatcccggcgttctgcgagctccccctggacgaccaggtcgccctgctccgggcccacgccggcgagcacctcctgctgggggccaccaagcgcagcatggtgttcaaggacgtgctgctgctcggcaacgactacatcgtcccccggcactgccccgagctggcggagatgtcccgcgtgagcatccggatcctggacgagctcgtgctgccgttccaggagctgcagatcgacgacaacgagtacgcctacctcaaggccatcatcttcttcgaccccgacgccaagggcctgagcgaccccgggaagatcaagcgcctgcgcgcccaggtccaggtgtccctcgaggactacatcaacgaccggcagtacgacagccgcggccggttcggggagctgctgctcctgctgcccacgctccagtccatcacctggcagatgatcgagcagatccagttcatcaagctgttcggcatggcgaagatcgacaacctgctccaggagatgctgctgggcggggccccgagcgacgcgccccacgcccaccaccccctccacccccacctgatgcaggagcacatgggcaccaacgtgatcgtcgccaacaccatgccgacgcacctgtccaacgggcagatgtgcgagtggccccgcccccggggccaggccgccgcccccgaggccccgcagcccgcgccgcccgggggcagcggctccgagccctacaagctgctccccggggccgtggccaccatcgtgcgccccctgagcgccatcccccagccgaccatcaccaagcaggaggtcatctgaggactagttataagactgactagcccgatgggcctcccaacgggccctcctcccctccttgcaccgagattaataaaaaaaaaaaaaaaaaaaaaaaaaaaaaaaaaaaaaaaaaaaaaaaaaaaaaaaaaaaaaaaatgcatcccccccccccccccccccccccccccccccaaaggctcttttcagagccaccagaatt

SEQ ID NO: 1661 - RNA, 1642 nt, synthetic construct
  misc_feature 1..1642: note = mRNA i-3 (A64-N5-C30-hSL-N5) (opt1) from Homo sapiens__NP_000448.3__HNF4A(1-474)(K106R_K108R_K126R_K127R_ S142A_S143A_S148A_S167A_S313A_S378A_T429A_T432A_S436A_K458R )
  source 1..1642: mol_type = other RNA
aggagaaagcttaccatgcgcctgagcaagaccctcgtggacatggacatggccgactactccgccgcgctggaccccgcctacaccacgctggagttcgagaacgtccaggtgctcaccatgggcaacgacaccagcccgtccgaggggaccaacctgaacgcccccaacagcctgggcgtgtccgccctctgcgccatctgcggggaccgggcgacgggcaagcactacggggccagctcctgcgacggctgcaagggcttcttccgccggagcgtccgcaagaaccacatgtactcctgccggttcagccgccagtgcgtggtggaccgggaccgccggaaccagtgccgctactgccggctgaagaagtgcttccgcgccgggatgcggcgcgaggccgtccagaacgagcgggaccgcatctccacccggcgcgcggcctacgaggacagcgccctgccctccatcaacgccctcctgcaggccgaggtgctgagccggcagatcaccgcgcccgtgtccggcatcaacggggacatccgcgccaagaagatcgccagcatcgccgacgtctgcgagtccatgaaggagcagctcctggtgctggtggagtgggccaagtacatcccggcgttctgcgagctccccctggacgaccaggtcgccctgctccgggcccacgccggcgagcacctcctgctgggggccaccaagcgcagcatggtgttcaaggacgtgctgctgctcggcaacgactacatcgtcccccgccactgccccgagctggcggagatgtcccgggtgagcatccgcatcctggacgagctcgtgctgccgttccaggagctgcagatcgacgacaacgagtacgcctacctcaaggccatcatcttcttcgaccccgacgccaagggcctgagcgaccccgggaagatcaagcggctgcgcgcccaggtccaggtgtccctcgaggactacatcaacgaccggcagtacgacagccgcggccggttcggggagctgctgctcctgctgcccacgctccagtccatcacctggcagatgatcgagcagatccagttcatcaagctgttcggcatggcgaagatcgacaacctgctccaggagatgctgctgggcggggccccgagcgacgcgccccacgcccaccaccccctccacccccacctgatgcaggagcacatgggcaccaacgtgatcgtcgccaacaccatgccgacgcacctgtccaacgggcagatgtgcgagtggccccgcccccggggccaggccgccgcccccgaggccccgcagcccgcgccgcccgggggcagcggctccgagccctacaagctgctccccggggccgtggccaccatcgtgcgccccctgagcgccatcccccagccgaccatcaccaagcaggaggtcatctgaggactagttataagactgactagcccgatgggcctcccaacgggccctcctcccctccttgcaccgagattaataaaaaaaaaaaaaaaaaaaaaaaaaaaaaaaaaaaaaaaaaaaaaaaaaaaaaaaaaaaaaaaatgcatcccccccccccccccccccccccccccccccaaaggctcttttcagagccaccagaatt

SEQ ID NO: 1662 - RNA, 1642 nt, synthetic construct
  misc_feature 1..1642: note = mRNA i-3 (A64-N5-C30-hSL-N5) (opt1) from Homo sapiens__NP_000448.3__HNF4A(1-474)(S142A_S143A_S148A_T166A_ S167A_S313A_S378A_T429A_T432A_S436A_K458R)
  source 1..1642: mol_type = other RNA
aggagaaagcttaccatgcgcctgagcaagaccctcgtggacatggacatggccgactactccgccgcgctggaccccgcctacaccacgctggagttcgagaacgtccaggtgctcaccatgggcaacgacaccagcccgtccgaggggaccaacctgaacgcccccaacagcctgggcgtgtccgccctctgcgccatctgcggggaccgggcgacgggcaagcactacggggccagctcctgcgacggctgcaagggcttcttccgccggagcgtccgcaagaaccacatgtactcctgccggttcagccgccagtgcgtggtggacaaggacaagcggaaccagtgccgctactgccggctgaagaagtgcttccgcgccgggatgaagaaggaggccgtccagaacgagcgggaccgcatctccacccggcgcgcggcctacgaggacagcgccctgccctccatcaacgccctcctgcaggccgaggtgctgagccggcagatcgcggcccccgtgtccggcatcaacggggacatccgcgccaagaagatcgccagcatcgccgacgtctgcgagtccatgaaggagcagctcctggtgctggtggagtgggcgaagtacatcccggccttctgcgagctccccctggacgaccaggtcgccctgctccgggcccacgccggcgagcacctcctgctgggggcgaccaagcgcagcatggtgttcaaggacgtgctgctgctcggcaacgactacatcgtcccccggcactgccccgagctggccgagatgtcccgcgtgagcatccggatcctggacgagctcgtgctgccgttccaggagctgcagatcgacgacaacgagtacgcctacctcaaggccatcatcttcttcgaccccgacgccaagggcctgagcgaccccgggaagatcaagcgcctgcgcgcgcaggtccaggtgtccctcgaggactacatcaacgaccggcagtacgacagccgcggccggttcggggagctgctgctcctgctgcccaccctccagtccatcacgtggcagatgatcgagcagatccagttcatcaagctgttcggcatggccaagatcgacaacctgctccaggagatgctgctgggcggggccccgagcgacgcgccccacgcccaccaccccctccacccccacctgatgcaggagcacatgggcaccaacgtgatcgtcgccaacaccatgccgacccacctgtccaacgggcagatgtgcgagtggccccgcccccggggccaggccgccgcccccgaggcgccgcagcccgccccgcccgggggcagcggctccgagccctacaagctgctccccggggccgtggccacgatcgtgcgccccctgagcgccatcccccagccgaccatcaccaagcaggaggtcatctgaggactagttataagactgactagcccgatgggcctcccaacgggccctcctcccctccttgcaccgagattaataaaaaaaaaaaaaaaaaaaaaaaaaaaaaaaaaaaaaaaaaaaaaaaaaaaaaaaaaaaaaaaatgcatcccccccccccccccccccccccccccccccaaaggctcttttcagagccaccagaatt

SEQ ID NO: 1663 - RNA, 1642 nt, synthetic construct
  misc_feature 1..1642: note = mRNA i-3 (A64-N5-C30-hSL-N5) (opt1) from Homo sapiens__NP_000448.3__HNF4A(1-474)(S87A_S142A_S143A_S148A_T 166A_S167A_S313A_S378A_T429A_T432A_S436A_K458R)
  source 1..1642: mol_type = other RNA
aggagaaagcttaccatgcgcctgagcaagaccctcgtggacatggacatggccgactactccgccgcgctggaccccgcctacaccacgctggagttcgagaacgtccaggtgctcaccatgggcaacgacaccagcccgtccgaggggaccaacctgaacgcccccaacagcctgggcgtgtccgccctctgcgccatctgcggggaccgggcgacgggcaagcactacggggccagctcctgcgacggctgcaagggcttcttccgccgggccgtccgcaagaaccacatgtacagctgccggttctcccgccagtgcgtggtggacaaggacaagcggaaccagtgccgctactgccggctgaagaagtgcttccgcgccgggatgaagaaggaggcggtccagaacgagcgggaccgcatcagcacccggcgcgccgcctacgaggactccgccctgcccagcatcaacgccctcctgcaggcggaggtgctgtcccggcagatcgccgcccccgtgagcggcatcaacggggacatccgcgccaagaagatcgcctccatcgcggacgtctgcgagagcatgaaggagcagctcctggtgctggtggagtgggccaagtacatcccggccttctgcgagctccccctggacgaccaggtcgccctgctccgggcccacgcgggcgagcacctcctgctgggggccaccaagcgctccatggtgttcaaggacgtgctgctgctcggcaacgactacatcgtcccccggcactgccccgagctggccgagatgagccgcgtgtccatccggatcctggacgagctcgtgctgccgttccaggagctgcagatcgacgacaacgagtacgcctacctcaaggccatcatcttcttcgaccccgacgcgaagggcctgagcgaccccgggaagatcaagcgcctgcgcgcccaggtccaggtgagcctcgaggactacatcaacgaccggcagtacgactcccgcggccggttcggggagctgctgctcctgctgcccaccctccagagcatcacgtggcagatgatcgagcagatccagttcatcaagctgttcggcatggccaagatcgacaacctgctccaggagatgctgctgggcggggccccgtccgacgcgccccacgcccaccaccccctccacccccacctgatgcaggagcacatgggcaccaacgtgatcgtcgccaacaccatgccgacccacctgagcaacgggcagatgtgcgagtggccccgcccccggggccaggccgccgcgcccgaggccccgcagcccgccccgcccgggggctccggcagcgagccctacaagctgctccccggggccgtggccacgatcgtgcgccccctgtccgcgatcccccagccgaccatcaccaagcaggaggtcatctgaggactagttataagactgactagcccgatgggcctcccaacgggccctcctcccctccttgcaccgagattaataaaaaaaaaaaaaaaaaaaaaaaaaaaaaaaaaaaaaaaaaaaaaaaaaaaaaaaaaaaaaaaatgcatcccccccccccccccccccccccccccccccaaaggctcttttcagagccaccagaatt

SEQ ID NO: 1664 - RNA, 1642 nt, synthetic construct
  misc_feature 1..1642: note = mRNA i-3 (A64-N5-C30-hSL-N5) (opt1) from Homo sapiens__NP_000448.3__HNF4A(1-474)(S87A_K106R_K108R_K126R_K 127R_S142A_S143A_S148A_T166A_S167A_S313A_S378A_T429A_T432A_ S436A_K458R)
  source 1..1642: mol_type = other RNA
aggagaaagcttaccatgcgcctgagcaagaccctcgtggacatggacatggccgactactccgccgcgctggaccccgcctacaccacgctggagttcgagaacgtccaggtgctcaccatgggcaacgacaccagcccgtccgaggggaccaacctgaacgcccccaacagcctgggcgtgtccgccctctgcgccatctgcggggaccgggcgacgggcaagcactacggggccagctcctgcgacggctgcaagggcttcttccgccgggccgtccgcaagaaccacatgtacagctgccggttctcccgccagtgcgtggtggaccgggaccgccggaaccagtgccgctactgccggctgaagaagtgcttccgcgccgggatgcggcgcgaggcggtccagaacgagcgggaccgcatcagcacccggcgcgccgcctacgaggactccgccctgcccagcatcaacgccctcctgcaggcggaggtgctgtcccggcagatcgccgcccccgtgagcggcatcaacggggacatccgcgccaagaagatcgcctccatcgcggacgtctgcgagagcatgaaggagcagctcctggtgctggtggagtgggccaagtacatcccggccttctgcgagctccccctggacgaccaggtcgccctgctccgggcccacgcgggcgagcacctcctgctgggggccaccaagcgctccatggtgttcaaggacgtgctgctgctcggcaacgactacatcgtcccccgccactgccccgagctggccgagatgagccgggtgtccatccgcatcctggacgagctcgtgctgccgttccaggagctgcagatcgacgacaacgagtacgcctacctcaaggccatcatcttcttcgaccccgacgcgaagggcctgagcgaccccgggaagatcaagcggctgcgcgcccaggtccaggtgagcctcgaggactacatcaacgaccggcagtacgactcccgcggccggttcggggagctgctgctcctgctgcccaccctccagagcatcacgtggcagatgatcgagcagatccagttcatcaagctgttcggcatggccaagatcgacaacctgctccaggagatgctgctgggcggggccccgtccgacgcgccccacgcccaccaccccctccacccccacctgatgcaggagcacatgggcaccaacgtgatcgtcgccaacaccatgccgacccacctgagcaacgggcagatgtgcgagtggccccgcccccggggccaggccgccgcgcccgaggccccgcagcccgccccgcccgggggctccggcagcgagccctacaagctgctccccggggccgtggccacgatcgtgcgccccctgtccgcgatcccccagccgaccatcaccaagcaggaggtcatctgaggactagttataagactgactagcccgatgggcctcccaacgggccctcctcccctccttgcaccgagattaataaaaaaaaaaaaaaaaaaaaaaaaaaaaaaaaaaaaaaaaaaaaaaaaaaaaaaaaaaaaaaaatgcatcccccccccccccccccccccccccccccccaaaggctcttttcagagccaccagaatt

SEQ ID NO: 1665 - RNA, 1642 nt, synthetic construct
  misc_feature 1..1642: note = mRNA i-3 (A64-N5-C30-hSL-N5) (opt1) from Homo sapiens__NP_000448.3__HNF4A(1-474)(S87A_K106R_K108R_K126R_K 127R)
  source 1..1642: mol_type = other RNA
aggagaaagcttaccatgcgcctgagcaagaccctcgtggacatggacatggccgactactccgccgcgctggaccccgcctacaccacgctggagttcgagaacgtccaggtgctcaccatgggcaacgacaccagcccgtccgaggggaccaacctgaacgcccccaacagcctgggcgtgtccgccctctgcgccatctgcggggaccgggcgacgggcaagcactacggggccagctcctgcgacggctgcaagggcttcttccgccgggccgtccgcaagaaccacatgtacagctgccggttctcccgccagtgcgtggtggaccgggaccgccggaaccagtgccgctactgccggctgaagaagtgcttccgcgccgggatgcggcgcgaggcggtccagaacgagcgggaccgcatcagcacccggcgctccagctacgaggactccagcctgccctccatcaacgccctcctgcaggccgaggtgctgagccggcagatcacctcccccgtgagcggcatcaacggggacatccgcgccaagaagatcgcctccatcgcggacgtctgcgagagcatgaaggagcagctcctggtgctggtggagtgggccaagtacatcccggccttctgcgagctccccctggacgaccaggtcgccctgctccgggcccacgcgggcgagcacctcctgctgggggccaccaagcgcagcatggtgttcaaggacgtgctgctgctcggcaacgactacatcgtcccccgccactgccccgagctggccgagatgtcccgggtgagcatccgcatcctggacgagctcgtgctgccgttccaggagctgcagatcgacgacaacgagtacgcctacctcaaggccatcatcttcttcgaccccgacgcgaagggcctgtccgaccccgggaagatcaagcggctgcgcagccaggtccaggtgtccctcgaggactacatcaacgaccggcagtacgacagccgcggccggttcggggagctgctgctcctgctgcccacgctccagtccatcacctggcagatgatcgagcagatccagttcatcaagctgttcggcatggccaagatcgacaacctgctccaggagatgctgctgggcgggagcccgtccgacgcgccccacgcccaccaccccctccacccccacctgatgcaggagcacatgggcaccaacgtgatcgtcgccaacaccatgccgacgcacctgagcaacgggcagatgtgcgagtggccccgcccccggggccaggccgccacccccgagaccccgcagccctccccgcccgggggcagcggctccgagccctacaagctgctccccggggccgtggccaccatcgtgaagcccctgagcgcgatcccccagccgacgatcaccaagcaggaggtcatctgaggactagttataagactgactagcccgatgggcctcccaacgggccctcctcccctccttgcaccgagattaataaaaaaaaaaaaaaaaaaaaaaaaaaaaaaaaaaaaaaaaaaaaaaaaaaaaaaaaaaaaaaaatgcatcccccccccccccccccccccccccccccccaaaggctcttttcagagccaccagaatt

SEQ ID NO: 1666 - RNA, 1642 nt, synthetic construct
  misc_feature 1..1642: note = mRNA i-3 (A64-N5-C30-hSL-N5) (opt1) from Homo sapiens__NP_000448.3__HNF4A(1-474)(S87A_K106R_K108R_K126R_K 127R_S142A_S143A_S148A_T166A_S167A_S313A_S378A_T429A_T432A_ S436A_K458R_S461A)
  source 1..1642: mol_type = other RNA
aggagaaagcttaccatgcgcctgagcaagaccctcgtggacatggacatggccgactactccgccgcgctggaccccgcctacaccacgctggagttcgagaacgtccaggtgctcaccatgggcaacgacaccagcccgtccgaggggaccaacctgaacgcccccaacagcctgggcgtgtccgccctctgcgccatctgcggggaccgggcgacgggcaagcactacggggccagctcctgcgacggctgcaagggcttcttccgccgggccgtccgcaagaaccacatgtacagctgccggttctcccgccagtgcgtggtggaccgggaccgccggaaccagtgccgctactgccggctgaagaagtgcttccgcgccgggatgcggcgcgaggcggtccagaacgagcgggaccgcatcagcacccggcgcgccgcctacgaggactccgccctgcccagcatcaacgccctcctgcaggcggaggtgctgtcccggcagatcgccgcccccgtgagcggcatcaacggggacatccgcgccaagaagatcgcctccatcgcggacgtctgcgagagcatgaaggagcagctcctggtgctggtggagtgggccaagtacatcccggccttctgcgagctccccctggacgaccaggtcgccctgctccgggcccacgcgggcgagcacctcctgctgggggccaccaagcgctccatggtgttcaaggacgtgctgctgctcggcaacgactacatcgtcccccgccactgccccgagctggccgagatgagccgggtgtccatccgcatcctggacgagctcgtgctgccgttccaggagctgcagatcgacgacaacgagtacgcctacctcaaggccatcatcttcttcgaccccgacgcgaagggcctgagcgaccccgggaagatcaagcggctgcgcgcccaggtccaggtgagcctcgaggactacatcaacgaccggcagtacgactcccgcggccggttcggggagctgctgctcctgctgcccaccctccagagcatcacgtggcagatgatcgagcagatccagttcatcaagctgttcggcatggccaagatcgacaacctgctccaggagatgctgctgggcggggccccgtccgacgcgccccacgcccaccaccccctccacccccacctgatgcaggagcacatgggcaccaacgtgatcgtcgccaacaccatgccgacccacctgagcaacgggcagatgtgcgagtggccccgcccccggggccaggccgccgcgcccgaggccccgcagcccgccccgcccgggggctccggcagcgagccctacaagctgctccccggggccgtggccacgatcgtgcgccccctggcggccatcccccagccgaccatcaccaagcaggaggtcatctgaggactagttataagactgactagcccgatgggcctcccaacgggccctcctcccctccttgcaccgagattaataaaaaaaaaaaaaaaaaaaaaaaaaaaaaaaaaaaaaaaaaaaaaaaaaaaaaaaaaaaaaaaatgcatcccccccccccccccccccccccccccccccaaaggctcttttcagagccaccagaatt

SEQ ID NO: 1667 - RNA, 1642 nt, synthetic construct
  misc_feature 1..1642: note = mRNA i-3 (A64-N5-C30-hSL-N5) (opt1) from Homo sapiens__NP_000448.3__HNF4A(1-474)(S87A_K106R_K108R_K126R_K 127R_S142A_S143A_S148A_T166A_S167A_S313A_S378A_T429A_T432A_ S436A_K458R_S461E)
  source 1..1642: mol_type = other RNA
aggagaaagcttaccatgcgcctgagcaagaccctcgtggacatggacatggccgactactccgccgcgctggaccccgcctacaccacgctggagttcgagaacgtccaggtgctcaccatgggcaacgacaccagcccgtccgaggggaccaacctgaacgcccccaacagcctgggcgtgtccgccctctgcgccatctgcggggaccgggcgacgggcaagcactacggggccagctcctgcgacggctgcaagggcttcttccgccgggccgtccgcaagaaccacatgtacagctgccggttctcccgccagtgcgtggtggaccgggaccgccggaaccagtgccgctactgccggctgaagaagtgcttccgcgccgggatgcggcgcgaggcggtccagaacgagcgggaccgcatcagcacccggcgcgccgcctacgaggactccgccctgcccagcatcaacgccctcctgcaggcggaggtgctgtcccggcagatcgccgcccccgtgagcggcatcaacggggacatccgcgccaagaagatcgcctccatcgcggacgtctgcgagagcatgaaggagcagctcctggtgctggtggagtgggccaagtacatcccggccttctgcgagctccccctggacgaccaggtcgccctgctccgggcccacgcgggcgagcacctcctgctgggggccaccaagcgctccatggtgttcaaggacgtgctgctgctcggcaacgactacatcgtcccccgccactgccccgagctggccgagatgagccgggtgtccatccgcatcctggacgagctcgtgctgccgttccaggagctgcagatcgacgacaacgagtacgcctacctcaaggccatcatcttcttcgaccccgacgcgaagggcctgagcgaccccgggaagatcaagcggctgcgcgcccaggtccaggtgagcctcgaggactacatcaacgaccggcagtacgactcccgcggccggttcggggagctgctgctcctgctgcccaccctccagagcatcacgtggcagatgatcgagcagatccagttcatcaagctgttcggcatggccaagatcgacaacctgctccaggagatgctgctgggcggggccccgtccgacgcgccccacgcccaccaccccctccacccccacctgatgcaggagcacatgggcaccaacgtgatcgtcgccaacaccatgccgacccacctgagcaacgggcagatgtgcgagtggccccgcccccggggccaggccgccgcgcccgaggccccgcagcccgccccgcccgggggctccggcagcgagccctacaagctgctccccggggccgtggccacgatcgtgcgccccctggaggcgatcccccagccgaccatcaccaagcaggaggtcatctgaggactagttataagactgactagcccgatgggcctcccaacgggccctcctcccctccttgcaccgagattaataaaaaaaaaaaaaaaaaaaaaaaaaaaaaaaaaaaaaaaaaaaaaaaaaaaaaaaaaaaaaaaatgcatcccccccccccccccccccccccccccccccaaaggctcttttcagagccaccagaatt

SEQ ID NO: 1668 - RNA, 1642 nt, synthetic construct
  misc_feature 1..1642: note = mRNA i-3 (A64-N5-C30-hSL-N5) (opt1) from Homo sapiens__NP_000448.3__HNF4A(1-474)(S87A_K106R_K108R_K126R_K 127R_S142A_S143A_S148E_T166A_S167E_S313A_S378E_T429E_T432E_ S436E_K458R_S461E)
  source 1..1642: mol_type = other RNA
aggagaaagcttaccatgcgcctgagcaagaccctcgtggacatggacatggccgactactccgccgcgctggaccccgcctacaccacgctggagttcgagaacgtccaggtgctcaccatgggcaacgacaccagcccgtccgaggggaccaacctgaacgcccccaacagcctgggcgtgtccgccctctgcgccatctgcggggaccgggcgacgggcaagcactacggggccagctcctgcgacggctgcaagggcttcttccgccgggccgtccgcaagaaccacatgtacagctgccggttctcccgccagtgcgtggtggaccgggaccgccggaaccagtgccgctactgccggctgaagaagtgcttccgcgccgggatgcggcgcgaggcggtccagaacgagcgggaccgcatcagcacccggcgcgccgcctacgaggactccgagctgcccagcatcaacgccctcctgcaggccgaggtgctgtcccggcagatcgcggagcccgtgagcggcatcaacggggacatccgcgccaagaagatcgcctccatcgccgacgtctgcgagagcatgaaggagcagctcctggtgctggtggagtgggccaagtacatcccggcgttctgcgagctccccctggacgaccaggtcgccctgctccgggcccacgccggcgagcacctcctgctgggggccaccaagcgctccatggtgttcaaggacgtgctgctgctcggcaacgactacatcgtcccccgccactgccccgagctggcggagatgagccgggtgtccatccgcatcctggacgagctcgtgctgccgttccaggagctgcagatcgacgacaacgagtacgcctacctcaaggccatcatcttcttcgaccccgacgccaagggcctgagcgaccccgggaagatcaagcggctgcgcgcccaggtccaggtgagcctcgaggactacatcaacgaccggcagtacgactcccgcggccggttcggggagctgctgctcctgctgcccaccctccagagcatcacgtggcagatgatcgagcagatccagttcatcaagctgttcggcatggcgaagatcgacaacctgctccaggagatgctgctgggcggggagccgtccgacgcgccccacgcccaccaccccctccacccccacctgatgcaggagcacatgggcaccaacgtgatcgtcgccaacaccatgccgacccacctgagcaacgggcagatgtgcgagtggccccgcccccggggccaggccgccgagcccgaggagccgcagcccgagccgcccgggggctccggcagcgagccctacaagctgctccccggggccgtggccacgatcgtgcgccccctggaggccatcccccagccgaccatcaccaagcaggaggtcatctgaggactagttataagactgactagcccgatgggcctcccaacgggccctcctcccctccttgcaccgagattaataaaaaaaaaaaaaaaaaaaaaaaaaaaaaaaaaaaaaaaaaaaaaaaaaaaaaaaaaaaaaaaatgcatcccccccccccccccccccccccccccccccaaaggctcttttcagagccaccagaatt

SEQ ID NO: 1669 - RNA, 1642 nt, synthetic construct
  misc_feature 1..1642: note = mRNA i-3 (A64-N5-C30-hSL-N5) (opt1) from Homo sapiens__NP_000448.3__HNF4A(1-474)(S87A_K106R_K108R_K126R_K 127R_S142A_S143A_S148A_T166A_S167A_K179R_K180R_S313A_S378A_ T429A_T432A_S436A_K458R_S461E)
  source 1..1642: mol_type = other RNA
aggagaaagcttaccatgcgcctgagcaagaccctcgtggacatggacatggccgactactccgccgcgctggaccccgcctacaccacgctggagttcgagaacgtccaggtgctcaccatgggcaacgacaccagcccgtccgaggggaccaacctgaacgcccccaacagcctgggcgtgtccgccctctgcgccatctgcggggaccgggcgacgggcaagcactacggggccagctcctgcgacggctgcaagggcttcttccgccgggccgtccgcaagaaccacatgtacagctgccggttctcccgccagtgcgtggtggaccgggaccgccggaaccagtgccgctactgccggctgaagaagtgcttccgcgccgggatgcggcgcgaggcggtccagaacgagcgggaccgcatcagcacccggcgcgccgcctacgaggactccgccctgcccagcatcaacgccctcctgcaggcggaggtgctgtcccggcagatcgccgcccccgtgagcggcatcaacggggacatccgcgcccggcgcatcgcctccatcgcggacgtctgcgagagcatgaaggagcagctcctggtgctggtggagtgggccaagtacatcccggccttctgcgagctccccctggacgaccaggtcgccctgctccgcgcccacgcgggcgagcacctcctgctgggggccaccaagcggtccatggtgttcaaggacgtgctgctgctcggcaacgactacatcgtcccccgccactgccccgagctggccgagatgagccgggtgtccatccgcatcctggacgagctcgtgctgccgttccaggagctgcagatcgacgacaacgagtacgcctacctcaaggccatcatcttcttcgaccccgacgcgaagggcctgagcgaccccgggaagatcaagcggctgcgcgcccaggtccaggtgagcctcgaggactacatcaacgaccggcagtacgactcccgcggccggttcggggagctgctgctcctgctgcccaccctccagagcatcacgtggcagatgatcgagcagatccagttcatcaagctgttcggcatggccaagatcgacaacctgctccaggagatgctgctgggcggggccccgtccgacgcgccccacgcccaccaccccctccacccccacctgatgcaggagcacatgggcaccaacgtgatcgtcgccaacaccatgccgacccacctgagcaacgggcagatgtgcgagtggccccgcccccggggccaggccgccgcgcccgaggccccgcagcccgccccgcccgggggctccggcagcgagccctacaagctgctccccggggccgtggccacgatcgtgcgccccctggaggcgatcccccagccgaccatcaccaagcaggaggtcatctgaggactagttataagactgactagcccgatgggcctcccaacgggccctcctcccctccttgcaccgagattaataaaaaaaaaaaaaaaaaaaaaaaaaaaaaaaaaaaaaaaaaaaaaaaaaaaaaaaaaaaaaaaatgcatcccccccccccccccccccccccccccccccaaaggctcttttcagagccaccagaatt

SEQ ID NO: 1670 - RNA, 1642 nt, synthetic construct
  misc_feature 1..1642: note = mRNA i-3 (A64-N5-C30-hSL-N5) (opt1) from Homo sapiens__NP_000448.3__HNF4A(1-474)(S87A_K106R_K108R_K126R_K 127R_S142A_S143A_S148A_T166A_S167A_K300R_K307R_K309R_S313A_ S378A_T429A_T432A_S436A_K458R_S461E)
  source 1..1642: mol_type = other RNA
aggagaaagcttaccatgcgcctgagcaagaccctcgtggacatggacatggccgactactccgccgcgctggaccccgcctacaccacgctggagttcgagaacgtccaggtgctcaccatgggcaacgacaccagcccgtccgaggggaccaacctgaacgcccccaacagcctgggcgtgtccgccctctgcgccatctgcggggaccgggcgacgggcaagcactacggggccagctcctgcgacggctgcaagggcttcttccgccgggccgtccgcaagaaccacatgtacagctgccggttctcccgccagtgcgtggtggaccgggaccgccggaaccagtgccgctactgccggctgaagaagtgcttccgcgccgggatgcggcgcgaggcggtccagaacgagcgggaccgcatcagcacccggcgcgccgcctacgaggactccgccctgcccagcatcaacgccctcctgcaggcggaggtgctgtcccggcagatcgccgcccccgtgagcggcatcaacggggacatccgcgccaagaagatcgcctccatcgcggacgtctgcgagagcatgaaggagcagctcctggtgctggtggagtgggccaagtacatcccggccttctgcgagctccccctggacgaccaggtcgccctgctccgggcccacgcgggcgagcacctcctgctgggggccaccaagcgctccatggtgttcaaggacgtgctgctgctcggcaacgactacatcgtcccccgccactgccccgagctggccgagatgagccgggtgtccatccgcatcctggacgagctcgtgctgccgttccaggagctgcagatcgacgacaacgagtacgcctacctcaaggccatcatcttcttcgaccccgacgcgcggggcctgagcgaccccgggcgcatccggcgcctgcgggcccaggtccaggtgagcctcgaggactacatcaacgaccgccagtacgactcccggggccgcttcggggagctgctgctcctgctgcccaccctccagagcatcacgtggcagatgatcgagcagatccagttcatcaagctgttcggcatggccaagatcgacaacctgctccaggagatgctgctgggcggggccccgtccgacgcgccccacgcccaccaccccctccacccccacctgatgcaggagcacatgggcaccaacgtgatcgtcgccaacaccatgccgacccacctgagcaacgggcagatgtgcgagtggccccggccccgcggccaggccgccgcgcccgaggccccgcagcccgccccgcccgggggctccggcagcgagccctacaagctgctccccggggccgtggccacgatcgtgcggcccctggaggcgatcccccagccgaccatcaccaagcaggaggtcatctgaggactagttataagactgactagcccgatgggcctcccaacgggccctcctcccctccttgcaccgagattaataaaaaaaaaaaaaaaaaaaaaaaaaaaaaaaaaaaaaaaaaaaaaaaaaaaaaaaaaaaaaaaatgcatcccccccccccccccccccccccccccccccaaaggctcttttcagagccaccagaatt

SEQ ID NO: 1671 - RNA, 1642 nt, synthetic construct
  misc_feature 1..1642: note = mRNA i-3 (A64-N5-C30-hSL-N5) (opt1) from Homo sapiens__NP_000448.3__HNF4A(1-474)(S87A_K106R_K108R_K126R_K 127R_S142A_S143A_S148A_T166A_S167A_S313A_S378A_T429A_T432A_ S436A_K447R_K458R_S461E_K470R)
  source 1..1642: mol_type = other RNA
aggagaaagcttaccatgcgcctgagcaagaccctcgtggacatggacatggccgactactccgccgcgctggaccccgcctacaccacgctggagttcgagaacgtccaggtgctcaccatgggcaacgacaccagcccgtccgaggggaccaacctgaacgcccccaacagcctgggcgtgtccgccctctgcgccatctgcggggaccgggcgacgggcaagcactacggggccagctcctgcgacggctgcaagggcttcttccgccgggccgtccgcaagaaccacatgtacagctgccggttctcccgccagtgcgtggtggaccgggaccgccggaaccagtgccgctactgccggctgaagaagtgcttccgcgccgggatgcggcgcgaggcggtccagaacgagcgggaccgcatcagcacccggcgcgccgcctacgaggactccgccctgcccagcatcaacgccctcctgcaggcggaggtgctgtcccggcagatcgccgcccccgtgagcggcatcaacggggacatccgcgccaagaagatcgcctccatcgcggacgtctgcgagagcatgaaggagcagctcctggtgctggtggagtgggccaagtacatcccggccttctgcgagctccccctggacgaccaggtcgccctgctccgggcccacgcgggcgagcacctcctgctgggggccaccaagcgctccatggtgttcaaggacgtgctgctgctcggcaacgactacatcgtcccccgccactgccccgagctggccgagatgagccgggtgtccatccgcatcctggacgagctcgtgctgccgttccaggagctgcagatcgacgacaacgagtacgcctacctcaaggccatcatcttcttcgaccccgacgcgaagggcctgagcgaccccgggaagatcaagcggctgcgcgcccaggtccaggtgagcctcgaggactacatcaacgaccggcagtacgactcccgcggccggttcggggagctgctgctcctgctgcccaccctccagagcatcacgtggcagatgatcgagcagatccagttcatcaagctgttcggcatggccaagatcgacaacctgctccaggagatgctgctgggcggggccccgtccgacgcgccccacgcccaccaccccctccacccccacctgatgcaggagcacatgggcaccaacgtgatcgtcgccaacaccatgccgacccacctgagcaacgggcagatgtgcgagtggccccgcccccggggccaggccgccgcgcccgaggccccgcagcccgccccgcccgggggctccggcagcgagccctaccgcctgctccccggggccgtggccacgatcgtgcggcccctggaggcgatcccccagccgaccatcacccgccaggaggtcatctgaggactagttataagactgactagcccgatgggcctcccaacgggccctcctcccctccttgcaccgagattaataaaaaaaaaaaaaaaaaaaaaaaaaaaaaaaaaaaaaaaaaaaaaaaaaaaaaaaaaaaaaaaatgcatcccccccccccccccccccccccccccccccaaaggctcttttcagagccaccagaatt

SEQ ID NO: 1672 - RNA, 1642 nt, synthetic construct
  misc_feature 1..1642: note = mRNA i-3 (A64-N5-C30-hSL-N5) (opt1) from Homo sapiens__NP_000448.3__HNF4A(1-474)(S87A_K106R_K108R_K126R_K 127R_S142A_S143A_S148A_T166A_S167A_K179R_K180R_K234R_K300R_ K307R_K309R_S313A_S378A_T429A_T432A_S436A_K447R_K458R_S461E _K470R)
  source 1..1642: mol_type = other RNA
aggagaaagcttaccatgcgcctgagcaagaccctcgtggacatggacatggccgactactccgccgcgctggaccccgcctacaccacgctggagttcgagaacgtccaggtgctcaccatgggcaacgacaccagcccgtccgaggggaccaacctgaacgcccccaacagcctgggcgtgtccgccctctgcgccatctgcggggaccgggcgacgggcaagcactacggggccagctcctgcgacggctgcaagggcttcttccgccgggccgtccgcaagaaccacatgtacagctgccggttctcccgccagtgcgtggtggaccgggaccgccggaaccagtgccgctactgccggctgaagaagtgcttccgcgccgggatgcggcgcgaggcggtccagaacgagcgggaccgcatcagcacccggcgcgccgcctacgaggactccgccctgcccagcatcaacgccctcctgcaggcggaggtgctgtcccggcagatcgccgcccccgtgagcggcatcaacggggacatccgcgcccggcgcatcgcctccatcgcggacgtctgcgagagcatgaaggagcagctcctggtgctggtggagtgggccaagtacatcccggccttctgcgagctccccctggacgaccaggtcgccctgctccgcgcccacgcgggcgagcacctcctgctgggggccacccggcgctccatggtgttcaaggacgtgctgctgctcggcaacgactacatcgtcccccggcactgccccgagctggccgagatgagccgcgtgtccatccggatcctggacgagctcgtgctgccgttccaggagctgcagatcgacgacaacgagtacgcctacctcaaggccatcatcttcttcgaccccgacgcgcgcggcctgagcgaccccgggcggatccgccggctgcgcgcccaggtccaggtgagcctcgaggactacatcaacgaccggcagtacgactcccgcggccggttcggggagctgctgctcctgctgcccaccctccagagcatcacgtggcagatgatcgagcagatccagttcatcaagctgttcggcatggccaagatcgacaacctgctccaggagatgctgctgggcggggccccgtccgacgcgccccacgcccaccaccccctccacccccacctgatgcaggagcacatgggcaccaacgtgatcgtcgccaacaccatgccgacccacctgagcaacgggcagatgtgcgagtggccccgcccccggggccaggccgccgcgcccgaggccccgcagcccgccccgcccgggggctccggcagcgagccctaccgcctgctccccggggccgtggccacgatcgtgcggcccctggaggcgatcccccagccgaccatcacccgccaggaggtcatctgaggactagttataagactgactagcccgatgggcctcccaacgggccctcctcccctccttgcaccgagattaataaaaaaaaaaaaaaaaaaaaaaaaaaaaaaaaaaaaaaaaaaaaaaaaaaaaaaaaaaaaaaaatgcatcccccccccccccccccccccccccccccccaaaggctcttttcagagccaccagaatt

SEQ ID NO: 1673 - RNA, 1642 nt, synthetic construct
  misc_feature 1..1642: note = mRNA i-3 (A64-N5-C30-hSL-N5) (opt1) from Homo sapiens__NP_000448.3__HNF4A(1-474)(S87A_S95A_S99A_K106R_K10 8R_K126R_K127R_S142A_S143A_S148A_T166A_S167A_S313A_S378A_T4 29A_T432A_S436A_K458R_S461E)
  source 1..1642: mol_type = other RNA
aggagaaagcttaccatgcgcctgagcaagaccctcgtggacatggacatggccgactactccgccgcgctggaccccgcctacaccacgctggagttcgagaacgtccaggtgctcaccatgggcaacgacaccagcccgtccgaggggaccaacctgaacgcccccaacagcctgggcgtgtccgccctctgcgccatctgcggggaccgggcgacgggcaagcactacggggccagctcctgcgacggctgcaagggcttcttccgccgggccgtccgcaagaaccacatgtacgcctgccggttcgcgcgccagtgcgtggtggaccgggaccgccggaaccagtgccgctactgccggctgaagaagtgcttccgcgccgggatgcggcgcgaggccgtccagaacgagcgggaccgcatcagcacccggcgcgccgcctacgaggactccgcgctgcccagcatcaacgccctcctgcaggccgaggtgctgtcccggcagatcgccgcccccgtgagcggcatcaacggggacatccgcgcgaagaagatcgcctccatcgccgacgtctgcgagagcatgaaggagcagctcctggtgctggtggagtgggccaagtacatcccggccttctgcgagctccccctggacgaccaggtcgcgctgctccgggcccacgccggcgagcacctcctgctgggggccaccaagcgctccatggtgttcaaggacgtgctgctgctcggcaacgactacatcgtcccccgccactgccccgagctggccgagatgagccgggtgtccatccgcatcctggacgagctcgtgctgccgttccaggagctgcagatcgacgacaacgagtacgcgtacctcaaggccatcatcttcttcgaccccgacgccaagggcctgagcgaccccgggaagatcaagcggctgcgcgcccaggtccaggtgtccctcgaggactacatcaacgaccggcagtacgacagccgcggccggttcggggagctgctgctcctgctgcccaccctccagagcatcacgtggcagatgatcgagcagatccagttcatcaagctgttcggcatggcgaagatcgacaacctgctccaggagatgctgctgggcggggccccgtccgacgcgccccacgcccaccaccccctccacccccacctgatgcaggagcacatgggcaccaacgtgatcgtcgccaacaccatgccgacccacctgagcaacgggcagatgtgcgagtggccccgcccccggggccaggccgccgcccccgaggccccgcagcccgccccgcccgggggctccggcagcgagccctacaagctgctccccggggcggtggccacgatcgtgcgccccctggaggccatcccccagccgaccatcaccaagcaggaggtcatctgaggactagttataagactgactagcccgatgggcctcccaacgggccctcctcccctccttgcaccgagattaataaaaaaaaaaaaaaaaaaaaaaaaaaaaaaaaaaaaaaaaaaaaaaaaaaaaaaaaaaaaaaaatgcatcccccccccccccccccccccccccccccccaaaggctcttttcagagccaccagaatt

SEQ ID NO: 1674 - RNA, 1642 nt, synthetic construct
  misc_feature 1..1642: note = mRNA i-3 (A64-N5-C30-hSL-N5) (opt1) from Homo sapiens__NP_000448.3__HNF4A(1-474)(S87A_K106R_K108R_K126R_K 127R_S138A_T139A_S142A_S143A_S148A_T166A_S167A_S313A_S378A_ T429A_T432A_S436A_K458R_S461E)
  source 1..1642: mol_type = other RNA
aggagaaagcttaccatgcgcctgagcaagaccctcgtggacatggacatggccgactactccgccgcgctggaccccgcctacaccacgctggagttcgagaacgtccaggtgctcaccatgggcaacgacaccagcccgtccgaggggaccaacctgaacgcccccaacagcctgggcgtgtccgccctctgcgccatctgcggggaccgggcgacgggcaagcactacggggccagctcctgcgacggctgcaagggcttcttccgccgggccgtccgcaagaaccacatgtacagctgccggttctcccgccagtgcgtggtggaccgggaccgccggaaccagtgccgctactgccggctgaagaagtgcttccgcgccgggatgcggcgcgaggcggtccagaacgagcgggaccgcatcgccgcccggcgcgccgcctacgaggacagcgcgctgccctccatcaacgccctcctgcaggccgaggtgctgagccggcagatcgccgcccccgtgtccggcatcaacggggacatccgcgcgaagaagatcgccagcatcgccgacgtctgcgagtccatgaaggagcagctcctggtgctggtggagtgggccaagtacatcccggccttctgcgagctccccctggacgaccaggtcgcgctgctccgggcccacgccggcgagcacctcctgctgggggccaccaagcgcagcatggtgttcaaggacgtgctgctgctcggcaacgactacatcgtcccccgccactgccccgagctggccgagatgtcccgggtgagcatccgcatcctggacgagctcgtgctgccgttccaggagctgcagatcgacgacaacgagtacgcgtacctcaaggccatcatcttcttcgaccccgacgccaagggcctgtccgaccccgggaagatcaagcggctgcgcgcccaggtccaggtgagcctcgaggactacatcaacgaccggcagtacgacagccgcggccggttcggggagctgctgctcctgctgcccaccctccagtccatcacctggcagatgatcgagcagatccagttcatcaagctgttcggcatggcgaagatcgacaacctgctccaggagatgctgctgggcggggccccgagcgacgcgccccacgcccaccaccccctccacccccacctgatgcaggagcacatgggcacgaacgtgatcgtcgccaacaccatgccgacccacctgtccaacgggcagatgtgcgagtggccccgcccccggggccaggccgccgcccccgaggccccgcagcccgccccgcccgggggcagcggctccgagccctacaagctgctccccggggcggtggccaccatcgtgcgccccctggaggccatcccccagccgacgatcaccaagcaggaggtcatctgaggactagttataagactgactagcccgatgggcctcccaacgggccctcctcccctccttgcaccgagattaataaaaaaaaaaaaaaaaaaaaaaaaaaaaaaaaaaaaaaaaaaaaaaaaaaaaaaaaaaaaaaaatgcatcccccccccccccccccccccccccccccccaaaggctcttttcagagccaccagaatt

SEQ ID NO: 1675 - RNA, 1642 nt, synthetic construct
  misc_feature 1..1642: note = mRNA i-3 (A64-N5-C30-hSL-N5) (opt1) from Homo sapiens__NP_000448.3__HNF4A(1-474)(S87A_S95A_S99A_K106R_K10 8R_K126R_K127R_S138A_T139A_S142A_S143A_S148A_T166A_S167A_S3 13A_S378A_T429A_T432A_S436A_K458R_S461E)
  source 1..1642: mol_type = other RNA
aggagaaagcttaccatgcgcctgagcaagaccctcgtggacatggacatggccgactactccgccgcgctggaccccgcctacaccacgctggagttcgagaacgtccaggtgctcaccatgggcaacgacaccagcccgtccgaggggaccaacctgaacgcccccaacagcctgggcgtgtccgccctctgcgccatctgcggggaccgggcgacgggcaagcactacggggccagctcctgcgacggctgcaagggcttcttccgccgggccgtccgcaagaaccacatgtacgcctgccggttcgcgcgccagtgcgtggtggaccgggaccgccggaaccagtgccgctactgccggctgaagaagtgcttccgcgccgggatgcggcgcgaggccgtccagaacgagcgggaccgcatcgccgcccggcgcgcggcctacgaggacagcgccctgccctccatcaacgccctcctgcaggccgaggtgctgagccggcagatcgcggcccccgtgtccggcatcaacggggacatccgcgccaagaagatcgccagcatcgccgacgtctgcgagtccatgaaggagcagctcctggtgctggtggagtgggcgaagtacatcccggccttctgcgagctccccctggacgaccaggtcgccctgctccgggcccacgccggcgagcacctcctgctgggggcgaccaagcgcagcatggtgttcaaggacgtgctgctgctcggcaacgactacatcgtcccccgccactgccccgagctggccgagatgtcccgggtgagcatccgcatcctggacgagctcgtgctgccgttccaggagctgcagatcgacgacaacgagtacgcctacctcaaggccatcatcttcttcgaccccgacgcgaagggcctgtccgaccccgggaagatcaagcggctgcgcgcccaggtccaggtgagcctcgaggactacatcaacgaccggcagtacgactcccgcggccggttcggggagctgctgctcctgctgcccaccctccagagcatcacctggcagatgatcgagcagatccagttcatcaagctgttcggcatggccaagatcgacaacctgctccaggagatgctgctgggcggggccccgagcgacgcgccccacgcccaccaccccctccacccccacctgatgcaggagcacatgggcacgaacgtgatcgtcgccaacaccatgccgacccacctgtccaacgggcagatgtgcgagtggccccgcccccggggccaggccgccgcccccgaggcgccgcagcccgccccgcccgggggcagcggctccgagccctacaagctgctccccggggccgtggccaccatcgtgcgccccctggaggccatcccccagccgacgatcaccaagcaggaggtcatctgaggactagttataagactgactagcccgatgggcctcccaacgggccctcctcccctccttgcaccgagattaataaaaaaaaaaaaaaaaaaaaaaaaaaaaaaaaaaaaaaaaaaaaaaaaaaaaaaaaaaaaaaaatgcatcccccccccccccccccccccccccccccccaaaggctcttttcagagccaccagaatt

SEQ ID NO: 1676 - RNA, 1642 nt, synthetic construct
  misc_feature 1..1642: note = mRNA i-3 (A64-N5-C30-hSL-N5) (opt2) from Homo sapiens__NP_000448.3__HNF4A(1-474)
  source 1..1642: mol_type = other RNA
aggagaaagcttaccatgcgcctctccaagaccctcgtcgacatggacatggccgactactccgccgccctcgaccccgcctacaccaccctcgagttcgagaacgtccaggtcctcaccatgggcaacgacacctccccctccgagggcaccaacctcaacgcccccaactccctcggcgtctccgccctctgcgccatctgcggcgaccgcgccaccggcaagcactacggcgcctcctcctgcgacggctgcaagggcttcttccgccgctccgtccgcaagaaccacatgtactcctgccgcttctcccgccagtgcgtcgtcgacaaggacaagcgcaaccagtgccgctactgccgcctcaagaagtgcttccgcgccggcatgaagaaggaggccgtccagaacgagcgcgaccgcatctccacccgccgctcctcctacgaggactcctccctcccctccatcaacgccctcctccaggccgaggtcctctcccgccagatcacctcccccgtctccggcatcaacggcgacatccgcgccaagaagatcgcctccatcgccgacgtctgcgagtccatgaaggagcagctcctcgtcctcgtcgagtgggccaagtacatccccgccttctgcgagctccccctcgacgaccaggtcgccctcctccgcgcccacgccggcgagcacctcctcctcggcgccaccaagcgctccatggtcttcaaggacgtcctcctcctcggcaacgactacatcgtcccccgccactgccccgagctcgccgagatgtcccgcgtctccatccgcatcctcgacgagctcgtcctccccttccaggagctccagatcgacgacaacgagtacgcctacctcaaggccatcatcttcttcgaccccgacgccaagggcctctccgaccccggcaagatcaagcgcctccgctcccaggtccaggtctccctcgaggactacatcaacgaccgccagtacgactcgcgcgggcgcttcggcgagctcctcctcctcctccccaccctccagtccatcacctggcagatgatcgagcagatccagttcatcaagctgttcggcatggccaagatcgacaacctcctccaggagatgctcctcggcggctccccctccgacgccccccacgcccaccaccccctccacccccacctcatgcaggagcacatgggcaccaacgtcatcgtcgccaacaccatgcccacccacctctccaacggccagatgtgcgagtggccccgcccgcgcggccaggccgccacccccgagaccccccagccctccccccccggcggctccggctccgagccctacaagctcctccccggcgccgtcgccaccatcgtcaagcccctctccgccatcccccagcccaccatcaccaagcaggaggtcatctgaggactagttataagactgactagcccgatgggcctcccaacgggccctcctcccctccttgcaccgagattaataaaaaaaaaaaaaaaaaaaaaaaaaaaaaaaaaaaaaaaaaaaaaaaaaaaaaaaaaaaaaaaatgcatcccccccccccccccccccccccccccccccaaaggctcttttcagagccaccagaatt

SEQ ID NO: 1677 - RNA, 1642 nt, synthetic construct
  misc_feature 1..1642: note = mRNA i-3 (A64-N5-C30-hSL-N5) (opt2) from Homo sapiens__NP_000448.3__HNF4A(1-474)(S313A)
  source 1..1642: mol_type = other RNA
aggagaaagcttaccatgcgcctctccaagaccctcgtcgacatggacatggccgactactccgccgccctcgaccccgcctacaccaccctcgagttcgagaacgtccaggtcctcaccatgggcaacgacacctccccctccgagggcaccaacctcaacgcccccaactccctcggcgtctccgccctctgcgccatctgcggcgaccgcgccaccggcaagcactacggcgcctcctcctgcgacggctgcaagggcttcttccgccgctccgtccgcaagaaccacatgtactcctgccgcttctcccgccagtgcgtcgtcgacaaggacaagcgcaaccagtgccgctactgccgcctcaagaagtgcttccgcgccggcatgaagaaggaggccgtccagaacgagcgcgaccgcatctccacccgccgctcctcctacgaggactcctccctcccctccatcaacgccctcctccaggccgaggtcctctcccgccagatcacctcccccgtctccggcatcaacggcgacatccgcgccaagaagatcgcctccatcgccgacgtctgcgagtccatgaaggagcagctcctcgtcctcgtcgagtgggccaagtacatccccgccttctgcgagctccccctcgacgaccaggtcgccctcctccgcgcccacgccggcgagcacctcctcctcggcgccaccaagcgctccatggtcttcaaggacgtcctcctcctcggcaacgactacatcgtcccccgccactgccccgagctcgccgagatgtcccgcgtctccatccgcatcctcgacgagctcgtcctccccttccaggagctccagatcgacgacaacgagtacgcctacctcaaggccatcatcttcttcgaccccgacgccaagggcctctccgaccccggcaagatcaagcgcctccgcgcccaggtccaggtctccctcgaggactacatcaacgaccgccagtacgactcccgcggccgcttcggcgagctcctcctcctcctccccaccctccagtccatcacctggcagatgatcgagcagatccagttcatcaagctcttcggcatggccaagatcgacaacctcctccaggagatgctcctcggcggctccccctccgacgccccccacgcccaccaccccctccacccccacctcatgcaggagcacatgggcaccaacgtcatcgtcgccaacaccatgcccacccacctctccaacggccagatgtgcgagtggccccgcccccgcggccaggccgccacccccgagaccccccagccctccccccccggcggctccggctccgagccctacaagctcctccccggcgccgtcgccaccatcgtcaagcccctctccgccatcccccagcccaccatcaccaagcaggaggtcatctgaggactagttataagactgactagcccgatgggcctcccaacgggccctcctcccctccttgcaccgagattaataaaaaaaaaaaaaaaaaaaaaaaaaaaaaaaaaaaaaaaaaaaaaaaaaaaaaaaaaaaaaaaatgcatcccccccccccccccccccccccccccccccaaaggctcttttcagagccaccagaatt

SEQ ID NO: 1678 - RNA, 1642 nt, synthetic construct
  misc_feature 1..1642: note = mRNA i-3 (A64-N5-C30-hSL-N5) (opt2) from Homo sapiens__NP_000448.3__HNF4A(1-474)(S313E)
  source 1..1642: mol_type = other RNA
aggagaaagcttaccatgcgcctctccaagaccctcgtcgacatggacatggccgactactccgccgccctcgaccccgcctacaccaccctcgagttcgagaacgtccaggtcctcaccatgggcaacgacacctccccctccgagggcaccaacctcaacgcccccaactccctcggcgtctccgccctctgcgccatctgcggcgaccgcgccaccggcaagcactacggcgcctcctcctgcgacggctgcaagggcttcttccgccgctccgtccgcaagaaccacatgtactcctgccgcttctcccgccagtgcgtcgtcgacaaggacaagcgcaaccagtgccgctactgccgcctcaagaagtgcttccgcgccggcatgaagaaggaggccgtccagaacgagcgcgaccgcatctccacccgccgctcctcctacgaggactcctccctcccctccatcaacgccctcctccaggccgaggtcctctcccgccagatcacctcccccgtctccggcatcaacggcgacatccgcgccaagaagatcgcctccatcgccgacgtctgcgagtccatgaaggagcagctcctcgtcctcgtcgagtgggccaagtacatccccgccttctgcgagctccccctcgacgaccaggtcgccctcctccgcgcccacgccggcgagcacctcctcctcggcgccaccaagcgctccatggtcttcaaggacgtcctcctcctcggcaacgactacatcgtcccccgccactgccccgagctcgccgagatgtcccgcgtctccatccgcatcctcgacgagctcgtcctccccttccaggagctccagatcgacgacaacgagtacgcctacctcaaggccatcatcttcttcgaccccgacgccaagggcctctccgaccccggcaagatcaagcgcctccgcgagcaggtccaggtctccctcgaggactacatcaacgaccgccagtacgactcccgcggccgcttcggcgagctcctcctcctcctccccaccctccagtccatcacctggcagatgatcgagcagatccagttcatcaagctcttcggcatggccaagatcgacaacctcctccaggagatgctcctcggcggctccccctccgacgccccccacgcccaccaccccctccacccccacctcatgcaggagcacatgggcaccaacgtcatcgtcgccaacaccatgcccacccacctctccaacggccagatgtgcgagtggccccgcccccgcggccaggccgccacccccgagaccccccagccctccccccccggcggctccggctccgagccctacaagctcctccccggcgccgtcgccaccatcgtcaagcccctctccgccatcccccagcccaccatcaccaagcaggaggtcatctgaggactagttataagactgactagcccgatgggcctcccaacgggccctcctcccctccttgcaccgagattaataaaaaaaaaaaaaaaaaaaaaaaaaaaaaaaaaaaaaaaaaaaaaaaaaaaaaaaaaaaaaaaatgcatcccccccccccccccccccccccccccccccaaaggctcttttcagagccaccagaatt

SEQ ID NO: 1679 - RNA, 1642 nt, synthetic construct
  misc_feature 1..1642: note = mRNA i-3 (A64-N5-C30-hSL-N5) (opt2) from Homo sapiens__NP_000448.3__HNF4A(1-474)(S142A_S143A)
  source 1..1642: mol_type = other RNA
aggagaaagcttaccatgcgcctctccaagaccctcgtcgacatggacatggccgactactccgccgccctcgaccccgcctacaccaccctcgagttcgagaacgtccaggtcctcaccatgggcaacgacacctccccctccgagggcaccaacctcaacgcccccaactccctcggcgtctccgccctctgcgccatctgcggcgaccgcgccaccggcaagcactacggcgcctcctcctgcgacggctgcaagggcttcttccgccgctccgtccgcaagaaccacatgtactcctgccgcttctcccgccagtgcgtcgtcgacaaggacaagcgcaaccagtgccgctactgccgcctcaagaagtgcttccgcgccggcatgaagaaggaggccgtccagaacgagcgcgaccgcatctccacccgccgcgccgcctacgaggactcctccctcccctccatcaacgccctcctccaggccgaggtcctctcccgccagatcacctcccccgtctccggcatcaacggcgacatccgcgccaagaagatcgcctccatcgccgacgtctgcgagtccatgaaggagcagctcctcgtcctcgtcgagtgggccaagtacatccccgccttctgcgagctccccctcgacgaccaggtcgccctcctccgcgcccacgccggcgagcacctcctcctcggcgccaccaagcgctccatggtcttcaaggacgtcctcctcctcggcaacgactacatcgtcccccgccactgccccgagctcgccgagatgtcccgcgtctccatccgcatcctcgacgagctcgtcctccccttccaggagctccagatcgacgacaacgagtacgcctacctcaaggccatcatcttcttcgaccccgacgccaagggcctctccgaccccggcaagatcaagcgcctccgctcccaggtccaggtctccctcgaggactacatcaacgaccgccagtacgactcccgcggccgcttcggcgagctcctcctcctcctccccaccctccagtccatcacctggcagatgatcgagcagatccagttcatcaagctcttcggcatggccaagatcgacaacctcctccaggagatgctcctcggcggctccccctccgacgccccccacgcccaccaccccctccacccccacctcatgcaggagcacatgggcaccaacgtcatcgtcgccaacaccatgcccacccacctctccaacggccagatgtgcgagtggccccgcccccgcggccaggccgccacccccgagaccccccagccctccccccccggcggctccggctccgagccctacaagctcctccccggcgccgtcgccaccatcgtcaagcccctctccgccatcccccagcccaccatcaccaagcaggaggtcatctgaggactagttataagactgactagcccgatgggcctcccaacgggccctcctcccctccttgcaccgagattaataaaaaaaaaaaaaaaaaaaaaaaaaaaaaaaaaaaaaaaaaaaaaaaaaaaaaaaaaaaaaaaatgcatcccccccccccccccccccccccccccccccaaaggctcttttcagagccaccagaatt

SEQ ID NO: 1680 - RNA, 1642 nt, synthetic construct
  misc_feature 1..1642: note = mRNA i-3 (A64-N5-C30-hSL-N5) (opt2) from Homo sapiens__NP_000448.3__HNF4A(1-474)(S142E_S143E)
  source 1..1642: mol_type = other RNA
aggagaaagcttaccatgcgcctctccaagaccctcgtcgacatggacatggccgactactccgccgccctcgaccccgcctacaccaccctcgagttcgagaacgtccaggtcctcaccatgggcaacgacacctccccctccgagggcaccaacctcaacgcccccaactccctcggcgtctccgccctctgcgccatctgcggcgaccgcgccaccggcaagcactacggcgcctcctcctgcgacggctgcaagggcttcttccgccgctccgtccgcaagaaccacatgtactcctgccgcttctcccgccagtgcgtcgtcgacaaggacaagcgcaaccagtgccgctactgccgcctcaagaagtgcttccgcgccggcatgaagaaggaggccgtccagaacgagcgcgaccgcatctccacccgccgcgaggagtacgaggactcctccctcccctccatcaacgccctcctccaggccgaggtcctctcccgccagatcacctcccccgtctccggcatcaacggcgacatccgcgccaagaagatcgcctccatcgccgacgtctgcgagtccatgaaggagcagctcctcgtcctcgtcgagtgggccaagtacatccccgccttctgcgagctccccctcgacgaccaggtcgccctcctccgcgcccacgccggcgagcacctcctcctcggcgccaccaagcgctccatggtcttcaaggacgtcctcctcctcggcaacgactacatcgtcccccgccactgccccgagctcgccgagatgtcccgcgtctccatccgcatcctcgacgagctcgtcctccccttccaggagctccagatcgacgacaacgagtacgcctacctcaaggccatcatcttcttcgaccccgacgccaagggcctctccgaccccggcaagatcaagcgcctccgctcccaggtccaggtctccctcgaggactacatcaacgaccgccagtacgactcccgcggccgcttcggcgagctcctcctcctcctccccaccctccagtccatcacctggcagatgatcgagcagatccagttcatcaagctcttcggcatggccaagatcgacaacctcctccaggagatgctcctcggcggctccccctccgacgccccccacgcccaccaccccctccacccccacctcatgcaggagcacatgggcaccaacgtcatcgtcgccaacaccatgcccacccacctctccaacggccagatgtgcgagtggccccgcccccgcggccaggccgccacccccgagaccccccagccctccccccccggcggctccggctccgagccctacaagctcctccccggcgccgtcgccaccatcgtcaagcccctctccgccatcccccagcccaccatcaccaagcaggaggtcatctgaggactagttataagactgactagcccgatgggcctcccaacgggccctcctcccctccttgcaccgagattaataaaaaaaaaaaaaaaaaaaaaaaaaaaaaaaaaaaaaaaaaaaaaaaaaaaaaaaaaaaaaaaatgcatcccccccccccccccccccccccccccccccaaaggctcttttcagagccaccagaatt

SEQ ID NO: 1681 - RNA, 1642 nt, synthetic construct
  misc_feature 1..1642: note = mRNA i-3 (A64-N5-C30-hSL-N5) (opt2) from Homo sapiens__NP_000448.3__HNF4A(1-474)(S143A)
  source 1..1642: mol_type = other RNA
aggagaaagcttaccatgcgcctctccaagaccctcgtcgacatggacatggccgactactccgccgccctcgaccccgcctacaccaccctcgagttcgagaacgtccaggtcctcaccatgggcaacgacacctccccctccgagggcaccaacctcaacgcccccaactccctcggcgtctccgccctctgcgccatctgcggcgaccgcgccaccggcaagcactacggcgcctcctcctgcgacggctgcaagggcttcttccgccgctccgtccgcaagaaccacatgtactcctgccgcttctcccgccagtgcgtcgtcgacaaggacaagcgcaaccagtgccgctactgccgcctcaagaagtgcttccgcgccggcatgaagaaggaggccgtccagaacgagcgcgaccgcatctccacccgccgctccgcctacgaggactcctccctcccctccatcaacgccctcctccaggccgaggtcctctcccgccagatcacctcccccgtctccggcatcaacggcgacatccgcgccaagaagatcgcctccatcgccgacgtctgcgagtccatgaaggagcagctcctcgtcctcgtcgagtgggccaagtacatccccgccttctgcgagctccccctcgacgaccaggtcgccctcctccgcgcccacgccggcgagcacctcctcctcggcgccaccaagcgctccatggtcttcaaggacgtcctcctcctcggcaacgactacatcgtcccccgccactgccccgagctcgccgagatgtcccgcgtctccatccgcatcctcgacgagctcgtcctccccttccaggagctccagatcgacgacaacgagtacgcctacctcaaggccatcatcttcttcgaccccgacgccaagggcctctccgaccccggcaagatcaagcgcctccgctcccaggtccaggtctccctcgaggactacatcaacgaccgccagtacgactcccgcggccgcttcggcgagctcctcctcctcctccccaccctccagtccatcacctggcagatgatcgagcagatccagttcatcaagctcttcggcatggccaagatcgacaacctcctccaggagatgctcctcggcggctccccctccgacgccccccacgcccaccaccccctccacccccacctcatgcaggagcacatgggcaccaacgtcatcgtcgccaacaccatgcccacccacctctccaacggccagatgtgcgagtggccccgcccccgcggccaggccgccacccccgagaccccccagccctccccccccggcggctccggctccgagccctacaagctcctccccggcgccgtcgccaccatcgtcaagcccctctccgccatcccccagcccaccatcaccaagcaggaggtcatctgaggactagttataagactgactagcccgatgggcctcccaacgggccctcctcccctccttgcaccgagattaataaaaaaaaaaaaaaaaaaaaaaaaaaaaaaaaaaaaaaaaaaaaaaaaaaaaaaaaaaaaaaaatgcatcccccccccccccccccccccccccccccccaaaggctcttttcagagccaccagaatt

SEQ ID NO: 1682 - RNA, 1642 nt, synthetic construct
  misc_feature 1..1642: note = mRNA i-3 (A64-N5-C30-hSL-N5) (opt2) from Homo sapiens__NP_000448.3__HNF4A(1-474)(T166A)
  source 1..1642: mol_type = other RNA
aggagaaagcttaccatgcgcctctccaagaccctcgtcgacatggacatggccgactactccgccgccctcgaccccgcctacaccaccctcgagttcgagaacgtccaggtcctcaccatgggcaacgacacctccccctccgagggcaccaacctcaacgcccccaactccctcggcgtctccgccctctgcgccatctgcggcgaccgcgccaccggcaagcactacggcgcctcctcctgcgacggctgcaagggcttcttccgccgctccgtccgcaagaaccacatgtactcctgccgcttctcccgccagtgcgtcgtcgacaaggacaagcgcaaccagtgccgctactgccgcctcaagaagtgcttccgcgccggcatgaagaaggaggccgtccagaacgagcgcgaccgcatctccacccgccgctcctcctacgaggactcctccctcccctccatcaacgccctcctccaggccgaggtcctctcccgccagatcgcctcccccgtctccggcatcaacggcgacatccgcgccaagaagatcgcctccatcgccgacgtctgcgagtccatgaaggagcagctcctcgtcctcgtcgagtgggccaagtacatccccgccttctgcgagctccccctcgacgaccaggtcgccctcctccgcgcccacgccggcgagcacctcctcctcggcgccaccaagcgctccatggtcttcaaggacgtcctcctcctcggcaacgactacatcgtcccccgccactgccccgagctcgccgagatgtcccgcgtctccatccgcatcctcgacgagctcgtcctccccttccaggagctccagatcgacgacaacgagtacgcctacctcaaggccatcatcttcttcgaccccgacgccaagggcctctccgaccccggcaagatcaagcgcctccgctcccaggtccaggtctccctcgaggactacatcaacgaccgccagtacgactcccgcggccgcttcggcgagctcctcctcctcctccccaccctccagtccatcacctggcagatgatcgagcagatccagttcatcaagctcttcggcatggccaagatcgacaacctcctccaggagatgctcctcggcggctccccctccgacgccccccacgcccaccaccccctccacccccacctcatgcaggagcacatgggcaccaacgtcatcgtcgccaacaccatgcccacccacctctccaacggccagatgtgcgagtggccccgcccccgcggccaggccgccacccccgagaccccccagccctccccccccggcggctccggctccgagccctacaagctcctccccggcgccgtcgccaccatcgtcaagcccctctccgccatcccccagcccaccatcaccaagcaggaggtcatctgaggactagttataagactgactagcccgatgggcctcccaacgggccctcctcccctccttgcaccgagattaataaaaaaaaaaaaaaaaaaaaaaaaaaaaaaaaaaaaaaaaaaaaaaaaaaaaaaaaaaaaaaaatgcatcccccccccccccccccccccccccccccccaaaggctcttttcagagccaccagaatt

SEQ ID NO: 1683 - RNA, 1642 nt, synthetic construct
  misc_feature 1..1642: note = mRNA i-3 (A64-N5-C30-hSL-N5) (opt2) from Homo sapiens__NP_000448.3__HNF4A(1-474)(S167E)
  source 1..1642: mol_type = other RNA
aggagaaagcttaccatgcgcctctccaagaccctcgtcgacatggacatggccgactactccgccgccctcgaccccgcctacaccaccctcgagttcgagaacgtccaggtcctcaccatgggcaacgacacctccccctccgagggcaccaacctcaacgcccccaactccctcggcgtctccgccctctgcgccatctgcggcgaccgcgccaccggcaagcactacggcgcctcctcctgcgacggctgcaagggcttcttccgccgctccgtccgcaagaaccacatgtactcctgccgcttctcccgccagtgcgtcgtcgacaaggacaagcgcaaccagtgccgctactgccgcctcaagaagtgcttccgcgccggcatgaagaaggaggccgtccagaacgagcgcgaccgcatctccacccgccgctcctcctacgaggactcctccctcccctccatcaacgccctcctccaggccgaggtcctctcccgccagatcaccgagcccgtctccggcatcaacggcgacatccgcgccaagaagatcgcctccatcgccgacgtctgcgagtccatgaaggagcagctcctcgtcctcgtcgagtgggccaagtacatccccgccttctgcgagctccccctcgacgaccaggtcgccctcctccgcgcccacgccggcgagcacctcctcctcggcgccaccaagcgctccatggtcttcaaggacgtcctcctcctcggcaacgactacatcgtcccccgccactgccccgagctcgccgagatgtcccgcgtctccatccgcatcctcgacgagctcgtcctccccttccaggagctccagatcgacgacaacgagtacgcctacctcaaggccatcatcttcttcgaccccgacgccaagggcctctccgaccccggcaagatcaagcgcctccgctcccaggtccaggtctccctcgaggactacatcaacgaccgccagtacgactcccgcggccgcttcggcgagctcctcctcctcctccccaccctccagtccatcacctggcagatgatcgagcagatccagttcatcaagctcttcggcatggccaagatcgacaacctcctccaggagatgctcctcggcggctccccctccgacgccccccacgcccaccaccccctccacccccacctcatgcaggagcacatgggcaccaacgtcatcgtcgccaacaccatgcccacccacctctccaacggccagatgtgcgagtggccccgcccccgcggccaggccgccacccccgagaccccccagccctccccccccggcggctccggctccgagccctacaagctcctccccggcgccgtcgccaccatcgtcaagcccctctccgccatcccccagcccaccatcaccaagcaggaggtcatctgaggactagttataagactgactagcccgatgggcctcccaacgggccctcctcccctccttgcaccgagattaataaaaaaaaaaaaaaaaaaaaaaaaaaaaaaaaaaaaaaaaaaaaaaaaaaaaaaaaaaaaaaaatgcatcccccccccccccccccccccccccccccccaaaggctcttttcagagccaccagaatt

SEQ ID NO: 1684 - RNA, 1642 nt, synthetic construct
  misc_feature 1..1642: note = mRNA i-3 (A64-N5-C30-hSL-N5) (opt2) from Homo sapiens__NP_000448.3__HNF4A(1-474)(S167A)
  source 1..1642: mol_type = other RNA
aggagaaagcttaccatgcgcctctccaagaccctcgtcgacatggacatggccgactactccgccgccctcgaccccgcctacaccaccctcgagttcgagaacgtccaggtcctcaccatgggcaacgacacctccccctccgagggcaccaacctcaacgcccccaactccctcggcgtctccgccctctgcgccatctgcggcgaccgcgccaccggcaagcactacggcgcctcctcctgcgacggctgcaagggcttcttccgccgctccgtccgcaagaaccacatgtactcctgccgcttctcccgccagtgcgtcgtcgacaaggacaagcgcaaccagtgccgctactgccgcctcaagaagtgcttccgcgccggcatgaagaaggaggccgtccagaacgagcgcgaccgcatctccacccgccgctcctcctacgaggactcctccctcccctccatcaacgccctcctccaggccgaggtcctctcccgccagatcaccgcccccgtctccggcatcaacggcgacatccgcgccaagaagatcgcctccatcgccgacgtctgcgagtccatgaaggagcagctcctcgtcctcgtcgagtgggccaagtacatccccgccttctgcgagctccccctcgacgaccaggtcgccctcctccgcgcccacgccggcgagcacctcctcctcggcgccaccaagcgctccatggtcttcaaggacgtcctcctcctcggcaacgactacatcgtcccccgccactgccccgagctcgccgagatgtcccgcgtctccatccgcatcctcgacgagctcgtcctccccttccaggagctccagatcgacgacaacgagtacgcctacctcaaggccatcatcttcttcgaccccgacgccaagggcctctccgaccccggcaagatcaagcgcctccgctcccaggtccaggtctccctcgaggactacatcaacgaccgccagtacgactcccgcggccgcttcggcgagctcctcctcctcctccccaccctccagtccatcacctggcagatgatcgagcagatccagttcatcaagctcttcggcatggccaagatcgacaacctcctccaggagatgctcctcggcggctccccctccgacgccccccacgcccaccaccccctccacccccacctcatgcaggagcacatgggcaccaacgtcatcgtcgccaacaccatgcccacccacctctccaacggccagatgtgcgagtggccccgcccccgcggccaggccgccacccccgagaccccccagccctccccccccggcggctccggctccgagccctacaagctcctccccggcgccgtcgccaccatcgtcaagcccctctccgccatcccccagcccaccatcaccaagcaggaggtcatctgaggactagttataagactgactagcccgatgggcctcccaacgggccctcctcccctccttgcaccgagattaataaaaaaaaaaaaaaaaaaaaaaaaaaaaaaaaaaaaaaaaaaaaaaaaaaaaaaaaaaaaaaaatgcatcccccccccccccccccccccccccccccccaaaggctcttttcagagccaccagaatt

SEQ ID NO: 1685 - RNA, 1642 nt, synthetic construct
  misc_feature 1..1642: note = mRNA i-3 (A64-N5-C30-hSL-N5) (opt2) from Homo sapiens__NP_000448.3__HNF4A(1-474)(S167A_S378A_T429A_T432A_ S436A)
  source 1..1642: mol_type = other RNA
aggagaaagcttaccatgcgcctctccaagaccctcgtcgacatggacatggccgactactccgccgccctcgaccccgcctacaccaccctcgagttcgagaacgtccaggtcctcaccatgggcaacgacacctccccctccgagggcaccaacctcaacgcccccaactccctcggcgtctccgccctctgcgccatctgcggcgaccgcgccaccggcaagcactacggcgcctcctcctgcgacggctgcaagggcttcttccgccgctccgtccgcaagaaccacatgtactcctgccgcttctcccgccagtgcgtcgtcgacaaggacaagcgcaaccagtgccgctactgccgcctcaagaagtgcttccgcgccggcatgaagaaggaggccgtccagaacgagcgcgaccgcatctccacccgccgctcctcctacgaggactcctccctcccctccatcaacgccctcctccaggccgaggtcctctcccgccagatcaccgcccccgtctccggcatcaacggcgacatccgcgccaagaagatcgcctccatcgccgacgtctgcgagtccatgaaggagcagctcctcgtcctcgtcgagtgggccaagtacatccccgccttctgcgagctccccctcgacgaccaggtcgccctcctccgcgcccacgccggcgagcacctcctcctcggcgccaccaagcgctccatggtcttcaaggacgtcctcctcctcggcaacgactacatcgtcccccgccactgccccgagctcgccgagatgtcccgcgtctccatccgcatcctcgacgagctcgtcctccccttccaggagctccagatcgacgacaacgagtacgcctacctcaaggccatcatcttcttcgaccccgacgccaagggcctctccgaccccggcaagatcaagcgcctccgctcccaggtccaggtctccctcgaggactacatcaacgaccgccagtacgactcccgcggccgcttcggcgagctcctcctcctcctccccaccctccagtccatcacctggcagatgatcgagcagatccagttcatcaagctcttcggcatggccaagatcgacaacctcctccaggagatgctcctcggcggcgccccctccgacgccccccacgcccaccaccccctccacccccacctcatgcaggagcacatgggcaccaacgtcatcgtcgccaacaccatgcccacccacctctccaacggccagatgtgcgagtggccccgcccccgcggccaggccgccgcccccgaggccccccagcccgccccccccggcggctccggctccgagccctacaagctcctccccggcgccgtcgccaccatcgtcaagcccctctccgccatcccccagcccaccatcaccaagcaggaggtcatctgaggactagttataagactgactagcccgatgggcctcccaacgggccctcctcccctccttgcaccgagattaataaaaaaaaaaaaaaaaaaaaaaaaaaaaaaaaaaaaaaaaaaaaaaaaaaaaaaaaaaaaaaaatgcatcccccccccccccccccccccccccccccccaaaggctcttttcagagccaccagaatt

SEQ ID NO: 1686 - RNA, 1642 nt, synthetic construct
  misc_feature 1..1642: note = mRNA i-3 (A64-N5-C30-hSL-N5) (opt2) from Homo sapiens__NP_000448.3__HNF4A(1-474)(S167E_S378E_T429E_T432E_ S436E)
  source 1..1642: mol_type = other RNA
aggagaaagcttaccatgcgcctctccaagaccctcgtcgacatggacatggccgactactccgccgccctcgaccccgcctacaccaccctcgagttcgagaacgtccaggtcctcaccatgggcaacgacacctccccctccgagggcaccaacctcaacgcccccaactccctcggcgtctccgccctctgcgccatctgcggcgaccgcgccaccggcaagcactacggcgcctcctcctgcgacggctgcaagggcttcttccgccgctccgtccgcaagaaccacatgtactcctgccgcttctcccgccagtgcgtcgtcgacaaggacaagcgcaaccagtgccgctactgccgcctcaagaagtgcttccgcgccggcatgaagaaggaggccgtccagaacgagcgcgaccgcatctccacccgccgctcctcctacgaggactcctccctcccctccatcaacgccctcctccaggccgaggtcctctcccgccagatcaccgagcccgtctccggcatcaacggcgacatccgcgccaagaagatcgcctccatcgccgacgtctgcgagtccatgaaggagcagctcctcgtcctcgtcgagtgggccaagtacatccccgccttctgcgagctccccctcgacgaccaggtcgccctcctccgcgcccacgccggcgagcacctcctcctcggcgccaccaagcgctccatggtcttcaaggacgtcctcctcctcggcaacgactacatcgtcccccgccactgccccgagctcgccgagatgtcccgcgtctccatccgcatcctcgacgagctcgtcctccccttccaggagctccagatcgacgacaacgagtacgcctacctcaaggccatcatcttcttcgaccccgacgccaagggcctctccgaccccggcaagatcaagcgcctccgctcccaggtccaggtctccctcgaggactacatcaacgaccgccagtacgactcccgcggccgcttcggcgagctcctcctcctcctccccaccctccagtccatcacctggcagatgatcgagcagatccagttcatcaagctcttcggcatggccaagatcgacaacctcctccaggagatgctcctcggcggcgagccctccgacgccccccacgcccaccaccccctccacccccacctcatgcaggagcacatgggcaccaacgtcatcgtcgccaacaccatgcccacccacctctccaacggccagatgtgcgagtggccccgcccccgcggccaggccgccgagcccgaggagccccagcccgagccccccggcggctccggctccgagccctacaagctcctccccggcgccgtcgccaccatcgtcaagcccctctccgccatcccccagcccaccatcaccaagcaggaggtcatctgaggactagttataagactgactagcccgatgggcctcccaacgggccctcctcccctccttgcaccgagattaataaaaaaaaaaaaaaaaaaaaaaaaaaaaaaaaaaaaaaaaaaaaaaaaaaaaaaaaaaaaaaaatgcatcccccccccccccccccccccccccccccccaaaggctcttttcagagccaccagaatt

SEQ ID NO: 1687 - RNA, 1642 nt, synthetic construct
  misc_feature 1..1642: note = mRNA i-3 (A64-N5-C30-hSL-N5) (opt2) from Homo sapiens__NP_000448.3__HNF4A(1-474)(S87A)
  source 1..1642: mol_type = other RNA
aggagaaagcttaccatgcgcctctccaagaccctcgtcgacatggacatggccgactactccgccgccctcgaccccgcctacaccaccctcgagttcgagaacgtccaggtcctcaccatgggcaacgacacctccccctccgagggcaccaacctcaacgcccccaactccctcggcgtctccgccctctgcgccatctgcggcgaccgcgccaccggcaagcactacggcgcctcctcctgcgacggctgcaagggcttcttccgccgcgccgtccgcaagaaccacatgtactcctgccgcttctcccgccagtgcgtcgtcgacaaggacaagcgcaaccagtgccgctactgccgcctcaagaagtgcttccgcgccggcatgaagaaggaggccgtccagaacgagcgcgaccgcatctccacccgccgctcctcctacgaggactcctccctcccctccatcaacgccctcctccaggccgaggtcctctcccgccagatcacctcccccgtctccggcatcaacggcgacatccgcgccaagaagatcgcctccatcgccgacgtctgcgagtccatgaaggagcagctcctcgtcctcgtcgagtgggccaagtacatccccgccttctgcgagctccccctcgacgaccaggtcgccctcctccgcgcccacgccggcgagcacctcctcctcggcgccaccaagcgctccatggtcttcaaggacgtcctcctcctcggcaacgactacatcgtcccccgccactgccccgagctcgccgagatgtcccgcgtctccatccgcatcctcgacgagctcgtcctccccttccaggagctccagatcgacgacaacgagtacgcctacctcaaggccatcatcttcttcgaccccgacgccaagggcctctccgaccccggcaagatcaagcgcctccgctcccaggtccaggtctccctcgaggactacatcaacgaccgccagtacgactcccgcggccgcttcggcgagctcctcctcctcctccccaccctccagtccatcacctggcagatgatcgagcagatccagttcatcaagctcttcggcatggccaagatcgacaacctcctccaggagatgctcctcggcggctccccctccgacgccccccacgcccaccaccccctccacccccacctcatgcaggagcacatgggcaccaacgtcatcgtcgccaacaccatgcccacccacctctccaacggccagatgtgcgagtggccccgcccccgcggccaggccgccacccccgagaccccccagccctccccccccggcggctccggctccgagccctacaagctcctccccggcgccgtcgccaccatcgtcaagcccctctccgccatcccccagcccaccatcaccaagcaggaggtcatctgaggactagttataagactgactagcccgatgggcctcccaacgggccctcctcccctccttgcaccgagattaataaaaaaaaaaaaaaaaaaaaaaaaaaaaaaaaaaaaaaaaaaaaaaaaaaaaaaaaaaaaaaaatgcatcccccccccccccccccccccccccccccccaaaggctcttttcagagccaccagaatt

SEQ ID NO: 1688 - RNA, 1642 nt, synthetic construct
  misc_feature 1..1642: note = mRNA i-3 (A64-N5-C30-hSL-N5) (opt2) from Homo sapiens__NP_000448.3__HNF4A(1-474)(S87E)
  source 1..1642: mol_type = other RNA
aggagaaagcttaccatgcgcctctccaagaccctcgtcgacatggacatggccgactactccgccgccctcgaccccgcctacaccaccctcgagttcgagaacgtccaggtcctcaccatgggcaacgacacctccccctccgagggcaccaacctcaacgcccccaactccctcggcgtctccgccctctgcgccatctgcggcgaccgcgccaccggcaagcactacggcgcctcctcctgcgacggctgcaagggcttcttccgccgcgaggtccgcaagaaccacatgtactcctgccgcttctcccgccagtgcgtcgtcgacaaggacaagcgcaaccagtgccgctactgccgcctcaagaagtgcttccgcgccggcatgaagaaggaggccgtccagaacgagcgcgaccgcatctccacccgccgctcctcctacgaggactcctccctcccctccatcaacgccctcctccaggccgaggtcctctcccgccagatcacctcccccgtctccggcatcaacggcgacatccgcgccaagaagatcgcctccatcgccgacgtctgcgagtccatgaaggagcagctcctcgtcctcgtcgagtgggccaagtacatccccgccttctgcgagctccccctcgacgaccaggtcgccctcctccgcgcccacgccggcgagcacctcctcctcggcgccaccaagcgctccatggtcttcaaggacgtcctcctcctcggcaacgactacatcgtcccccgccactgccccgagctcgccgagatgtcccgcgtctccatccgcatcctcgacgagctcgtcctccccttccaggagctccagatcgacgacaacgagtacgcctacctcaaggccatcatcttcttcgaccccgacgccaagggcctctccgaccccggcaagatcaagcgcctccgctcccaggtccaggtctccctcgaggactacatcaacgaccgccagtacgactcccgcggccgcttcggcgagctcctcctcctcctccccaccctccagtccatcacctggcagatgatcgagcagatccagttcatcaagctcttcggcatggccaagatcgacaacctcctccaggagatgctcctcggcggctccccctccgacgccccccacgcccaccaccccctccacccccacctcatgcaggagcacatgggcaccaacgtcatcgtcgccaacaccatgcccacccacctctccaacggccagatgtgcgagtggccccgcccccgcggccaggccgccacccccgagaccccccagccctccccccccggcggctccggctccgagccctacaagctcctccccggcgccgtcgccaccatcgtcaagcccctctccgccatcccccagcccaccatcaccaagcaggaggtcatctgaggactagttataagactgactagcccgatgggcctcccaacgggccctcctcccctccttgcaccgagattaataaaaaaaaaaaaaaaaaaaaaaaaaaaaaaaaaaaaaaaaaaaaaaaaaaaaaaaaaaaaaaaatgcatcccccccccccccccccccccccccccccccaaaggctcttttcagagccaccagaatt

SEQ ID NO: 1689 - RNA, 1642 nt, synthetic construct
  misc_feature 1..1642: note = mRNA i-3 (A64-N5-C30-hSL-N5) (opt2) from Homo sapiens__NP_000448.3__HNF4A(1-474)(R2V)
  source 1..1642: mol_type = other RNA
aggagaaagcttaccatggtcctctccaagaccctcgtcgacatggacatggccgactactccgccgccctcgaccccgcctacaccaccctcgagttcgagaacgtccaggtcctcaccatgggcaacgacacctccccctccgagggcaccaacctcaacgcccccaactccctcggcgtctccgccctctgcgccatctgcggcgaccgcgccaccggcaagcactacggcgcctcctcctgcgacggctgcaagggcttcttccgccgctccgtccgcaagaaccacatgtactcctgccgcttctcccgccagtgcgtcgtcgacaaggacaagcgcaaccagtgccgctactgccgcctcaagaagtgcttccgcgccggcatgaagaaggaggccgtccagaacgagcgcgaccgcatctccacccgccgctcctcctacgaggactcctccctcccctccatcaacgccctcctccaggccgaggtcctctcccgccagatcacctcccccgtctccggcatcaacggcgacatccgcgccaagaagatcgcctccatcgccgacgtctgcgagtccatgaaggagcagctcctcgtcctcgtcgagtgggccaagtacatccccgccttctgcgagctccccctcgacgaccaggtcgccctcctccgcgcccacgccggcgagcacctcctcctcggcgccaccaagcgctccatggtcttcaaggacgtcctcctcctcggcaacgactacatcgtcccccgccactgccccgagctcgccgagatgtcccgcgtctccatccgcatcctcgacgagctcgtcctccccttccaggagctccagatcgacgacaacgagtacgcctacctcaaggccatcatcttcttcgaccccgacgccaagggcctctccgaccccggcaagatcaagcgcctccgctcccaggtccaggtctccctcgaggactacatcaacgaccgccagtacgactcccgcggccgcttcggcgagctcctcctcctcctccccaccctccagtccatcacctggcagatgatcgagcagatccagttcatcaagctcttcggcatggccaagatcgacaacctcctccaggagatgctcctcggcggctccccctccgacgccccccacgcccaccaccccctccacccccacctcatgcaggagcacatgggcaccaacgtcatcgtcgccaacaccatgcccacccacctctccaacggccagatgtgcgagtggccccgcccccgcggccaggccgccacccccgagaccccccagccctccccccccggcggctccggctccgagccctacaagctcctccccggcgccgtcgccaccatcgtcaagcccctctccgccatcccccagcccaccatcaccaagcaggaggtcatctgaggactagttataagactgactagcccgatgggcctcccaacgggccctcctcccctccttgcaccgagattaataaaaaaaaaaaaaaaaaaaaaaaaaaaaaaaaaaaaaaaaaaaaaaaaaaaaaaaaaaaaaaaatgcatcccccccccccccccccccccccccccccccaaaggctcttttcagagccaccagaatt

SEQ ID NO: 1690 - RNA, 1642 nt, synthetic construct
  misc_feature 1..1642: note = mRNA i-3 (A64-N5-C30-hSL-N5) (opt2) from Homo sapiens__NP_000448.3__HNF4A(1-474)(R2V_K5V)
  source 1..1642: mol_type = other RNA
aggagaaagcttaccatggtcctctccgtcaccctcgtcgacatggacatggccgactactccgccgccctcgaccccgcctacaccaccctcgagttcgagaacgtccaggtcctcaccatgggcaacgacacctccccctccgagggcaccaacctcaacgcccccaactccctcggcgtctccgccctctgcgccatctgcggcgaccgcgccaccggcaagcactacggcgcctcctcctgcgacggctgcaagggcttcttccgccgctccgtccgcaagaaccacatgtactcctgccgcttctcccgccagtgcgtcgtcgacaaggacaagcgcaaccagtgccgctactgccgcctcaagaagtgcttccgcgccggcatgaagaaggaggccgtccagaacgagcgcgaccgcatctccacccgccgctcctcctacgaggactcctccctcccctccatcaacgccctcctccaggccgaggtcctctcccgccagatcacctcccccgtctccggcatcaacggcgacatccgcgccaagaagatcgcctccatcgccgacgtctgcgagtccatgaaggagcagctcctcgtcctcgtcgagtgggccaagtacatccccgccttctgcgagctccccctcgacgaccaggtcgccctcctccgcgcccacgccggcgagcacctcctcctcggcgccaccaagcgctccatggtcttcaaggacgtcctcctcctcggcaacgactacatcgtcccccgccactgccccgagctcgccgagatgtcccgcgtctccatccgcatcctcgacgagctcgtcctccccttccaggagctccagatcgacgacaacgagtacgcctacctcaaggccatcatcttcttcgaccccgacgccaagggcctctccgaccccggcaagatcaagcgcctccgctcccaggtccaggtctccctcgaggactacatcaacgaccgccagtacgactcccgcggccgcttcggcgagctcctcctcctcctccccaccctccagtccatcacctggcagatgatcgagcagatccagttcatcaagctcttcggcatggccaagatcgacaacctcctccaggagatgctcctcggcggctccccctccgacgccccccacgcccaccaccccctccacccccacctcatgcaggagcacatgggcaccaacgtcatcgtcgccaacaccatgcccacccacctctccaacggccagatgtgcgagtggccccgcccccgcggccaggccgccacccccgagaccccccagccctccccccccggcggctccggctccgagccctacaagctcctccccggcgccgtcgccaccatcgtcaagcccctctccgccatcccccagcccaccatcaccaagcaggaggtcatctgaggactagttataagactgactagcccgatgggcctcccaacgggccctcctcccctccttgcaccgagattaataaaaaaaaaaaaaaaaaaaaaaaaaaaaaaaaaaaaaaaaaaaaaaaaaaaaaaaaaaaaaaaatgcatcccccccccccccccccccccccccccccccaaaggctcttttcagagccaccagaatt

SEQ ID NO: 1691 - RNA, 1642 nt, synthetic construct
  misc_feature 1..1642: note = mRNA i-3 (A64-N5-C30-hSL-N5) (opt2) from Homo sapiens__NP_000448.3__HNF4A(1-474)(K179R_K180R)
  source 1..1642: mol_type = other RNA
aggagaaagcttaccatgcgcctctccaagaccctcgtcgacatggacatggccgactactccgccgccctcgaccccgcctacaccaccctcgagttcgagaacgtccaggtcctcaccatgggcaacgacacctccccctccgagggcaccaacctcaacgcccccaactccctcggcgtctccgccctctgcgccatctgcggcgaccgcgccaccggcaagcactacggcgcctcctcctgcgacggctgcaagggcttcttccgccgctccgtccgcaagaaccacatgtactcctgccgcttctcccgccagtgcgtcgtcgacaaggacaagcgcaaccagtgccgctactgccgcctcaagaagtgcttccgcgccggcatgaagaaggaggccgtccagaacgagcgcgaccgcatctccacccgccgctcctcctacgaggactcctccctcccctccatcaacgccctcctccaggccgaggtcctctcccgccagatcacctcccccgtctccggcatcaacggcgacatccgcgcccgccgcatcgcctccatcgccgacgtctgcgagtccatgaaggagcagctcctcgtcctcgtcgagtgggccaagtacatccccgccttctgcgagctccccctcgacgaccaggtcgccctcctccgcgcccacgccggcgagcacctcctcctcggcgccaccaagcgctccatggtcttcaaggacgtcctcctcctcggcaacgactacatcgtcccccgccactgccccgagctcgccgagatgtcccgcgtctccatccgcatcctcgacgagctcgtcctccccttccaggagctccagatcgacgacaacgagtacgcctacctcaaggccatcatcttcttcgaccccgacgccaagggcctctccgaccccggcaagatcaagcgcctccgctcccaggtccaggtctccctcgaggactacatcaacgaccgccagtacgactcccgcggccgcttcggcgagctcctcctcctcctccccaccctccagtccatcacctggcagatgatcgagcagatccagttcatcaagctcttcggcatggccaagatcgacaacctcctccaggagatgctcctcggcggctccccctccgacgccccccacgcccaccaccccctccacccccacctcatgcaggagcacatgggcaccaacgtcatcgtcgccaacaccatgcccacccacctctccaacggccagatgtgcgagtggccccgcccccgcggccaggccgccacccccgagaccccccagccctccccccccggcggctccggctccgagccctacaagctcctccccggcgccgtcgccaccatcgtcaagcccctctccgccatcccccagcccaccatcaccaagcaggaggtcatctgaggactagttataagactgactagcccgatgggcctcccaacgggccctcctcccctccttgcaccgagattaataaaaaaaaaaaaaaaaaaaaaaaaaaaaaaaaaaaaaaaaaaaaaaaaaaaaaaaaaaaaaaaatgcatcccccccccccccccccccccccccccccccaaaggctcttttcagagccaccagaatt

SEQ ID NO: 1692 - RNA, 1642 nt, synthetic construct
  misc_feature 1..1642: note = mRNA i-3 (A64-N5-C30-hSL-N5) (opt2) from Homo sapiens__NP_000448.3__HNF4A(1-474)(K234R)
  source 1..1642: mol_type = other RNA
aggagaaagcttaccatgcgcctctccaagaccctcgtcgacatggacatggccgactactccgccgccctcgaccccgcctacaccaccctcgagttcgagaacgtccaggtcctcaccatgggcaacgacacctccccctccgagggcaccaacctcaacgcccccaactccctcggcgtctccgccctctgcgccatctgcggcgaccgcgccaccggcaagcactacggcgcctcctcctgcgacggctgcaagggcttcttccgccgctccgtccgcaagaaccacatgtactcctgccgcttctcccgccagtgcgtcgtcgacaaggacaagcgcaaccagtgccgctactgccgcctcaagaagtgcttccgcgccggcatgaagaaggaggccgtccagaacgagcgcgaccgcatctccacccgccgctcctcctacgaggactcctccctcccctccatcaacgccctcctccaggccgaggtcctctcccgccagatcacctcccccgtctccggcatcaacggcgacatccgcgccaagaagatcgcctccatcgccgacgtctgcgagtccatgaaggagcagctcctcgtcctcgtcgagtgggccaagtacatccccgccttctgcgagctccccctcgacgaccaggtcgccctcctccgcgcccacgccggcgagcacctcctcctcggcgccacccgccgctccatggtcttcaaggacgtcctcctcctcggcaacgactacatcgtcccccgccactgccccgagctcgccgagatgtcccgcgtctccatccgcatcctcgacgagctcgtcctccccttccaggagctccagatcgacgacaacgagtacgcctacctcaaggccatcatcttcttcgaccccgacgccaagggcctctccgaccccggcaagatcaagcgcctccgctcccaggtccaggtctccctcgaggactacatcaacgaccgccagtacgactcccgcggccgcttcggcgagctcctcctcctcctccccaccctccagtccatcacctggcagatgatcgagcagatccagttcatcaagctcttcggcatggccaagatcgacaacctcctccaggagatgctcctcggcggctccccctccgacgccccccacgcccaccaccccctccacccccacctcatgcaggagcacatgggcaccaacgtcatcgtcgccaacaccatgcccacccacctctccaacggccagatgtgcgagtggccccgcccccgcggccaggccgccacccccgagaccccccagccctccccccccggcggctccggctccgagccctacaagctcctccccggcgccgtcgccaccatcgtcaagcccctctccgccatcccccagcccaccatcaccaagcaggaggtcatctgaggactagttataagactgactagcccgatgggcctcccaacgggccctcctcccctccttgcaccgagattaataaaaaaaaaaaaaaaaaaaaaaaaaaaaaaaaaaaaaaaaaaaaaaaaaaaaaaaaaaaaaaaatgcatcccccccccccccccccccccccccccccccaaaggctcttttcagagccaccagaatt

SEQ ID NO: 1693 - RNA, 1642 nt, synthetic construct
  misc_feature 1..1642: note = mRNA i-3 (A64-N5-C30-hSL-N5) (opt2) from Homo sapiens__NP_000448.3__HNF4A(1-474)(K300R)
  source 1..1642: mol_type = other RNA
aggagaaagcttaccatgcgcctctccaagaccctcgtcgacatggacatggccgactactccgccgccctcgaccccgcctacaccaccctcgagttcgagaacgtccaggtcctcaccatgggcaacgacacctccccctccgagggcaccaacctcaacgcccccaactccctcggcgtctccgccctctgcgccatctgcggcgaccgcgccaccggcaagcactacggcgcctcctcctgcgacggctgcaagggcttcttccgccgctccgtccgcaagaaccacatgtactcctgccgcttctcccgccagtgcgtcgtcgacaaggacaagcgcaaccagtgccgctactgccgcctcaagaagtgcttccgcgccggcatgaagaaggaggccgtccagaacgagcgcgaccgcatctccacccgccgctcctcctacgaggactcctccctcccctccatcaacgccctcctccaggccgaggtcctctcccgccagatcacctcccccgtctccggcatcaacggcgacatccgcgccaagaagatcgcctccatcgccgacgtctgcgagtccatgaaggagcagctcctcgtcctcgtcgagtgggccaagtacatccccgccttctgcgagctccccctcgacgaccaggtcgccctcctccgcgcccacgccggcgagcacctcctcctcggcgccaccaagcgctccatggtcttcaaggacgtcctcctcctcggcaacgactacatcgtcccccgccactgccccgagctcgccgagatgtcccgcgtctccatccgcatcctcgacgagctcgtcctccccttccaggagctccagatcgacgacaacgagtacgcctacctcaaggccatcatcttcttcgaccccgacgcccgcggcctctccgaccccggcaagatcaagcgcctccgctcccaggtccaggtctccctcgaggactacatcaacgaccgccagtacgactcccgcggccgcttcggcgagctcctcctcctcctccccaccctccagtccatcacctggcagatgatcgagcagatccagttcatcaagctcttcggcatggccaagatcgacaacctcctccaggagatgctcctcggcggctccccctccgacgccccccacgcccaccaccccctccacccccacctcatgcaggagcacatgggcaccaacgtcatcgtcgccaacaccatgcccacccacctctccaacggccagatgtgcgagtggccccgcccccgcggccaggccgccacccccgagaccccccagccctccccccccggcggctccggctccgagccctacaagctcctccccggcgccgtcgccaccatcgtcaagcccctctccgccatcccccagcccaccatcaccaagcaggaggtcatctgaggactagttataagactgactagcccgatgggcctcccaacgggccctcctcccctccttgcaccgagattaataaaaaaaaaaaaaaaaaaaaaaaaaaaaaaaaaaaaaaaaaaaaaaaaaaaaaaaaaaaaaaaatgcatcccccccccccccccccccccccccccccccaaaggctcttttcagagccaccagaatt

SEQ ID NO: 1694 - RNA, 1642 nt, synthetic construct
  misc_feature 1..1642: note = mRNA i-3 (A64-N5-C30-hSL-N5) (opt2) from Homo sapiens__NP_000448.3__HNF4A(1-474)(K300R_K307R_K309R)
  source 1..1642: mol_type = other RNA
aggagaaagcttaccatgcgcctctccaagaccctcgtcgacatggacatggccgactactccgccgccctcgaccccgcctacaccaccctcgagttcgagaacgtccaggtcctcaccatgggcaacgacacctccccctccgagggcaccaacctcaacgcccccaactccctcggcgtctccgccctctgcgccatctgcggcgaccgcgccaccggcaagcactacggcgcctcctcctgcgacggctgcaagggcttcttccgccgctccgtccgcaagaaccacatgtactcctgccgcttctcccgccagtgcgtcgtcgacaaggacaagcgcaaccagtgccgctactgccgcctcaagaagtgcttccgcgccggcatgaagaaggaggccgtccagaacgagcgcgaccgcatctccacccgccgctcctcctacgaggactcctccctcccctccatcaacgccctcctccaggccgaggtcctctcccgccagatcacctcccccgtctccggcatcaacggcgacatccgcgccaagaagatcgcctccatcgccgacgtctgcgagtccatgaaggagcagctcctcgtcctcgtcgagtgggccaagtacatccccgccttctgcgagctccccctcgacgaccaggtcgccctcctccgcgcccacgccggcgagcacctcctcctcggcgccaccaagcgctccatggtcttcaaggacgtcctcctcctcggcaacgactacatcgtcccccgccactgccccgagctcgccgagatgtcccgcgtctccatccgcatcctcgacgagctcgtcctccccttccaggagctccagatcgacgacaacgagtacgcctacctcaaggccatcatcttcttcgaccccgacgcccgcggcctctccgaccccggccgcatccgccgcctccgctcccaggtccaggtctccctcgaggactacatcaacgaccgccagtacgactcccgcggccgcttcggcgagctcctcctcctcctccccaccctccagtccatcacctggcagatgatcgagcagatccagttcatcaagctcttcggcatggccaagatcgacaacctcctccaggagatgctcctcggcggctccccctccgacgccccccacgcccaccaccccctccacccccacctcatgcaggagcacatgggcaccaacgtcatcgtcgccaacaccatgcccacccacctctccaacggccagatgtgcgagtggccccgcccccgcggccaggccgccacccccgagaccccccagccctccccccccggcggctccggctccgagccctacaagctcctccccggcgccgtcgccaccatcgtcaagcccctctccgccatcccccagcccaccatcaccaagcaggaggtcatctgaggactagttataagactgactagcccgatgggcctcccaacgggccctcctcccctccttgcaccgagattaataaaaaaaaaaaaaaaaaaaaaaaaaaaaaaaaaaaaaaaaaaaaaaaaaaaaaaaaaaaaaaaatgcatcccccccccccccccccccccccccccccccaaaggctcttttcagagccaccagaatt

SEQ ID NO: 1695 - RNA, 1642 nt, synthetic construct
  misc_feature 1..1642: note = mRNA i-3 (A64-N5-C30-hSL-N5) (opt2) from Homo sapiens__NP_000448.3__HNF4A(1-474)(K447R_K470R)
  source 1..1642: mol_type = other RNA
aggagaaagcttaccatgcgcctctccaagaccctcgtcgacatggacatggccgactactccgccgccctcgaccccgcctacaccaccctcgagttcgagaacgtccaggtcctcaccatgggcaacgacacctccccctccgagggcaccaacctcaacgcccccaactccctcggcgtctccgccctctgcgccatctgcggcgaccgcgccaccggcaagcactacggcgcctcctcctgcgacggctgcaagggcttcttccgccgctccgtccgcaagaaccacatgtactcctgccgcttctcccgccagtgcgtcgtcgacaaggacaagcgcaaccagtgccgctactgccgcctcaagaagtgcttccgcgccggcatgaagaaggaggccgtccagaacgagcgcgaccgcatctccacccgccgctcctcctacgaggactcctccctcccctccatcaacgccctcctccaggccgaggtcctctcccgccagatcacctcccccgtctccggcatcaacggcgacatccgcgccaagaagatcgcctccatcgccgacgtctgcgagtccatgaaggagcagctcctcgtcctcgtcgagtgggccaagtacatccccgccttctgcgagctccccctcgacgaccaggtcgccctcctccgcgcccacgccggcgagcacctcctcctcggcgccaccaagcgctccatggtcttcaaggacgtcctcctcctcggcaacgactacatcgtcccccgccactgccccgagctcgccgagatgtcccgcgtctccatccgcatcctcgacgagctcgtcctccccttccaggagctccagatcgacgacaacgagtacgcctacctcaaggccatcatcttcttcgaccccgacgccaagggcctctccgaccccggcaagatcaagcgcctccgctcccaggtccaggtctccctcgaggactacatcaacgaccgccagtacgactcccgcggccgcttcggcgagctcctcctcctcctccccaccctccagtccatcacctggcagatgatcgagcagatccagttcatcaagctcttcggcatggccaagatcgacaacctcctccaggagatgctcctcggcggctccccctccgacgccccccacgcccaccaccccctccacccccacctcatgcaggagcacatgggcaccaacgtcatcgtcgccaacaccatgcccacccacctctccaacggccagatgtgcgagtggccccgcccccgcggccaggccgccacccccgagaccccccagccctccccccccggcggctccggctccgagccctaccgcctcctccccggcgccgtcgccaccatcgtcaagcccctctccgccatcccccagcccaccatcacccgccaggaggtcatctgaggactagttataagactgactagcccgatgggcctcccaacgggccctcctcccctccttgcaccgagattaataaaaaaaaaaaaaaaaaaaaaaaaaaaaaaaaaaaaaaaaaaaaaaaaaaaaaaaaaaaaaaaatgcatcccccccccccccccccccccccccccccccaaaggctcttttcagagccaccagaatt

SEQ ID NO: 1696 - RNA, 1642 nt, synthetic construct
  misc_feature 1..1642: note = mRNA i-3 (A64-N5-C30-hSL-N5) (opt2) from Homo sapiens__NP_000448.3__HNF4A(1-474)(K458R)
  source 1..1642: mol_type = other RNA
aggagaaagcttaccatgcgcctctccaagaccctcgtcgacatggacatggccgactactccgccgccctcgaccccgcctacaccaccctcgagttcgagaacgtccaggtcctcaccatgggcaacgacacctccccctccgagggcaccaacctcaacgcccccaactccctcggcgtctccgccctctgcgccatctgcggcgaccgcgccaccggcaagcactacggcgcctcctcctgcgacggctgcaagggcttcttccgccgctccgtccgcaagaaccacatgtactcctgccgcttctcccgccagtgcgtcgtcgacaaggacaagcgcaaccagtgccgctactgccgcctcaagaagtgcttccgcgccggcatgaagaaggaggccgtccagaacgagcgcgaccgcatctccacccgccgctcctcctacgaggactcctccctcccctccatcaacgccctcctccaggccgaggtcctctcccgccagatcacctcccccgtctccggcatcaacggcgacatccgcgccaagaagatcgcctccatcgccgacgtctgcgagtccatgaaggagcagctcctcgtcctcgtcgagtgggccaagtacatccccgccttctgcgagctccccctcgacgaccaggtcgccctcctccgcgcccacgccggcgagcacctcctcctcggcgccaccaagcgctccatggtcttcaaggacgtcctcctcctcggcaacgactacatcgtcccccgccactgccccgagctcgccgagatgtcccgcgtctccatccgcatcctcgacgagctcgtcctccccttccaggagctccagatcgacgacaacgagtacgcctacctcaaggccatcatcttcttcgaccccgacgccaagggcctctccgaccccggcaagatcaagcgcctccgctcccaggtccaggtctccctcgaggactacatcaacgaccgccagtacgactcccgcggccgcttcggcgagctcctcctcctcctccccaccctccagtccatcacctggcagatgatcgagcagatccagttcatcaagctcttcggcatggccaagatcgacaacctcctccaggagatgctcctcggcggctccccctccgacgccccccacgcccaccaccccctccacccccacctcatgcaggagcacatgggcaccaacgtcatcgtcgccaacaccatgcccacccacctctccaacggccagatgtgcgagtggccccgcccccgcggccaggccgccacccccgagaccccccagccctccccccccggcggctccggctccgagccctacaagctcctccccggcgccgtcgccaccatcgtccgccccctctccgccatcccccagcccaccatcaccaagcaggaggtcatctgaggactagttataagactgactagcccgatgggcctcccaacgggccctcctcccctccttgcaccgagattaataaaaaaaaaaaaaaaaaaaaaaaaaaaaaaaaaaaaaaaaaaaaaaaaaaaaaaaaaaaaaaaatgcatcccccccccccccccccccccccccccccccaaaggctcttttcagagccaccagaatt

SEQ ID NO: 1697 - RNA, 1642 nt, synthetic construct
  misc_feature 1..1642: note = mRNA i-3 (A64-N5-C30-hSL-N5) (opt2) from Homo sapiens__NP_000448.3__HNF4A(1-474)(K106R_K108R_K126R_K127R)
  source 1..1642: mol_type = other RNA
aggagaaagcttaccatgcgcctctccaagaccctcgtcgacatggacatggccgactactccgccgccctcgaccccgcctacaccaccctcgagttcgagaacgtccaggtcctcaccatgggcaacgacacctccccctccgagggcaccaacctcaacgcccccaactccctcggcgtctccgccctctgcgccatctgcggcgaccgcgccaccggcaagcactacggcgcctcctcctgcgacggctgcaagggcttcttccgccgctccgtccgcaagaaccacatgtactcctgccgcttctcccgccagtgcgtcgtcgaccgcgaccgccgcaaccagtgccgctactgccgcctcaagaagtgcttccgcgccggcatgcgccgcgaggccgtccagaacgagcgcgaccgcatctccacccgccgctcctcctacgaggactcctccctcccctccatcaacgccctcctccaggccgaggtcctctcccgccagatcacctcccccgtctccggcatcaacggcgacatccgcgccaagaagatcgcctccatcgccgacgtctgcgagtccatgaaggagcagctcctcgtcctcgtcgagtgggccaagtacatccccgccttctgcgagctccccctcgacgaccaggtcgccctcctccgcgcccacgccggcgagcacctcctcctcggcgccaccaagcgctccatggtcttcaaggacgtcctcctcctcggcaacgactacatcgtcccccgccactgccccgagctcgccgagatgtcccgcgtctccatccgcatcctcgacgagctcgtcctccccttccaggagctccagatcgacgacaacgagtacgcctacctcaaggccatcatcttcttcgaccccgacgccaagggcctctccgaccccggcaagatcaagcgcctccgctcccaggtccaggtctccctcgaggactacatcaacgaccgccagtacgactcccgcggccgcttcggcgagctcctcctcctcctccccaccctccagtccatcacctggcagatgatcgagcagatccagttcatcaagctcttcggcatggccaagatcgacaacctcctccaggagatgctcctcggcggctccccctccgacgccccccacgcccaccaccccctccacccccacctcatgcaggagcacatgggcaccaacgtcatcgtcgccaacaccatgcccacccacctctccaacggccagatgtgcgagtggccccgcccccgcggccaggccgccacccccgagaccccccagccctccccccccggcggctccggctccgagccctacaagctcctccccggcgccgtcgccaccatcgtcaagcccctctccgccatcccccagcccaccatcaccaagcaggaggtcatctgaggactagttataagactgactagcccgatgggcctcccaacgggccctcctcccctccttgcaccgagattaataaaaaaaaaaaaaaaaaaaaaaaaaaaaaaaaaaaaaaaaaaaaaaaaaaaaaaaaaaaaaaaatgcatcccccccccccccccccccccccccccccccaaaggctcttttcagagccaccagaatt

SEQ ID NO: 1698 - RNA, 1642 nt, synthetic construct
  misc_feature 1..1642: note = mRNA i-3 (A64-N5-C30-hSL-N5) (opt2) from Homo sapiens__NP_000448.3__HNF4A(1-474)(E285Q)
  source 1..1642: mol_type = other RNA
aggagaaagcttaccatgcgcctctccaagaccctcgtcgacatggacatggccgactactccgccgccctcgaccccgcctacaccaccctcgagttcgagaacgtccaggtcctcaccatgggcaacgacacctccccctccgagggcaccaacctcaacgcccccaactccctcggcgtctccgccctctgcgccatctgcggcgaccgcgccaccggcaagcactacggcgcctcctcctgcgacggctgcaagggcttcttccgccgctccgtccgcaagaaccacatgtactcctgccgcttctcccgccagtgcgtcgtcgacaaggacaagcgcaaccagtgccgctactgccgcctcaagaagtgcttccgcgccggcatgaagaaggaggccgtccagaacgagcgcgaccgcatctccacccgccgctcctcctacgaggactcctccctcccctccatcaacgccctcctccaggccgaggtcctctcccgccagatcacctcccccgtctccggcatcaacggcgacatccgcgccaagaagatcgcctccatcgccgacgtctgcgagtccatgaaggagcagctcctcgtcctcgtcgagtgggccaagtacatccccgccttctgcgagctccccctcgacgaccaggtcgccctcctccgcgcccacgccggcgagcacctcctcctcggcgccaccaagcgctccatggtcttcaaggacgtcctcctcctcggcaacgactacatcgtcccccgccactgccccgagctcgccgagatgtcccgcgtctccatccgcatcctcgacgagctcgtcctccccttccaggagctccagatcgacgacaaccagtacgcctacctcaaggccatcatcttcttcgaccccgacgccaagggcctctccgaccccggcaagatcaagcgcctccgctcccaggtccaggtctccctcgaggactacatcaacgaccgccagtacgactcccgcggccgcttcggcgagctcctcctcctcctccccaccctccagtccatcacctggcagatgatcgagcagatccagttcatcaagctcttcggcatggccaagatcgacaacctcctccaggagatgctcctcggcggctccccctccgacgccccccacgcccaccaccccctccacccccacctcatgcaggagcacatgggcaccaacgtcatcgtcgccaacaccatgcccacccacctctccaacggccagatgtgcgagtggccccgcccccgcggccaggccgccacccccgagaccccccagccctccccccccggcggctccggctccgagccctacaagctcctccccggcgccgtcgccaccatcgtcaagcccctctccgccatcccccagcccaccatcaccaagcaggaggtcatctgaggactagttataagactgactagcccgatgggcctcccaacgggccctcctcccctccttgcaccgagattaataaaaaaaaaaaaaaaaaaaaaaaaaaaaaaaaaaaaaaaaaaaaaaaaaaaaaaaaaaaaaaaatgcatcccccccccccccccccccccccccccccccaaaggctcttttcagagccaccagaatt

SEQ ID NO: 1699 - RNA, 1642 nt, synthetic construct
  misc_feature 1..1642: note = mRNA i-3 (A64-N5-C30-hSL-N5) (opt2) from Homo sapiens__NP_000448.3__HNF4A(1-474)(T166E)
  source 1..1642: mol_type = other RNA
aggagaaagcttaccatgcgcctctccaagaccctcgtcgacatggacatggccgactactccgccgccctcgaccccgcctacaccaccctcgagttcgagaacgtccaggtcctcaccatgggcaacgacacctccccctccgagggcaccaacctcaacgcccccaactccctcggcgtctccgccctctgcgccatctgcggcgaccgcgccaccggcaagcactacggcgcctcctcctgcgacggctgcaagggcttcttccgccgctccgtccgcaagaaccacatgtactcctgccgcttctcccgccagtgcgtcgtcgacaaggacaagcgcaaccagtgccgctactgccgcctcaagaagtgcttccgcgccggcatgaagaaggaggccgtccagaacgagcgcgaccgcatctccacccgccgctcctcctacgaggactcctccctcccctccatcaacgccctcctccaggccgaggtcctctcccgccagatcgagtcccccgtctccggcatcaacggcgacatccgcgccaagaagatcgcctccatcgccgacgtctgcgagtccatgaaggagcagctcctcgtcctcgtcgagtgggccaagtacatccccgccttctgcgagctccccctcgacgaccaggtcgccctcctccgcgcccacgccggcgagcacctcctcctcggcgccaccaagcgctccatggtcttcaaggacgtcctcctcctcggcaacgactacatcgtcccccgccactgccccgagctcgccgagatgtcccgcgtctccatccgcatcctcgacgagctcgtcctccccttccaggagctccagatcgacgacaacgagtacgcctacctcaaggccatcatcttcttcgaccccgacgccaagggcctctccgaccccggcaagatcaagcgcctccgctcccaggtccaggtctccctcgaggactacatcaacgaccgccagtacgactcccgcggccgcttcggcgagctcctcctcctcctccccaccctccagtccatcacctggcagatgatcgagcagatccagttcatcaagctcttcggcatggccaagatcgacaacctcctccaggagatgctcctcggcggctccccctccgacgccccccacgcccaccaccccctccacccccacctcatgcaggagcacatgggcaccaacgtcatcgtcgccaacaccatgcccacccacctctccaacggccagatgtgcgagtggccccgcccccgcggccaggccgccacccccgagaccccccagccctccccccccggcggctccggctccgagccctacaagctcctccccggcgccgtcgccaccatcgtcaagcccctctccgccatcccccagcccaccatcaccaagcaggaggtcatctgaggactagttataagactgactagcccgatgggcctcccaacgggccctcctcccctccttgcaccgagattaataaaaaaaaaaaaaaaaaaaaaaaaaaaaaaaaaaaaaaaaaaaaaaaaaaaaaaaaaaaaaaaatgcatcccccccccccccccccccccccccccccccaaaggctcttttcagagccaccagaatt

SEQ ID NO: 1700 - RNA, 1642 nt, synthetic construct
  misc_feature 1..1642: note = mRNA i-3 (A64-N5-C30-hSL-N5) (opt2) from Homo sapiens__NP_000448.3__HNF4A(1-474)(S148A)
  source 1..1642: mol_type = other RNA
aggagaaagcttaccatgcgcctctccaagaccctcgtcgacatggacatggccgactactccgccgccctcgaccccgcctacaccaccctcgagttcgagaacgtccaggtcctcaccatgggcaacgacacctccccctccgagggcaccaacctcaacgcccccaactccctcggcgtctccgccctctgcgccatctgcggcgaccgcgccaccggcaagcactacggcgcctcctcctgcgacggctgcaagggcttcttccgccgctccgtccgcaagaaccacatgtactcctgccgcttctcccgccagtgcgtcgtcgacaaggacaagcgcaaccagtgccgctactgccgcctcaagaagtgcttccgcgccggcatgaagaaggaggccgtccagaacgagcgcgaccgcatctccacccgccgctcctcctacgaggactccgccctcccctccatcaacgccctcctccaggccgaggtcctctcccgccagatcacctcccccgtctccggcatcaacggcgacatccgcgccaagaagatcgcctccatcgccgacgtctgcgagtccatgaaggagcagctcctcgtcctcgtcgagtgggccaagtacatccccgccttctgcgagctccccctcgacgaccaggtcgccctcctccgcgcccacgccggcgagcacctcctcctcggcgccaccaagcgctccatggtcttcaaggacgtcctcctcctcggcaacgactacatcgtcccccgccactgccccgagctcgccgagatgtcccgcgtctccatccgcatcctcgacgagctcgtcctccccttccaggagctccagatcgacgacaacgagtacgcctacctcaaggccatcatcttcttcgaccccgacgccaagggcctctccgaccccggcaagatcaagcgcctccgctcccaggtccaggtctccctcgaggactacatcaacgaccgccagtacgactcccgcggccgcttcggcgagctcctcctcctcctccccaccctccagtccatcacctggcagatgatcgagcagatccagttcatcaagctcttcggcatggccaagatcgacaacctcctccaggagatgctcctcggcggctccccctccgacgccccccacgcccaccaccccctccacccccacctcatgcaggagcacatgggcaccaacgtcatcgtcgccaacaccatgcccacccacctctccaacggccagatgtgcgagtggccccgcccccgcggccaggccgccacccccgagaccccccagccctccccccccggcggctccggctccgagccctacaagctcctccccggcgccgtcgccaccatcgtcaagcccctctccgccatcccccagcccaccatcaccaagcaggaggtcatctgaggactagttataagactgactagcccgatgggcctcccaacgggccctcctcccctccttgcaccgagattaataaaaaaaaaaaaaaaaaaaaaaaaaaaaaaaaaaaaaaaaaaaaaaaaaaaaaaaaaaaaaaaatgcatcccccccccccccccccccccccccccccccaaaggctcttttcagagccaccagaatt

SEQ ID NO: 1701 - RNA, 1642 nt, synthetic construct
  misc_feature 1..1642: note = mRNA i-3 (A64-N5-C30-hSL-N5) (opt2) from Homo sapiens__NP_000448.3__HNF4A(1-474)(S148E)
  source 1..1642: mol_type = other RNA
aggagaaagcttaccatgcgcctctccaagaccctcgtcgacatggacatggccgactactccgccgccctcgaccccgcctacaccaccctcgagttcgagaacgtccaggtcctcaccatgggcaacgacacctccccctccgagggcaccaacctcaacgcccccaactccctcggcgtctccgccctctgcgccatctgcggcgaccgcgccaccggcaagcactacggcgcctcctcctgcgacggctgcaagggcttcttccgccgctccgtccgcaagaaccacatgtactcctgccgcttctcccgccagtgcgtcgtcgacaaggacaagcgcaaccagtgccgctactgccgcctcaagaagtgcttccgcgccggcatgaagaaggaggccgtccagaacgagcgcgaccgcatctccacccgccgctcctcctacgaggactccgagctcccctccatcaacgccctcctccaggccgaggtcctctcccgccagatcacctcccccgtctccggcatcaacggcgacatccgcgccaagaagatcgcctccatcgccgacgtctgcgagtccatgaaggagcagctcctcgtcctcgtcgagtgggccaagtacatccccgccttctgcgagctccccctcgacgaccaggtcgccctcctccgcgcccacgccggcgagcacctcctcctcggcgccaccaagcgctccatggtcttcaaggacgtcctcctcctcggcaacgactacatcgtcccccgccactgccccgagctcgccgagatgtcccgcgtctccatccgcatcctcgacgagctcgtcctccccttccaggagctccagatcgacgacaacgagtacgcctacctcaaggccatcatcttcttcgaccccgacgccaagggcctctccgaccccggcaagatcaagcgcctccgctcccaggtccaggtctccctcgaggactacatcaacgaccgccagtacgactcccgcggccgcttcggcgagctcctcctcctcctccccaccctccagtccatcacctggcagatgatcgagcagatccagttcatcaagctcttcggcatggccaagatcgacaacctcctccaggagatgctcctcggcggctccccctccgacgccccccacgcccaccaccccctccacccccacctcatgcaggagcacatgggcaccaacgtcatcgtcgccaacaccatgcccacccacctctccaacggccagatgtgcgagtggccccgcccccgcggccaggccgccacccccgagaccccccagccctccccccccggcggctccggctccgagccctacaagctcctccccggcgccgtcgccaccatcgtcaagcccctctccgccatcccccagcccaccatcaccaagcaggaggtcatctgaggactagttataagactgactagcccgatgggcctcccaacgggccctcctcccctccttgcaccgagattaataaaaaaaaaaaaaaaaaaaaaaaaaaaaaaaaaaaaaaaaaaaaaaaaaaaaaaaaaaaaaaaatgcatcccccccccccccccccccccccccccccccaaaggctcttttcagagccaccagaatt

SEQ ID NO: 1702 - RNA, 1642 nt, synthetic construct
  misc_feature 1..1642: note = mRNA i-3 (A64-N5-C30-hSL-N5) (opt2) from Homo sapiens__NP_000448.3__HNF4A(1-474)(S183A)
  source 1..1642: mol_type = other RNA
aggagaaagcttaccatgcgcctctccaagaccctcgtcgacatggacatggccgactactccgccgccctcgaccccgcctacaccaccctcgagttcgagaacgtccaggtcctcaccatgggcaacgacacctccccctccgagggcaccaacctcaacgcccccaactccctcggcgtctccgccctctgcgccatctgcggcgaccgcgccaccggcaagcactacggcgcctcctcctgcgacggctgcaagggcttcttccgccgctccgtccgcaagaaccacatgtactcctgccgcttctcccgccagtgcgtcgtcgacaaggacaagcgcaaccagtgccgctactgccgcctcaagaagtgcttccgcgccggcatgaagaaggaggccgtccagaacgagcgcgaccgcatctccacccgccgctcctcctacgaggactcctccctcccctccatcaacgccctcctccaggccgaggtcctctcccgccagatcacctcccccgtctccggcatcaacggcgacatccgcgccaagaagatcgccgccatcgccgacgtctgcgagtccatgaaggagcagctcctcgtcctcgtcgagtgggccaagtacatccccgccttctgcgagctccccctcgacgaccaggtcgccctcctccgcgcccacgccggcgagcacctcctcctcggcgccaccaagcgctccatggtcttcaaggacgtcctcctcctcggcaacgactacatcgtcccccgccactgccccgagctcgccgagatgtcccgcgtctccatccgcatcctcgacgagctcgtcctccccttccaggagctccagatcgacgacaacgagtacgcctacctcaaggccatcatcttcttcgaccccgacgccaagggcctctccgaccccggcaagatcaagcgcctccgctcccaggtccaggtctccctcgaggactacatcaacgaccgccagtacgactcccgcggccgcttcggcgagctcctcctcctcctccccaccctccagtccatcacctggcagatgatcgagcagatccagttcatcaagctcttcggcatggccaagatcgacaacctcctccaggagatgctcctcggcggctccccctccgacgccccccacgcccaccaccccctccacccccacctcatgcaggagcacatgggcaccaacgtcatcgtcgccaacaccatgcccacccacctctccaacggccagatgtgcgagtggccccgcccccgcggccaggccgccacccccgagaccccccagccctccccccccggcggctccggctccgagccctacaagctcctccccggcgccgtcgccaccatcgtcaagcccctctccgccatcccccagcccaccatcaccaagcaggaggtcatctgaggactagttataagactgactagcccgatgggcctcccaacgggccctcctcccctccttgcaccgagattaataaaaaaaaaaaaaaaaaaaaaaaaaaaaaaaaaaaaaaaaaaaaaaaaaaaaaaaaaaaaaaaatgcatcccccccccccccccccccccccccccccccaaaggctcttttcagagccaccagaatt

SEQ ID NO: 1703 - RNA, 1642 nt, synthetic construct
  misc_feature 1..1642: note = mRNA i-3 (A64-N5-C30-hSL-N5) (opt2) from Homo sapiens__NP_000448.3__HNF4A(1-474)(S183E)
  source 1..1642: mol_type = other RNA
aggagaaagcttaccatgcgcctctccaagaccctcgtcgacatggacatggccgactactccgccgccctcgaccccgcctacaccaccctcgagttcgagaacgtccaggtcctcaccatgggcaacgacacctccccctccgagggcaccaacctcaacgcccccaactccctcggcgtctccgccctctgcgccatctgcggcgaccgcgccaccggcaagcactacggcgcctcctcctgcgacggctgcaagggcttcttccgccgctccgtccgcaagaaccacatgtactcctgccgcttctcccgccagtgcgtcgtcgacaaggacaagcgcaaccagtgccgctactgccgcctcaagaagtgcttccgcgccggcatgaagaaggaggccgtccagaacgagcgcgaccgcatctccacccgccgctcctcctacgaggactcctccctcccctccatcaacgccctcctccaggccgaggtcctctcccgccagatcacctcccccgtctccggcatcaacggcgacatccgcgccaagaagatcgccgagatcgccgacgtctgcgagtccatgaaggagcagctcctcgtcctcgtcgagtgggccaagtacatccccgccttctgcgagctccccctcgacgaccaggtcgccctcctccgcgcccacgccggcgagcacctcctcctcggcgccaccaagcgctccatggtcttcaaggacgtcctcctcctcggcaacgactacatcgtcccccgccactgccccgagctcgccgagatgtcccgcgtctccatccgcatcctcgacgagctcgtcctccccttccaggagctccagatcgacgacaacgagtacgcctacctcaaggccatcatcttcttcgaccccgacgccaagggcctctccgaccccggcaagatcaagcgcctccgctcccaggtccaggtctccctcgaggactacatcaacgaccgccagtacgactcccgcggccgcttcggcgagctcctcctcctcctccccaccctccagtccatcacctggcagatgatcgagcagatccagttcatcaagctcttcggcatggccaagatcgacaacctcctccaggagatgctcctcggcggctccccctccgacgccccccacgcccaccaccccctccacccccacctcatgcaggagcacatgggcaccaacgtcatcgtcgccaacaccatgcccacccacctctccaacggccagatgtgcgagtggccccgcccccgcggccaggccgccacccccgagaccccccagccctccccccccggcggctccggctccgagccctacaagctcctccccggcgccgtcgccaccatcgtcaagcccctctccgccatcccccagcccaccatcaccaagcaggaggtcatctgaggactagttataagactgactagcccgatgggcctcccaacgggccctcctcccctccttgcaccgagattaataaaaaaaaaaaaaaaaaaaaaaaaaaaaaaaaaaaaaaaaaaaaaaaaaaaaaaaaaaaaaaaatgcatcccccccccccccccccccccccccccccccaaaggctcttttcagagccaccagaatt

SEQ ID NO: 1704 - RNA, 1642 nt, synthetic construct
  misc_feature 1..1642: note = mRNA i-3 (A64-N5-C30-hSL-N5) (opt2) from Homo sapiens__NP_000448.3__HNF4A(1-474)(S461A)
  source 1..1642: mol_type = other RNA
aggagaaagcttaccatgcgcctctccaagaccctcgtcgacatggacatggccgactactccgccgccctcgaccccgcctacaccaccctcgagttcgagaacgtccaggtcctcaccatgggcaacgacacctccccctccgagggcaccaacctcaacgcccccaactccctcggcgtctccgccctctgcgccatctgcggcgaccgcgccaccggcaagcactacggcgcctcctcctgcgacggctgcaagggcttcttccgccgctccgtccgcaagaaccacatgtactcctgccgcttctcccgccagtgcgtcgtcgacaaggacaagcgcaaccagtgccgctactgccgcctcaagaagtgcttccgcgccggcatgaagaaggaggccgtccagaacgagcgcgaccgcatctccacccgccgctcctcctacgaggactcctccctcccctccatcaacgccctcctccaggccgaggtcctctcccgccagatcacctcccccgtctccggcatcaacggcgacatccgcgccaagaagatcgcctccatcgccgacgtctgcgagtccatgaaggagcagctcctcgtcctcgtcgagtgggccaagtacatccccgccttctgcgagctccccctcgacgaccaggtcgccctcctccgcgcccacgccggcgagcacctcctcctcggcgccaccaagcgctccatggtcttcaaggacgtcctcctcctcggcaacgactacatcgtcccccgccactgccccgagctcgccgagatgtcccgcgtctccatccgcatcctcgacgagctcgtcctccccttccaggagctccagatcgacgacaacgagtacgcctacctcaaggccatcatcttcttcgaccccgacgccaagggcctctccgaccccggcaagatcaagcgcctccgctcccaggtccaggtctccctcgaggactacatcaacgaccgccagtacgactcccgcggccgcttcggcgagctcctcctcctcctccccaccctccagtccatcacctggcagatgatcgagcagatccagttcatcaagctcttcggcatggccaagatcgacaacctcctccaggagatgctcctcggcggctccccctccgacgccccccacgcccaccaccccctccacccccacctcatgcaggagcacatgggcaccaacgtcatcgtcgccaacaccatgcccacccacctctccaacggccagatgtgcgagtggccccgcccccgcggccaggccgccacccccgagaccccccagccctccccccccggcggctccggctccgagccctacaagctcctccccggcgccgtcgccaccatcgtcaagcccctcgccgccatcccccagcccaccatcaccaagcaggaggtcatctgaggactagttataagactgactagcccgatgggcctcccaacgggccctcctcccctccttgcaccgagattaataaaaaaaaaaaaaaaaaaaaaaaaaaaaaaaaaaaaaaaaaaaaaaaaaaaaaaaaaaaaaaaatgcatcccccccccccccccccccccccccccccccaaaggctcttttcagagccaccagaatt

SEQ ID NO: 1705 - RNA, 1642 nt, synthetic construct
  misc_feature 1..1642: note = mRNA i-3 (A64-N5-C30-hSL-N5) (opt2) from Homo sapiens__NP_000448.3__HNF4A(1-474)(S461E)
  source 1..1642: mol_type = other RNA
aggagaaagcttaccatgcgcctctccaagaccctcgtcgacatggacatggccgactactccgccgccctcgaccccgcctacaccaccctcgagttcgagaacgtccaggtcctcaccatgggcaacgacacctccccctccgagggcaccaacctcaacgcccccaactccctcggcgtctccgccctctgcgccatctgcggcgaccgcgccaccggcaagcactacggcgcctcctcctgcgacggctgcaagggcttcttccgccgctccgtccgcaagaaccacatgtactcctgccgcttctcccgccagtgcgtcgtcgacaaggacaagcgcaaccagtgccgctactgccgcctcaagaagtgcttccgcgccggcatgaagaaggaggccgtccagaacgagcgcgaccgcatctccacccgccgctcctcctacgaggactcctccctcccctccatcaacgccctcctccaggccgaggtcctctcccgccagatcacctcccccgtctccggcatcaacggcgacatccgcgccaagaagatcgcctccatcgccgacgtctgcgagtccatgaaggagcagctcctcgtcctcgtcgagtgggccaagtacatccccgccttctgcgagctccccctcgacgaccaggtcgccctcctccgcgcccacgccggcgagcacctcctcctcggcgccaccaagcgctccatggtcttcaaggacgtcctcctcctcggcaacgactacatcgtcccccgccactgccccgagctcgccgagatgtcccgcgtctccatccgcatcctcgacgagctcgtcctccccttccaggagctccagatcgacgacaacgagtacgcctacctcaaggccatcatcttcttcgaccccgacgccaagggcctctccgaccccggcaagatcaagcgcctccgctcccaggtccaggtctccctcgaggactacatcaacgaccgccagtacgactcccgcggccgcttcggcgagctcctcctcctcctccccaccctccagtccatcacctggcagatgatcgagcagatccagttcatcaagctcttcggcatggccaagatcgacaacctcctccaggagatgctcctcggcggctccccctccgacgccccccacgcccaccaccccctccacccccacctcatgcaggagcacatgggcaccaacgtcatcgtcgccaacaccatgcccacccacctctccaacggccagatgtgcgagtggccccgcccccgcggccaggccgccacccccgagaccccccagccctccccccccggcggctccggctccgagccctacaagctcctccccggcgccgtcgccaccatcgtcaagcccctcgaggccatcccccagcccaccatcaccaagcaggaggtcatctgaggactagttataagactgactagcccgatgggcctcccaacgggccctcctcccctccttgcaccgagattaataaaaaaaaaaaaaaaaaaaaaaaaaaaaaaaaaaaaaaaaaaaaaaaaaaaaaaaaaaaaaaaatgcatcccccccccccccccccccccccccccccccaaaggctcttttcagagccaccagaatt

SEQ ID NO: 1706 - RNA, 1642 nt, synthetic construct
  misc_feature 1..1642: note = mRNA i-3 (A64-N5-C30-hSL-N5) (opt2) from Homo sapiens__NP_000448.3__HNF4A(1-474)(S142A_S143A_S313A)
  source 1..1642: mol_type = other RNA
aggagaaagcttaccatgcgcctctccaagaccctcgtcgacatggacatggccgactactccgccgccctcgaccccgcctacaccaccctcgagttcgagaacgtccaggtcctcaccatgggcaacgacacctccccctccgagggcaccaacctcaacgcccccaactccctcggcgtctccgccctctgcgccatctgcggcgaccgcgccaccggcaagcactacggcgcctcctcctgcgacggctgcaagggcttcttccgccgctccgtccgcaagaaccacatgtactcctgccgcttctcccgccagtgcgtcgtcgacaaggacaagcgcaaccagtgccgctactgccgcctcaagaagtgcttccgcgccggcatgaagaaggaggccgtccagaacgagcgcgaccgcatctccacccgccgcgccgcctacgaggactcctccctcccctccatcaacgccctcctccaggccgaggtcctctcccgccagatcacctcccccgtctccggcatcaacggcgacatccgcgccaagaagatcgcctccatcgccgacgtctgcgagtccatgaaggagcagctcctcgtcctcgtcgagtgggccaagtacatccccgccttctgcgagctccccctcgacgaccaggtcgccctcctccgcgcccacgccggcgagcacctcctcctcggcgccaccaagcgctccatggtcttcaaggacgtcctcctcctcggcaacgactacatcgtcccccgccactgccccgagctcgccgagatgtcccgcgtctccatccgcatcctcgacgagctcgtcctccccttccaggagctccagatcgacgacaacgagtacgcctacctcaaggccatcatcttcttcgaccccgacgccaagggcctctccgaccccggcaagatcaagcgcctccgcgcccaggtccaggtctccctcgaggactacatcaacgaccgccagtacgactcccgcggccgcttcggcgagctcctcctcctcctccccaccctccagtccatcacctggcagatgatcgagcagatccagttcatcaagctcttcggcatggccaagatcgacaacctcctccaggagatgctcctcggcggctccccctccgacgccccccacgcccaccaccccctccacccccacctcatgcaggagcacatgggcaccaacgtcatcgtcgccaacaccatgcccacccacctctccaacggccagatgtgcgagtggccccgcccccgcggccaggccgccacccccgagaccccccagccctccccccccggcggctccggctccgagccctacaagctcctccccggcgccgtcgccaccatcgtcaagcccctctccgccatcccccagcccaccatcaccaagcaggaggtcatctgaggactagttataagactgactagcccgatgggcctcccaacgggccctcctcccctccttgcaccgagattaataaaaaaaaaaaaaaaaaaaaaaaaaaaaaaaaaaaaaaaaaaaaaaaaaaaaaaaaaaaaaaaatgcatcccccccccccccccccccccccccccccccaaaggctcttttcagagccaccagaatt

SEQ ID NO: 1707 - RNA, 1642 nt, synthetic construct
  misc_feature 1..1642: note = mRNA i-3 (A64-N5-C30-hSL-N5) (opt2) from Homo sapiens__NP_000448.3__HNF4A(1-474)(S142A_S143A_S313A_K458R)
  source 1..1642: mol_type = other RNA
aggagaaagcttaccatgcgcctctccaagaccctcgtcgacatggacatggccgactactccgccgccctcgaccccgcctacaccaccctcgagttcgagaacgtccaggtcctcaccatgggcaacgacacctccccctccgagggcaccaacctcaacgcccccaactccctcggcgtctccgccctctgcgccatctgcggcgaccgcgccaccggcaagcactacggcgcctcctcctgcgacggctgcaagggcttcttccgccgctccgtccgcaagaaccacatgtactcctgccgcttctcccgccagtgcgtcgtcgacaaggacaagcgcaaccagtgccgctactgccgcctcaagaagtgcttccgcgccggcatgaagaaggaggccgtccagaacgagcgcgaccgcatctccacccgccgcgccgcctacgaggactcctccctcccctccatcaacgccctcctccaggccgaggtcctctcccgccagatcacctcccccgtctccggcatcaacggcgacatccgcgccaagaagatcgcctccatcgccgacgtctgcgagtccatgaaggagcagctcctcgtcctcgtcgagtgggccaagtacatccccgccttctgcgagctccccctcgacgaccaggtcgccctcctccgcgcccacgccggcgagcacctcctcctcggcgccaccaagcgctccatggtcttcaaggacgtcctcctcctcggcaacgactacatcgtcccccgccactgccccgagctcgccgagatgtcccgcgtctccatccgcatcctcgacgagctcgtcctccccttccaggagctccagatcgacgacaacgagtacgcctacctcaaggccatcatcttcttcgaccccgacgccaagggcctctccgaccccggcaagatcaagcgcctccgcgcccaggtccaggtctccctcgaggactacatcaacgaccgccagtacgactcccgcggccgcttcggcgagctcctcctcctcctccccaccctccagtccatcacctggcagatgatcgagcagatccagttcatcaagctcttcggcatggccaagatcgacaacctcctccaggagatgctcctcggcggctccccctccgacgccccccacgcccaccaccccctccacccccacctcatgcaggagcacatgggcaccaacgtcatcgtcgccaacaccatgcccacccacctctccaacggccagatgtgcgagtggccccgcccccgcggccaggccgccacccccgagaccccccagccctccccccccggcggctccggctccgagccctacaagctcctccccggcgccgtcgccaccatcgtccgccccctctccgccatcccccagcccaccatcaccaagcaggaggtcatctgaggactagttataagactgactagcccgatgggcctcccaacgggccctcctcccctccttgcaccgagattaataaaaaaaaaaaaaaaaaaaaaaaaaaaaaaaaaaaaaaaaaaaaaaaaaaaaaaaaaaaaaaaatgcatcccccccccccccccccccccccccccccccaaaggctcttttcagagccaccagaatt

SEQ ID NO: 1708 - RNA, 1642 nt, synthetic construct
  misc_feature 1..1642: note = mRNA i-3 (A64-N5-C30-hSL-N5) (opt2) from Homo sapiens__NP_000448.3__HNF4A(1-474)(S142A_S143A_S167A_S313A_ S378A_T429A_T432A_S436A_K458R)
  source 1..1642: mol_type = other RNA
aggagaaagcttaccatgcgcctctccaagaccctcgtcgacatggacatggccgactactccgccgccctcgaccccgcctacaccaccctcgagttcgagaacgtccaggtcctcaccatgggcaacgacacctccccctccgagggcaccaacctcaacgcccccaactccctcggcgtctccgccctctgcgccatctgcggcgaccgcgccaccggcaagcactacggcgcctcctcctgcgacggctgcaagggcttcttccgccgctccgtccgcaagaaccacatgtactcctgccgcttctcccgccagtgcgtcgtcgacaaggacaagcgcaaccagtgccgctactgccgcctcaagaagtgcttccgcgccggcatgaagaaggaggccgtccagaacgagcgcgaccgcatctccacccgccgcgccgcctacgaggactcctccctcccctccatcaacgccctcctccaggccgaggtcctctcccgccagatcaccgcccccgtctccggcatcaacggcgacatccgcgccaagaagatcgcctccatcgccgacgtctgcgagtccatgaaggagcagctcctcgtcctcgtcgagtgggccaagtacatccccgccttctgcgagctccccctcgacgaccaggtcgccctcctccgcgcccacgccggcgagcacctcctcctcggcgccaccaagcgctccatggtcttcaaggacgtcctcctcctcggcaacgactacatcgtcccccgccactgccccgagctcgccgagatgtcccgcgtctccatccgcatcctcgacgagctcgtcctccccttccaggagctccagatcgacgacaacgagtacgcctacctcaaggccatcatcttcttcgaccccgacgccaagggcctctccgaccccggcaagatcaagcgcctccgcgcccaggtccaggtctccctcgaggactacatcaacgaccgccagtacgactcccgcggccgcttcggcgagctcctcctcctcctccccaccctccagtccatcacctggcagatgatcgagcagatccagttcatcaagctcttcggcatggccaagatcgacaacctcctccaggagatgctcctcggcggcgccccctccgacgccccccacgcccaccaccccctccacccccacctcatgcaggagcacatgggcaccaacgtcatcgtcgccaacaccatgcccacccacctctccaacggccagatgtgcgagtggccccgcccccgcggccaggccgccgcccccgaggccccccagcccgccccccccggcggctccggctccgagccctacaagctcctccccggcgccgtcgccaccatcgtccgccccctctccgccatcccccagcccaccatcaccaagcaggaggtcatctgaggactagttataagactgactagcccgatgggcctcccaacgggccctcctcccctccttgcaccgagattaataaaaaaaaaaaaaaaaaaaaaaaaaaaaaaaaaaaaaaaaaaaaaaaaaaaaaaaaaaaaaaaatgcatcccccccccccccccccccccccccccccccaaaggctcttttcagagccaccagaatt

SEQ ID NO: 1709 - RNA, 1642 nt, synthetic construct
  misc_feature 1..1642: note = mRNA i-3 (A64-N5-C30-hSL-N5) (opt2) from Homo sapiens__NP_000448.3__HNF4A(1-474)(S142A_S143A_S148A_S167A_ S313A_S378A_T429A_T432A_S436A_K458R)
  source 1..1642: mol_type = other RNA
aggagaaagcttaccatgcgcctctccaagaccctcgtcgacatggacatggccgactactccgccgccctcgaccccgcctacaccaccctcgagttcgagaacgtccaggtcctcaccatgggcaacgacacctccccctccgagggcaccaacctcaacgcccccaactccctcggcgtctccgccctctgcgccatctgcggcgaccgcgccaccggcaagcactacggcgcctcctcctgcgacggctgcaagggcttcttccgccgctccgtccgcaagaaccacatgtactcctgccgcttctcccgccagtgcgtcgtcgacaaggacaagcgcaaccagtgccgctactgccgcctcaagaagtgcttccgcgccggcatgaagaaggaggccgtccagaacgagcgcgaccgcatctccacccgccgcgccgcctacgaggactccgccctcccctccatcaacgccctcctccaggccgaggtcctctcccgccagatcaccgcccccgtctccggcatcaacggcgacatccgcgccaagaagatcgcctccatcgccgacgtctgcgagtccatgaaggagcagctcctcgtcctcgtcgagtgggccaagtacatccccgccttctgcgagctccccctcgacgaccaggtcgccctcctccgcgcccacgccggcgagcacctcctcctcggcgccaccaagcgctccatggtcttcaaggacgtcctcctcctcggcaacgactacatcgtcccccgccactgccccgagctcgccgagatgtcccgcgtctccatccgcatcctcgacgagctcgtcctccccttccaggagctccagatcgacgacaacgagtacgcctacctcaaggccatcatcttcttcgaccccgacgccaagggcctctccgaccccggcaagatcaagcgcctccgcgcccaggtccaggtctccctcgaggactacatcaacgaccgccagtacgactcccgcggccgcttcggcgagctcctcctcctcctccccaccctccagtccatcacctggcagatgatcgagcagatccagttcatcaagctcttcggcatggccaagatcgacaacctcctccaggagatgctcctcggcggcgccccctccgacgccccccacgcccaccaccccctccacccccacctcatgcaggagcacatgggcaccaacgtcatcgtcgccaacaccatgcccacccacctctccaacggccagatgtgcgagtggccccgcccccgcggccaggccgccgcccccgaggccccccagcccgccccccccggcggctccggctccgagccctacaagctcctccccggcgccgtcgccaccatcgtccgccccctctccgccatcccccagcccaccatcaccaagcaggaggtcatctgaggactagttataagactgactagcccgatgggcctcccaacgggccctcctcccctccttgcaccgagattaataaaaaaaaaaaaaaaaaaaaaaaaaaaaaaaaaaaaaaaaaaaaaaaaaaaaaaaaaaaaaaaatgcatcccccccccccccccccccccccccccccccaaaggctcttttcagagccaccagaatt

SEQ ID NO: 1710 - RNA, 1642 nt, synthetic construct
  misc_feature 1..1642: note = mRNA i-3 (A64-N5-C30-hSL-N5) (opt2) from Homo sapiens__NP_000448.3__HNF4A(1-474)(K106R_K108R_K126R_K127R_ S142A_S143A_S148A_S167A_S313A_S378A_T429A_T432A_S436A_K458R )
  source 1..1642: mol_type = other RNA
aggagaaagcttaccatgcgcctctccaagaccctcgtcgacatggacatggccgactactccgccgccctcgaccccgcctacaccaccctcgagttcgagaacgtccaggtcctcaccatgggcaacgacacctccccctccgagggcaccaacctcaacgcccccaactccctcggcgtctccgccctctgcgccatctgcggcgaccgcgccaccggcaagcactacggcgcctcctcctgcgacggctgcaagggcttcttccgccgctccgtccgcaagaaccacatgtactcctgccgcttctcccgccagtgcgtcgtcgaccgcgaccgccgcaaccagtgccgctactgccgcctcaagaagtgcttccgcgccggcatgcgccgcgaggccgtccagaacgagcgcgaccgcatctccacccgccgcgccgcctacgaggactccgccctcccctccatcaacgccctcctccaggccgaggtcctctcccgccagatcaccgcccccgtctccggcatcaacggcgacatccgcgccaagaagatcgcctccatcgccgacgtctgcgagtccatgaaggagcagctcctcgtcctcgtcgagtgggccaagtacatccccgccttctgcgagctccccctcgacgaccaggtcgccctcctccgcgcccacgccggcgagcacctcctcctcggcgccaccaagcgctccatggtcttcaaggacgtcctcctcctcggcaacgactacatcgtcccccgccactgccccgagctcgccgagatgtcccgcgtctccatccgcatcctcgacgagctcgtcctccccttccaggagctccagatcgacgacaacgagtacgcctacctcaaggccatcatcttcttcgaccccgacgccaagggcctctccgaccccggcaagatcaagcgcctccgcgcccaggtccaggtctccctcgaggactacatcaacgaccgccagtacgactcccgcggccgcttcggcgagctcctcctcctcctccccaccctccagtccatcacctggcagatgatcgagcagatccagttcatcaagctcttcggcatggccaagatcgacaacctcctccaggagatgctcctcggcggcgccccctccgacgccccccacgcccaccaccccctccacccccacctcatgcaggagcacatgggcaccaacgtcatcgtcgccaacaccatgcccacccacctctccaacggccagatgtgcgagtggccccgcccccgcggccaggccgccgcccccgaggccccccagcccgccccccccggcggctccggctccgagccctacaagctcctccccggcgccgtcgccaccatcgtccgccccctctccgccatcccccagcccaccatcaccaagcaggaggtcatctgaggactagttataagactgactagcccgatgggcctcccaacgggccctcctcccctccttgcaccgagattaataaaaaaaaaaaaaaaaaaaaaaaaaaaaaaaaaaaaaaaaaaaaaaaaaaaaaaaaaaaaaaaatgcatcccccccccccccccccccccccccccccccaaaggctcttttcagagccaccagaatt

SEQ ID NO: 1711 - RNA, 1642 nt, synthetic construct
  misc_feature 1..1642: note = mRNA i-3 (A64-N5-C30-hSL-N5) (opt2) from Homo sapiens__NP_000448.3__HNF4A(1-474)(S142A_S143A_S148A_T166A_ S167A_S313A_S378A_T429A_T432A_S436A_K458R)
  source 1..1642: mol_type = other RNA
aggagaaagcttaccatgcgcctctccaagaccctcgtcgacatggacatggccgactactccgccgccctcgaccccgcctacaccaccctcgagttcgagaacgtccaggtcctcaccatgggcaacgacacctccccctccgagggcaccaacctcaacgcccccaactccctcggcgtctccgccctctgcgccatctgcggcgaccgcgccaccggcaagcactacggcgcctcctcctgcgacggctgcaagggcttcttccgccgctccgtccgcaagaaccacatgtactcctgccgcttctcccgccagtgcgtcgtcgacaaggacaagcgcaaccagtgccgctactgccgcctcaagaagtgcttccgcgccggcatgaagaaggaggccgtccagaacgagcgcgaccgcatctccacccgccgcgccgcctacgaggactccgccctcccctccatcaacgccctcctccaggccgaggtcctctcccgccagatcgccgcccccgtctccggcatcaacggcgacatccgcgccaagaagatcgcctccatcgccgacgtctgcgagtccatgaaggagcagctcctcgtcctcgtcgagtgggccaagtacatccccgccttctgcgagctccccctcgacgaccaggtcgccctcctccgcgcccacgccggcgagcacctcctcctcggcgccaccaagcgctccatggtcttcaaggacgtcctcctcctcggcaacgactacatcgtcccccgccactgccccgagctcgccgagatgtcccgcgtctccatccgcatcctcgacgagctcgtcctccccttccaggagctccagatcgacgacaacgagtacgcctacctcaaggccatcatcttcttcgaccccgacgccaagggcctctccgaccccggcaagatcaagcgcctccgcgcccaggtccaggtctccctcgaggactacatcaacgaccgccagtacgactcccgcggccgcttcggcgagctcctcctcctcctccccaccctccagtccatcacctggcagatgatcgagcagatccagttcatcaagctcttcggcatggccaagatcgacaacctcctccaggagatgctcctcggcggcgccccctccgacgccccccacgcccaccaccccctccacccccacctcatgcaggagcacatgggcaccaacgtcatcgtcgccaacaccatgcccacccacctctccaacggccagatgtgcgagtggccccgcccccgcggccaggccgccgcccccgaggccccccagcccgccccccccggcggctccggctccgagccctacaagctcctccccggcgccgtcgccaccatcgtccgccccctctccgccatcccccagcccaccatcaccaagcaggaggtcatctgaggactagttataagactgactagcccgatgggcctcccaacgggccctcctcccctccttgcaccgagattaataaaaaaaaaaaaaaaaaaaaaaaaaaaaaaaaaaaaaaaaaaaaaaaaaaaaaaaaaaaaaaaatgcatcccccccccccccccccccccccccccccccaaaggctcttttcagagccaccagaatt

SEQ ID NO: 1712 - RNA, 1642 nt, synthetic construct
  misc_feature 1..1642: note = mRNA i-3 (A64-N5-C30-hSL-N5) (opt2) from Homo sapiens__NP_000448.3__HNF4A(1-474)(S87A_S142A_S143A_S148A_T 166A_S167A_S313A_S378A_T429A_T432A_S436A_K458R)
  source 1..1642: mol_type = other RNA
aggagaaagcttaccatgcgcctctccaagaccctcgtcgacatggacatggccgactactccgccgccctcgaccccgcctacaccaccctcgagttcgagaacgtccaggtcctcaccatgggcaacgacacctccccctccgagggcaccaacctcaacgcccccaactccctcggcgtctccgccctctgcgccatctgcggcgaccgcgccaccggcaagcactacggcgcctcctcctgcgacggctgcaagggcttcttccgccgcgccgtccgcaagaaccacatgtactcctgccgcttctcccgccagtgcgtcgtcgacaaggacaagcgcaaccagtgccgctactgccgcctcaagaagtgcttccgcgccggcatgaagaaggaggccgtccagaacgagcgcgaccgcatctccacccgccgcgccgcctacgaggactccgccctcccctccatcaacgccctcctccaggccgaggtcctctcccgccagatcgccgcccccgtctccggcatcaacggcgacatccgcgccaagaagatcgcctccatcgccgacgtctgcgagtccatgaaggagcagctcctcgtcctcgtcgagtgggccaagtacatccccgccttctgcgagctccccctcgacgaccaggtcgccctcctccgcgcccacgccggcgagcacctcctcctcggcgccaccaagcgctccatggtcttcaaggacgtcctcctcctcggcaacgactacatcgtcccccgccactgccccgagctcgccgagatgtcccgcgtctccatccgcatcctcgacgagctcgtcctccccttccaggagctccagatcgacgacaacgagtacgcctacctcaaggccatcatcttcttcgaccccgacgccaagggcctctccgaccccggcaagatcaagcgcctccgcgcccaggtccaggtctccctcgaggactacatcaacgaccgccagtacgactcccgcggccgcttcggcgagctcctcctcctcctccccaccctccagtccatcacctggcagatgatcgagcagatccagttcatcaagctcttcggcatggccaagatcgacaacctcctccaggagatgctcctcggcggcgccccctccgacgccccccacgcccaccaccccctccacccccacctcatgcaggagcacatgggcaccaacgtcatcgtcgccaacaccatgcccacccacctctccaacggccagatgtgcgagtggccccgcccccgcggccaggccgccgcccccgaggccccccagcccgccccccccggcggctccggctccgagccctacaagctcctccccggcgccgtcgccaccatcgtccgccccctctccgccatcccccagcccaccatcaccaagcaggaggtcatctgaggactagttataagactgactagcccgatgggcctcccaacgggccctcctcccctccttgcaccgagattaataaaaaaaaaaaaaaaaaaaaaaaaaaaaaaaaaaaaaaaaaaaaaaaaaaaaaaaaaaaaaaaatgcatcccccccccccccccccccccccccccccccaaaggctcttttcagagccaccagaatt

SEQ ID NO: 1713 - RNA, 1642 nt, synthetic construct
  misc_feature 1..1642: note = mRNA i-3 (A64-N5-C30-hSL-N5) (opt2) from Homo sapiens__NP_000448.3__HNF4A(1-474)(S87A_K106R_K108R_K126R_K 127R_S142A_S143A_S148A_T166A_S167A_S313A_S378A_T429A_T432A_ S436A_K458R)
  source 1..1642: mol_type = other RNA
aggagaaagcttaccatgcgcctctccaagaccctcgtcgacatggacatggccgactactccgccgccctcgaccccgcctacaccaccctcgagttcgagaacgtccaggtcctcaccatgggcaacgacacctccccctccgagggcaccaacctcaacgcccccaactccctcggcgtctccgccctctgcgccatctgcggcgaccgcgccaccggcaagcactacggcgcctcctcctgcgacggctgcaagggcttcttccgccgcgccgtccgcaagaaccacatgtactcctgccgcttctcccgccagtgcgtcgtcgaccgcgaccgccgcaaccagtgccgctactgccgcctcaagaagtgcttccgcgccggcatgcgccgcgaggccgtccagaacgagcgcgaccgcatctccacccgccgcgccgcctacgaggactccgccctcccctccatcaacgccctcctccaggccgaggtcctctcccgccagatcgccgcccccgtctccggcatcaacggcgacatccgcgccaagaagatcgcctccatcgccgacgtctgcgagtccatgaaggagcagctcctcgtcctcgtcgagtgggccaagtacatccccgccttctgcgagctccccctcgacgaccaggtcgccctcctccgcgcccacgccggcgagcacctcctcctcggcgccaccaagcgctccatggtcttcaaggacgtcctcctcctcggcaacgactacatcgtcccccgccactgccccgagctcgccgagatgtcccgcgtctccatccgcatcctcgacgagctcgtcctccccttccaggagctccagatcgacgacaacgagtacgcctacctcaaggccatcatcttcttcgaccccgacgccaagggcctctccgaccccggcaagatcaagcgcctccgcgcccaggtccaggtctccctcgaggactacatcaacgaccgccagtacgactcccgcggccgcttcggcgagctcctcctcctcctccccaccctccagtccatcacctggcagatgatcgagcagatccagttcatcaagctcttcggcatggccaagatcgacaacctcctccaggagatgctcctcggcggcgccccctccgacgccccccacgcccaccaccccctccacccccacctcatgcaggagcacatgggcaccaacgtcatcgtcgccaacaccatgcccacccacctctccaacggccagatgtgcgagtggccccgcccccgcggccaggccgccgcccccgaggccccccagcccgccccccccggcggctccggctccgagccctacaagctcctccccggcgccgtcgccaccatcgtccgccccctctccgccatcccccagcccaccatcaccaagcaggaggtcatctgaggactagttataagactgactagcccgatgggcctcccaacgggccctcctcccctccttgcaccgagattaataaaaaaaaaaaaaaaaaaaaaaaaaaaaaaaaaaaaaaaaaaaaaaaaaaaaaaaaaaaaaaaatgcatcccccccccccccccccccccccccccccccaaaggctcttttcagagccaccagaatt

SEQ ID NO: 1714 - RNA, 1642 nt, synthetic construct
  misc_feature 1..1642: note = mRNA i-3 (A64-N5-C30-hSL-N5) (opt2) from Homo sapiens__NP_000448.3__HNF4A(1-474)(S87A_K106R_K108R_K126R_K 127R)
  source 1..1642: mol_type = other RNA
aggagaaagcttaccatgcgcctctccaagaccctcgtcgacatggacatggccgactactccgccgccctcgaccccgcctacaccaccctcgagttcgagaacgtccaggtcctcaccatgggcaacgacacctccccctccgagggcaccaacctcaacgcccccaactccctcggcgtctccgccctctgcgccatctgcggcgaccgcgccaccggcaagcactacggcgcctcctcctgcgacggctgcaagggcttcttccgccgcgccgtccgcaagaaccacatgtactcctgccgcttctcccgccagtgcgtcgtcgaccgcgaccgccgcaaccagtgccgctactgccgcctcaagaagtgcttccgcgccggcatgcgccgcgaggccgtccagaacgagcgcgaccgcatctccacccgccgctcctcctacgaggactcctccctcccctccatcaacgccctcctccaggccgaggtcctctcccgccagatcacctcccccgtctccggcatcaacggcgacatccgcgccaagaagatcgcctccatcgccgacgtctgcgagtccatgaaggagcagctcctcgtcctcgtcgagtgggccaagtacatccccgccttctgcgagctccccctcgacgaccaggtcgccctcctccgcgcccacgccggcgagcacctcctcctcggcgccaccaagcgctccatggtcttcaaggacgtcctcctcctcggcaacgactacatcgtcccccgccactgccccgagctcgccgagatgtcccgcgtctccatccgcatcctcgacgagctcgtcctccccttccaggagctccagatcgacgacaacgagtacgcctacctcaaggccatcatcttcttcgaccccgacgccaagggcctctccgaccccggcaagatcaagcgcctccgctcccaggtccaggtctccctcgaggactacatcaacgaccgccagtacgactcccgcggccgcttcggcgagctcctcctcctcctccccaccctccagtccatcacctggcagatgatcgagcagatccagttcatcaagctcttcggcatggccaagatcgacaacctcctccaggagatgctcctcggcggctccccctccgacgccccccacgcccaccaccccctccacccccacctcatgcaggagcacatgggcaccaacgtcatcgtcgccaacaccatgcccacccacctctccaacggccagatgtgcgagtggccccgcccccgcggccaggccgccacccccgagaccccccagccctccccccccggcggctccggctccgagccctacaagctcctccccggcgccgtcgccaccatcgtcaagcccctctccgccatcccccagcccaccatcaccaagcaggaggtcatctgaggactagttataagactgactagcccgatgggcctcccaacgggccctcctcccctccttgcaccgagattaataaaaaaaaaaaaaaaaaaaaaaaaaaaaaaaaaaaaaaaaaaaaaaaaaaaaaaaaaaaaaaaatgcatcccccccccccccccccccccccccccccccaaaggctcttttcagagccaccagaatt

SEQ ID NO: 1715 - RNA, 1642 nt, synthetic construct
  misc_feature 1..1642: note = mRNA i-3 (A64-N5-C30-hSL-N5) (opt2) from Homo sapiens__NP_000448.3__HNF4A(1-474)(S87A_K106R_K108R_K126R_K 127R_S142A_S143A_S148A_T166A_S167A_S313A_S378A_T429A_T432A_ S436A_K458R_S461A)
  source 1..1642: mol_type = other RNA
aggagaaagcttaccatgcgcctctccaagaccctcgtcgacatggacatggccgactactccgccgccctcgaccccgcctacaccaccctcgagttcgagaacgtccaggtcctcaccatgggcaacgacacctccccctccgagggcaccaacctcaacgcccccaactccctcggcgtctccgccctctgcgccatctgcggcgaccgcgccaccggcaagcactacggcgcctcctcctgcgacggctgcaagggcttcttccgccgcgccgtccgcaagaaccacatgtactcctgccgcttctcccgccagtgcgtcgtcgaccgcgaccgccgcaaccagtgccgctactgccgcctcaagaagtgcttccgcgccggcatgcgccgcgaggccgtccagaacgagcgcgaccgcatctccacccgccgcgccgcctacgaggactccgccctcccctccatcaacgccctcctccaggccgaggtcctctcccgccagatcgccgcccccgtctccggcatcaacggcgacatccgcgccaagaagatcgcctccatcgccgacgtctgcgagtccatgaaggagcagctcctcgtcctcgtcgagtgggccaagtacatccccgccttctgcgagctccccctcgacgaccaggtcgccctcctccgcgcccacgccggcgagcacctcctcctcggcgccaccaagcgctccatggtcttcaaggacgtcctcctcctcggcaacgactacatcgtcccccgccactgccccgagctcgccgagatgtcccgcgtctccatccgcatcctcgacgagctcgtcctccccttccaggagctccagatcgacgacaacgagtacgcctacctcaaggccatcatcttcttcgaccccgacgccaagggcctctccgaccccggcaagatcaagcgcctccgcgcccaggtccaggtctccctcgaggactacatcaacgaccgccagtacgactcccgcggccgcttcggcgagctcctcctcctcctccccaccctccagtccatcacctggcagatgatcgagcagatccagttcatcaagctcttcggcatggccaagatcgacaacctcctccaggagatgctcctcggcggcgccccctccgacgccccccacgcccaccaccccctccacccccacctcatgcaggagcacatgggcaccaacgtcatcgtcgccaacaccatgcccacccacctctccaacggccagatgtgcgagtggccccgcccccgcggccaggccgccgcccccgaggccccccagcccgccccccccggcggctccggctccgagccctacaagctcctccccggcgccgtcgccaccatcgtccgccccctcgccgccatcccccagcccaccatcaccaagcaggaggtcatctgaggactagttataagactgactagcccgatgggcctcccaacgggccctcctcccctccttgcaccgagattaataaaaaaaaaaaaaaaaaaaaaaaaaaaaaaaaaaaaaaaaaaaaaaaaaaaaaaaaaaaaaaaatgcatcccccccccccccccccccccccccccccccaaaggctcttttcagagccaccagaatt

SEQ ID NO: 1716 - RNA, 1642 nt, synthetic construct
  misc_feature 1..1642: note = mRNA i-3 (A64-N5-C30-hSL-N5) (opt2) from Homo sapiens__NP_000448.3__HNF4A(1-474)(S87A_K106R_K108R_K126R_K 127R_S142A_S143A_S148A_T166A_S167A_S313A_S378A_T429A_T432A_ S436A_K458R_S461E)
  source 1..1642: mol_type = other RNA
aggagaaagcttaccatgcgcctctccaagaccctcgtcgacatggacatggccgactactccgccgccctcgaccccgcctacaccaccctcgagttcgagaacgtccaggtcctcaccatgggcaacgacacctccccctccgagggcaccaacctcaacgcccccaactccctcggcgtctccgccctctgcgccatctgcggcgaccgcgccaccggcaagcactacggcgcctcctcctgcgacggctgcaagggcttcttccgccgcgccgtccgcaagaaccacatgtactcctgccgcttctcccgccagtgcgtcgtcgaccgcgaccgccgcaaccagtgccgctactgccgcctcaagaagtgcttccgcgccggcatgcgccgcgaggccgtccagaacgagcgcgaccgcatctccacccgccgcgccgcctacgaggactccgccctcccctccatcaacgccctcctccaggccgaggtcctctcccgccagatcgccgcccccgtctccggcatcaacggcgacatccgcgccaagaagatcgcctccatcgccgacgtctgcgagtccatgaaggagcagctcctcgtcctcgtcgagtgggccaagtacatccccgccttctgcgagctccccctcgacgaccaggtcgccctcctccgcgcccacgccggcgagcacctcctcctcggcgccaccaagcgctccatggtcttcaaggacgtcctcctcctcggcaacgactacatcgtcccccgccactgccccgagctcgccgagatgtcccgcgtctccatccgcatcctcgacgagctcgtcctccccttccaggagctccagatcgacgacaacgagtacgcctacctcaaggccatcatcttcttcgaccccgacgccaagggcctctccgaccccggcaagatcaagcgcctccgcgcccaggtccaggtctccctcgaggactacatcaacgaccgccagtacgactcccgcggccgcttcggcgagctcctcctcctcctccccaccctccagtccatcacctggcagatgatcgagcagatccagttcatcaagctcttcggcatggccaagatcgacaacctcctccaggagatgctcctcggcggcgccccctccgacgccccccacgcccaccaccccctccacccccacctcatgcaggagcacatgggcaccaacgtcatcgtcgccaacaccatgcccacccacctctccaacggccagatgtgcgagtggccccgcccccgcggccaggccgccgcccccgaggccccccagcccgccccccccggcggctccggctccgagccctacaagctcctccccggcgccgtcgccaccatcgtccgccccctcgaggccatcccccagcccaccatcaccaagcaggaggtcatctgaggactagttataagactgactagcccgatgggcctcccaacgggccctcctcccctccttgcaccgagattaataaaaaaaaaaaaaaaaaaaaaaaaaaaaaaaaaaaaaaaaaaaaaaaaaaaaaaaaaaaaaaaatgcatcccccccccccccccccccccccccccccccaaaggctcttttcagagccaccagaatt

SEQ ID NO: 1717 - RNA, 1642 nt, synthetic construct
  misc_feature 1..1642: note = mRNA i-3 (A64-N5-C30-hSL-N5) (opt2) from Homo sapiens__NP_000448.3__HNF4A(1-474)(S87A_K106R_K108R_K126R_K 127R_S142A_S143A_S148E_T166A_S167E_S313A_S378E_T429E_T432E_ S436E_K458R_S461E)
  source 1..1642: mol_type = other RNA
aggagaaagcttaccatgcgcctctccaagaccctcgtcgacatggacatggccgactactccgccgccctcgaccccgcctacaccaccctcgagttcgagaacgtccaggtcctcaccatgggcaacgacacctccccctccgagggcaccaacctcaacgcccccaactccctcggcgtctccgccctctgcgccatctgcggcgaccgcgccaccggcaagcactacggcgcctcctcctgcgacggctgcaagggcttcttccgccgcgccgtccgcaagaaccacatgtactcctgccgcttctcccgccagtgcgtcgtcgaccgcgaccgccgcaaccagtgccgctactgccgcctcaagaagtgcttccgcgccggcatgcgccgcgaggccgtccagaacgagcgcgaccgcatctccacccgccgcgccgcctacgaggactccgagctcccctccatcaacgccctcctccaggccgaggtcctctcccgccagatcgccgagcccgtctccggcatcaacggcgacatccgcgccaagaagatcgcctccatcgccgacgtctgcgagtccatgaaggagcagctcctcgtcctcgtcgagtgggccaagtacatccccgccttctgcgagctccccctcgacgaccaggtcgccctcctccgcgcccacgccggcgagcacctcctcctcggcgccaccaagcgctccatggtcttcaaggacgtcctcctcctcggcaacgactacatcgtcccccgccactgccccgagctcgccgagatgtcccgcgtctccatccgcatcctcgacgagctcgtcctccccttccaggagctccagatcgacgacaacgagtacgcctacctcaaggccatcatcttcttcgaccccgacgccaagggcctctccgaccccggcaagatcaagcgcctccgcgcccaggtccaggtctccctcgaggactacatcaacgaccgccagtacgactcccgcggccgcttcggcgagctcctcctcctcctccccaccctccagtccatcacctggcagatgatcgagcagatccagttcatcaagctcttcggcatggccaagatcgacaacctcctccaggagatgctcctcggcggcgagccctccgacgccccccacgcccaccaccccctccacccccacctcatgcaggagcacatgggcaccaacgtcatcgtcgccaacaccatgcccacccacctctccaacggccagatgtgcgagtggccccgcccccgcggccaggccgccgagcccgaggagccccagcccgagccccccggcggctccggctccgagccctacaagctcctccccggcgccgtcgccaccatcgtccgccccctcgaggccatcccccagcccaccatcaccaagcaggaggtcatctgaggactagttataagactgactagcccgatgggcctcccaacgggccctcctcccctccttgcaccgagattaataaaaaaaaaaaaaaaaaaaaaaaaaaaaaaaaaaaaaaaaaaaaaaaaaaaaaaaaaaaaaaaatgcatcccccccccccccccccccccccccccccccaaaggctcttttcagagccaccagaatt

SEQ ID NO: 1718 - RNA, 1642 nt, synthetic construct
  misc_feature 1..1642: note = mRNA i-3 (A64-N5-C30-hSL-N5) (opt2) from Homo sapiens__NP_000448.3__HNF4A(1-474)(S87A_K106R_K108R_K126R_K 127R_S142A_S143A_S148A_T166A_S167A_K179R_K180R_S313A_S378A_ T429A_T432A_S436A_K458R_S461E)
  source 1..1642: mol_type = other RNA
aggagaaagcttaccatgcgcctctccaagaccctcgtcgacatggacatggccgactactccgccgccctcgaccccgcctacaccaccctcgagttcgagaacgtccaggtcctcaccatgggcaacgacacctccccctccgagggcaccaacctcaacgcccccaactccctcggcgtctccgccctctgcgccatctgcggcgaccgcgccaccggcaagcactacggcgcctcctcctgcgacggctgcaagggcttcttccgccgcgccgtccgcaagaaccacatgtactcctgccgcttctcccgccagtgcgtcgtcgaccgcgaccgccgcaaccagtgccgctactgccgcctcaagaagtgcttccgcgccggcatgcgccgcgaggccgtccagaacgagcgcgaccgcatctccacccgccgcgccgcctacgaggactccgccctcccctccatcaacgccctcctccaggccgaggtcctctcccgccagatcgccgcccccgtctccggcatcaacggcgacatccgcgcccgccgcatcgcctccatcgccgacgtctgcgagtccatgaaggagcagctcctcgtcctcgtcgagtgggccaagtacatccccgccttctgcgagctccccctcgacgaccaggtcgccctcctccgcgcccacgccggcgagcacctcctcctcggcgccaccaagcgctccatggtcttcaaggacgtcctcctcctcggcaacgactacatcgtcccccgccactgccccgagctcgccgagatgtcccgcgtctccatccgcatcctcgacgagctcgtcctccccttccaggagctccagatcgacgacaacgagtacgcctacctcaaggccatcatcttcttcgaccccgacgccaagggcctctccgaccccggcaagatcaagcgcctccgcgcccaggtccaggtctccctcgaggactacatcaacgaccgccagtacgactcccgcggccgcttcggcgagctcctcctcctcctccccaccctccagtccatcacctggcagatgatcgagcagatccagttcatcaagctcttcggcatggccaagatcgacaacctcctccaggagatgctcctcggcggcgccccctccgacgccccccacgcccaccaccccctccacccccacctcatgcaggagcacatgggcaccaacgtcatcgtcgccaacaccatgcccacccacctctccaacggccagatgtgcgagtggccccgcccccgcggccaggccgccgcccccgaggccccccagcccgccccccccggcggctccggctccgagccctacaagctcctccccggcgccgtcgccaccatcgtccgccccctcgaggccatcccccagcccaccatcaccaagcaggaggtcatctgaggactagttataagactgactagcccgatgggcctcccaacgggccctcctcccctccttgcaccgagattaataaaaaaaaaaaaaaaaaaaaaaaaaaaaaaaaaaaaaaaaaaaaaaaaaaaaaaaaaaaaaaaatgcatcccccccccccccccccccccccccccccccaaaggctcttttcagagccaccagaatt

SEQ ID NO: 1719 - RNA, 1642 nt, synthetic construct
  misc_feature 1..1642: note = mRNA i-3 (A64-N5-C30-hSL-N5) (opt2) from Homo sapiens__NP_000448.3__HNF4A(1-474)(S87A_K106R_K108R_K126R_K 127R_S142A_S143A_S148A_T166A_S167A_K300R_K307R_K309R_S313A_ S378A_T429A_T432A_S436A_K458R_S461E)
  source 1..1642: mol_type = other RNA
aggagaaagcttaccatgcgcctctccaagaccctcgtcgacatggacatggccgactactccgccgccctcgaccccgcctacaccaccctcgagttcgagaacgtccaggtcctcaccatgggcaacgacacctccccctccgagggcaccaacctcaacgcccccaactccctcggcgtctccgccctctgcgccatctgcggcgaccgcgccaccggcaagcactacggcgcctcctcctgcgacggctgcaagggcttcttccgccgcgccgtccgcaagaaccacatgtactcctgccgcttctcccgccagtgcgtcgtcgaccgcgaccgccgcaaccagtgccgctactgccgcctcaagaagtgcttccgcgccggcatgcgccgcgaggccgtccagaacgagcgcgaccgcatctccacccgccgcgccgcctacgaggactccgccctcccctccatcaacgccctcctccaggccgaggtcctctcccgccagatcgccgcccccgtctccggcatcaacggcgacatccgcgccaagaagatcgcctccatcgccgacgtctgcgagtccatgaaggagcagctcctcgtcctcgtcgagtgggccaagtacatccccgccttctgcgagctccccctcgacgaccaggtcgccctcctccgcgcccacgccggcgagcacctcctcctcggcgccaccaagcgctccatggtcttcaaggacgtcctcctcctcggcaacgactacatcgtcccccgccactgccccgagctcgccgagatgtcccgcgtctccatccgcatcctcgacgagctcgtcctccccttccaggagctccagatcgacgacaacgagtacgcctacctcaaggccatcatcttcttcgaccccgacgcccgcggcctctccgaccccggccgcatccgccgcctccgcgcccaggtccaggtctccctcgaggactacatcaacgaccgccagtacgactcccgcggccgcttcggcgagctcctcctcctcctccccaccctccagtccatcacctggcagatgatcgagcagatccagttcatcaagctcttcggcatggccaagatcgacaacctcctccaggagatgctcctcggcggcgccccctccgacgccccccacgcccaccaccccctccacccccacctcatgcaggagcacatgggcaccaacgtcatcgtcgccaacaccatgcccacccacctctccaacggccagatgtgcgagtggccccgcccccgcggccaggccgccgcccccgaggccccccagcccgccccccccggcggctccggctccgagccctacaagctcctccccggcgccgtcgccaccatcgtccgccccctcgaggccatcccccagcccaccatcaccaagcaggaggtcatctgaggactagttataagactgactagcccgatgggcctcccaacgggccctcctcccctccttgcaccgagattaataaaaaaaaaaaaaaaaaaaaaaaaaaaaaaaaaaaaaaaaaaaaaaaaaaaaaaaaaaaaaaaatgcatcccccccccccccccccccccccccccccccaaaggctcttttcagagccaccagaatt

SEQ ID NO: 1720 - RNA, 1642 nt, synthetic construct
  misc_feature 1..1642: note = mRNA i-3 (A64-N5-C30-hSL-N5) (opt2) from Homo sapiens__NP_000448.3__HNF4A(1-474)(S87A_K106R_K108R_K126R_K 127R_S142A_S143A_S148A_T166A_S167A_S313A_S378A_T429A_T432A_ S436A_K447R_K458R_S461E_K470R)
  source 1..1642: mol_type = other RNA
aggagaaagcttaccatgcgcctctccaagaccctcgtcgacatggacatggccgactactccgccgccctcgaccccgcctacaccaccctcgagttcgagaacgtccaggtcctcaccatgggcaacgacacctccccctccgagggcaccaacctcaacgcccccaactccctcggcgtctccgccctctgcgccatctgcggcgaccgcgccaccggcaagcactacggcgcctcctcctgcgacggctgcaagggcttcttccgccgcgccgtccgcaagaaccacatgtactcctgccgcttctcccgccagtgcgtcgtcgaccgcgaccgccgcaaccagtgccgctactgccgcctcaagaagtgcttccgcgccggcatgcgccgcgaggccgtccagaacgagcgcgaccgcatctccacccgccgcgccgcctacgaggactccgccctcccctccatcaacgccctcctccaggccgaggtcctctcccgccagatcgccgcccccgtctccggcatcaacggcgacatccgcgccaagaagatcgcctccatcgccgacgtctgcgagtccatgaaggagcagctcctcgtcctcgtcgagtgggccaagtacatccccgccttctgcgagctccccctcgacgaccaggtcgccctcctccgcgcccacgccggcgagcacctcctcctcggcgccaccaagcgctccatggtcttcaaggacgtcctcctcctcggcaacgactacatcgtcccccgccactgccccgagctcgccgagatgtcccgcgtctccatccgcatcctcgacgagctcgtcctccccttccaggagctccagatcgacgacaacgagtacgcctacctcaaggccatcatcttcttcgaccccgacgccaagggcctctccgaccccggcaagatcaagcgcctccgcgcccaggtccaggtctccctcgaggactacatcaacgaccgccagtacgactcccgcggccgcttcggcgagctcctcctcctcctccccaccctccagtccatcacctggcagatgatcgagcagatccagttcatcaagctcttcggcatggccaagatcgacaacctcctccaggagatgctcctcggcggcgccccctccgacgccccccacgcccaccaccccctccacccccacctcatgcaggagcacatgggcaccaacgtcatcgtcgccaacaccatgcccacccacctctccaacggccagatgtgcgagtggccccgcccccgcggccaggccgccgcccccgaggccccccagcccgccccccccggcggctccggctccgagccctaccgcctcctccccggcgccgtcgccaccatcgtccgccccctcgaggccatcccccagcccaccatcacccgccaggaggtcatctgaggactagttataagactgactagcccgatgggcctcccaacgggccctcctcccctccttgcaccgagattaataaaaaaaaaaaaaaaaaaaaaaaaaaaaaaaaaaaaaaaaaaaaaaaaaaaaaaaaaaaaaaaatgcatcccccccccccccccccccccccccccccccaaaggctcttttcagagccaccagaatt

SEQ ID NO: 1721 - RNA, 1642 nt, synthetic construct
  misc_feature 1..1642: note = mRNA i-3 (A64-N5-C30-hSL-N5) (opt2) from Homo sapiens__NP_000448.3__HNF4A(1-474)(S87A_K106R_K108R_K126R_K 127R_S142A_S143A_S148A_T166A_S167A_K179R_K180R_K234R_K300R_ K307R_K309R_S313A_S378A_T429A_T432A_S436A_K447R_K458R_S461E _K470R)
  source 1..1642: mol_type = other RNA
aggagaaagcttaccatgcgcctctccaagaccctcgtcgacatggacatggccgactactccgccgccctcgaccccgcctacaccaccctcgagttcgagaacgtccaggtcctcaccatgggcaacgacacctccccctccgagggcaccaacctcaacgcccccaactccctcggcgtctccgccctctgcgccatctgcggcgaccgcgccaccggcaagcactacggcgcctcctcctgcgacggctgcaagggcttcttccgccgcgccgtccgcaagaaccacatgtactcctgccgcttctcccgccagtgcgtcgtcgaccgcgaccgccgcaaccagtgccgctactgccgcctcaagaagtgcttccgcgccggcatgcgccgcgaggccgtccagaacgagcgcgaccgcatctccacccgccgcgccgcctacgaggactccgccctcccctccatcaacgccctcctccaggccgaggtcctctcccgccagatcgccgcccccgtctccggcatcaacggcgacatccgcgcccgccgcatcgcctccatcgccgacgtctgcgagtccatgaaggagcagctcctcgtcctcgtcgagtgggccaagtacatccccgccttctgcgagctccccctcgacgaccaggtcgccctcctccgcgcccacgccggcgagcacctcctcctcggcgccacccgccgctccatggtcttcaaggacgtcctcctcctcggcaacgactacatcgtcccccgccactgccccgagctcgccgagatgtcccgcgtctccatccgcatcctcgacgagctcgtcctccccttccaggagctccagatcgacgacaacgagtacgcctacctcaaggccatcatcttcttcgaccccgacgcccgcggcctctccgaccccggccgcatccgccgcctccgcgcccaggtccaggtctccctcgaggactacatcaacgaccgccagtacgactcccgcggccgcttcggcgagctcctcctcctcctccccaccctccagtccatcacctggcagatgatcgagcagatccagttcatcaagctcttcggcatggccaagatcgacaacctcctccaggagatgctcctcggcggcgccccctccgacgccccccacgcccaccaccccctccacccccacctcatgcaggagcacatgggcaccaacgtcatcgtcgccaacaccatgcccacccacctctccaacggccagatgtgcgagtggccccgcccccgcggccaggccgccgcccccgaggccccccagcccgccccccccggcggctccggctccgagccctaccgcctcctccccggcgccgtcgccaccatcgtccgccccctcgaggccatcccccagcccaccatcacccgccaggaggtcatctgaggactagttataagactgactagcccgatgggcctcccaacgggccctcctcccctccttgcaccgagattaataaaaaaaaaaaaaaaaaaaaaaaaaaaaaaaaaaaaaaaaaaaaaaaaaaaaaaaaaaaaaaaatgcatcccccccccccccccccccccccccccccccaaaggctcttttcagagccaccagaatt

SEQ ID NO: 1722 - RNA, 1642 nt, synthetic construct
  misc_feature 1..1642: note = mRNA i-3 (A64-N5-C30-hSL-N5) (opt2) from Homo sapiens__NP_000448.3__HNF4A(1-474)(S87A_S95A_S99A_K106R_K10 8R_K126R_K127R_S142A_S143A_S148A_T166A_S167A_S313A_S378A_T4 29A_T432A_S436A_K458R_S461E)
  source 1..1642: mol_type = other RNA
aggagaaagcttaccatgcgcctctccaagaccctcgtcgacatggacatggccgactactccgccgccctcgaccccgcctacaccaccctcgagttcgagaacgtccaggtcctcaccatgggcaacgacacctccccctccgagggcaccaacctcaacgcccccaactccctcggcgtctccgccctctgcgccatctgcggcgaccgcgccaccggcaagcactacggcgcctcctcctgcgacggctgcaagggcttcttccgccgcgccgtccgcaagaaccacatgtacgcctgccgcttcgcccgccagtgcgtcgtcgaccgcgaccgccgcaaccagtgccgctactgccgcctcaagaagtgcttccgcgccggcatgcgccgcgaggccgtccagaacgagcgcgaccgcatctccacccgccgcgccgcctacgaggactccgccctcccctccatcaacgccctcctccaggccgaggtcctctcccgccagatcgccgcccccgtctccggcatcaacggcgacatccgcgccaagaagatcgcctccatcgccgacgtctgcgagtccatgaaggagcagctcctcgtcctcgtcgagtgggccaagtacatccccgccttctgcgagctccccctcgacgaccaggtcgccctcctccgcgcccacgccggcgagcacctcctcctcggcgccaccaagcgctccatggtcttcaaggacgtcctcctcctcggcaacgactacatcgtcccccgccactgccccgagctcgccgagatgtcccgcgtctccatccgcatcctcgacgagctcgtcctccccttccaggagctccagatcgacgacaacgagtacgcctacctcaaggccatcatcttcttcgaccccgacgccaagggcctctccgaccccggcaagatcaagcgcctccgcgcccaggtccaggtctccctcgaggactacatcaacgaccgccagtacgactcccgcggccgcttcggcgagctcctcctcctcctccccaccctccagtccatcacctggcagatgatcgagcagatccagttcatcaagctcttcggcatggccaagatcgacaacctcctccaggagatgctcctcggcggcgccccctccgacgccccccacgcccaccaccccctccacccccacctcatgcaggagcacatgggcaccaacgtcatcgtcgccaacaccatgcccacccacctctccaacggccagatgtgcgagtggccccgcccccgcggccaggccgccgcccccgaggccccccagcccgccccccccggcggctccggctccgagccctacaagctcctccccggcgccgtcgccaccatcgtccgccccctcgaggccatcccccagcccaccatcaccaagcaggaggtcatctgaggactagttataagactgactagcccgatgggcctcccaacgggccctcctcccctccttgcaccgagattaataaaaaaaaaaaaaaaaaaaaaaaaaaaaaaaaaaaaaaaaaaaaaaaaaaaaaaaaaaaaaaaatgcatcccccccccccccccccccccccccccccccaaaggctcttttcagagccaccagaatt

SEQ ID NO: 1723 - RNA, 1642 nt, synthetic construct
  misc_feature 1..1642: note = mRNA i-3 (A64-N5-C30-hSL-N5) (opt2) from Homo sapiens__NP_000448.3__HNF4A(1-474)(S87A_K106R_K108R_K126R_K 127R_S138A_T139A_S142A_S143A_S148A_T166A_S167A_S313A_S378A_ T429A_T432A_S436A_K458R_S461E)
  source 1..1642: mol_type = other RNA
aggagaaagcttaccatgcgcctctccaagaccctcgtcgacatggacatggccgactactccgccgccctcgaccccgcctacaccaccctcgagttcgagaacgtccaggtcctcaccatgggcaacgacacctccccctccgagggcaccaacctcaacgcccccaactccctcggcgtctccgccctctgcgccatctgcggcgaccgcgccaccggcaagcactacggcgcctcctcctgcgacggctgcaagggcttcttccgccgcgccgtccgcaagaaccacatgtactcctgccgcttctcccgccagtgcgtcgtcgaccgcgaccgccgcaaccagtgccgctactgccgcctcaagaagtgcttccgcgccggcatgcgccgcgaggccgtccagaacgagcgcgaccgcatcgccgcccgccgcgccgcctacgaggactccgccctcccctccatcaacgccctcctccaggccgaggtcctctcccgccagatcgccgcccccgtctccggcatcaacggcgacatccgcgccaagaagatcgcctccatcgccgacgtctgcgagtccatgaaggagcagctcctcgtcctcgtcgagtgggccaagtacatccccgccttctgcgagctccccctcgacgaccaggtcgccctcctccgcgcccacgccggcgagcacctcctcctcggcgccaccaagcgctccatggtcttcaaggacgtcctcctcctcggcaacgactacatcgtcccccgccactgccccgagctcgccgagatgtcccgcgtctccatccgcatcctcgacgagctcgtcctccccttccaggagctccagatcgacgacaacgagtacgcctacctcaaggccatcatcttcttcgaccccgacgccaagggcctctccgaccccggcaagatcaagcgcctccgcgcccaggtccaggtctccctcgaggactacatcaacgaccgccagtacgactcccgcggccgcttcggcgagctcctcctcctcctccccaccctccagtccatcacctggcagatgatcgagcagatccagttcatcaagctcttcggcatggccaagatcgacaacctcctccaggagatgctcctcggcggcgccccctccgacgccccccacgcccaccaccccctccacccccacctcatgcaggagcacatgggcaccaacgtcatcgtcgccaacaccatgcccacccacctctccaacggccagatgtgcgagtggccccgcccccgcggccaggccgccgcccccgaggccccccagcccgccccccccggcggctccggctccgagccctacaagctcctccccggcgccgtcgccaccatcgtccgccccctcgaggccatcccccagcccaccatcaccaagcaggaggtcatctgaggactagttataagactgactagcccgatgggcctcccaacgggccctcctcccctccttgcaccgagattaataaaaaaaaaaaaaaaaaaaaaaaaaaaaaaaaaaaaaaaaaaaaaaaaaaaaaaaaaaaaaaaatgcatcccccccccccccccccccccccccccccccaaaggctcttttcagagccaccagaatt

SEQ ID NO: 1724 - RNA, 1642 nt, synthetic construct
  misc_feature 1..1642: note = mRNA i-3 (A64-N5-C30-hSL-N5) (opt2) from Homo sapiens__NP_000448.3__HNF4A(1-474)(S87A_S95A_S99A_K106R_K10 8R_K126R_K127R_S138A_T139A_S142A_S143A_S148A_T166A_S167A_S3 13A_S378A_T429A_T432A_S436A_K458R_S461E)
  source 1..1642: mol_type = other RNA
aggagaaagcttaccatgcgcctctccaagaccctcgtcgacatggacatggccgactactccgccgccctcgaccccgcctacaccaccctcgagttcgagaacgtccaggtcctcaccatgggcaacgacacctccccctccgagggcaccaacctcaacgcccccaactccctcggcgtctccgccctctgcgccatctgcggcgaccgcgccaccggcaagcactacggcgcctcctcctgcgacggctgcaagggcttcttccgccgcgccgtccgcaagaaccacatgtacgcctgccgcttcgcccgccagtgcgtcgtcgaccgcgaccgccgcaaccagtgccgctactgccgcctcaagaagtgcttccgcgccggcatgcgccgcgaggccgtccagaacgagcgcgaccgcatcgccgcccgccgcgccgcctacgaggactccgccctcccctccatcaacgccctcctccaggccgaggtcctctcccgccagatcgccgcccccgtctccggcatcaacggcgacatccgcgccaagaagatcgcctccatcgccgacgtctgcgagtccatgaaggagcagctcctcgtcctcgtcgagtgggccaagtacatccccgccttctgcgagctccccctcgacgaccaggtcgccctcctccgcgcccacgccggcgagcacctcctcctcggcgccaccaagcgctccatggtcttcaaggacgtcctcctcctcggcaacgactacatcgtcccccgccactgccccgagctcgccgagatgtcccgcgtctccatccgcatcctcgacgagctcgtcctccccttccaggagctccagatcgacgacaacgagtacgcctacctcaaggccatcatcttcttcgaccccgacgccaagggcctctccgaccccggcaagatcaagcgcctccgcgcccaggtccaggtctccctcgaggactacatcaacgaccgccagtacgactcccgcggccgcttcggcgagctcctcctcctcctccccaccctccagtccatcacctggcagatgatcgagcagatccagttcatcaagctcttcggcatggccaagatcgacaacctcctccaggagatgctcctcggcggcgccccctccgacgccccccacgcccaccaccccctccacccccacctcatgcaggagcacatgggcaccaacgtcatcgtcgccaacaccatgcccacccacctctccaacggccagatgtgcgagtggccccgcccccgcggccaggccgccgcccccgaggccccccagcccgccccccccggcggctccggctccgagccctacaagctcctccccggcgccgtcgccaccatcgtccgccccctcgaggccatcccccagcccaccatcaccaagcaggaggtcatctgaggactagttataagactgactagcccgatgggcctcccaacgggccctcctcccctccttgcaccgagattaataaaaaaaaaaaaaaaaaaaaaaaaaaaaaaaaaaaaaaaaaaaaaaaaaaaaaaaaaaaaaaaatgcatcccccccccccccccccccccccccccccccaaaggctcttttcagagccaccagaatt

SEQ ID NO: 1725 - RNA, 1642 nt, synthetic construct
  misc_feature 1..1642: note = mRNA i-3 (A64-N5-C30-hSL-N5) (opt3) from Homo sapiens__NP_000448.3__HNF4A(1-474)
  source 1..1642: mol_type = other RNA
aggagaaagcttaccatgagactgagcaagaccctcgtggacatggatatggccgactactccgctgcacttgatcccgcctatacaactctggagttcgaaaacgtccaggttttgacgatgggcaatgacacctctccttcagaggggacaaacttaaatgcgccaaacagtctgggagtgagcgctctatgcgccatctgtggtgatagggcaactggcaaacactacggggcctcctcttgcgacggatgtaagggctttttccggcgctcggtacgtaaaaatcatatgtattcatgccgatttagcagacaatgtgtggtcgataaggacaaaaggaaccagtgccggtactgtcgcctcaagaagtgcttcagagctggtatgaaaaaggaagcagtgcagaatgagagggatcggattagtacccgccgatcctcttatgaagacagctccctgccgtcaataaacgcccttctgcaggctgaggttttgagtagacaaatcacaagccccgtgtctgggattaatggagatatcagggccaaaaagattgcgtccatcgcagacgtctgtgagtcaatgaaagaacagctcctggtgctggtagagtgggccaagtacatacctgctttttgcgaactcccattagatgaccaggttgccctgcttcgggcacacgctggcgagcatttgctgctaggcgccaccaagcgtagcatggtgttcaaagacgtcctcctgcttgggaacgattatatcgtgccccgccactgtcctgagctggcggaaatgagtagagtgtctattaggatcttggacgagctcgtcctgccatttcaggaattacaaattgatgacaatgagtacgcctacctgaaggcaatcatattctttgatcccgacgctaaaggactctccgatcctggtaagattaaacggcttcgaagccaggttcaggtgtcgctggaagactatatcaacgatcgccagtacgactctagaggcaggttcggggagttgctactgctcctgccaactcttcaatccattacatggcagatgatcgagcagatccaatttattaagctgttcggaatggccaaaatagataatttgctccaggaaatgctgttaggcggttcaccgagtgacgctccccatgcccaccaccctctgcatccacacctaatgcaggagcatatggggaccaacgtaatcgtggcaaatacgatgcccactcacctcagcaacggacagatgtgcgaatggcctcggccacgcggccaagccgctacccccgagacaccgcagccttctcccccaggcgggtccggaagcgaaccttataagctgcttcccggtgcggtcgcaactattgtgaagccattgtcagccatcccccagcctaccataacaaaacaggaggttatttgaggactagttataagactgactagcccgatgggcctcccaacgggccctcctcccctccttgcaccgagattaataaaaaaaaaaaaaaaaaaaaaaaaaaaaaaaaaaaaaaaaaaaaaaaaaaaaaaaaaaaaaaaatgcatcccccccccccccccccccccccccccccccaaaggctcttttcagagccaccagaatt

SEQ ID NO: 1726 - RNA, 1642 nt, synthetic construct
  misc_feature 1..1642: note = mRNA i-3 (A64-N5-C30-hSL-N5) (opt3) from Homo sapiens__NP_000448.3__HNF4A(1-474)(S313A)
  source 1..1642: mol_type = other RNA
aggagaaagcttaccatgagactgagcaagaccctcgtggacatggatatggccgactactccgctgcacttgatcccgcctatacaactctggagttcgaaaacgtccaggttttgacgatgggcaatgacacctctccttcagaggggacaaacttaaatgcgccaaacagtctgggagtgagcgctctatgcgccatctgtggtgatagggcaactggcaaacactacggggcctcctcttgcgacggatgtaagggctttttccggcgctcggtacgtaaaaatcatatgtattcatgccgatttagcagacaatgtgtggtcgataaggacaaaaggaaccagtgccggtactgtcgcctcaagaagtgcttcagagctggtatgaaaaaggaagcagtgcagaatgagagggatcggattagtacccgccgatcctcttatgaagacagctccctgccgtcaataaacgcccttctgcaggctgaggttttgagtagacaaatcacaagccccgtgtctgggattaatggagatatcagggccaaaaagattgcgtccatcgcagacgtctgtgagtcaatgaaagaacagctcctggtgctggtagagtgggccaagtacatacctgctttttgcgaactcccattagatgaccaggttgccctgcttcgggcacacgctggcgagcatttgctgctaggcgccaccaagcgtagcatggtgttcaaagacgtcctcctgcttgggaacgattatatcgtgccccgccactgtcctgagctggcggaaatgagtagagtgtctattaggatcttggacgagctcgtcctgccatttcaggaattacaaattgatgacaatgagtacgcctacctgaaggcaatcatattctttgatcccgacgctaaaggactctccgatcctggtaagattaaacggcttcgagcccaggttcaggtgagcctggaagactatatcaacgatcgccagtacgactcgagaggcaggttcggggagttgctactgctcctgccaactcttcaatctattacatggcagatgatcgagcagatccaatttattaagctgttcggaatggctaaaatagataatttgctccaggaaatgctgttaggcggttccccgtcagacgcaccccatgcccaccaccctctgcatccacacctaatgcaggagcatatggggaccaacgtaatcgtggccaatacgatgcccactcacctcagtaacggacagatgtgcgaatggcctcggccacgcggccaagctgcgacccccgagacaccgcagcctagcccacccggcgggtccggatctgaaccttataagctgcttcccggtgcagtcgccactattgtgaagccattgagcgctatcccccagcctaccataacaaaacaggaggttatttgaggactagttataagactgactagcccgatgggcctcccaacgggccctcctcccctccttgcaccgagattaataaaaaaaaaaaaaaaaaaaaaaaaaaaaaaaaaaaaaaaaaaaaaaaaaaaaaaaaaaaaaaaatgcatcccccccccccccccccccccccccccccccaaaggctcttttcagagccaccagaatt

SEQ ID NO: 1727 - RNA, 1642 nt, synthetic construct
  misc_feature 1..1642: note = mRNA i-3 (A64-N5-C30-hSL-N5) (opt3) from Homo sapiens__NP_000448.3__HNF4A(1-474)(S313E)
  source 1..1642: mol_type = other RNA
aggagaaagcttaccatgagactgagcaagaccctcgtggacatggatatggccgactactccgctgcacttgatcccgcctatacaactctggagttcgaaaacgtccaggttttgacgatgggcaatgacacctctccttcagaggggacaaacttaaatgcgccaaacagtctgggagtgagcgctctatgcgccatctgtggtgatagggcaactggcaaacactacggggcctcctcttgcgacggatgtaagggctttttccggcgctcggtacgtaaaaatcatatgtattcatgccgatttagcagacaatgtgtggtcgataaggacaaaaggaaccagtgccggtactgtcgcctcaagaagtgcttcagagctggtatgaaaaaggaagcagtgcagaatgagagggatcggattagtacccgccgatcctcttatgaagacagctccctgccgtcaataaacgcccttctgcaggctgaggttttgagtagacaaatcacaagccccgtgtctgggattaatggagatatcagggccaaaaagattgcgtccatcgcagacgtctgtgagtcaatgaaagaacagctcctggtgctggtagagtgggccaagtacatacctgctttttgcgaactcccattagatgaccaggttgccctgcttcgggcacacgctggcgagcatttgctgctaggcgccaccaagcgtagcatggtgttcaaagacgtcctcctgcttgggaacgattatatcgtgccccgccactgtcctgagctggcggaaatgagtagagtgtctattaggatcttggacgagctcgtcctgccatttcaggaattacaaattgatgacaatgagtacgcctacctgaaggcaatcatattctttgatcccgacgctaaaggactctccgatcctggtaagattaaacggcttcgagaacaggttcaggtgagcctggaggactatatcaacgatcgccagtacgactcgagaggcaggttcggggagttgctactgctcctgccaactcttcaatctattacatggcagatgatcgaacagatccaatttattaagctgttcggaatggccaaaatagataatttgctccaggagatgctgttaggcggttccccgtcagacgctccccatgcccaccaccctctgcatccacacctaatgcaggaacatatggggaccaacgtaatcgtggcaaatacgatgcccactcacctcagtaacggacagatgtgcgagtggcctcggccacgcggccaagccgctacccccgaaacaccgcagcctagcccacccggcgggtccggatctgagccttataagctgcttcccggtgcggtcgcaactattgtgaagccattgagcgccatcccccagcctaccataacaaaacaggaggttatttgaggactagttataagactgactagcccgatgggcctcccaacgggccctcctcccctccttgcaccgagattaataaaaaaaaaaaaaaaaaaaaaaaaaaaaaaaaaaaaaaaaaaaaaaaaaaaaaaaaaaaaaaaatgcatcccccccccccccccccccccccccccccccaaaggctcttttcagagccaccagaatt

SEQ ID NO: 1728 - RNA, 1642 nt, synthetic construct
  misc_feature 1..1642: note = mRNA i-3 (A64-N5-C30-hSL-N5) (opt3) from Homo sapiens__NP_000448.3__HNF4A(1-474)(S142A_S143A)
  source 1..1642: mol_type = other RNA
aggagaaagcttaccatgagactgagcaagaccctcgtggacatggatatggccgactactccgctgcacttgatcccgcctatacaactctggagttcgaaaacgtccaggttttgacgatgggcaatgacacctctccttcagaggggacaaacttaaatgcgccaaacagtctgggagtgagcgctctatgcgccatctgtggtgatagggcaactggcaaacactacggggcctcctcttgcgacggatgtaagggctttttccggcgctcggtacgtaaaaatcatatgtattcatgccgatttagcagacaatgtgtggtcgataaggacaaaaggaaccagtgccggtactgtcgcctcaagaagtgcttcagagctggtatgaaaaaggaagcagtgcagaatgagagggatcggattagtacccgccgagccgcttatgaagactcctctctgccgagcataaacgcccttctgcaggcggaggttttgtccagacaaatcacatcacccgtgagtgggattaatggagatatcagggccaaaaagattgcaagcatcgctgacgtctgtgagtctatgaaagaacagctcctggtgctggtagagtgggccaagtacatacctgcattttgcgaactcccattagatgaccaggttgctctgcttcgggcccacgcgggcgagcatttgctgctaggcgccaccaagcgttccatggtgttcaaagacgtcctcctgcttgggaacgattatatcgtgccccgccactgtcctgagctggcagaaatgtcaagagtgagcattaggatcttggacgagctcgtcctgccatttcaggaattacaaattgatgacaatgagtacgcttacctgaaggccatcatattctttgatcccgacgctaaaggactcagtgatcctggtaagattaaacggcttcgatctcaggttcaggtgtccctggaagactatatcaacgatcgccagtacgacagcagaggcaggttcggggagttgctactgctcctgccaactcttcaatcgattacatggcagatgatcgagcagatccaatttattaagctgttcggaatggccaaaatagataatttgctccaggaaatgctgttaggcggttctccgtccgacgcaccccatgcccaccaccctctgcatccacacctaatgcaggagcatatggggaccaacgtaatcgtggctaatacgatgcccactcacctctcaaacggacagatgtgcgaatggcctcggccacgcggccaagcggcaacccccgagacaccgcagcctagtcccccaggcgggagcggatccgaaccttataagctgcttcccggtgccgtcgctactattgtgaagccattgtctgccatcccccagcctaccataacaaaacaggaggttatttgaggactagttataagactgactagcccgatgggcctcccaacgggccctcctcccctccttgcaccgagattaataaaaaaaaaaaaaaaaaaaaaaaaaaaaaaaaaaaaaaaaaaaaaaaaaaaaaaaaaaaaaaaatgcatcccccccccccccccccccccccccccccccaaaggctcttttcagagccaccagaatt

SEQ ID NO: 1729 - RNA, 1642 nt, synthetic construct
  misc_feature 1..1642: note = mRNA i-3 (A64-N5-C30-hSL-N5) (opt3) from Homo sapiens__NP_000448.3__HNF4A(1-474)(S142E_S143E)
  source 1..1642: mol_type = other RNA
aggagaaagcttaccatgagactgagcaagaccctcgtggacatggatatggccgactactccgctgcacttgatcccgcctatacaactctggagttcgaaaacgtccaggttttgacgatgggcaatgacacctctccttcagaggggacaaacttaaatgcgccaaacagtctgggagtgagcgctctatgcgccatctgtggtgatagggcaactggcaaacactacggggcctcctcttgcgacggatgtaagggctttttccggcgctcggtacgtaaaaatcatatgtattcatgccgatttagcagacaatgtgtggtcgataaggacaaaaggaaccagtgccggtactgtcgcctcaagaagtgcttcagagctggtatgaaaaaggaagcagtgcagaatgagagggatcggattagtacccgccgagaagagtatgaggactcctctctgccgagcataaacgcccttctgcaggctgaagttttgtccagacaaatcacatcacccgtgagtgggattaatggagatatcagggccaaaaagattgcgagcatcgcagacgtctgtgagtctatgaaagaacagctcctggtgctggtagagtgggccaagtacatacctgctttttgcgagctcccattagatgaccaggttgccctgcttcgggcacacgctggcgaacatttgctgctaggcgccaccaagcgttccatggtgttcaaagacgtcctcctgcttgggaacgattatatcgtgccccgccactgtcctgagctggcggaaatgtcaagagtgagcattaggatcttggacgagctcgtcctgccatttcaggaattacaaattgatgacaatgagtacgcctacctgaaggcaatcatattctttgatcccgacgctaaaggactcagtgatcctggtaagattaaacggcttcgatctcaggttcaggtgtccctggaggactatatcaacgatcgccagtacgacagcagaggcaggttcggggaattgctactgctcctgccaactcttcaatcgattacatggcagatgatcgagcagatccaatttattaagctgttcggaatggccaaaatagataatttgctccaggaaatgctgttaggcggttctccgtccgacgctccccatgcccaccaccctctgcatccacacctaatgcaggagcatatggggaccaacgtaatcgtggcaaatacgatgcccactcacctctcaaacggacagatgtgcgaatggcctcggccacgcggccaagccgctacccccgagacaccgcagcctagtcccccaggcgggagcggatccgagccttataagctgcttcccggtgcggtcgcaactattgtgaagccattgtctgccatcccccagcctaccataacaaaacaggaagttatttgaggactagttataagactgactagcccgatgggcctcccaacgggccctcctcccctccttgcaccgagattaataaaaaaaaaaaaaaaaaaaaaaaaaaaaaaaaaaaaaaaaaaaaaaaaaaaaaaaaaaaaaaaatgcatcccccccccccccccccccccccccccccccaaaggctcttttcagagccaccagaatt

SEQ ID NO: 1730 - RNA, 1642 nt, synthetic construct
  misc_feature 1..1642: note = mRNA i-3 (A64-N5-C30-hSL-N5) (opt3) from Homo sapiens__NP_000448.3__HNF4A(1-474)(S143A)
  source 1..1642: mol_type = other RNA
aggagaaagcttaccatgagactgagcaagaccctcgtggacatggatatggccgactactccgctgcacttgatcccgcctatacaactctggagttcgaaaacgtccaggttttgacgatgggcaatgacacctctccttcagaggggacaaacttaaatgcgccaaacagtctgggagtgagcgctctatgcgccatctgtggtgatagggcaactggcaaacactacggggcctcctcttgcgacggatgtaagggctttttccggcgctcggtacgtaaaaatcatatgtattcatgccgatttagcagacaatgtgtggtcgataaggacaaaaggaaccagtgccggtactgtcgcctcaagaagtgcttcagagctggtatgaaaaaggaagcagtgcagaatgagagggatcggattagtacccgccgatccgcctatgaagactctagcctgccgtccataaacgcccttctgcaggccgaggttttgtcaagacaaatcacaagtcccgtgagcgggattaatggagatatcagggcgaaaaagattgcatctatcgccgacgtctgtgagtccatgaaagaacagctcctggtgctggtagagtgggctaagtacatacctgccttttgcgaactcccattagatgaccaggttgcactgcttcgggctcacgccggcgagcatttgctgctaggcgcgaccaagcgttcaatggtgttcaaagacgtcctcctgcttgggaacgattatatcgtgccccgccactgtcctgagctggccgaaatgagcagagtgagtattaggatcttggacgagctcgtcctgccatttcaggaattacaaattgatgacaatgagtacgcatacctgaaggctatcatattctttgatcccgacgccaaaggactctctgatcctggtaagattaaacggcttcgatcccaggttcaggtgagcctggaagactatatcaacgatcgccagtacgactcgagaggcaggttcggggagttgctactgctcctgccaactcttcaatctattacatggcagatgatcgagcagatccaatttattaagctgttcggaatggctaaaatagataatttgctccaggaaatgctgttaggcggttccccgtcagacgctccccatgcacaccaccctctgcatccacacctaatgcaggagcatatggggaccaacgtaatcgtggccaatacgatgcccactcacctcagtaacggacagatgtgcgaatggcctcggccacgcggccaagctgcgacccccgagacaccgcagcctagcccacccggcgggtccggatctgaaccttataagctgcttcccggtgcagtcgccactattgtgaagccattgagcgctatcccccagcctaccataacaaaacaggaggttatttgaggactagttataagactgactagcccgatgggcctcccaacgggccctcctcccctccttgcaccgagattaataaaaaaaaaaaaaaaaaaaaaaaaaaaaaaaaaaaaaaaaaaaaaaaaaaaaaaaaaaaaaaaatgcatcccccccccccccccccccccccccccccccaaaggctcttttcagagccaccagaatt

SEQ ID NO: 1731 - RNA, 1642 nt, synthetic construct
  misc_feature 1..1642: note = mRNA i-3 (A64-N5-C30-hSL-N5) (opt3) from Homo sapiens__NP_000448.3__HNF4A(1-474)(T166A)
  source 1..1642: mol_type = other RNA
aggagaaagcttaccatgagactgagcaagaccctcgtggacatggatatggccgactactccgctgcacttgatcccgcctatacaactctggagttcgaaaacgtccaggttttgacgatgggcaatgacacctctccttcagaggggacaaacttaaatgcgccaaacagtctgggagtgagcgctctatgcgccatctgtggtgatagggcaactggcaaacactacggggcctcctcttgcgacggatgtaagggctttttccggcgctcggtacgtaaaaatcatatgtattcatgccgatttagcagacaatgtgtggtcgataaggacaaaaggaaccagtgccggtactgtcgcctcaagaagtgcttcagagctggtatgaaaaaggaagcagtgcagaatgagagggatcggattagtacccgccgatcctcttatgaagacagctccctgccgtcaataaacgcccttctgcaggctgaggttttgagtagacaaatcgccagccccgtgtctgggattaatggagatatcagggcgaaaaagattgcatccatcgccgacgtctgtgagtcaatgaaagaacagctcctggtgctggtagagtgggctaagtacatacctgccttttgcgaactcccattagatgaccaggttgcactgcttcgggctcacgccggcgagcatttgctgctaggcgcgacaaagcgtagcatggtgttcaaagacgtcctcctgcttgggaacgattatatcgtgccccgccactgtcctgagctggccgaaatgagtagagtgtctattaggatcttggacgagctcgtcctgccatttcaggaattacaaattgatgacaatgagtacgcatacctgaaggctatcatattctttgatcccgacgccaaaggactctccgatcctggtaagattaaacggcttcgaagccaggttcaggtgtcgctggaagactatatcaacgatcgccagtacgactctagaggcaggttcggggagttgctactgctcctgccaacccttcaatccattacttggcagatgatcgagcagatccaatttattaagctgttcggaatggctaaaatagataatttgctccaggaaatgctgttaggcggttcaccgagtgacgcaccccatgcccaccaccctctgcatccacacctaatgcaggagcatatggggacaaacgtaatcgtggccaataccatgcccacgcacctcagcaacggacagatgtgcgaatggcctcggccacgcggccaagctgcgactcccgagaccccgcagccttctcccccaggcgggtccggaagcgaaccttataagctgcttcccggtgcagtcgccacaattgtgaagccattgtcagctatcccccagcctactataaccaaacaggaggttatttgaggactagttataagactgactagcccgatgggcctcccaacgggccctcctcccctccttgcaccgagattaataaaaaaaaaaaaaaaaaaaaaaaaaaaaaaaaaaaaaaaaaaaaaaaaaaaaaaaaaaaaaaaatgcatcccccccccccccccccccccccccccccccaaaggctcttttcagagccaccagaatt

SEQ ID NO: 1732 - RNA, 1642 nt, synthetic construct
  misc_feature 1..1642: note = mRNA i-3 (A64-N5-C30-hSL-N5) (opt3) from Homo sapiens__NP_000448.3__HNF4A(1-474)(S167E)
  source 1..1642: mol_type = other RNA
aggagaaagcttaccatgagactgagcaagaccctcgtggacatggatatggccgactactccgctgcacttgatcccgcctatacaactctggagttcgaaaacgtccaggttttgacgatgggcaatgacacctctccttcagaggggacaaacttaaatgcgccaaacagtctgggagtgagcgctctatgcgccatctgtggtgatagggcaactggcaaacactacggggcctcctcttgcgacggatgtaagggctttttccggcgctcggtacgtaaaaatcatatgtattcatgccgatttagcagacaatgtgtggtcgataaggacaaaaggaaccagtgccggtactgtcgcctcaagaagtgcttcagagctggtatgaaaaaggaagcagtgcagaatgagagggatcggattagtacccgccgatcctcttatgaagacagctccctgccgtcaataaacgcccttctgcaggctgaggttttgagtagacaaatcacagagcccgtgagcgggattaatggagatatcagggccaaaaagattgcgtctatcgcagacgtctgtgaatccatgaaagagcagctcctggtgctggtagaatgggccaagtacatacctgctttttgcgagctcccattagatgaccaggttgccctgcttcgggcacacgctggcgagcatttgctgctaggcgccaccaagcgttcaatggtgttcaaagacgtcctcctgcttgggaacgattatatcgtgccccgccactgtcctgaactggcggagatgagcagagtgagtattaggatcttggacgaactcgtcctgccatttcaggagttacaaattgatgacaatgaatacgcctacctgaaggcaatcatattctttgatcccgacgctaaaggactctctgatcctggtaagattaaacggcttcgatcccaggttcaggtgagcctggaggactatatcaacgatcgccagtacgactcgagaggcaggttcggggagttgctactgctcctgccaactcttcaatctattacatggcagatgatcgaacagatccaatttattaagctgttcggaatggccaaaatagataatttgctccaggagatgctgttaggcggttccccgtcagacgctccccatgcccaccaccctctgcatccacacctaatgcaggaacatatggggaccaacgtaatcgtggcaaatacgatgcccactcacctcagtaacggacagatgtgcgagtggcctcggccacgcggccaagccgctacccccgaaacaccgcagcctagcccacccggcgggtccggatctgagccttataagctgcttcccggtgcggtcgcaactattgtgaagccattgagcgccatcccccagcctaccataacaaaacaggaggttatttgaggactagttataagactgactagcccgatgggcctcccaacgggccctcctcccctccttgcaccgagattaataaaaaaaaaaaaaaaaaaaaaaaaaaaaaaaaaaaaaaaaaaaaaaaaaaaaaaaaaaaaaaaatgcatcccccccccccccccccccccccccccccccaaaggctcttttcagagccaccagaatt

SEQ ID NO: 1733 - RNA, 1642 nt, synthetic construct
  misc_feature 1..1642: note = mRNA i-3 (A64-N5-C30-hSL-N5) (opt3) from Homo sapiens__NP_000448.3__HNF4A(1-474)(S167A)
  source 1..1642: mol_type = other RNA
aggagaaagcttaccatgagactgagcaagaccctcgtggacatggatatggccgactactccgctgcacttgatcccgcctatacaactctggagttcgaaaacgtccaggttttgacgatgggcaatgacacctctccttcagaggggacaaacttaaatgcgccaaacagtctgggagtgagcgctctatgcgccatctgtggtgatagggcaactggcaaacactacggggcctcctcttgcgacggatgtaagggctttttccggcgctcggtacgtaaaaatcatatgtattcatgccgatttagcagacaatgtgtggtcgataaggacaaaaggaaccagtgccggtactgtcgcctcaagaagtgcttcagagctggtatgaaaaaggaagcagtgcagaatgagagggatcggattagtacccgccgatcctcttatgaagacagctccctgccgtcaataaacgcccttctgcaggctgaggttttgagtagacaaatcacagcccccgtgagcgggattaatggagatatcagggcgaaaaagattgcatctatcgccgacgtctgtgagtccatgaaagaacagctcctggtgctggtagagtgggctaagtacatacctgccttttgcgaactcccattagatgaccaggttgcactgcttcgggctcacgccggcgagcatttgctgctaggcgcgaccaagcgttcaatggtgttcaaagacgtcctcctgcttgggaacgattatatcgtgccccgccactgtcctgagctggccgaaatgagcagagtgagtattaggatcttggacgagctcgtcctgccatttcaggaattacaaattgatgacaatgagtacgcatacctgaaggctatcatattctttgatcccgacgccaaaggactctctgatcctggtaagattaaacggcttcgatcccaggttcaggtgagcctggaagactatatcaacgatcgccagtacgactcgagaggcaggttcggggagttgctactgctcctgccaactcttcaatctattacatggcagatgatcgagcagatccaatttattaagctgttcggaatggctaaaatagataatttgctccaggaaatgctgttaggcggttccccgtcagacgcaccccatgcccaccaccctctgcatccacacctaatgcaggagcatatggggaccaacgtaatcgtggccaatacgatgcccactcacctcagtaacggacagatgtgcgaatggcctcggccacgcggccaagctgcgacccccgagacaccgcagcctagcccacccggcgggtccggatctgaaccttataagctgcttcccggtgcagtcgccactattgtgaagccattgagcgctatcccccagcctaccataacaaaacaggaggttatttgaggactagttataagactgactagcccgatgggcctcccaacgggccctcctcccctccttgcaccgagattaataaaaaaaaaaaaaaaaaaaaaaaaaaaaaaaaaaaaaaaaaaaaaaaaaaaaaaaaaaaaaaaatgcatcccccccccccccccccccccccccccccccaaaggctcttttcagagccaccagaatt

SEQ ID NO: 1734 - RNA, 1642 nt, synthetic construct
  misc_feature 1..1642: note = mRNA i-3 (A64-N5-C30-hSL-N5) (opt3) from Homo sapiens__NP_000448.3__HNF4A(1-474)(S167A_S378A_T429A_T432A_ S436A)
  source 1..1642: mol_type = other RNA
aggagaaagcttaccatgagactgagcaagaccctcgtggacatggatatggccgactactccgctgcacttgatcccgcctatacaactctggagttcgaaaacgtccaggttttgacgatgggcaatgacacctctccttcagaggggacaaacttaaatgcgccaaacagtctgggagtgagcgctctatgcgccatctgtggtgatagggcaactggcaaacactacggggcctcctcttgcgacggatgtaagggctttttccggcgctcggtacgtaaaaatcatatgtattcatgccgatttagcagacaatgtgtggtcgataaggacaaaaggaaccagtgccggtactgtcgcctcaagaagtgcttcagagctggtatgaaaaaggaagcagtgcagaatgagagggatcggattagtacccgccgatcctcttatgaagacagctccctgccgtcaataaacgcccttctgcaggctgaggttttgagtagacaaatcacagcccccgtgagcgggattaatggagatatcagggcgaaaaagattgcatctatcgccgacgtctgtgagtccatgaaagaacagctcctggtgctggtagagtgggctaagtacatacctgccttttgcgaactcccattagatgaccaggttgcactgcttcgggctcacgccggcgagcatttgctgctaggcgcgaccaagcgttcaatggtgttcaaagacgtcctcctgcttgggaacgattatatcgtgccccgccactgtcctgagctggccgaaatgagcagagtgagtattaggatcttggacgagctcgtcctgccatttcaggaattacaaattgatgacaatgagtacgcatacctgaaggctatcatattctttgatcccgacgccaaaggactctctgatcctggtaagattaaacggcttcgatcccaggttcaggtgagcctggaagactatatcaacgatcgccagtacgactcgagaggcaggttcggggagttgctactgctcctgccaactcttcaatctattacatggcagatgatcgagcagatccaatttattaagctgttcggaatggctaaaatagataatttgctccaggaaatgctgttaggcggtgccccgtccgacgcaccccatgcccaccaccctctgcatccacacctaatgcaggagcatatggggaccaacgtaatcgtggctaatacgatgcccactcacctctcaaacggacagatgtgcgaatggcctcggccacgcggccaagcggcagcccccgaggctccgcagcctgcacccccaggcgggagtggaagcgaaccttataagctgcttcccggtgccgtcgccaccattgtgaagccattgtccgctatcccccagcctacaataactaaacaggaggttatttgaggactagttataagactgactagcccgatgggcctcccaacgggccctcctcccctccttgcaccgagattaataaaaaaaaaaaaaaaaaaaaaaaaaaaaaaaaaaaaaaaaaaaaaaaaaaaaaaaaaaaaaaaatgcatcccccccccccccccccccccccccccccccaaaggctcttttcagagccaccagaatt

SEQ ID NO: 1735 - RNA, 1642 nt, synthetic construct
  misc_feature 1..1642: note = mRNA i-3 (A64-N5-C30-hSL-N5) (opt3) from Homo sapiens__NP_000448.3__HNF4A(1-474)(S167E_S378E_T429E_T432E_ S436E)
  source 1..1642: mol_type = other RNA
aggagaaagcttaccatgagactgagcaagaccctcgtggacatggatatggccgactactccgctgcacttgatcccgcctatacaactctggagttcgaaaacgtccaggttttgacgatgggcaatgacacctctccttcagaggggacaaacttaaatgcgccaaacagtctgggagtgagcgctctatgcgccatctgtggtgatagggcaactggcaaacactacggggcctcctcttgcgacggatgtaagggctttttccggcgctcggtacgtaaaaatcatatgtattcatgccgatttagcagacaatgtgtggtcgataaggacaaaaggaaccagtgccggtactgtcgcctcaagaagtgcttcagagctggtatgaaaaaggaagcagtgcagaatgagagggatcggattagtacccgccgatcctcttatgaagacagctccctgccgtcaataaacgcccttctgcaggctgaggttttgagtagacaaatcacagagcccgtgagcgggattaatggagatatcagggccaaaaagattgcgtctatcgcagacgtctgtgaatccatgaaagagcagctcctggtgctggtagaatgggccaagtacatacctgctttttgcgagctcccattagatgaccaggttgccctgcttcgggcacacgctggcgagcatttgctgctaggcgccaccaagcgttcaatggtgttcaaagacgtcctcctgcttgggaacgattatatcgtgccccgccactgtcctgaactggcggagatgagcagagtgagtattaggatcttggacgaactcgtcctgccatttcaggagttacaaattgatgacaatgaatacgcctacctgaaggcaatcatattctttgatcccgacgctaaaggactctctgatcctggtaagattaaacggcttcgatcccaggttcaggtgagcctggaggactatatcaacgatcgccagtacgactcgagaggcaggttcggggagttgctactgctcctgccaactcttcaatctattacatggcagatgatcgaacagatccaatttattaagctgttcggaatggccaaaatagataatttgctccaggagatgctgttaggcggtgaaccgtccgacgctccccatgcccaccaccctctgcatccacacctaatgcaggagcatatggggaccaacgtaatcgtggcaaatacgatgcccactcacctctcaaacggacagatgtgcgaatggcctcggccacgcggccaagccgctgagcccgaggaaccgcagcctgagcccccaggcgggagtggaagcgaaccttataagctgcttcccggtgcggtcgcaaccattgtgaagccattgtccgccatcccccagcctacaataactaaacaggaggttatttgaggactagttataagactgactagcccgatgggcctcccaacgggccctcctcccctccttgcaccgagattaataaaaaaaaaaaaaaaaaaaaaaaaaaaaaaaaaaaaaaaaaaaaaaaaaaaaaaaaaaaaaaaatgcatcccccccccccccccccccccccccccccccaaaggctcttttcagagccaccagaatt

SEQ ID NO: 1736 - RNA, 1642 nt, synthetic construct
  misc_feature 1..1642: note = mRNA i-3 (A64-N5-C30-hSL-N5) (opt3) from Homo sapiens__NP_000448.3__HNF4A(1-474)(S87A)
  source 1..1642: mol_type = other RNA
aggagaaagcttaccatgagactgagcaagaccctcgtggacatggatatggccgactactccgctgcacttgatcccgcctatacaactctggagttcgaaaacgtccaggttttgacgatgggcaatgacacctctccttcagaggggacaaacttaaatgcgccaaacagtctgggagtgagcgctctatgcgccatctgtggtgatagggcaactggcaaacactacggggcctcctcttgcgacggatgtaagggctttttccggcgcgctgtacgtaaaaatcatatgtattcgtgccgattttcaagacaatgtgtggtcgataaggacaaaaggaaccagtgccggtactgtcgcctcaagaagtgcttcagagcaggtatgaaaaaggaagccgtgcagaatgagagggatcggattagcacccgccgaagttcctatgaagactctagcctgccgtccataaacgcccttctgcaggccgaggttttgtcaagacaaatcacaagtcccgtgagcgggattaatggagatatcagggcgaaaaagattgcatctatcgccgacgtctgtgagtccatgaaagaacagctcctggtgctggtagagtgggctaagtacatacctgccttttgcgaactcccattagatgaccaggttgcactgcttcgggctcacgccggcgagcatttgctgctaggcgcgaccaagcgttcaatggtgttcaaagacgtcctcctgcttgggaacgattatatcgtgccccgccactgtcctgagctggccgaaatgagcagagtgagtattaggatcttggacgagctcgtcctgccatttcaggaattacaaattgatgacaatgagtacgcatacctgaaggctatcatattctttgatcccgacgccaaaggactctctgatcctggtaagattaaacggcttcgatcccaggttcaggtgagcctggaagactatatcaacgatcgccagtacgactcgagaggcaggttcggggagttgctactgctcctgccaactcttcaatctattacatggcagatgatcgagcagatccaatttattaagctgttcggaatggctaaaatagataatttgctccaggaaatgctgttaggcggttccccgtcagacgctccccatgcacaccaccctctgcatccacacctaatgcaggagcatatggggaccaacgtaatcgtggccaatacgatgcccactcacctcagtaacggacagatgtgcgaatggcctcggccacgcggccaagctgcgacccccgagacaccgcagcctagcccacccggcgggtccggatctgaaccttataagctgcttcccggtgcagtcgccactattgtgaagccattgagcgctatcccccagcctaccataacaaaacaggaggttatttgaggactagttataagactgactagcccgatgggcctcccaacgggccctcctcccctccttgcaccgagattaataaaaaaaaaaaaaaaaaaaaaaaaaaaaaaaaaaaaaaaaaaaaaaaaaaaaaaaaaaaaaaaatgcatcccccccccccccccccccccccccccccccaaaggctcttttcagagccaccagaatt

SEQ ID NO: 1737 - RNA, 1642 nt, synthetic construct
  misc_feature 1..1642: note = mRNA i-3 (A64-N5-C30-hSL-N5) (opt3) from Homo sapiens__NP_000448.3__HNF4A(1-474)(S87E)
  source 1..1642: mol_type = other RNA
aggagaaagcttaccatgagactgagcaagaccctcgtggacatggatatggccgactactccgctgcacttgatcccgcctatacaactctggagttcgaaaacgtccaggttttgacgatgggcaatgacacctctccttcagaggggacaaacttaaatgcgccaaacagtctgggagtgagcgctctatgcgccatctgtggtgatagggcaactggcaaacactacggggcctcctcttgcgacggatgtaagggctttttccggcgcgaagtacgtaaaaatcatatgtattcgtgccgattttcaagacaatgtgtggtcgataaggacaaaaggaaccagtgccggtactgtcgcctcaagaagtgcttcagagctggtatgaaaaaggaggcagtgcagaatgaaagggatcggattagcacccgccgaagttcctatgaggactctagcctgccgtccataaacgcccttctgcaggctgaggttttgtcaagacaaatcacaagtcccgtgagcgggattaatggagatatcagggccaaaaagattgcgtctatcgcagacgtctgtgaatccatgaaagagcagctcctggtgctggtagaatgggccaagtacatacctgctttttgcgagctcccattagatgaccaggttgccctgcttcgggcacacgctggcgagcatttgctgctaggcgccaccaagcgttcaatggtgttcaaagacgtcctcctgcttgggaacgattatatcgtgccccgccactgtcctgaactggcggagatgagcagagtgagtattaggatcttggacgaactcgtcctgccatttcaggagttacaaattgatgacaatgaatacgcctacctgaaggcaatcatattctttgatcccgacgctaaaggactctctgatcctggtaagattaaacggcttcgatcccaggttcaggtgagcctggaggactatatcaacgatcgccagtacgactcgagaggcaggttcggggagttgctactgctcctgccaactcttcaatctattacatggcagatgatcgaacagatccaatttattaagctgttcggaatggccaaaatagataatttgctccaggagatgctgttaggcggttccccgtcagacgctccccatgcccaccaccctctgcatccacacctaatgcaggaacatatggggaccaacgtaatcgtggcaaatacgatgcccactcacctcagtaacggacagatgtgcgagtggcctcggccacgcggccaagccgctacccccgaaacaccgcagcctagcccacccggcgggtccggatctgagccttataagctgcttcccggtgcggtcgcaactattgtgaagccattgagcgccatcccccagcctaccataacaaaacaggaggttatttgaggactagttataagactgactagcccgatgggcctcccaacgggccctcctcccctccttgcaccgagattaataaaaaaaaaaaaaaaaaaaaaaaaaaaaaaaaaaaaaaaaaaaaaaaaaaaaaaaaaaaaaaaatgcatcccccccccccccccccccccccccccccccaaaggctcttttcagagccaccagaatt

SEQ ID NO: 1738 - RNA, 1642 nt, synthetic construct
  misc_feature 1..1642: note = mRNA i-3 (A64-N5-C30-hSL-N5) (opt3) from Homo sapiens__NP_000448.3__HNF4A(1-474)(R2V)
  source 1..1642: mol_type = other RNA
aggagaaagcttaccatggtgctgagcaagaccctcgtcgacatggatatggccgactactccgctgcacttgatcccgcctatacaactctggagttcgaaaacgttcaggtgttgacgatgggcaatgacacctctccttcagaggggacaaacttaaatgcgccaaacagtctgggagtaagcgctctatgcgccatctgtggtgatagagcaactggcaaacactacggggcctcctcttgcgacggatgtaagggctttttcaggcggtcggtgcgcaaaaatcatatgtattcatgccgatttagccgtcaatgtgtcgtggataaggacaaaagaaaccagtgcaggtactgtcggctcaagaagtgcttccgcgctggtatgaaaaaggaagcagttcagaatgagagagataggattagtacccggcgctcctcttatgaagacagctccctgccgtcaataaacgcccttctgcaggctgaggtgttgagtcgacaaatcacaagccccgtctctgggattaatggagatatcagagccaaaaagattgcgtccatcgcagacgtgtgtgagtcaatgaaagaacagctcctggtactggttgagtgggccaagtacatacctgctttttgcgaactcccattagatgaccaggtggccctgcttagggcacacgctggcgagcatttgctgctaggcgccaccaagcggagcatggtcttcaaagacgtgctcctgcttgggaacgattatatcgtgccccgtcactgtcctgagctggcggaaatgagtcgcgtctctattagaatcttggacgagctcgttctgccatttcaggaattacaaattgatgacaatgagtacgcctacctgaaggcaatcatattctttgatcccgacgctaaaggactctccgatcctggtaagattaaaaggcttcggagccaggtgcaggtatcgctggaagactatatcaacgatcgacagtacgactctcgcggcagattcggggagttgctactgctcctgccaactcttcaatccattacatggcagatgatcgagcagatccaatttattaagctgttcggaatggccaaaatagataatttgctccaggaaatgctgttaggcggttcaccgagtgacgctccccatgcccaccaccctctgcatccacacctaatgcaggagcatatggggaccaacgtgatcgtcgcaaatacgatgcccactcacctcagcaacggacagatgtgcgaatggcctaggccacggggccaagccgctacccccgagacaccgcagccttctcccccaggcgggtccggaagcgaaccttataagctgcttcccggtgcggtggcaactattgttaagccattgtcagccatcccccagcctaccataacaaaacaggaggtgatttgaggactagttataagactgactagcccgatgggcctcccaacgggccctcctcccctccttgcaccgagattaataaaaaaaaaaaaaaaaaaaaaaaaaaaaaaaaaaaaaaaaaaaaaaaaaaaaaaaaaaaaaaaatgcatcccccccccccccccccccccccccccccccaaaggctcttttcagagccaccagaatt

SEQ ID NO: 1739 - RNA, 1642 nt, synthetic construct
  misc_feature 1..1642: note = mRNA i-3 (A64-N5-C30-hSL-N5) (opt3) from Homo sapiens__NP_000448.3__HNF4A(1-474)(R2V_K5V)
  source 1..1642: mol_type = other RNA
aggagaaagcttaccatggtgctgagcgtcaccctcgttgacatggatatggccgactactccgctgcacttgatcccgcctatacaactctggagttcgaaaacgtgcaggtattgacgatgggcaatgacacctctccttcagaggggacaaacttaaatgcgccaaacagtctgggagtgagcgctctatgcgccatctgtggtgatagagcaactggcaagcactacggggcctcctcttgcgacggatgtaaaggctttttcaggcggtcggtccgcaagaatcatatgtattcatgccgatttagccgtcaatgtgtggttgataaagacaagagaaaccagtgcaggtactgtcggctcaaaaagtgcttccgcgctggtatgaagaaagaagcagtgcagaatgagagagataggattagtacccggcgctcctcttatgaagacagctccctgccgtcaataaacgcccttctgcaggctgaggtcttgagtcgacaaatcacaagccccgtgtctgggattaatggagatatcagagccaagaaaattgcgtccatcgcagacgtatgtgagtcaatgaaggaacagctcctggttctggtggagtgggccaaatacatacctgctttttgcgaactcccattagatgaccaggtcgccctgcttagggcacacgctggcgagcatttgctgctaggcgccaccaagcggagcatggtgttcaaggacgtgctcctgcttgggaacgattatatcgtcccccgtcactgtcctgagctggcggaaatgagtcgcgtttctattagaatcttggacgagctcgtgctgccatttcaggaattacaaattgatgacaatgagtacgcctacctgaaagcaatcatattctttgatcccgacgctaagggactctccgatcctggtaaaattaagaggcttcggagccaggtacaggtgtcgctggaagactatatcaacgatcgacagtacgactctcgcggcagattcggggagttgctactgctcctgccaactcttcaatccattacatggcagatgatcgagcagatccaatttattaaactgttcggaatggccaagatagataatttgctccaggaaatgctgttaggcggttcaccgagtgacgctccccatgcccaccaccctctgcatccacacctaatgcaggagcatatggggaccaacgtcatcgtggcaaatacgatgcccactcacctcagcaacggacagatgtgcgaatggcctaggccacggggccaagccgctacccccgagacaccgcagccttctcccccaggcgggtccggaagcgaaccttataaactgcttcccggtgcggttgcaactattgtgaagccattgtcagccatcccccagcctaccataacaaagcaggaggtcatttgaggactagttataagactgactagcccgatgggcctcccaacgggccctcctcccctccttgcaccgagattaataaaaaaaaaaaaaaaaaaaaaaaaaaaaaaaaaaaaaaaaaaaaaaaaaaaaaaaaaaaaaaaatgcatcccccccccccccccccccccccccccccccaaaggctcttttcagagccaccagaatt

SEQ ID NO: 1740 - RNA, 1642 nt, synthetic construct
  misc_feature 1..1642: note = mRNA i-3 (A64-N5-C30-hSL-N5) (opt3) from Homo sapiens__NP_000448.3__HNF4A(1-474)(K179R_K180R)
  source 1..1642: mol_type = other RNA
aggagaaagcttaccatgagactgagcaagaccctcgtggacatggatatggccgactactccgctgcacttgatcccgcctatacaactctggagttcgaaaacgtccaggttttgacgatgggcaatgacacctctccttcagaggggacaaacttaaatgcgccaaacagtctgggagtgagcgctctatgcgccatctgtggtgatagggcaactggcaaacactacggggcctcctcttgcgacggatgtaagggctttttccggcgctcggtacgtaaaaatcatatgtattcatgccgatttagcagacaatgtgtggtcgataaggacaaaaggaaccagtgccggtactgtcgcctcaagaagtgcttcagagctggtatgaaaaaggaagcagtgcagaatgagagggatcggattagtacccgccgatcctcttatgaagacagctccctgccgtcaataaacgcccttctgcaggctgaggttttgagtagacaaatcacaagccccgtgtctgggattaatggagatatcagggcccggcgtattgcgtccatcgcagacgtctgtgagtcaatgaaagaacagctcctggtgctggtagagtgggccaagtacatacctgctttttgcgaactcccattagatgaccaggttgccctgcttcgcgcacacgctggcgagcatttgctgctaggcgccaccaaaagaagcatggtgttcaaggacgtcctcctgcttgggaacgattatatcgtgcccaggcactgtcctgagctggcggaaatgagtcgggtgtctattcgaatcttggacgagctcgtcctgccatttcaggaattacaaattgatgacaatgagtacgcctacctgaaggcaatcatattctttgatcccgacgctaaaggactctccgatcctggtaagattaaacgccttagaagccaggttcaggtgtcgctggaagactatatcaacgataggcagtacgactctcggggccgcttcggggagttgctactgctcctgccaactcttcaatccattacatggcagatgatcgagcagatccaatttattaagctgttcggaatggccaaaatagataatttgctccaggaaatgctgttaggcggttcaccgagtgacgctccccatgcccaccaccctctgcatccacacctaatgcaggagcatatggggaccaacgtaatcgtggcaaatacgatgcccactcacctcagcaacggacagatgtgcgaatggcctagaccaaggggccaagccgctacccccgagacaccgcagccttctcccccaggcgggtccggaagcgaaccttataagctgcttcccggtgcggtcgcaactattgtgaaaccattgtcagccatcccccagcctaccataacaaagcaggaggttatttgaggactagttataagactgactagcccgatgggcctcccaacgggccctcctcccctccttgcaccgagattaataaaaaaaaaaaaaaaaaaaaaaaaaaaaaaaaaaaaaaaaaaaaaaaaaaaaaaaaaaaaaaaatgcatcccccccccccccccccccccccccccccccaaaggctcttttcagagccaccagaatt

SEQ ID NO: 1741 - RNA, 1642 nt, synthetic construct
  misc_feature 1..1642: note = mRNA i-3 (A64-N5-C30-hSL-N5) (opt3) from Homo sapiens__NP_000448.3__HNF4A(1-474)(K234R)
  source 1..1642: mol_type = other RNA
aggagaaagcttaccatgagactgagcaagaccctcgtggacatggatatggccgactactccgctgcacttgatcccgcctatacaactctggagttcgaaaacgtccaggttttgacgatgggcaatgacacctctccttcagaggggacaaacttaaatgcgccaaacagtctgggagtgagcgctctatgcgccatctgtggtgatagggcaactggcaaacactacggggcctcctcttgcgacggatgtaagggctttttccggcgctcggtacgtaaaaatcatatgtattcatgccgatttagcagacaatgtgtggtcgataaggacaaaaggaaccagtgccggtactgtcgcctcaagaagtgcttcagagctggtatgaaaaaggaagcagtgcagaatgagagggatcggattagtacccgccgatcctcttatgaagacagctccctgccgtcaataaacgcccttctgcaggctgaggttttgagtagacaaatcacaagccccgtgtctgggattaatggagatatcagggccaaaaagattgcgtccatcgcagacgtctgtgagtcaatgaaagaacagctcctggtgctggtagagtgggccaagtacatacctgctttttgcgaactcccattagatgaccaggttgccctgcttcgggcacacgctggcgagcatttgctgctaggcgccacccgtcgcagcatggtgttcaaggacgtcctcctgcttgggaacgattatatcgtgcccagacactgtcctgagctggcggaaatgagtagggtgtctattcggatcttggacgagctcgtcctgccatttcaggaattacaaattgatgacaatgagtacgcctacctgaaagcaatcatattctttgatcccgacgctaagggactctccgatcctggtaaaattaagcgacttcgcagccaggttcaggtgtcgctggaagactatatcaacgatagacagtacgactctaggggccggttcggggagttgctactgctcctgccaactcttcaatccattacatggcagatgatcgagcagatccaatttattaaactgttcggaatggccaagatagataatttgctccaggaaatgctgttaggcggttcaccgagtgacgctccccatgcccaccaccctctgcatccacacctaatgcaggagcatatggggaccaacgtaatcgtggcaaatacgatgcccactcacctcagcaacggacagatgtgcgaatggcctcgcccaagaggccaagccgctacccccgagacaccgcagccttctcccccaggcgggtccggaagcgaaccttataaactgcttcccggtgcggtcgcaactattgtgaagccattgtcagccatcccccagcctaccataacaaagcaggaggttatttgaggactagttataagactgactagcccgatgggcctcccaacgggccctcctcccctccttgcaccgagattaataaaaaaaaaaaaaaaaaaaaaaaaaaaaaaaaaaaaaaaaaaaaaaaaaaaaaaaaaaaaaaaatgcatcccccccccccccccccccccccccccccccaaaggctcttttcagagccaccagaatt

SEQ ID NO: 1742 - RNA, 1642 nt, synthetic construct
  misc_feature 1..1642: note = mRNA i-3 (A64-N5-C30-hSL-N5) (opt3) from Homo sapiens__NP_000448.3__HNF4A(1-474)(K300R)
  source 1..1642: mol_type = other RNA
aggagaaagcttaccatgagactgagcaagaccctcgtggacatggatatggccgactactccgctgcacttgatcccgcctatacaactctggagttcgaaaacgtccaggttttgacgatgggcaatgacacctctccttcagaggggacaaacttaaatgcgccaaacagtctgggagtgagcgctctatgcgccatctgtggtgatagggcaactggcaaacactacggggcctcctcttgcgacggatgtaagggctttttccggcgctcggtacgtaaaaatcatatgtattcatgccgatttagcagacaatgtgtggtcgataaggacaaaaggaaccagtgccggtactgtcgcctcaagaagtgcttcagagctggtatgaaaaaggaagcagtgcagaatgagagggatcggattagtacccgccgatcctcttatgaagacagctccctgccgtcaataaacgcccttctgcaggctgaggttttgagtagacaaatcacaagccccgtgtctgggattaatggagatatcagggccaaaaagattgcgtccatcgcagacgtctgtgagtcaatgaaagaacagctcctggtgctggtagagtgggccaagtacatacctgctttttgcgaactcccattagatgaccaggttgccctgcttcgggcacacgctggcgagcatttgctgctaggcgccaccaagcgtagcatggtgttcaaagacgtcctcctgcttgggaacgattatatcgtgccccgccactgtcctgagctggcggaaatgagtagagtgtctattaggatcttggacgagctcgtcctgccatttcaggaattacaaattgatgacaatgagtacgcctacctgaaggcaatcatattctttgatcccgacgctcggggactctccgatcctggtaaaattaagcgacttcgcagccaggttcaggtgtcgctggaagactatatcaacgatagacagtacgactctaggggccggttcggggagttgctactgctcctgccaactcttcaatccattacatggcagatgatcgagcagatccaatttattaaactgttcggaatggccaagatagataatttgctccaggaaatgctgttaggcggttcaccgagtgacgctccccatgcccaccaccctctgcatccacacctaatgcaggagcatatggggaccaacgtaatcgtggcaaatacgatgcccactcacctcagcaacggacagatgtgcgaatggcctcgcccaagaggccaagccgctacccccgagacaccgcagccttctcccccaggcgggtccggaagcgaaccttataaactgcttcccggtgcggtcgcaactattgtgaagccattgtcagccatcccccagcctaccataacaaagcaggaggttatttgaggactagttataagactgactagcccgatgggcctcccaacgggccctcctcccctccttgcaccgagattaataaaaaaaaaaaaaaaaaaaaaaaaaaaaaaaaaaaaaaaaaaaaaaaaaaaaaaaaaaaaaaaatgcatcccccccccccccccccccccccccccccccaaaggctcttttcagagccaccagaatt

SEQ ID NO: 1743 - RNA, 1642 nt, synthetic construct
  misc_feature 1..1642: note = mRNA i-3 (A64-N5-C30-hSL-N5) (opt3) from Homo sapiens__NP_000448.3__HNF4A(1-474)(K300R_K307R_K309R)
  source 1..1642: mol_type = other RNA
aggagaaagcttaccatgagactgagcaagaccctcgtggacatggatatggccgactactccgctgcacttgatcccgcctatacaactctggagttcgaaaacgtccaggttttgacgatgggcaatgacacctctccttcagaggggacaaacttaaatgcgccaaacagtctgggagtgagcgctctatgcgccatctgtggtgatagggcaactggcaaacactacggggcctcctcttgcgacggatgtaagggctttttccggcgctcggtacgtaaaaatcatatgtattcatgccgatttagcagacaatgtgtggtcgataaggacaaaaggaaccagtgccggtactgtcgcctcaagaagtgcttcagagctggtatgaaaaaggaagcagtgcagaatgagagggatcggattagtacccgccgatcctcttatgaagacagctccctgccgtcaataaacgcccttctgcaggctgaggttttgagtagacaaatcacaagccccgtgtctgggattaatggagatatcagggccaaaaagattgcgtccatcgcagacgtctgtgagtcaatgaaagaacagctcctggtgctggtagagtgggccaagtacatacctgctttttgcgaactcccattagatgaccaggttgccctgcttcgggcacacgctggcgagcatttgctgctaggcgccaccaagcgtagcatggtgttcaaagacgtcctcctgcttgggaacgattatatcgtgccccgccactgtcctgagctggcggaaatgagtagagtgtctattaggatcttggacgagctcgtcctgccatttcaggaattacaaattgatgacaatgagtacgcctacctgaaggcaatcatattctttgatcccgacgctcggggactctccgatcctggtcgcattcgaagacttaggagccaggttcaggtgtcgctggaagactatatcaacgatcggcagtacgactctcgcggcagattcggggagttgctactgctcctgccaactcttcaatccattacatggcagatgatcgagcagatccaatttattaaactgttcggaatggccaagatagataatttgctccaggaaatgctgttaggcggttcaccgagtgacgctccccatgcccaccaccctctgcatccacacctaatgcaggagcatatggggaccaacgtaatcgtggcaaatacgatgcccactcacctcagcaacggacagatgtgcgaatggcctaggccacgtggccaagccgctacccccgagacaccgcagccttctcccccaggcgggtccggaagcgaaccttataaactgcttcccggtgcggtcgcaactattgtgaagccattgtcagccatcccccagcctaccataacaaaacaggaggttatttgaggactagttataagactgactagcccgatgggcctcccaacgggccctcctcccctccttgcaccgagattaataaaaaaaaaaaaaaaaaaaaaaaaaaaaaaaaaaaaaaaaaaaaaaaaaaaaaaaaaaaaaaaatgcatcccccccccccccccccccccccccccccccaaaggctcttttcagagccaccagaatt

SEQ ID NO: 1744 - RNA, 1642 nt, synthetic construct
  misc_feature 1..1642: note = mRNA i-3 (A64-N5-C30-hSL-N5) (opt3) from Homo sapiens__NP_000448.3__HNF4A(1-474)(K447R_K470R)
  source 1..1642: mol_type = other RNA
aggagaaagcttaccatgagactgagcaagaccctcgtggacatggatatggccgactactccgctgcacttgatcccgcctatacaactctggagttcgaaaacgtccaggttttgacgatgggcaatgacacctctccttcagaggggacaaacttaaatgcgccaaacagtctgggagtgagcgctctatgcgccatctgtggtgatagggcaactggcaaacactacggggcctcctcttgcgacggatgtaagggctttttccggcgctcggtacgtaaaaatcatatgtattcatgccgatttagcagacaatgtgtggtcgataaggacaaaaggaaccagtgccggtactgtcgcctcaagaagtgcttcagagctggtatgaaaaaggaagcagtgcagaatgagagggatcggattagtacccgccgatcctcttatgaagacagctccctgccgtcaataaacgcccttctgcaggctgaggttttgagtagacaaatcacaagccccgtgtctgggattaatggagatatcagggccaaaaagattgcgtccatcgcagacgtctgtgagtcaatgaaagaacagctcctggtgctggtagagtgggccaagtacatacctgctttttgcgaactcccattagatgaccaggttgccctgcttcgggcacacgctggcgagcatttgctgctaggcgccaccaagcgtagcatggtgttcaaagacgtcctcctgcttgggaacgattatatcgtgccccgccactgtcctgagctggcggaaatgagtagagtgtctattaggatcttggacgagctcgtcctgccatttcaggaattacaaattgatgacaatgagtacgcctacctgaaggcaatcatattctttgatcccgacgctaaaggactctccgatcctggtaagattaaacggcttcgaagccaggttcaggtgtcgctggaagactatatcaacgatcgccagtacgactctagaggcaggttcggggagttgctactgctcctgccaactcttcaatccattacatggcagatgatcgagcagatccaatttattaagctgttcggaatggccaaaatagataatttgctccaggaaatgctgttaggcggttcaccgagtgacgctccccatgcccaccaccctctgcatccacacctaatgcaggagcatatggggaccaacgtaatcgtggcaaatacgatgcccactcacctcagcaacggacagatgtgcgaatggcctcggccacgcggccaagccgctacccccgagacaccgcagccttctcccccaggcgggtccggaagcgaaccttatagactgcttcccggtgcggtcgcaactattgtgaagccattgtcagccatcccccagcctaccataacaaggcaggaggttatttgaggactagttataagactgactagcccgatgggcctcccaacgggccctcctcccctccttgcaccgagattaataaaaaaaaaaaaaaaaaaaaaaaaaaaaaaaaaaaaaaaaaaaaaaaaaaaaaaaaaaaaaaaatgcatcccccccccccccccccccccccccccccccaaaggctcttttcagagccaccagaatt

SEQ ID NO: 1745 - RNA, 1642 nt, synthetic construct
  misc_feature 1..1642: note = mRNA i-3 (A64-N5-C30-hSL-N5) (opt3) from Homo sapiens__NP_000448.3__HNF4A(1-474)(K458R)
  source 1..1642: mol_type = other RNA
aggagaaagcttaccatgagactgagcaagaccctcgtggacatggatatggccgactactccgctgcacttgatcccgcctatacaactctggagttcgaaaacgtccaggttttgacgatgggcaatgacacctctccttcagaggggacaaacttaaatgcgccaaacagtctgggagtgagcgctctatgcgccatctgtggtgatagggcaactggcaaacactacggggcctcctcttgcgacggatgtaagggctttttccggcgctcggtacgtaaaaatcatatgtattcatgccgatttagcagacaatgtgtggtcgataaggacaaaaggaaccagtgccggtactgtcgcctcaagaagtgcttcagagctggtatgaaaaaggaagcagtgcagaatgagagggatcggattagtacccgccgatcctcttatgaagacagctccctgccgtcaataaacgcccttctgcaggctgaggttttgagtagacaaatcacaagccccgtgtctgggattaatggagatatcagggccaaaaagattgcgtccatcgcagacgtctgtgagtcaatgaaagaacagctcctggtgctggtagagtgggccaagtacatacctgctttttgcgaactcccattagatgaccaggttgccctgcttcgggcacacgctggcgagcatttgctgctaggcgccaccaagcgtagcatggtgttcaaagacgtcctcctgcttgggaacgattatatcgtgccccgccactgtcctgagctggcggaaatgagtagagtgtctattaggatcttggacgagctcgtcctgccatttcaggaattacaaattgatgacaatgagtacgcctacctgaaggcaatcatattctttgatcccgacgctaaaggactctccgatcctggtaagattaaacggcttcgaagccaggttcaggtgtcgctggaagactatatcaacgatcgccagtacgactctagaggcaggttcggggagttgctactgctcctgccaactcttcaatccattacatggcagatgatcgagcagatccaatttattaagctgttcggaatggccaaaatagataatttgctccaggaaatgctgttaggcggttcaccgagtgacgctccccatgcccaccaccctctgcatccacacctaatgcaggagcatatggggaccaacgtaatcgtggcaaatacgatgcccactcacctcagcaacggacagatgtgcgaatggcctcggccacgcggccaagccgctacccccgagacaccgcagccttctcccccaggcgggtccggaagcgaaccttataagctgcttcccggtgcggtcgcaactattgtgagaccattgtcagccatcccccagcctaccataacaaagcaggaggttatttgaggactagttataagactgactagcccgatgggcctcccaacgggccctcctcccctccttgcaccgagattaataaaaaaaaaaaaaaaaaaaaaaaaaaaaaaaaaaaaaaaaaaaaaaaaaaaaaaaaaaaaaaaatgcatcccccccccccccccccccccccccccccccaaaggctcttttcagagccaccagaatt

SEQ ID NO: 1746 - RNA, 1642 nt, synthetic construct
  misc_feature 1..1642: note = mRNA i-3 (A64-N5-C30-hSL-N5) (opt3) from Homo sapiens__NP_000448.3__HNF4A(1-474)(K106R_K108R_K126R_K127R)
  source 1..1642: mol_type = other RNA
aggagaaagcttaccatgagactgagcaagaccctcgtggacatggatatggccgactactccgctgcacttgatcccgcctatacaactctggagttcgaaaacgtccaggttttgacgatgggcaatgacacctctccttcagaggggacaaacttaaatgcgccaaacagtctgggagtgagcgctctatgcgccatctgtggtgatagggcaactggcaaacactacggggcctcctcttgcgacggatgtaagggctttttccggcgctcggtacgtaaaaatcatatgtattcatgccgatttagcagacaatgtgtggtcgatagggaccggcgcaaccagtgcagatactgtaggctcaagaaatgcttccgggctggtatgcgccgagaagcagtgcagaatgagagagataggattagtacccggcgttcctcttatgaagacagctccctgccgtcaataaacgcccttctgcaggctgaggttttgagtcgccaaatcacaagccccgtgtctgggattaatggagatatcagagccaagaagattgcgtccatcgcagacgtctgtgagtcaatgaaagaacagctcctggtgctggtagagtgggccaagtacatacctgctttttgcgaactcccattagatgaccaggttgccctgcttagggcacacgctggcgagcatttgctgctaggcgccaccaaacggagcatggtgttcaaggacgtcctcctgcttgggaacgattatatcgtgccccgacactgtcctgagctggcggaaatgagtcgcgtgtctattagaatcttggacgagctcgtcctgccatttcaggaattacaaattgatgacaatgagtacgcctacctgaaagcaatcatattctttgatcccgacgctaagggactctccgatcctggtaagattaaaaggcttcggagccaggttcaggtgtcgctggaagactatatcaacgatcgccagtacgactctagaggcaggttcggggagttgctactgctcctgccaactcttcaatccattacatggcagatgatcgagcagatccaatttattaagctgttcggaatggccaaaatagataatttgctccaggaaatgctgttaggcggttcaccgagtgacgctccccatgcccaccaccctctgcatccacacctaatgcaggagcatatggggaccaacgtaatcgtggcaaatacgatgcccactcacctcagcaacggacagatgtgcgaatggcctcgtccacggggccaagccgctacccccgagacaccgcagccttctcccccaggcgggtccggaagcgaaccttataagctgcttcccggtgcggtcgcaactattgtgaaaccattgtcagccatcccccagcctaccataacaaagcaggaggttatttgaggactagttataagactgactagcccgatgggcctcccaacgggccctcctcccctccttgcaccgagattaataaaaaaaaaaaaaaaaaaaaaaaaaaaaaaaaaaaaaaaaaaaaaaaaaaaaaaaaaaaaaaaatgcatcccccccccccccccccccccccccccccccaaaggctcttttcagagccaccagaatt

SEQ ID NO: 1747 - RNA, 1642 nt, synthetic construct
  misc_feature 1..1642: note = mRNA i-3 (A64-N5-C30-hSL-N5) (opt3) from Homo sapiens__NP_000448.3__HNF4A(1-474)(E285Q)
  source 1..1642: mol_type = other RNA
aggagaaagcttaccatgagactgagcaagaccctcgtggacatggatatggccgactactccgctgcacttgatcccgcctatacaactctggagttcgaaaacgtccaggttttgacgatgggcaatgacacctctccttcagaggggacaaacttaaatgcgccaaacagtctgggagtgagcgctctatgcgccatctgtggtgatagggcaactggcaaacactacggggcctcctcttgcgacggatgtaagggctttttccggcgctcggtacgtaaaaatcatatgtattcatgccgatttagcagacaatgtgtggtcgataaggacaaaaggaaccagtgccggtactgtcgcctcaagaagtgcttcagagctggtatgaaaaaggaagcagtgcagaatgagagggatcggattagtacccgccgatcctcttatgaagacagctccctgccgtcaataaacgcccttctgcaggctgaggttttgagtagacaaatcacaagccccgtgtctgggattaatggagatatcagggccaaaaagattgcgtccatcgcagacgtctgtgagtcaatgaaagaacagctcctggtgctggtagagtgggccaagtacatacctgctttttgcgaactcccattagatgaccaggttgccctgcttcgggcacacgctggcgagcatttgctgctaggcgccaccaagcgtagcatggtgttcaaagacgtcctcctgcttgggaacgattatatcgtgccccgccactgtcctgagctggcggaaatgagtagagtgtctattaggatcttggacgagctcgtcctgccatttcaggaattacaaattgatgacaatcagtacgcctacctgaaggcaatcatattctttgatcccgacgctaaaggactctccgatcctggtaagattaaacggcttcgaagccaggttcaggtgtcgctggaggactatatcaacgatcgccaatacgactctagaggcaggttcggggaattgctactgctcctgccaactcttcagtccattacatggcagatgatcgagcaaatccagtttattaagctgttcggaatggccaaaatagataatttgctccaggagatgctgttaggcggttcaccgagtgacgctccccatgcccaccaccctctgcatccacacctaatgcaggaacatatggggaccaacgtaatcgtggcaaatacgatgcccactcacctcagcaacggacaaatgtgcgagtggcctcggccacgcggccaggccgctacccccgaaacaccgcagccttctcccccaggcgggtccggaagcgagccttataagctgcttcccggtgcggtcgcaactattgtgaagccattgtcagccatcccccagcctaccataacaaaacaagaagttatttgaggactagttataagactgactagcccgatgggcctcccaacgggccctcctcccctccttgcaccgagattaataaaaaaaaaaaaaaaaaaaaaaaaaaaaaaaaaaaaaaaaaaaaaaaaaaaaaaaaaaaaaaaatgcatcccccccccccccccccccccccccccccccaaaggctcttttcagagccaccagaatt

SEQ ID NO: 1748 - RNA, 1642 nt, synthetic construct
  misc_feature 1..1642: note = mRNA i-3 (A64-N5-C30-hSL-N5) (opt3) from Homo sapiens__NP_000448.3__HNF4A(1-474)(T166E)
  source 1..1642: mol_type = other RNA
aggagaaagcttaccatgagactgagcaagaccctcgtggacatggatatggccgactactccgctgcacttgatcccgcctatacaactctggagttcgaaaacgtccaggttttgacgatgggcaatgacacctctccttcagaggggacaaacttaaatgcgccaaacagtctgggagtgagcgctctatgcgccatctgtggtgatagggcaactggcaaacactacggggcctcctcttgcgacggatgtaagggctttttccggcgctcggtacgtaaaaatcatatgtattcatgccgatttagcagacaatgtgtggtcgataaggacaaaaggaaccagtgccggtactgtcgcctcaagaagtgcttcagagctggtatgaaaaaggaagcagtgcagaatgagagggatcggattagtacccgccgatcctcttatgaagacagctccctgccgtcaataaacgcccttctgcaggctgaggttttgagtagacaaatcgagagccccgtgtctgggattaatggagatatcagggccaaaaagattgcgtccatcgcagacgtctgtgaatcaatgaaagagcagctcctggtgctggtagaatgggccaagtacatacctgctttttgcgagctcccattagatgaccaggttgccctgcttcgggcacacgctggcgagcatttgctgctaggcgccacaaagcgtagcatggtgttcaaagacgtcctcctgcttgggaacgattatatcgtgccccgccactgtcctgaactggcggagatgagtagagtgtctattaggatcttggacgaactcgtcctgccatttcaggagttacaaattgatgacaatgaatacgcctacctgaaggcaatcatattctttgatcccgacgctaaaggactctccgatcctggtaagattaaacggcttcgaagccaggttcaggtgtcgctggaggactatatcaacgatcgccagtacgactctagaggcaggttcggggagttgctactgctcctgccaacccttcaatccattacttggcagatgatcgaacagatccaatttattaagctgttcggaatggccaaaatagataatttgctccaggagatgctgttaggcggttcaccgagtgacgctccccatgcccaccaccctctgcatccacacctaatgcaggaacatatggggacaaacgtaatcgtggcaaataccatgcccacgcacctcagcaacggacagatgtgcgagtggcctcggccacgcggccaagccgctactcccgaaaccccgcagccttctcccccaggcgggtccggaagcgagccttataagctgcttcccggtgcggtcgcaacaattgtgaagccattgtcagccatcccccagcctactataaccaaacaggaggttatttgaggactagttataagactgactagcccgatgggcctcccaacgggccctcctcccctccttgcaccgagattaataaaaaaaaaaaaaaaaaaaaaaaaaaaaaaaaaaaaaaaaaaaaaaaaaaaaaaaaaaaaaaaatgcatcccccccccccccccccccccccccccccccaaaggctcttttcagagccaccagaatt

SEQ ID NO: 1749 - RNA, 1642 nt, synthetic construct
  misc_feature 1..1642: note = mRNA i-3 (A64-N5-C30-hSL-N5) (opt3) from Homo sapiens__NP_000448.3__HNF4A(1-474)(S148A)
  source 1..1642: mol_type = other RNA
aggagaaagcttaccatgagactgagcaagaccctcgtggacatggatatggccgactactccgctgcacttgatcccgcctatacaactctggagttcgaaaacgtccaggttttgacgatgggcaatgacacctctccttcagaggggacaaacttaaatgcgccaaacagtctgggagtgagcgctctatgcgccatctgtggtgatagggcaactggcaaacactacggggcctcctcttgcgacggatgtaagggctttttccggcgctcggtacgtaaaaatcatatgtattcatgccgatttagcagacaatgtgtggtcgataaggacaaaaggaaccagtgccggtactgtcgcctcaagaagtgcttcagagctggtatgaaaaaggaagcagtgcagaatgagagggatcggattagtacccgccgatcctcttatgaagacagcgccctgccgtccataaacgcccttctgcaggccgaggttttgtcaagacaaatcacaagtcccgtgagcgggattaatggagatatcagggcgaaaaagattgcatctatcgccgacgtctgtgagtccatgaaagaacagctcctggtgctggtagagtgggctaagtacatacctgccttttgcgaactcccattagatgaccaggttgcactgcttcgggctcacgccggcgagcatttgctgctaggcgcgaccaagcgttcaatggtgttcaaagacgtcctcctgcttgggaacgattatatcgtgccccgccactgtcctgagctggccgaaatgagcagagtgagtattaggatcttggacgagctcgtcctgccatttcaggaattacaaattgatgacaatgagtacgcatacctgaaggctatcatattctttgatcccgacgccaaaggactctctgatcctggtaagattaaacggcttcgatcccaggttcaggtgagcctggaagactatatcaacgatcgccagtacgactcgagaggcaggttcggggagttgctactgctcctgccaactcttcaatctattacatggcagatgatcgagcagatccaatttattaagctgttcggaatggctaaaatagataatttgctccaggaaatgctgttaggcggttccccgtcagacgctccccatgcacaccaccctctgcatccacacctaatgcaggagcatatggggaccaacgtaatcgtggccaatacgatgcccactcacctcagtaacggacagatgtgcgaatggcctcggccacgcggccaagctgcgacccccgagacaccgcagcctagcccacccggcgggtccggatctgaaccttataagctgcttcccggtgcagtcgccactattgtgaagccattgagcgctatcccccagcctaccataacaaaacaggaggttatttgaggactagttataagactgactagcccgatgggcctcccaacgggccctcctcccctccttgcaccgagattaataaaaaaaaaaaaaaaaaaaaaaaaaaaaaaaaaaaaaaaaaaaaaaaaaaaaaaaaaaaaaaaatgcatcccccccccccccccccccccccccccccccaaaggctcttttcagagccaccagaatt

SEQ ID NO: 1750 - RNA, 1642 nt, synthetic construct
  misc_feature 1..1642: note = mRNA i-3 (A64-N5-C30-hSL-N5) (opt3) from Homo sapiens__NP_000448.3__HNF4A(1-474)(S148E)
  source 1..1642: mol_type = other RNA
aggagaaagcttaccatgagactgagcaagaccctcgtggacatggatatggccgactactccgctgcacttgatcccgcctatacaactctggagttcgaaaacgtccaggttttgacgatgggcaatgacacctctccttcagaggggacaaacttaaatgcgccaaacagtctgggagtgagcgctctatgcgccatctgtggtgatagggcaactggcaaacactacggggcctcctcttgcgacggatgtaagggctttttccggcgctcggtacgtaaaaatcatatgtattcatgccgatttagcagacaatgtgtggtcgataaggacaaaaggaaccagtgccggtactgtcgcctcaagaagtgcttcagagctggtatgaaaaaggaagcagtgcagaatgagagggatcggattagtacccgccgatcctcttatgaagacagcgagctgccgtccataaacgcccttctgcaggctgaggttttgtcaagacaaatcacaagtcccgtgagcgggattaatggagatatcagggccaaaaagattgcgtctatcgcagacgtctgtgaatccatgaaagagcagctcctggtgctggtagaatgggccaagtacatacctgctttttgcgagctcccattagatgaccaggttgccctgcttcgggcacacgctggcgagcatttgctgctaggcgccaccaagcgttcaatggtgttcaaagacgtcctcctgcttgggaacgattatatcgtgccccgccactgtcctgaactggcggagatgagcagagtgagtattaggatcttggacgaactcgtcctgccatttcaggagttacaaattgatgacaatgaatacgcctacctgaaggcaatcatattctttgatcccgacgctaaaggactctctgatcctggtaagattaaacggcttcgatcccaggttcaggtgagcctggaggactatatcaacgatcgccagtacgactcgagaggcaggttcggggagttgctactgctcctgccaactcttcaatctattacatggcagatgatcgaacagatccaatttattaagctgttcggaatggccaaaatagataatttgctccaggagatgctgttaggcggttccccgtcagacgctccccatgcccaccaccctctgcatccacacctaatgcaggaacatatggggaccaacgtaatcgtggcaaatacgatgcccactcacctcagtaacggacagatgtgcgagtggcctcggccacgcggccaagccgctacccccgaaacaccgcagcctagcccacccggcgggtccggatctgagccttataagctgcttcccggtgcggtcgcaactattgtgaagccattgagcgccatcccccagcctaccataacaaaacaggaggttatttgaggactagttataagactgactagcccgatgggcctcccaacgggccctcctcccctccttgcaccgagattaataaaaaaaaaaaaaaaaaaaaaaaaaaaaaaaaaaaaaaaaaaaaaaaaaaaaaaaaaaaaaaaatgcatcccccccccccccccccccccccccccccccaaaggctcttttcagagccaccagaatt

SEQ ID NO: 1751 - RNA, 1642 nt, synthetic construct
  misc_feature 1..1642: note = mRNA i-3 (A64-N5-C30-hSL-N5) (opt3) from Homo sapiens__NP_000448.3__HNF4A(1-474)(S183A)
  source 1..1642: mol_type = other RNA
aggagaaagcttaccatgagactgagcaagaccctcgtggacatggatatggccgactactccgctgcacttgatcccgcctatacaactctggagttcgaaaacgtccaggttttgacgatgggcaatgacacctctccttcagaggggacaaacttaaatgcgccaaacagtctgggagtgagcgctctatgcgccatctgtggtgatagggcaactggcaaacactacggggcctcctcttgcgacggatgtaagggctttttccggcgctcggtacgtaaaaatcatatgtattcatgccgatttagcagacaatgtgtggtcgataaggacaaaaggaaccagtgccggtactgtcgcctcaagaagtgcttcagagctggtatgaaaaaggaagcagtgcagaatgagagggatcggattagtacccgccgatcctcttatgaagacagctccctgccgtcaataaacgcccttctgcaggctgaggttttgagtagacaaatcacaagccccgtgtctgggattaatggagatatcagggccaaaaagattgcggcaatcgccgacgtctgtgagtccatgaaagaacagctcctggtgctggtagagtgggctaagtacatacctgccttttgcgaactcccattagatgaccaggttgcactgcttcgggctcacgccggcgagcatttgctgctaggcgcgaccaagcgttcaatggtgttcaaagacgtcctcctgcttgggaacgattatatcgtgccccgccactgtcctgagctggccgaaatgagcagagtgagtattaggatcttggacgagctcgtcctgccatttcaggaattacaaattgatgacaatgagtacgcatacctgaaggctatcatattctttgatcccgacgccaaaggactctctgatcctggtaagattaaacggcttcgatcccaggttcaggtgagcctggaagactatatcaacgatcgccagtacgactcgagaggcaggttcggggagttgctactgctcctgccaactcttcaatctattacatggcagatgatcgagcagatccaatttattaagctgttcggaatggctaaaatagataatttgctccaggaaatgctgttaggcggttccccgtcagacgcaccccatgcccaccaccctctgcatccacacctaatgcaggagcatatggggaccaacgtaatcgtggccaatacgatgcccactcacctcagtaacggacagatgtgcgaatggcctcggccacgcggccaagctgcgacccccgagacaccgcagcctagcccacccggcgggtccggatctgaaccttataagctgcttcccggtgcagtcgccactattgtgaagccattgagcgctatcccccagcctaccataacaaaacaggaggttatttgaggactagttataagactgactagcccgatgggcctcccaacgggccctcctcccctccttgcaccgagattaataaaaaaaaaaaaaaaaaaaaaaaaaaaaaaaaaaaaaaaaaaaaaaaaaaaaaaaaaaaaaaaatgcatcccccccccccccccccccccccccccccccaaaggctcttttcagagccaccagaatt

SEQ ID NO: 1752 - RNA, 1642 nt, synthetic construct
  misc_feature 1..1642: note = mRNA i-3 (A64-N5-C30-hSL-N5) (opt3) from Homo sapiens__NP_000448.3__HNF4A(1-474)(S183E)
  source 1..1642: mol_type = other RNA
aggagaaagcttaccatgagactgagcaagaccctcgtggacatggatatggccgactactccgctgcacttgatcccgcctatacaactctggagttcgaaaacgtccaggttttgacgatgggcaatgacacctctccttcagaggggacaaacttaaatgcgccaaacagtctgggagtgagcgctctatgcgccatctgtggtgatagggcaactggcaaacactacggggcctcctcttgcgacggatgtaagggctttttccggcgctcggtacgtaaaaatcatatgtattcatgccgatttagcagacaatgtgtggtcgataaggacaaaaggaaccagtgccggtactgtcgcctcaagaagtgcttcagagctggtatgaaaaaggaagcagtgcagaatgagagggatcggattagtacccgccgatcctcttatgaagacagctccctgccgtcaataaacgcccttctgcaggctgaggttttgagtagacaaatcacaagccccgtgtctgggattaatggagatatcagggccaaaaagattgcggagatcgcagacgtctgtgaatccatgaaagagcagctcctggtgctggtagaatgggccaagtacatacctgctttttgcgagctcccattagatgaccaggttgccctgcttcgggcacacgctggcgagcatttgctgctaggcgccaccaagcgttcaatggtgttcaaagacgtcctcctgcttgggaacgattatatcgtgccccgccactgtcctgaactggcggagatgagcagagtgagtattaggatcttggacgaactcgtcctgccatttcaggagttacaaattgatgacaatgaatacgcctacctgaaggcaatcatattctttgatcccgacgctaaaggactctctgatcctggtaagattaaacggcttcgatcccaggttcaggtgagcctggaggactatatcaacgatcgccagtacgactcgagaggcaggttcggggagttgctactgctcctgccaactcttcaatctattacatggcagatgatcgaacagatccaatttattaagctgttcggaatggccaaaatagataatttgctccaggagatgctgttaggcggttccccgtcagacgctccccatgcccaccaccctctgcatccacacctaatgcaggaacatatggggaccaacgtaatcgtggcaaatacgatgcccactcacctcagtaacggacagatgtgcgagtggcctcggccacgcggccaagccgctacccccgaaacaccgcagcctagcccacccggcgggtccggatctgagccttataagctgcttcccggtgcggtcgcaactattgtgaagccattgagcgccatcccccagcctaccataacaaaacaggaggttatttgaggactagttataagactgactagcccgatgggcctcccaacgggccctcctcccctccttgcaccgagattaataaaaaaaaaaaaaaaaaaaaaaaaaaaaaaaaaaaaaaaaaaaaaaaaaaaaaaaaaaaaaaaatgcatcccccccccccccccccccccccccccccccaaaggctcttttcagagccaccagaatt

SEQ ID NO: 1753 - RNA, 1642 nt, synthetic construct
  misc_feature 1..1642: note = mRNA i-3 (A64-N5-C30-hSL-N5) (opt3) from Homo sapiens__NP_000448.3__HNF4A(1-474)(S461A)
  source 1..1642: mol_type = other RNA
aggagaaagcttaccatgagactgagcaagaccctcgtggacatggatatggccgactactccgctgcacttgatcccgcctatacaactctggagttcgaaaacgtccaggttttgacgatgggcaatgacacctctccttcagaggggacaaacttaaatgcgccaaacagtctgggagtgagcgctctatgcgccatctgtggtgatagggcaactggcaaacactacggggcctcctcttgcgacggatgtaagggctttttccggcgctcggtacgtaaaaatcatatgtattcatgccgatttagcagacaatgtgtggtcgataaggacaaaaggaaccagtgccggtactgtcgcctcaagaagtgcttcagagctggtatgaaaaaggaagcagtgcagaatgagagggatcggattagtacccgccgatcctcttatgaagacagctccctgccgtcaataaacgcccttctgcaggctgaggttttgagtagacaaatcacaagccccgtgtctgggattaatggagatatcagggccaaaaagattgcgtccatcgcagacgtctgtgagtcaatgaaagaacagctcctggtgctggtagagtgggccaagtacatacctgctttttgcgaactcccattagatgaccaggttgccctgcttcgggcacacgctggcgagcatttgctgctaggcgccaccaagcgtagcatggtgttcaaagacgtcctcctgcttgggaacgattatatcgtgccccgccactgtcctgagctggcggaaatgagtagagtgtctattaggatcttggacgagctcgtcctgccatttcaggaattacaaattgatgacaatgagtacgcctacctgaaggcaatcatattctttgatcccgacgctaaaggactctccgatcctggtaagattaaacggcttcgaagccaggttcaggtgtcgctggaagactatatcaacgatcgccagtacgactctagaggcaggttcggggagttgctactgctcctgccaactcttcaatccattacatggcagatgatcgagcagatccaatttattaagctgttcggaatggccaaaatagataatttgctccaggaaatgctgttaggcggttcaccgagtgacgctccccatgcccaccaccctctgcatccacacctaatgcaggagcatatggggaccaacgtaatcgtggcaaatacgatgcccactcacctcagcaacggacagatgtgcgaatggcctcggccacgcggccaagccgctacccccgagacaccgcagccttctcccccaggcgggtccggaagcgaaccttataagctgcttcccggtgcggtcgcaactattgtgaagccattggccgctatcccccagcctaccataacaaaacaggaggttatttgaggactagttataagactgactagcccgatgggcctcccaacgggccctcctcccctccttgcaccgagattaataaaaaaaaaaaaaaaaaaaaaaaaaaaaaaaaaaaaaaaaaaaaaaaaaaaaaaaaaaaaaaaatgcatcccccccccccccccccccccccccccccccaaaggctcttttcagagccaccagaatt

SEQ ID NO: 1754 - RNA, 1642 nt, synthetic construct
  misc_feature 1..1642: note = mRNA i-3 (A64-N5-C30-hSL-N5) (opt3) from Homo sapiens__NP_000448.3__HNF4A(1-474)(S461E)
  source 1..1642: mol_type = other RNA
aggagaaagcttaccatgagactgagcaagaccctcgtggacatggatatggccgactactccgctgcacttgatcccgcctatacaactctggagttcgaaaacgtccaggttttgacgatgggcaatgacacctctccttcagaggggacaaacttaaatgcgccaaacagtctgggagtgagcgctctatgcgccatctgtggtgatagggcaactggcaaacactacggggcctcctcttgcgacggatgtaagggctttttccggcgctcggtacgtaaaaatcatatgtattcatgccgatttagcagacaatgtgtggtcgataaggacaaaaggaaccagtgccggtactgtcgcctcaagaagtgcttcagagctggtatgaaaaaggaagcagtgcagaatgagagggatcggattagtacccgccgatcctcttatgaagacagctccctgccgtcaataaacgcccttctgcaggctgaggttttgagtagacaaatcacaagccccgtgtctgggattaatggagatatcagggccaaaaagattgcgtccatcgcagacgtctgtgagtcaatgaaagaacagctcctggtgctggtagagtgggccaagtacatacctgctttttgcgaactcccattagatgaccaggttgccctgcttcgggcacacgctggcgagcatttgctgctaggcgccaccaagcgtagcatggtgttcaaagacgtcctcctgcttgggaacgattatatcgtgccccgccactgtcctgagctggcggaaatgagtagagtgtctattaggatcttggacgagctcgtcctgccatttcaggaattacaaattgatgacaatgagtacgcctacctgaaggcaatcatattctttgatcccgacgctaaaggactctccgatcctggtaagattaaacggcttcgaagccaggttcaggtgtcgctggaagactatatcaacgatcgccagtacgactctagaggcaggttcggggagttgctactgctcctgccaactcttcaatccattacatggcagatgatcgagcagatccaatttattaagctgttcggaatggccaaaatagataatttgctccaggaaatgctgttaggcggttcaccgagtgacgctccccatgcccaccaccctctgcatccacacctaatgcaggagcatatggggaccaacgtaatcgtggcaaatacgatgcccactcacctcagcaacggacagatgtgcgaatggcctcggccacgcggccaagccgctacccccgagacaccgcagccttctcccccaggcgggtccggaagcgaaccttataagctgcttcccggtgcggtcgcaactattgtgaagccattggaggccatcccccagcctaccataacaaaacaggaggttatttgaggactagttataagactgactagcccgatgggcctcccaacgggccctcctcccctccttgcaccgagattaataaaaaaaaaaaaaaaaaaaaaaaaaaaaaaaaaaaaaaaaaaaaaaaaaaaaaaaaaaaaaaaatgcatcccccccccccccccccccccccccccccccaaaggctcttttcagagccaccagaatt

SEQ ID NO: 1755 - RNA, 1642 nt, synthetic construct
  misc_feature 1..1642: note = mRNA i-3 (A64-N5-C30-hSL-N5) (opt3) from Homo sapiens__NP_000448.3__HNF4A(1-474)(S142A_S143A_S313A)
  source 1..1642: mol_type = other RNA
aggagaaagcttaccatgagactgagcaagaccctcgtggacatggatatggccgactactccgctgcacttgatcccgcctatacaactctggagttcgaaaacgtccaggttttgacgatgggcaatgacacctctccttcagaggggacaaacttaaatgcgccaaacagtctgggagtgagcgctctatgcgccatctgtggtgatagggcaactggcaaacactacggggcctcctcttgcgacggatgtaagggctttttccggcgctcggtacgtaaaaatcatatgtattcatgccgatttagcagacaatgtgtggtcgataaggacaaaaggaaccagtgccggtactgtcgcctcaagaagtgcttcagagctggtatgaaaaaggaagcagtgcagaatgagagggatcggattagtacccgccgagccgcttatgaagactcctctctgccgagcataaacgcccttctgcaggcggaggttttgtccagacaaatcacatcacccgtgagtgggattaatggagatatcagggccaaaaagattgccagcatcgctgacgtctgtgagtctatgaaagaacagctcctggtgctggtagagtgggccaagtacatacctgcattttgcgaactcccattagatgaccaggttgctctgcttcgggcccacgcgggcgagcatttgctgctaggcgccaccaagcgttccatggtgttcaaagacgtcctcctgcttgggaacgattatatcgtgccccgccactgtcctgagctggcagaaatgtcaagagtgagcattaggatcttggacgagctcgtcctgccatttcaggaattacaaattgatgacaatgagtacgcttacctgaaggccatcatattctttgatcccgacgctaaaggactcagtgatcctggtaagattaaacggcttcgagcccaggttcaggtgtctctggaagactatatcaacgatcgccagtacgactccagaggcaggttcggggagttgctactgctcctgccaactcttcaaagcattacatggcagatgatcgagcagatccaatttattaagctgttcggaatggcaaaaatagataatttgctccaggaaatgctgttaggcggttcgccgtctgacgcaccccatgctcaccaccctctgcatccacacctaatgcaggagcatatggggaccaacgtaatcgtggcgaatacgatgcccactcacctctccaacggacagatgtgcgaatggcctcggccacgcggccaagcagccacccccgagacaccgcagccttcacccccaggcgggagtggaagcgaaccttataagctgcttcccggtgctgtcgccactattgtgaagccattgtccgcaatcccccagcctaccataacaaaacaggaggttatttgaggactagttataagactgactagcccgatgggcctcccaacgggccctcctcccctccttgcaccgagattaataaaaaaaaaaaaaaaaaaaaaaaaaaaaaaaaaaaaaaaaaaaaaaaaaaaaaaaaaaaaaaaatgcatcccccccccccccccccccccccccccccccaaaggctcttttcagagccaccagaatt

SEQ ID NO: 1756 - RNA, 1642 nt, synthetic construct
  misc_feature 1..1642: note = mRNA i-3 (A64-N5-C30-hSL-N5) (opt3) from Homo sapiens__NP_000448.3__HNF4A(1-474)(S142A_S143A_S313A_K458R)
  source 1..1642: mol_type = other RNA
aggagaaagcttaccatgagactgagcaagaccctcgtggacatggatatggccgactactccgctgcacttgatcccgcctatacaactctggagttcgaaaacgtccaggttttgacgatgggcaatgacacctctccttcagaggggacaaacttaaatgcgccaaacagtctgggagtgagcgctctatgcgccatctgtggtgatagggcaactggcaaacactacggggcctcctcttgcgacggatgtaagggctttttccggcgctcggtacgtaaaaatcatatgtattcatgccgatttagcagacaatgtgtggtcgataaggacaaaaggaaccagtgccggtactgtcgcctcaagaagtgcttcagagctggtatgaaaaaggaagcagtgcagaatgagagggatcggattagtacccgccgagccgcttatgaagactcctctctgccgagcataaacgcccttctgcaggcggaggttttgtccagacaaatcacatcacccgtgagtgggattaatggagatatcagggccaaaaagattgccagcatcgctgacgtctgtgagtctatgaaagaacagctcctggtgctggtagagtgggccaagtacatacctgcattttgcgaactcccattagatgaccaggttgctctgcttcgggcccacgcgggcgagcatttgctgctaggcgccaccaagcgttccatggtgttcaaagacgtcctcctgcttgggaacgattatatcgtgccccgccactgtcctgagctggcagaaatgtcaagagtgagcattaggatcttggacgagctcgtcctgccatttcaggaattacaaattgatgacaatgagtacgcttacctgaaggccatcatattctttgatcccgacgctaaaggactcagtgatcctggtaagattaaacggcttcgagcccaggttcaggtgtctctggaagactatatcaacgatcgccagtacgactccagaggcaggttcggggagttgctactgctcctgccaactcttcaaagcattacatggcagatgatcgagcagatccaatttattaagctgttcggaatggcaaaaatagataatttgctccaggaaatgctgttaggcggttcgccgtctgacgcaccccatgctcaccaccctctgcatccacacctaatgcaggagcatatggggaccaacgtaatcgtggcgaatacgatgcccactcacctctccaacggacagatgtgcgaatggcctcggccacgcggccaagcagccacccccgagacaccgcagccttcacccccaggcgggagtggaagcgaaccttataagctgcttcccggtgctgtcgccactattgtgagaccattgtccgcaatcccccagcctaccataacaaagcaggaggttatttgaggactagttataagactgactagcccgatgggcctcccaacgggccctcctcccctccttgcaccgagattaataaaaaaaaaaaaaaaaaaaaaaaaaaaaaaaaaaaaaaaaaaaaaaaaaaaaaaaaaaaaaaaatgcatcccccccccccccccccccccccccccccccaaaggctcttttcagagccaccagaatt

SEQ ID NO: 1757 - RNA, 1642 nt, synthetic construct
  misc_feature 1..1642: note = mRNA i-3 (A64-N5-C30-hSL-N5) (opt3) from Homo sapiens__NP_000448.3__HNF4A(1-474)(S142A_S143A_S167A_S313A_ S378A_T429A_T432A_S436A_K458R)
  source 1..1642: mol_type = other RNA
aggagaaagcttaccatgagactgagcaagaccctcgtggacatggatatggccgactactccgctgcacttgatcccgcctatacaactctggagttcgaaaacgtccaggttttgacgatgggcaatgacacctctccttcagaggggacaaacttaaatgcgccaaacagtctgggagtgagcgctctatgcgccatctgtggtgatagggcaactggcaaacactacggggcctcctcttgcgacggatgtaagggctttttccggcgctcggtacgtaaaaatcatatgtattcatgccgatttagcagacaatgtgtggtcgataaggacaaaaggaaccagtgccggtactgtcgcctcaagaagtgcttcagagctggtatgaaaaaggaagcagtgcagaatgagagggatcggattagtacccgccgagccgcttatgaagactcctctctgccgagcataaacgcccttctgcaggcggaggttttgtccagacaaatcacagcacccgtgtcagggattaatggagatatcagggccaaaaagattgctagtatcgccgacgtctgtgagagcatgaaagaacagctcctggtgctggtagagtgggcaaagtacatacctgctttttgcgaactcccattagatgaccaggttgccctgcttcgggcgcacgccggcgagcatttgctgctaggcgcaaccaagcgttctatggtgttcaaagacgtcctcctgcttgggaacgattatatcgtgccccgccactgtcctgagctggctgaaatgtccagagtgtcaattaggatcttggacgagctcgtcctgccatttcaggaattacaaattgatgacaatgagtacgcctacctgaaggctatcatattctttgatcccgacgccaaaggactcagcgatcctggtaagattaaacggcttcgagcacaggttcaggtgagtctggaagactatatcaacgatcgccagtacgactctagaggcaggttcggggagttgctactgctcctgccaactcttcaatccattacatggcagatgatcgagcagatccaatttattaagctgttcggaatggccaaaatagataatttgctccaggaaatgctgttaggcggtgctccgagcgacgcgccccatgcacaccaccctctgcatccacacctaatgcaggagcatatggggaccaacgtaatcgtggccaatacgatgcccactcacctctcgaacggacagatgtgcgaatggcctcggccacgcggccaagctgccgcacccgaggccccgcagcctgctcccccaggcgggtctggatccgaaccttataagctgcttcccggtgccgtcgcaaccattgtgagaccattgtcagcgatcccccagcctacaataactaagcaggaggttatttgaggactagttataagactgactagcccgatgggcctcccaacgggccctcctcccctccttgcaccgagattaataaaaaaaaaaaaaaaaaaaaaaaaaaaaaaaaaaaaaaaaaaaaaaaaaaaaaaaaaaaaaaaatgcatcccccccccccccccccccccccccccccccaaaggctcttttcagagccaccagaatt

SEQ ID NO: 1758 - RNA, 1642 nt, synthetic construct
  misc_feature 1..1642: note = mRNA i-3 (A64-N5-C30-hSL-N5) (opt3) from Homo sapiens__NP_000448.3__HNF4A(1-474)(S142A_S143A_S148A_S167A_ S313A_S378A_T429A_T432A_S436A_K458R)
  source 1..1642: mol_type = other RNA
aggagaaagcttaccatgagactgagcaagaccctcgtggacatggatatggccgactactccgctgcacttgatcccgcctatacaactctggagttcgaaaacgtccaggttttgacgatgggcaatgacacctctccttcagaggggacaaacttaaatgcgccaaacagtctgggagtgagcgctctatgcgccatctgtggtgatagggcaactggcaaacactacggggcctcctcttgcgacggatgtaagggctttttccggcgctcggtacgtaaaaatcatatgtattcatgccgatttagcagacaatgtgtggtcgataaggacaaaaggaaccagtgccggtactgtcgcctcaagaagtgcttcagagctggtatgaaaaaggaagcagtgcagaatgagagggatcggattagtacccgccgagccgcttatgaagactccgccctgccgtctataaacgcgcttctgcaggcagaggttttgagcagacaaatcacagcccccgtgtccgggattaatggagatatcagggctaaaaagattgcctcaatcgcagacgtctgtgagagtatgaaagaacagctcctggtgctggtagagtgggctaagtacatacctgccttttgcgaactcccattagatgaccaggttgcgctgcttcgggcccacgcaggcgagcatttgctgctaggcgctaccaagcgtagcatggtgttcaaagacgtcctcctgcttgggaacgattatatcgtgccccgccactgtcctgagctggccgaaatgtctagagtgtccattaggatcttggacgagctcgtcctgccatttcaggaattacaaattgatgacaatgagtacgcttacctgaaggccatcatattctttgatcccgacgcaaaaggactctcagatcctggtaagattaaacggcttcgagcccaggttcaggtgagcctggaagactatatcaacgatcgccagtacgacagtagaggcaggttcggggagttgctactgctcctgccaactcttcaatctattacatggcagatgatcgagcagatccaatttattaagctgttcggaatggctaaaatagataatttgctccaggaaatgctgttaggcggtgcgccgtccgacgcaccccatgcccaccaccctctgcatccacacctaatgcaggagcatatggggaccaacgtaatcgtggctaatacgatgcccactcacctcagcaacggacagatgtgcgaatggcctcggccacgcggccaagccgcagcccccgaggctccgcagcctgcacccccaggcgggtcgggatctgaaccttataagctgcttcccggtgccgtcgcgaccattgtgagaccattgtccgctatcccccagcctacaataactaagcaggaggttatttgaggactagttataagactgactagcccgatgggcctcccaacgggccctcctcccctccttgcaccgagattaataaaaaaaaaaaaaaaaaaaaaaaaaaaaaaaaaaaaaaaaaaaaaaaaaaaaaaaaaaaaaaaatgcatcccccccccccccccccccccccccccccccaaaggctcttttcagagccaccagaatt

SEQ ID NO: 1759 - RNA, 1642 nt, synthetic construct
  misc_feature 1..1642: note = mRNA i-3 (A64-N5-C30-hSL-N5) (opt3) from Homo sapiens__NP_000448.3__HNF4A(1-474)(K106R_K108R_K126R_K127R_ S142A_S143A_S148A_S167A_S313A_S378A_T429A_T432A_S436A_K458R )
  source 1..1642: mol_type = other RNA
aggagaaagcttaccatgagactgagcaagaccctcgtggacatggatatggccgactactccgctgcacttgatcccgcctatacaactctggagttcgaaaacgtccaggttttgacgatgggcaatgacacctctccttcagaggggacaaacttaaatgcgccaaacagtctgggagtgagcgctctatgcgccatctgtggtgatagggcaactggcaaacactacggggcctcctcttgcgacggatgtaagggctttttccggcgctcggtacgtaaaaatcatatgtattcatgccgatttagcagacaatgtgtggtcgatagggaccggcgcaaccagtgcagatactgtaggctcaagaaatgcttccgggctggtatgcgccgagaagcagtgcagaatgagagagataggattagtacccggcgtgccgcttatgaagactccgccctgccgtctataaacgcgcttctgcaggcagaggttttgagccgccaaatcacagcccccgtgtccgggattaatggagatatcagagctaagaagattgcctcaatcgcagacgtctgtgagagtatgaaagaacagctcctggtgctggtagagtgggctaagtacatacctgccttttgcgaactcccattagatgaccaggttgcgctgcttagggcccacgcaggcgagcatttgctgctaggcgctaccaaacggagcatggtgttcaaggacgtcctcctgcttgggaacgattatatcgtgccccgacactgtcctgagctggccgaaatgtctcgcgtgtccattagaatcttggacgagctcgtcctgccatttcaggaattacaaattgatgacaatgagtacgcttacctgaaagccatcatattctttgatcccgacgcaaagggactctcagatcctggtaagattaaaaggcttcgggcccaggttcaggtgagcctggaagactatatcaacgatcgccagtacgacagtagaggcaggttcggggagttgctactgctcctgccaactcttcaatctattacatggcagatgatcgagcagatccaatttattaagctgttcggaatggctaaaatagataatttgctccaggaaatgctgttaggcggtgcgccgtccgacgcaccccatgcccaccaccctctgcatccacacctaatgcaggagcatatggggaccaacgtaatcgtggctaatacgatgcccactcacctcagcaacggacagatgtgcgaatggcctcgtccacggggccaagccgcagcccccgaggctccgcagcctgcacccccaggcgggtcgggatctgaaccttataagctgcttcccggtgccgtcgcgaccattgtgcgaccattgtccgctatcccccagcctacaataactaaacaggaggttatttgaggactagttataagactgactagcccgatgggcctcccaacgggccctcctcccctccttgcaccgagattaataaaaaaaaaaaaaaaaaaaaaaaaaaaaaaaaaaaaaaaaaaaaaaaaaaaaaaaaaaaaaaaatgcatcccccccccccccccccccccccccccccccaaaggctcttttcagagccaccagaatt

SEQ ID NO: 1760 - RNA, 1642 nt, synthetic construct
  misc_feature 1..1642: note = mRNA i-3 (A64-N5-C30-hSL-N5) (opt3) from Homo sapiens__NP_000448.3__HNF4A(1-474)(S142A_S143A_S148A_T166A_ S167A_S313A_S378A_T429A_T432A_S436A_K458R)
  source 1..1642: mol_type = other RNA
aggagaaagcttaccatgagactgagcaagaccctcgtggacatggatatggccgactactccgctgcacttgatcccgcctatacaactctggagttcgaaaacgtccaggttttgacgatgggcaatgacacctctccttcagaggggacaaacttaaatgcgccaaacagtctgggagtgagcgctctatgcgccatctgtggtgatagggcaactggcaaacactacggggcctcctcttgcgacggatgtaagggctttttccggcgctcggtacgtaaaaatcatatgtattcatgccgatttagcagacaatgtgtggtcgataaggacaaaaggaaccagtgccggtactgtcgcctcaagaagtgcttcagagctggtatgaaaaaggaagcagtgcagaatgagagggatcggattagtacccgccgagccgcttatgaagactccgccctgccgtctataaacgcgcttctgcaggcagaggttttgagcagacaaatcgccgctcccgtgtccgggattaatggagatatcagggccaaaaagattgcatcaatcgctgacgtctgtgagagtatgaaagaacagctcctggtgctggtagagtgggccaagtacatacctgcgttttgcgaactcccattagatgaccaggttgccctgcttcgggcacacgctggcgagcatttgctgctaggcgccacaaagcgtagcatggtgttcaaagacgtcctcctgcttgggaacgattatatcgtgccccgccactgtcctgagctggctgaaatgtctagagtgtccattaggatcttggacgagctcgtcctgccatttcaggaattacaaattgatgacaatgagtacgcctacctgaaggcaatcatattctttgatcccgacgccaaaggactctcagatcctggtaagattaaacggcttcgagctcaggttcaggtgagcctggaagactatatcaacgatcgccagtacgacagtagaggcaggttcggggagttgctactgctcctgccaacccttcaatctattacttggcagatgatcgagcagatccaatttattaagctgttcggaatggcgaaaatagataatttgctccaggaaatgctgttaggcggtgcaccgtccgacgctccccatgcccaccaccctctgcatccacacctaatgcaggagcatatggggacaaacgtaatcgtggccaataccatgcccacgcacctcagcaacggacagatgtgcgaatggcctcggccacgcggccaagcagccgctcccgaggccccgcagcctgcacccccaggcgggtcgggatctgaaccttataagctgcttcccggtgcggtcgctactattgtgagaccattgtccgccatcccccagcctaccataacaaagcaggaggttatttgaggactagttataagactgactagcccgatgggcctcccaacgggccctcctcccctccttgcaccgagattaataaaaaaaaaaaaaaaaaaaaaaaaaaaaaaaaaaaaaaaaaaaaaaaaaaaaaaaaaaaaaaaatgcatcccccccccccccccccccccccccccccccaaaggctcttttcagagccaccagaatt

SEQ ID NO: 1761 - RNA, 1642 nt, synthetic construct
  misc_feature 1..1642: note = mRNA i-3 (A64-N5-C30-hSL-N5) (opt3) from Homo sapiens__NP_000448.3__HNF4A(1-474)(S87A_S142A_S143A_S148A_T 166A_S167A_S313A_S378A_T429A_T432A_S436A_K458R)
  source 1..1642: mol_type = other RNA
aggagaaagcttaccatgagactgagcaagaccctcgtggacatggatatggccgactactccgctgcacttgatcccgcctatacaactctggagttcgaaaacgtccaggttttgacgatgggcaatgacacctctccttcagaggggacaaacttaaatgcgccaaacagtctgggagtgagcgctctatgcgccatctgtggtgatagggcaactggcaaacactacggggcctcctcttgcgacggatgtaagggctttttccggcgcgctgtacgtaaaaatcatatgtattcgtgccgattttcaagacaatgtgtggtcgataaggacaaaaggaaccagtgccggtactgtcgcctcaagaagtgcttcagagcaggtatgaaaaaggaagccgtgcagaatgagagggatcggattagcacccgccgagctgcctatgaagacagtgcgctgccgtccataaacgcacttctgcaggccgaggttttgtctagacaaatcgctgcccccgtgagcgggattaatggagatatcagggctaaaaagattgcatccatcgccgacgtctgtgagtcaatgaaagaacagctcctggtgctggtagagtgggcgaagtacatacctgccttttgcgaactcccattagatgaccaggttgcactgcttcgggctcacgccggcgagcatttgctgctaggcgctacaaagcgtagtatggtgttcaaagacgtcctcctgcttgggaacgattatatcgtgccccgccactgtcctgagctggccgaaatgagcagagtgtctattaggatcttggacgagctcgtcctgccatttcaggaattacaaattgatgacaatgagtacgcatacctgaaggccatcatattctttgatcccgacgctaaaggactctccgatcctggtaagattaaacggcttcgagcgcaggttcaggtgtcactggaagactatatcaacgatcgccagtacgacagcagaggcaggttcggggagttgctactgctcctgccaacccttcaaagtattacttggcagatgatcgagcagatccaatttattaagctgttcggaatggcaaaaatagataatttgctccaggaaatgctgttaggcggtgccccgtctgacgctccccatgcccaccaccctctgcatccacacctaatgcaggagcatatggggacaaacgtaatcgtggcaaataccatgcccacgcacctctccaacggacagatgtgcgaatggcctcggccacgcggccaagccgctgcccccgaggcaccgcagcctgcgcccccaggcgggagcggatcggaaccttataagctgcttcccggtgctgtcgccactattgtgagaccattgtctgcaatcccccagcctaccataacaaagcaggaggttatttgaggactagttataagactgactagcccgatgggcctcccaacgggccctcctcccctccttgcaccgagattaataaaaaaaaaaaaaaaaaaaaaaaaaaaaaaaaaaaaaaaaaaaaaaaaaaaaaaaaaaaaaaaatgcatcccccccccccccccccccccccccccccccaaaggctcttttcagagccaccagaatt

SEQ ID NO: 1762 - RNA, 1642 nt, synthetic construct
  misc_feature 1..1642: note = mRNA i-3 (A64-N5-C30-hSL-N5) (opt3) from Homo sapiens__NP_000448.3__HNF4A(1-474)(S87A_K106R_K108R_K126R_K 127R_S142A_S143A_S148A_T166A_S167A_S313A_S378A_T429A_T432A_ S436A_K458R)
  source 1..1642: mol_type = other RNA
aggagaaagcttaccatgagactgagcaagaccctcgtggacatggatatggccgactactccgctgcacttgatcccgcctatacaactctggagttcgaaaacgtccaggttttgacgatgggcaatgacacctctccttcagaggggacaaacttaaatgcgccaaacagtctgggagtgagcgctctatgcgccatctgtggtgatagggcaactggcaaacactacggggcctcctcttgcgacggatgtaagggctttttccggcgcgctgtacgtaaaaatcatatgtattcgtgccgattttcaagacaatgtgtggtcgatagggaccggcgcaaccagtgcagatactgtaggctcaagaaatgcttccgggcaggtatgcgccgagaagccgtgcagaatgagagagataggattagcacccggcgtgctgcctatgaagacagtgcgctgccgtccataaacgcacttctgcaggccgaggttttgtctcgccaaatcgctgcccccgtgagcgggattaatggagatatcagagcaaagaagattgcttccatcgccgacgtctgtgagtcaatgaaagaacagctcctggtgctggtagagtgggcgaagtacatacctgccttttgcgaactcccattagatgaccaggttgcactgcttagggctcacgccggcgagcatttgctgctaggcgctacaaaacggagtatggtgttcaaggacgtcctcctgcttgggaacgattatatcgtgccccgacactgtcctgagctggccgaaatgagccgcgtgtctattagaatcttggacgagctcgtcctgccatttcaggaattacaaattgatgacaatgagtacgcatacctgaaagccatcatattctttgatcccgacgctaagggactctccgatcctggtaagattaaaaggcttcgggcgcaggttcaggtgtcactggaagactatatcaacgatcgccagtacgacagcagaggcaggttcggggagttgctactgctcctgccaacccttcaaagtattacttggcagatgatcgagcagatccaatttattaagctgttcggaatggcaaaaatagataatttgctccaggaaatgctgttaggcggtgccccgtctgacgctccccatgcccaccaccctctgcatccacacctaatgcaggagcatatggggacaaacgtaatcgtggcaaataccatgcccacgcacctctccaacggacagatgtgcgaatggcctcgtccacggggccaagccgctgcccccgaggcaccgcagcctgcgcccccaggcgggagcggatcggaaccttataagctgcttcccggtgctgtcgccactattgtgcgaccattgtctgcaatcccccagcctaccataacaaaacaggaggttatttgaggactagttataagactgactagcccgatgggcctcccaacgggccctcctcccctccttgcaccgagattaataaaaaaaaaaaaaaaaaaaaaaaaaaaaaaaaaaaaaaaaaaaaaaaaaaaaaaaaaaaaaaaatgcatcccccccccccccccccccccccccccccccaaaggctcttttcagagccaccagaatt

SEQ ID NO: 1763 - RNA, 1642 nt, synthetic construct
  misc_feature 1..1642: note = mRNA i-3 (A64-N5-C30-hSL-N5) (opt3) from Homo sapiens__NP_000448.3__HNF4A(1-474)(S87A_K106R_K108R_K126R_K 127R)
  source 1..1642: mol_type = other RNA
aggagaaagcttaccatgagactgagcaagaccctcgtggacatggatatggccgactactccgctgcacttgatcccgcctatacaactctggagttcgaaaacgtccaggttttgacgatgggcaatgacacctctccttcagaggggacaaacttaaatgcgccaaacagtctgggagtgagcgctctatgcgccatctgtggtgatagggcaactggcaaacactacggggcctcctcttgcgacggatgtaagggctttttccggcgcgctgtacgtaaaaatcatatgtattcgtgccgattttcaagacaatgtgtggtcgatagggaccggcgcaaccagtgcagatactgtaggctcaagaaatgcttccgggcaggtatgcgccgagaagccgtgcagaatgagagagataggattagcacccggcgtagttcctatgaagactctagcctgccgtccataaacgcccttctgcaggccgaggttttgtcacgccaaatcacaagtcccgtgagcgggattaatggagatatcagagcgaagaagattgcatctatcgccgacgtctgtgagtccatgaaagaacagctcctggtgctggtagagtgggctaagtacatacctgccttttgcgaactcccattagatgaccaggttgcactgcttagggctcacgccggcgagcatttgctgctaggcgcgaccaaacggtcaatggtgttcaaggacgtcctcctgcttgggaacgattatatcgtgccccgacactgtcctgagctggccgaaatgagccgcgtgagtattagaatcttggacgagctcgtcctgccatttcaggaattacaaattgatgacaatgagtacgcatacctgaaagctatcatattctttgatcccgacgccaagggactctctgatcctggtaagattaaaaggcttcggtcccaggttcaggtgagcctggaagactatatcaacgatcgccagtacgactcgagaggcaggttcggggagttgctactgctcctgccaactcttcaatctattacatggcagatgatcgagcagatccaatttattaagctgttcggaatggctaaaatagataatttgctccaggaaatgctgttaggcggttccccgtcagacgctccccatgcacaccaccctctgcatccacacctaatgcaggagcatatggggaccaacgtaatcgtggccaatacgatgcccactcacctcagtaacggacagatgtgcgaatggcctcgtccacggggccaagctgcgacccccgagacaccgcagcctagcccacccggcgggtccggatctgaaccttataagctgcttcccggtgcagtcgccactattgtgaaaccattgagcgctatcccccagcctaccataacaaagcaggaggttatttgaggactagttataagactgactagcccgatgggcctcccaacgggccctcctcccctccttgcaccgagattaataaaaaaaaaaaaaaaaaaaaaaaaaaaaaaaaaaaaaaaaaaaaaaaaaaaaaaaaaaaaaaaatgcatcccccccccccccccccccccccccccccccaaaggctcttttcagagccaccagaatt

SEQ ID NO: 1764 - RNA, 1642 nt, synthetic construct
  misc_feature 1..1642: note = mRNA i-3 (A64-N5-C30-hSL-N5) (opt3) from Homo sapiens__NP_000448.3__HNF4A(1-474)(S87A_K106R_K108R_K126R_K 127R_S142A_S143A_S148A_T166A_S167A_S313A_S378A_T429A_T432A_ S436A_K458R_S461A)
  source 1..1642: mol_type = other RNA
aggagaaagcttaccatgagactgagcaagaccctcgtggacatggatatggccgactactccgctgcacttgatcccgcctatacaactctggagttcgaaaacgtccaggttttgacgatgggcaatgacacctctccttcagaggggacaaacttaaatgcgccaaacagtctgggagtgagcgctctatgcgccatctgtggtgatagggcaactggcaaacactacggggcctcctcttgcgacggatgtaagggctttttccggcgcgctgtacgtaaaaatcatatgtattcgtgccgattttcaagacaatgtgtggtcgatagggaccggcgcaaccagtgcagatactgtaggctcaagaaatgcttccgggcaggtatgcgccgagaagccgtgcagaatgagagagataggattagcacccggcgtgctgcctatgaagacagtgcgctgccgtccataaacgcacttctgcaggccgaggttttgtctcgccaaatcgctgcccccgtgagcgggattaatggagatatcagagcaaagaagattgcttccatcgccgacgtctgtgagtcaatgaaagaacagctcctggtgctggtagagtgggcgaagtacatacctgccttttgcgaactcccattagatgaccaggttgcactgcttagggctcacgccggcgagcatttgctgctaggcgctacaaaacggagtatggtgttcaaggacgtcctcctgcttgggaacgattatatcgtgccccgacactgtcctgagctggccgaaatgagccgcgtgtctattagaatcttggacgagctcgtcctgccatttcaggaattacaaattgatgacaatgagtacgcatacctgaaagccatcatattctttgatcccgacgctaagggactctccgatcctggtaagattaaaaggcttcgggcgcaggttcaggtgtcactggaagactatatcaacgatcgccagtacgacagcagaggcaggttcggggagttgctactgctcctgccaacccttcaaagtattacttggcagatgatcgagcagatccaatttattaagctgttcggaatggcaaaaatagataatttgctccaggaaatgctgttaggcggtgccccgtctgacgctccccatgcccaccaccctctgcatccacacctaatgcaggagcatatggggacaaacgtaatcgtggcaaataccatgcccacgcacctctccaacggacagatgtgcgaatggcctcgtccacggggccaagccgctgcccccgaggcaccgcagcctgcgcccccaggcgggagcggatcggaaccttataagctgcttcccggtgctgtcgccactattgtgcgaccattggcagccatcccccagcctaccataacaaaacaggaggttatttgaggactagttataagactgactagcccgatgggcctcccaacgggccctcctcccctccttgcaccgagattaataaaaaaaaaaaaaaaaaaaaaaaaaaaaaaaaaaaaaaaaaaaaaaaaaaaaaaaaaaaaaaaatgcatcccccccccccccccccccccccccccccccaaaggctcttttcagagccaccagaatt

SEQ ID NO: 1765 - RNA, 1642 nt, synthetic construct
  misc_feature 1..1642: note = mRNA i-3 (A64-N5-C30-hSL-N5) (opt3) from Homo sapiens__NP_000448.3__HNF4A(1-474)(S87A_K106R_K108R_K126R_K 127R_S142A_S143A_S148A_T166A_S167A_S313A_S378A_T429A_T432A_ S436A_K458R_S461E)
  source 1..1642: mol_type = other RNA
aggagaaagcttaccatgagactgagcaagaccctcgtggacatggatatggccgactactccgctgcacttgatcccgcctatacaactctggagttcgaaaacgtccaggttttgacgatgggcaatgacacctctccttcagaggggacaaacttaaatgcgccaaacagtctgggagtgagcgctctatgcgccatctgtggtgatagggcaactggcaaacactacggggcctcctcttgcgacggatgtaagggctttttccggcgcgctgtacgtaaaaatcatatgtattcgtgccgattttcaagacaatgtgtggtcgatagggaccggcgcaaccagtgcagatactgtaggctcaagaaatgcttccgggcaggtatgcgccgagaagccgtgcagaatgagagagataggattagcacccggcgtgctgcctatgaagacagtgcgctgccgtccataaacgcacttctgcaggccgaggttttgtctcgccaaatcgctgcccccgtgagcgggattaatggagatatcagagcaaagaagattgcttccatcgccgacgtctgtgagtcaatgaaagaacagctcctggtgctggtagagtgggcgaagtacatacctgccttttgcgaactcccattagatgaccaggttgcactgcttagggctcacgccggcgagcatttgctgctaggcgctacaaaacggagtatggtgttcaaggacgtcctcctgcttgggaacgattatatcgtgccccgacactgtcctgagctggccgaaatgagccgcgtgtctattagaatcttggacgagctcgtcctgccatttcaggaattacaaattgatgacaatgagtacgcatacctgaaagccatcatattctttgatcccgacgctaagggactctccgatcctggtaagattaaaaggcttcgggcgcaggttcaggtgtcactggaagactatatcaacgatcgccagtacgacagcagaggcaggttcggggagttgctactgctcctgccaacccttcaaagtattacttggcagatgatcgagcagatccaatttattaagctgttcggaatggcaaaaatagataatttgctccaggaaatgctgttaggcggtgccccgtctgacgctccccatgcccaccaccctctgcatccacacctaatgcaggagcatatggggacaaacgtaatcgtggcaaataccatgcccacgcacctctccaacggacagatgtgcgaatggcctcgtccacggggccaagccgctgcccccgaggcaccgcagcctgcgcccccaggcgggagcggatcggaaccttataagctgcttcccggtgctgtcgccactattgtgcgaccattggaggcaatcccccagcctaccataacaaaacaggaggttatttgaggactagttataagactgactagcccgatgggcctcccaacgggccctcctcccctccttgcaccgagattaataaaaaaaaaaaaaaaaaaaaaaaaaaaaaaaaaaaaaaaaaaaaaaaaaaaaaaaaaaaaaaaatgcatcccccccccccccccccccccccccccccccaaaggctcttttcagagccaccagaatt

SEQ ID NO: 1766 - RNA, 1642 nt, synthetic construct
  misc_feature 1..1642: note = mRNA i-3 (A64-N5-C30-hSL-N5) (opt3) from Homo sapiens__NP_000448.3__HNF4A(1-474)(S87A_K106R_K108R_K126R_K 127R_S142A_S143A_S148E_T166A_S167E_S313A_S378E_T429E_T432E_ S436E_K458R_S461E)
  source 1..1642: mol_type = other RNA
aggagaaagcttaccatgagactgagcaagaccctcgtggacatggatatggccgactactccgctgcacttgatcccgcctatacaactctggagttcgaaaacgtccaggttttgacgatgggcaatgacacctctccttcagaggggacaaacttaaatgcgccaaacagtctgggagtgagcgctctatgcgccatctgtggtgatagggcaactggcaaacactacggggcctcctcttgcgacggatgtaagggctttttccggcgcgctgtacgtaaaaatcatatgtattcgtgccgattttcaagacaatgtgtggtcgatagggaccggcgcaaccagtgcagatactgtaggctcaagaaatgcttccgggcaggtatgcgccgagaagccgtgcagaatgagagagataggattagcacccggcgtgctgcctatgaagacagtgagctgccgtccataaacgcgcttctgcaggcagaggttttgtctcgccaaatcgccgaacccgtgagcgggattaatggagatatcagagctaagaagattgcctccatcgcagacgtctgtgagtcaatgaaagaacagctcctggtgctggtagagtgggctaagtacatacctgccttttgcgagctcccattagatgaccaggttgcgctgcttagggcccacgcaggcgaacatttgctgctaggcgctacaaaacggagtatggtgttcaaggacgtcctcctgcttgggaacgattatatcgtgccccgacactgtcctgagctggccgaaatgagccgcgtgtctattagaatcttggacgagctcgtcctgccatttcaggaattacaaattgatgacaatgagtacgcttacctgaaagccatcatattctttgatcccgacgcaaagggactctccgatcctggtaagattaaaaggcttcgggcccaggttcaggtgtcactggaggactatatcaacgatcgccagtacgacagcagaggcaggttcggggaattgctactgctcctgccaacccttcaaagtattacttggcagatgatcgagcagatccaatttattaagctgttcggaatggctaaaatagataatttgctccaggaaatgctgttaggcggtgagccgtctgacgcgccccatgcacaccaccctctgcatccacacctaatgcaggaacatatggggacaaacgtaatcgtggccaataccatgcccacgcacctctccaacggacagatgtgcgagtggcctcgtccacggggccaagctgccgagcccgaggaaccgcagcctgaacccccaggcgggagcggatcggagccttataagctgcttcccggtgcagtcgccactattgtgcgaccattggaagctatcccccagcctaccataacaaaacaggaggttatttgaggactagttataagactgactagcccgatgggcctcccaacgggccctcctcccctccttgcaccgagattaataaaaaaaaaaaaaaaaaaaaaaaaaaaaaaaaaaaaaaaaaaaaaaaaaaaaaaaaaaaaaaaatgcatcccccccccccccccccccccccccccccccaaaggctcttttcagagccaccagaatt

SEQ ID NO: 1767 - RNA, 1642 nt, synthetic construct
  misc_feature 1..1642: note = mRNA i-3 (A64-N5-C30-hSL-N5) (opt3) from Homo sapiens__NP_000448.3__HNF4A(1-474)(S87A_K106R_K108R_K126R_K 127R_S142A_S143A_S148A_T166A_S167A_K179R_K180R_S313A_S378A_ T429A_T432A_S436A_K458R_S461E)
  source 1..1642: mol_type = other RNA
aggagaaagcttaccatgagactgagcaagaccctcgtggacatggatatggccgactactccgctgcacttgatcccgcctatacaactctggagttcgaaaacgtccaggttttgacgatgggcaatgacacctctccttcagaggggacaaacttaaatgcgccaaacagtctgggagtgagcgctctatgcgccatctgtggtgatagggcaactggcaaacactacggggcctcctcttgcgacggatgtaagggctttttccggcgcgctgtacgtaaaaatcatatgtattcgtgccgattttcaagacaatgtgtggtcgatagggaccggcgcaaccagtgcagatactgtaggctcaagaaatgcttccgggcaggtatgcgccgagaagccgtgcagaatgagagagataggattagcacccggcgtgctgcctatgaagacagtgcgctgccgtccataaacgcacttctgcaggccgaggttttgtctcgccaaatcgctgcccccgtgagcgggattaatggagatatcagagcaaggcggattgcttccatcgccgacgtctgtgagtcaatgaaggaacagctcctggtgctggtagagtgggcgaagtacatacctgccttttgcgaactcccattagatgaccaggttgcactgcttcgagctcacgccggcgagcatttgctgctaggcgctacaaaacgcagtatggtgttcaaggacgtcctcctgcttgggaacgattatatcgtgcccagacactgtcctgagctggccgaaatgagcagggtgtctattcggatcttggacgagctcgtcctgccatttcaggaattacaaattgatgacaatgagtacgcatacctgaaagccatcatattctttgatcccgacgctaagggactctccgatcctggtaaaattaagcgccttagagcgcaggttcaggtgtcactggaagactatatcaacgataggcagtacgacagccgtggccggttcggggagttgctactgctcctgccaacccttcaaagtattacttggcagatgatcgagcagatccaatttattaagctgttcggaatggcaaaaatagataatttgctccaggaaatgctgttaggcggtgccccgtctgacgctccccatgcccaccaccctctgcatccacacctaatgcaggagcatatggggacaaacgtaatcgtggcaaataccatgcccacgcacctctccaacggacagatgtgcgaatggcctcgaccaagaggccaagccgctgcccccgaggcaccgcagcctgcgcccccaggcgggagcggatcggaaccttataagctgcttcccggtgctgtcgccactattgtgaggccattggaggcaatcccccagcctaccataacaaaacaggaggttatttgaggactagttataagactgactagcccgatgggcctcccaacgggccctcctcccctccttgcaccgagattaataaaaaaaaaaaaaaaaaaaaaaaaaaaaaaaaaaaaaaaaaaaaaaaaaaaaaaaaaaaaaaaatgcatcccccccccccccccccccccccccccccccaaaggctcttttcagagccaccagaatt

SEQ ID NO: 1768 - RNA, 1642 nt, synthetic construct
  misc_feature 1..1642: note = mRNA i-3 (A64-N5-C30-hSL-N5) (opt3) from Homo sapiens__NP_000448.3__HNF4A(1-474)(S87A_K106R_K108R_K126R_K 127R_S142A_S143A_S148A_T166A_S167A_K300R_K307R_K309R_S313A_ S378A_T429A_T432A_S436A_K458R_S461E)
  source 1..1642: mol_type = other RNA
aggagaaagcttaccatgagactgagcaagaccctcgtggacatggatatggccgactactccgctgcacttgatcccgcctatacaactctggagttcgaaaacgtccaggttttgacgatgggcaatgacacctctccttcagaggggacaaacttaaatgcgccaaacagtctgggagtgagcgctctatgcgccatctgtggtgatagggcaactggcaaacactacggggcctcctcttgcgacggatgtaagggctttttccggcgcgctgtacgtaaaaatcatatgtattcgtgccgattttcaagacaatgtgtggtcgatagggaccggcgcaaccagtgcagatactgtaggctcaagaaatgcttccgggcaggtatgcgccgagaagccgtgcagaatgagagagataggattagcacccggcgtgctgcctatgaagacagtgcgctgccgtccataaacgcacttctgcaggccgaggttttgtctcgccaaatcgctgcccccgtgagcgggattaatggagatatcagagcaaagaagattgcttccatcgccgacgtctgtgagtcaatgaaagaacagctcctggtgctggtagagtgggcgaagtacatacctgccttttgcgaactcccattagatgaccaggttgcactgcttagggctcacgccggcgagcatttgctgctaggcgctacaaaacggagtatggtgttcaaggacgtcctcctgcttgggaacgattatatcgtgccccgacactgtcctgagctggccgaaatgagccgcgtgtctattagaatcttggacgagctcgtcctgccatttcaggaattacaaattgatgacaatgagtacgcatacctgaaagccatcatattctttgatcccgacgctaggggactctccgatcctggtcggattcgcagacttagggcgcaggttcaggtgtcactggaagactatatcaacgatcgtcagtacgacagccggggccgattcggggagttgctactgctcctgccaacccttcaaagtattacttggcagatgatcgagcagatccaatttattaagctgttcggaatggcaaagatagataatttgctccaggaaatgctgttaggcggtgccccgtctgacgctccccatgcccaccaccctctgcatccacacctaatgcaggagcatatggggacaaacgtaatcgtggcaaataccatgcccacgcacctctccaacggacagatgtgcgaatggcctagaccaaggggccaagccgctgcccccgaggcaccgcagcctgcgcccccaggcgggagcggatcggaaccttataaactgcttcccggtgctgtcgccactattgtgcgcccattggaggcaatcccccagcctaccataacaaagcaggaggttatttgaggactagttataagactgactagcccgatgggcctcccaacgggccctcctcccctccttgcaccgagattaataaaaaaaaaaaaaaaaaaaaaaaaaaaaaaaaaaaaaaaaaaaaaaaaaaaaaaaaaaaaaaaatgcatcccccccccccccccccccccccccccccccaaaggctcttttcagagccaccagaatt

SEQ ID NO: 1769 - RNA, 1642 nt, synthetic construct
  misc_feature 1..1642: note = mRNA i-3 (A64-N5-C30-hSL-N5) (opt3) from Homo sapiens__NP_000448.3__HNF4A(1-474)(S87A_K106R_K108R_K126R_K 127R_S142A_S143A_S148A_T166A_S167A_S313A_S378A_T429A_T432A_ S436A_K447R_K458R_S461E_K470R)
  source 1..1642: mol_type = other RNA
aggagaaagcttaccatgagactgagcaagaccctcgtggacatggatatggccgactactccgctgcacttgatcccgcctatacaactctggagttcgaaaacgtccaggttttgacgatgggcaatgacacctctccttcagaggggacaaacttaaatgcgccaaacagtctgggagtgagcgctctatgcgccatctgtggtgatagggcaactggcaaacactacggggcctcctcttgcgacggatgtaagggctttttccggcgcgctgtacgtaaaaatcatatgtattcgtgccgattttcaagacaatgtgtggtcgatagggaccggcgcaaccagtgcagatactgtaggctcaagaaatgcttccgggcaggtatgcgccgagaagccgtgcagaatgagagagataggattagcacccggcgtgctgcctatgaagacagtgcgctgccgtccataaacgcacttctgcaggccgaggttttgtctcgccaaatcgctgcccccgtgagcgggattaatggagatatcagagcaaagaagattgcttccatcgccgacgtctgtgagtcaatgaaagaacagctcctggtgctggtagagtgggcgaagtacatacctgccttttgcgaactcccattagatgaccaggttgcactgcttagggctcacgccggcgagcatttgctgctaggcgctacaaaacggagtatggtgttcaaggacgtcctcctgcttgggaacgattatatcgtgccccgacactgtcctgagctggccgaaatgagccgcgtgtctattagaatcttggacgagctcgtcctgccatttcaggaattacaaattgatgacaatgagtacgcatacctgaaagccatcatattctttgatcccgacgctaagggactctccgatcctggtaagattaaaaggcttcgggcgcaggttcaggtgtcactggaagactatatcaacgatcgccagtacgacagcagaggcaggttcggggagttgctactgctcctgccaacccttcaaagtattacttggcagatgatcgagcagatccaatttattaagctgttcggaatggcaaaaatagataatttgctccaggaaatgctgttaggcggtgccccgtctgacgctccccatgcccaccaccctctgcatccacacctaatgcaggagcatatggggacaaacgtaatcgtggcaaataccatgcccacgcacctctccaacggacagatgtgcgaatggcctcgtccacggggccaagccgctgcccccgaggcaccgcagcctgcgcccccaggcgggagcggatcggaaccttatcgactgcttcccggtgctgtcgccactattgtgagaccattggaggcaatcccccagcctaccataacaaggcaggaggttatttgaggactagttataagactgactagcccgatgggcctcccaacgggccctcctcccctccttgcaccgagattaataaaaaaaaaaaaaaaaaaaaaaaaaaaaaaaaaaaaaaaaaaaaaaaaaaaaaaaaaaaaaaaatgcatcccccccccccccccccccccccccccccccaaaggctcttttcagagccaccagaatt

SEQ ID NO: 1770 - RNA, 1642 nt, synthetic construct
  misc_feature 1..1642: note = mRNA i-3 (A64-N5-C30-hSL-N5) (opt3) from Homo sapiens__NP_000448.3__HNF4A(1-474)(S87A_K106R_K108R_K126R_K 127R_S142A_S143A_S148A_T166A_S167A_K179R_K180R_K234R_K300R_ K307R_K309R_S313A_S378A_T429A_T432A_S436A_K447R_K458R_S461E _K470R)
  source 1..1642: mol_type = other RNA
aggagaaagcttaccatgagactgagcaagaccctcgtggacatggatatggccgactactccgctgcacttgatcccgcctatacaactctggagttcgaaaacgtccaggttttgacgatgggcaatgacacctctccttcagaggggacaaacttaaatgcgccaaacagtctgggagtgagcgctctatgcgccatctgtggtgatagggcaactggcaaacactacggggcctcctcttgcgacggatgtaagggctttttccggcgcgctgtacgtaaaaatcatatgtattcgtgccgattttcaagacaatgtgtggtcgatagggaccggcgcaaccagtgcagatactgtaggctcaagaaatgcttccgggcaggtatgcgccgagaagccgtgcagaatgagagagataggattagcacccggcgtgctgcctatgaagacagtgcgctgccgtccataaacgcacttctgcaggccgaggttttgtctcgccaaatcgctgcccccgtgagcgggattaatggagatatcagagcaaggcggattgcttccatcgccgacgtctgtgagtcaatgaaggaacagctcctggtgctggtagagtgggcgaagtacatacctgccttttgcgaactcccattagatgaccaggttgcactgcttcgagctcacgccggcgagcatttgctgctaggcgctacacgcagaagtatggtgttcaaagacgtcctcctgcttgggaacgattatatcgtgcccaggcactgtcctgagctggccgaaatgagccgggtgtctattcgcatcttggacgagctcgtcctgccatttcaggaattacaaattgatgacaatgagtacgcatacctgaaggccatcatattctttgatcccgacgctagaggactctccgatcctggtaggattcgtcggcttcgagcgcaggttcaggtgtcactggaagactatatcaacgatagacagtacgacagcaggggccgcttcggggagttgctactgctcctgccaacccttcaaagtattacttggcagatgatcgagcagatccaatttattaaactgttcggaatggcaaagatagataatttgctccaggaaatgctgttaggcggtgccccgtctgacgctccccatgcccaccaccctctgcatccacacctaatgcaggagcatatggggacaaacgtaatcgtggcaaataccatgcccacgcacctctccaacggacagatgtgcgaatggcctcggccaagaggccaagccgctgcccccgaggcaccgcagcctgcgcccccaggcgggagcggatcggaaccttataggctgcttcccggtgctgtcgccactattgtgcgcccattggaggcaatcccccagcctaccataacacgacaggaggttatttgaggactagttataagactgactagcccgatgggcctcccaacgggccctcctcccctccttgcaccgagattaataaaaaaaaaaaaaaaaaaaaaaaaaaaaaaaaaaaaaaaaaaaaaaaaaaaaaaaaaaaaaaaatgcatcccccccccccccccccccccccccccccccaaaggctcttttcagagccaccagaatt

SEQ ID NO: 1771 - RNA, 1642 nt, synthetic construct
  misc_feature 1..1642: note = mRNA i-3 (A64-N5-C30-hSL-N5) (opt3) from Homo sapiens__NP_000448.3__HNF4A(1-474)(S87A_S95A_S99A_K106R_K10 8R_K126R_K127R_S142A_S143A_S148A_T166A_S167A_S313A_S378A_T4 29A_T432A_S436A_K458R_S461E)
  source 1..1642: mol_type = other RNA
aggagaaagcttaccatgagactgagcaagaccctcgtggacatggatatggccgactactccgctgcacttgatcccgcctatacaactctggagttcgaaaacgtccaggttttgacgatgggcaatgacacctctccttcagaggggacaaacttaaatgcgccaaacagtctgggagtgagcgctctatgcgccatctgtggtgatagggcaactggcaaacactacggggcctcctcttgcgacggatgtaagggctttttccggcgcgctgtacgtaaaaatcatatgtatgcatgccgatttgccagacaatgtgtggtcgatagggaccggcgcaaccagtgcagatactgtaggctcaagaaatgcttccgggctggtatgcgccgagaagccgtgcagaatgagagagataggatttcgacccggcgtgcggcatatgaagactcagccctgccgagcataaacgcccttctgcaggccgaggttttgagtcgccaaatcgcagctcccgtgtccgggattaatggagatatcagagccaagaagattgcgtctatcgccgacgtctgtgagagcatgaaagaacagctcctggtgctggtagagtgggcaaagtacatacctgctttttgcgaactcccattagatgaccaggttgccctgcttagggctcacgccggcgagcatttgctgctaggcgcaacaaaacggtccatggtgttcaaggacgtcctcctgcttgggaacgattatatcgtgccccgacactgtcctgagctggccgaaatgtcacgcgtgagtattagaatcttggacgagctcgtcctgccatttcaggaattacaaattgatgacaatgagtacgcttacctgaaagcgatcatattctttgatcccgacgcaaagggactcagcgatcctggtaagattaaaaggcttcgggcccaggttcaggtgtctctggaagactatatcaacgatcgccagtacgactccagaggcaggttcggggagttgctactgctcctgccaacccttcaatcaattacttggcagatgatcgagcagatccaatttattaagctgttcggaatggctaaaatagataatttgctccaggaaatgctgttaggcggtgccccgagcgacgcaccccatgcccaccaccctctgcatccacacctaatgcaggagcatatggggacaaacgtaatcgtggctaataccatgcccacgcacctcagtaacggacagatgtgcgaatggcctcgtccacggggccaagccgcagcgcccgaggctccgcagcctgctcccccaggcgggtctggatccgaaccttataagctgcttcccggtgcagtcgccactattgtgcgaccattggaggctatcccccagcctaccataacaaaacaggaggttatttgaggactagttataagactgactagcccgatgggcctcccaacgggccctcctcccctccttgcaccgagattaataaaaaaaaaaaaaaaaaaaaaaaaaaaaaaaaaaaaaaaaaaaaaaaaaaaaaaaaaaaaaaaatgcatcccccccccccccccccccccccccccccccaaaggctcttttcagagccaccagaatt

SEQ ID NO: 1772 - RNA, 1642 nt, synthetic construct
  misc_feature 1..1642: note = mRNA i-3 (A64-N5-C30-hSL-N5) (opt3) from Homo sapiens__NP_000448.3__HNF4A(1-474)(S87A_K106R_K108R_K126R_K 127R_S138A_T139A_S142A_S143A_S148A_T166A_S167A_S313A_S378A_ T429A_T432A_S436A_K458R_S461E)
  source 1..1642: mol_type = other RNA
aggagaaagcttaccatgagactgagcaagaccctcgtggacatggatatggccgactactccgctgcacttgatcccgcctatacaactctggagttcgaaaacgtccaggttttgacgatgggcaatgacacctctccttcagaggggacaaacttaaatgcgccaaacagtctgggagtgagcgctctatgcgccatctgtggtgatagggcaactggcaaacactacggggcctcctcttgcgacggatgtaagggctttttccggcgcgctgtacgtaaaaatcatatgtattcgtgccgattttcaagacaatgtgtggtcgatagggaccggcgcaaccagtgcagatactgtaggctcaagaaatgcttccgggcaggtatgcgccgagaagccgtgcagaatgagagagataggattgctgcccggcgtgcggcatatgaagacagcgccctgccgagtataaacgcccttctgcaggccgaggttttgtcccgccaaatcgcagctcccgtgtctgggattaatggagatatcagagccaagaagattgcgagcatcgccgacgtctgtgagtccatgaaagaacagctcctggtgctggtagagtgggcaaagtacatacctgctttttgcgaactcccattagatgaccaggttgccctgcttagggctcacgccggcgagcatttgctgctaggcgcaaccaaacggtcaatggtgttcaaggacgtcctcctgcttgggaacgattatatcgtgccccgacactgtcctgagctggccgaaatgagtcgcgtgagcattagaatcttggacgagctcgtcctgccatttcaggaattacaaattgatgacaatgagtacgcttacctgaaagcgatcatattctttgatcccgacgcaaagggactctctgatcctggtaagattaaaaggcttcgggcccaggttcaggtgtccctggaagactatatcaacgatcgccagtacgactcaagaggcaggttcggggagttgctactgctcctgccaacacttcaaagcattacctggcagatgatcgagcagatccaatttattaagctgttcggaatggctaaaatagataatttgctccaggaaatgctgttaggcggtgccccgagtgacgcaccccatgcccaccaccctctgcatccacacctaatgcaggagcatatggggactaacgtaatcgtggctaatacaatgcccacccacctctctaacggacagatgtgcgaatggcctcgtccacggggccaagccgcagcgcccgaggctccgcagcctgctcccccaggcgggtccggaagcgaaccttataagctgcttcccggtgcagtcgccacgattgtgcgaccattggaggctatcccccagcctactataaccaaacaggaggttatttgaggactagttataagactgactagcccgatgggcctcccaacgggccctcctcccctccttgcaccgagattaataaaaaaaaaaaaaaaaaaaaaaaaaaaaaaaaaaaaaaaaaaaaaaaaaaaaaaaaaaaaaaaatgcatcccccccccccccccccccccccccccccccaaaggctcttttcagagccaccagaatt

SEQ ID NO: 1773 - RNA, 1642 nt, synthetic construct
  misc_feature 1..1642: note = mRNA i-3 (A64-N5-C30-hSL-N5) (opt3) from Homo sapiens__NP_000448.3__HNF4A(1-474)(S87A_S95A_S99A_K106R_K10 8R_K126R_K127R_S138A_T139A_S142A_S143A_S148A_T166A_S167A_S3 13A_S378A_T429A_T432A_S436A_K458R_S461E)
  source 1..1642: mol_type = other RNA
aggagaaagcttaccatgagactgagcaagaccctcgtggacatggatatggccgactactccgctgcacttgatcccgcctatacaactctggagttcgaaaacgtccaggttttgacgatgggcaatgacacctctccttcagaggggacaaacttaaatgcgccaaacagtctgggagtgagcgctctatgcgccatctgtggtgatagggcaactggcaaacactacggggcctcctcttgcgacggatgtaagggctttttccggcgcgctgtacgtaaaaatcatatgtatgcatgccgatttgccagacaatgtgtggtcgatagggaccggcgcaaccagtgcagatactgtaggctcaagaaatgcttccgggctggtatgcgccgagaagccgtgcagaatgagagagataggattgcggcacggcgtgccgcttatgaagactcggccctgccgtcaataaacgcacttctgcaggctgaggttttgagccgccaaatcgccgcgcccgtgagtgggattaatggagatatcagagccaagaagattgcatccatcgctgacgtctgtgagtctatgaaagaacagctcctggtgctggtagagtgggccaagtacatacctgctttttgcgaactcccattagatgaccaggttgccctgcttagggcacacgccggcgagcatttgctgctaggcgctaccaaacggagcatggtgttcaaggacgtcctcctgcttgggaacgattatatcgtgccccgacactgtcctgagctggcggaaatgtcccgcgtgtcaattagaatcttggacgagctcgtcctgccatttcaggaattacaaattgatgacaatgagtacgcatacctgaaagccatcatattctttgatcccgacgctaagggactcagtgatcctggtaagattaaaaggcttcgggcccaggttcaggtgagcctggaagactatatcaacgatcgccagtacgactctagaggcaggttcggggagttgctactgctcctgccaacacttcaatccattacctggcagatgatcgagcagatccaatttattaagctgttcggaatggcaaaaatagataatttgctccaggaaatgctgttaggcggtgccccgtcagacgctccccatgcccaccaccctctgcatccacacctaatgcaggagcatatggggactaacgtaatcgtggcaaatacaatgcccacccacctcagcaacggacagatgtgcgaatggcctcgtccacggggccaagcggctgcccccgaggcaccgcagcctgctcccccaggcgggagtggatctgaaccttataagctgcttcccggtgccgtcgccacgattgtgcgaccattggaggcaatcccccagcctactataaccaaacaggaggttatttgaggactagttataagactgactagcccgatgggcctcccaacgggccctcctcccctccttgcaccgagattaataaaaaaaaaaaaaaaaaaaaaaaaaaaaaaaaaaaaaaaaaaaaaaaaaaaaaaaaaaaaaaaatgcatcccccccccccccccccccccccccccccccaaaggctcttttcagagccaccagaatt

SEQ ID NO: 1774 - RNA, 1642 nt, synthetic construct
  misc_feature 1..1642: note = mRNA i-3 (A64-N5-C30-hSL-N5) (opt4) from Homo sapiens__NP_000448.3__HNF4A(1-474)
  source 1..1642: mol_type = other RNA
aggagaaagcttaccatgagactgagcaagaccctggtggacatggacatggccgactacagcgccgccctggaccccgcctacaccaccctggagttcgagaacgtgcaggtgctgaccatgggcaacgacaccagccccagcgagggcaccaacctgaacgcccccaacagcctgggcgtgagcgccctgtgcgccatctgcggcgacagagccaccggcaagcactacggcgccagcagctgcgacggctgcaagggcttcttcagaagaagcgtgagaaagaaccacatgtacagctgcagattcagcagacagtgcgtggtggacaaggacaagagaaaccagtgcagatactgcagactgaagaagtgcttcagagccggcatgaagaaggaggccgtgcagaacgagagagacagaatcagcaccagaagaagcagctacgaggacagcagcctgcccagcatcaacgccctgctgcaggccgaggtgctgagcagacagatcaccagccccgtgagcggcatcaacggcgacatcagagccaagaagatcgccagcatcgccgacgtgtgcgagagcatgaaggagcagctgctggtgctggtggagtgggccaagtacatccccgccttctgcgagctgcccctggacgaccaggtggccctgctgagagcccacgccggcgagcacctgctgctgggcgccaccaagagaagcatggtgttcaaggacgtgctgctgctgggcaacgactacatcgtgcccagacactgccccgagctggccgagatgagcagagtgagcatcagaatcctggacgagctggtgctgcccttccaggagctgcagatcgacgacaacgagtacgcctacctgaaggccatcatcttcttcgaccccgacgccaagggcctgagcgaccccggcaagatcaagagactgagaagccaggtgcaggtgagcctggaggactacatcaacgacagacagtacgacagcagaggcagattcggcgagctgctgctgctgctgcccaccctgcagagcatcacctggcagatgatcgagcagatccagttcatcaagctgttcggcatggccaagatcgacaacctgctgcaggagatgctgctgggcggcagccccagcgacgccccccacgcccaccaccccctgcacccccacctgatgcaggagcacatgggcaccaacgtgatcgtggccaacaccatgcccacccacctgagcaacggccagatgtgcgagtggcccagacccagaggccaggccgccacccccgagaccccccagcccagcccccccggcggcagcggcagcgagccctacaagctgctgcccggcgccgtggccaccatcgtgaagcccctgagcgccatcccccagcccaccatcaccaagcaggaggtgatctgaggactagttataagactgactagcccgatgggcctcccaacgggccctcctcccctccttgcaccgagattaataaaaaaaaaaaaaaaaaaaaaaaaaaaaaaaaaaaaaaaaaaaaaaaaaaaaaaaaaaaaaaaatgcatcccccccccccccccccccccccccccccccaaaggctcttttcagagccaccagaatt

SEQ ID NO: 1775 - RNA, 1642 nt, synthetic construct
  misc_feature 1..1642: note = mRNA i-3 (A64-N5-C30-hSL-N5) (opt4) from Homo sapiens__NP_000448.3__HNF4A(1-474)(S313A)
  source 1..1642: mol_type = other RNA
aggagaaagcttaccatgagactgagcaagaccctggtggacatggacatggccgactacagcgccgccctggaccccgcctacaccaccctggagttcgagaacgtgcaggtgctgaccatgggcaacgacaccagccccagcgagggcaccaacctgaacgcccccaacagcctgggcgtgagcgccctgtgcgccatctgcggcgacagagccaccggcaagcactacggcgccagcagctgcgacggctgcaagggcttcttcagaagaagcgtgagaaagaaccacatgtacagctgcagattcagcagacagtgcgtggtggacaaggacaagagaaaccagtgcagatactgcagactgaagaagtgcttcagagccggcatgaagaaggaggccgtgcagaacgagagagacagaatcagcaccagaagaagcagctacgaggacagcagcctgcccagcatcaacgccctgctgcaggccgaggtgctgagcagacagatcaccagccccgtgagcggcatcaacggcgacatcagagccaagaagatcgccagcatcgccgacgtgtgcgagagcatgaaggagcagctgctggtgctggtggagtgggccaagtacatccccgccttctgcgagctgcccctggacgaccaggtggccctgctgagagcccacgccggcgagcacctgctgctgggcgccaccaagagaagcatggtgttcaaggacgtgctgctgctgggcaacgactacatcgtgcccagacactgccccgagctggccgagatgagcagagtgagcatcagaatcctggacgagctggtgctgcccttccaggagctgcagatcgacgacaacgagtacgcctacctgaaggccatcatcttcttcgaccccgacgccaagggcctgagcgaccccggcaagatcaagagactgagagcccaggtgcaggtgagcctggaggactacatcaacgacagacagtacgacagcagaggcagattcggcgagctgctgctgctgctgcccaccctgcagagcatcacctggcagatgatcgagcagatccagttcatcaagctgttcggcatggccaagatcgacaacctgctgcaggagatgctgctgggcggcagccccagcgacgccccccacgcccaccaccccctgcacccccacctgatgcaggagcacatgggcaccaacgtgatcgtggccaacaccatgcccacccacctgagcaacggccagatgtgcgagtggcccagacccagaggccaggccgccacccccgagaccccccagcccagcccccccggcggcagcggcagcgagccctacaagctgctgcccggcgccgtggccaccatcgtgaagcccctgagcgccatcccccagcccaccatcaccaagcaggaggtgatctgaggactagttataagactgactagcccgatgggcctcccaacgggccctcctcccctccttgcaccgagattaataaaaaaaaaaaaaaaaaaaaaaaaaaaaaaaaaaaaaaaaaaaaaaaaaaaaaaaaaaaaaaaatgcatcccccccccccccccccccccccccccccccaaaggctcttttcagagccaccagaatt

SEQ ID NO: 1776 - RNA, 1642 nt, synthetic construct
  misc_feature 1..1642: note = mRNA i-3 (A64-N5-C30-hSL-N5) (opt4) from Homo sapiens__NP_000448.3__HNF4A(1-474)(S313E)
  source 1..1642: mol_type = other RNA
aggagaaagcttaccatgagactgagcaagaccctggtggacatggacatggccgactacagcgccgccctggaccccgcctacaccaccctggagttcgagaacgtgcaggtgctgaccatgggcaacgacaccagccccagcgagggcaccaacctgaacgcccccaacagcctgggcgtgagcgccctgtgcgccatctgcggcgacagagccaccggcaagcactacggcgccagcagctgcgacggctgcaagggcttcttcagaagaagcgtgagaaagaaccacatgtacagctgcagattcagcagacagtgcgtggtggacaaggacaagagaaaccagtgcagatactgcagactgaagaagtgcttcagagccggcatgaagaaggaggccgtgcagaacgagagagacagaatcagcaccagaagaagcagctacgaggacagcagcctgcccagcatcaacgccctgctgcaggccgaggtgctgagcagacagatcaccagccccgtgagcggcatcaacggcgacatcagagccaagaagatcgccagcatcgccgacgtgtgcgagagcatgaaggagcagctgctggtgctggtggagtgggccaagtacatccccgccttctgcgagctgcccctggacgaccaggtggccctgctgagagcccacgccggcgagcacctgctgctgggcgccaccaagagaagcatggtgttcaaggacgtgctgctgctgggcaacgactacatcgtgcccagacactgccccgagctggccgagatgagcagagtgagcatcagaatcctggacgagctggtgctgcccttccaggagctgcagatcgacgacaacgagtacgcctacctgaaggccatcatcttcttcgaccccgacgccaagggcctgagcgaccccggcaagatcaagagactgagagagcaggtgcaggtgagcctggaggactacatcaacgacagacagtacgacagcagaggcagattcggcgagctgctgctgctgctgcccaccctgcagagcatcacctggcagatgatcgagcagatccagttcatcaagctgttcggcatggccaagatcgacaacctgctgcaggagatgctgctgggcggcagccccagcgacgccccccacgcccaccaccccctgcacccccacctgatgcaggagcacatgggcaccaacgtgatcgtggccaacaccatgcccacccacctgagcaacggccagatgtgcgagtggcccagacccagaggccaggccgccacccccgagaccccccagcccagcccccccggcggcagcggcagcgagccctacaagctgctgcccggcgccgtggccaccatcgtgaagcccctgagcgccatcccccagcccaccatcaccaagcaggaggtgatctgaggactagttataagactgactagcccgatgggcctcccaacgggccctcctcccctccttgcaccgagattaataaaaaaaaaaaaaaaaaaaaaaaaaaaaaaaaaaaaaaaaaaaaaaaaaaaaaaaaaaaaaaaatgcatcccccccccccccccccccccccccccccccaaaggctcttttcagagccaccagaatt

SEQ ID NO: 1777 - RNA, 1642 nt, synthetic construct
  misc_feature 1..1642: note = mRNA i-3 (A64-N5-C30-hSL-N5) (opt4) from Homo sapiens__NP_000448.3__HNF4A(1-474)(S142A_S143A)
  source 1..1642: mol_type = other RNA
aggagaaagcttaccatgagactgagcaagaccctggtggacatggacatggccgactacagcgccgccctggaccccgcctacaccaccctggagttcgagaacgtgcaggtgctgaccatgggcaacgacaccagccccagcgagggcaccaacctgaacgcccccaacagcctgggcgtgagcgccctgtgcgccatctgcggcgacagagccaccggcaagcactacggcgccagcagctgcgacggctgcaagggcttcttcagaagaagcgtgagaaagaaccacatgtacagctgcagattcagcagacagtgcgtggtggacaaggacaagagaaaccagtgcagatactgcagactgaagaagtgcttcagagccggcatgaagaaggaggccgtgcagaacgagagagacagaatcagcaccagaagagccgcctacgaggacagcagcctgcccagcatcaacgccctgctgcaggccgaggtgctgagcagacagatcaccagccccgtgagcggcatcaacggcgacatcagagccaagaagatcgccagcatcgccgacgtgtgcgagagcatgaaggagcagctgctggtgctggtggagtgggccaagtacatccccgccttctgcgagctgcccctggacgaccaggtggccctgctgagagcccacgccggcgagcacctgctgctgggcgccaccaagagaagcatggtgttcaaggacgtgctgctgctgggcaacgactacatcgtgcccagacactgccccgagctggccgagatgagcagagtgagcatcagaatcctggacgagctggtgctgcccttccaggagctgcagatcgacgacaacgagtacgcctacctgaaggccatcatcttcttcgaccccgacgccaagggcctgagcgaccccggcaagatcaagagactgagaagccaggtgcaggtgagcctggaggactacatcaacgacagacagtacgacagcagaggcagattcggcgagctgctgctgctgctgcccaccctgcagagcatcacctggcagatgatcgagcagatccagttcatcaagctgttcggcatggccaagatcgacaacctgctgcaggagatgctgctgggcggcagccccagcgacgccccccacgcccaccaccccctgcacccccacctgatgcaggagcacatgggcaccaacgtgatcgtggccaacaccatgcccacccacctgagcaacggccagatgtgcgagtggcccagacccagaggccaggccgccacccccgagaccccccagcccagcccccccggcggcagcggcagcgagccctacaagctgctgcccggcgccgtggccaccatcgtgaagcccctgagcgccatcccccagcccaccatcaccaagcaggaggtgatctgaggactagttataagactgactagcccgatgggcctcccaacgggccctcctcccctccttgcaccgagattaataaaaaaaaaaaaaaaaaaaaaaaaaaaaaaaaaaaaaaaaaaaaaaaaaaaaaaaaaaaaaaaatgcatcccccccccccccccccccccccccccccccaaaggctcttttcagagccaccagaatt

SEQ ID NO: 1778 - RNA, 1642 nt, synthetic construct
  misc_feature 1..1642: note = mRNA i-3 (A64-N5-C30-hSL-N5) (opt4) from Homo sapiens__NP_000448.3__HNF4A(1-474)(S142E_S143E)
  source 1..1642: mol_type = other RNA
aggagaaagcttaccatgagactgagcaagaccctggtggacatggacatggccgactacagcgccgccctggaccccgcctacaccaccctggagttcgagaacgtgcaggtgctgaccatgggcaacgacaccagccccagcgagggcaccaacctgaacgcccccaacagcctgggcgtgagcgccctgtgcgccatctgcggcgacagagccaccggcaagcactacggcgccagcagctgcgacggctgcaagggcttcttcagaagaagcgtgagaaagaaccacatgtacagctgcagattcagcagacagtgcgtggtggacaaggacaagagaaaccagtgcagatactgcagactgaagaagtgcttcagagccggcatgaagaaggaggccgtgcagaacgagagagacagaatcagcaccagaagagaggagtacgaggacagcagcctgcccagcatcaacgccctgctgcaggccgaggtgctgagcagacagatcaccagccccgtgagcggcatcaacggcgacatcagagccaagaagatcgccagcatcgccgacgtgtgcgagagcatgaaggagcagctgctggtgctggtggagtgggccaagtacatccccgccttctgcgagctgcccctggacgaccaggtggccctgctgagagcccacgccggcgagcacctgctgctgggcgccaccaagagaagcatggtgttcaaggacgtgctgctgctgggcaacgactacatcgtgcccagacactgccccgagctggccgagatgagcagagtgagcatcagaatcctggacgagctggtgctgcccttccaggagctgcagatcgacgacaacgagtacgcctacctgaaggccatcatcttcttcgaccccgacgccaagggcctgagcgaccccggcaagatcaagagactgagaagccaggtgcaggtgagcctggaggactacatcaacgacagacagtacgacagcagaggcagattcggcgagctgctgctgctgctgcccaccctgcagagcatcacctggcagatgatcgagcagatccagttcatcaagctgttcggcatggccaagatcgacaacctgctgcaggagatgctgctgggcggcagccccagcgacgccccccacgcccaccaccccctgcacccccacctgatgcaggagcacatgggcaccaacgtgatcgtggccaacaccatgcccacccacctgagcaacggccagatgtgcgagtggcccagacccagaggccaggccgccacccccgagaccccccagcccagcccccccggcggcagcggcagcgagccctacaagctgctgcccggcgccgtggccaccatcgtgaagcccctgagcgccatcccccagcccaccatcaccaagcaggaggtgatctgaggactagttataagactgactagcccgatgggcctcccaacgggccctcctcccctccttgcaccgagattaataaaaaaaaaaaaaaaaaaaaaaaaaaaaaaaaaaaaaaaaaaaaaaaaaaaaaaaaaaaaaaaatgcatcccccccccccccccccccccccccccccccaaaggctcttttcagagccaccagaatt

SEQ ID NO: 1779 - RNA, 1642 nt, synthetic construct
  misc_feature 1..1642: note = mRNA i-3 (A64-N5-C30-hSL-N5) (opt4) from Homo sapiens__NP_000448.3__HNF4A(1-474)(S143A)
  source 1..1642: mol_type = other RNA
aggagaaagcttaccatgagactgagcaagaccctggtggacatggacatggccgactacagcgccgccctggaccccgcctacaccaccctggagttcgagaacgtgcaggtgctgaccatgggcaacgacaccagccccagcgagggcaccaacctgaacgcccccaacagcctgggcgtgagcgccctgtgcgccatctgcggcgacagagccaccggcaagcactacggcgccagcagctgcgacggctgcaagggcttcttcagaagaagcgtgagaaagaaccacatgtacagctgcagattcagcagacagtgcgtggtggacaaggacaagagaaaccagtgcagatactgcagactgaagaagtgcttcagagccggcatgaagaaggaggccgtgcagaacgagagagacagaatcagcaccagaagaagcgcctacgaggacagcagcctgcccagcatcaacgccctgctgcaggccgaggtgctgagcagacagatcaccagccccgtgagcggcatcaacggcgacatcagagccaagaagatcgccagcatcgccgacgtgtgcgagagcatgaaggagcagctgctggtgctggtggagtgggccaagtacatccccgccttctgcgagctgcccctggacgaccaggtggccctgctgagagcccacgccggcgagcacctgctgctgggcgccaccaagagaagcatggtgttcaaggacgtgctgctgctgggcaacgactacatcgtgcccagacactgccccgagctggccgagatgagcagagtgagcatcagaatcctggacgagctggtgctgcccttccaggagctgcagatcgacgacaacgagtacgcctacctgaaggccatcatcttcttcgaccccgacgccaagggcctgagcgaccccggcaagatcaagagactgagaagccaggtgcaggtgagcctggaggactacatcaacgacagacagtacgacagcagaggcagattcggcgagctgctgctgctgctgcccaccctgcagagcatcacctggcagatgatcgagcagatccagttcatcaagctgttcggcatggccaagatcgacaacctgctgcaggagatgctgctgggcggcagccccagcgacgccccccacgcccaccaccccctgcacccccacctgatgcaggagcacatgggcaccaacgtgatcgtggccaacaccatgcccacccacctgagcaacggccagatgtgcgagtggcccagacccagaggccaggccgccacccccgagaccccccagcccagcccccccggcggcagcggcagcgagccctacaagctgctgcccggcgccgtggccaccatcgtgaagcccctgagcgccatcccccagcccaccatcaccaagcaggaggtgatctgaggactagttataagactgactagcccgatgggcctcccaacgggccctcctcccctccttgcaccgagattaataaaaaaaaaaaaaaaaaaaaaaaaaaaaaaaaaaaaaaaaaaaaaaaaaaaaaaaaaaaaaaaatgcatcccccccccccccccccccccccccccccccaaaggctcttttcagagccaccagaatt

SEQ ID NO: 1780 - RNA, 1642 nt, synthetic construct
  misc_feature 1..1642: note = mRNA i-3 (A64-N5-C30-hSL-N5) (opt4) from Homo sapiens__NP_000448.3__HNF4A(1-474)(T166A)
  source 1..1642: mol_type = other RNA
aggagaaagcttaccatgagactgagcaagaccctggtggacatggacatggccgactacagcgccgccctggaccccgcctacaccaccctggagttcgagaacgtgcaggtgctgaccatgggcaacgacaccagccccagcgagggcaccaacctgaacgcccccaacagcctgggcgtgagcgccctgtgcgccatctgcggcgacagagccaccggcaagcactacggcgccagcagctgcgacggctgcaagggcttcttcagaagaagcgtgagaaagaaccacatgtacagctgcagattcagcagacagtgcgtggtggacaaggacaagagaaaccagtgcagatactgcagactgaagaagtgcttcagagccggcatgaagaaggaggccgtgcagaacgagagagacagaatcagcaccagaagaagcagctacgaggacagcagcctgcccagcatcaacgccctgctgcaggccgaggtgctgagcagacagatcgccagccccgtgagcggcatcaacggcgacatcagagccaagaagatcgccagcatcgccgacgtgtgcgagagcatgaaggagcagctgctggtgctggtggagtgggccaagtacatccccgccttctgcgagctgcccctggacgaccaggtggccctgctgagagcccacgccggcgagcacctgctgctgggcgccaccaagagaagcatggtgttcaaggacgtgctgctgctgggcaacgactacatcgtgcccagacactgccccgagctggccgagatgagcagagtgagcatcagaatcctggacgagctggtgctgcccttccaggagctgcagatcgacgacaacgagtacgcctacctgaaggccatcatcttcttcgaccccgacgccaagggcctgagcgaccccggcaagatcaagagactgagaagccaggtgcaggtgagcctggaggactacatcaacgacagacagtacgacagcagaggcagattcggcgagctgctgctgctgctgcccaccctgcagagcatcacctggcagatgatcgagcagatccagttcatcaagctgttcggcatggccaagatcgacaacctgctgcaggagatgctgctgggcggcagccccagcgacgccccccacgcccaccaccccctgcacccccacctgatgcaggagcacatgggcaccaacgtgatcgtggccaacaccatgcccacccacctgagcaacggccagatgtgcgagtggcccagacccagaggccaggccgccacccccgagaccccccagcccagcccccccggcggcagcggcagcgagccctacaagctgctgcccggcgccgtggccaccatcgtgaagcccctgagcgccatcccccagcccaccatcaccaagcaggaggtgatctgaggactagttataagactgactagcccgatgggcctcccaacgggccctcctcccctccttgcaccgagattaataaaaaaaaaaaaaaaaaaaaaaaaaaaaaaaaaaaaaaaaaaaaaaaaaaaaaaaaaaaaaaaatgcatcccccccccccccccccccccccccccccccaaaggctcttttcagagccaccagaatt

SEQ ID NO: 1781 - RNA, 1642 nt, synthetic construct
  misc_feature 1..1642: note = mRNA i-3 (A64-N5-C30-hSL-N5) (opt4) from Homo sapiens__NP_000448.3__HNF4A(1-474)(S167E)
  source 1..1642: mol_type = other RNA
aggagaaagcttaccatgagactgagcaagaccctggtggacatggacatggccgactacagcgccgccctggaccccgcctacaccaccctggagttcgagaacgtgcaggtgctgaccatgggcaacgacaccagccccagcgagggcaccaacctgaacgcccccaacagcctgggcgtgagcgccctgtgcgccatctgcggcgacagagccaccggcaagcactacggcgccagcagctgcgacggctgcaagggcttcttcagaagaagcgtgagaaagaaccacatgtacagctgcagattcagcagacagtgcgtggtggacaaggacaagagaaaccagtgcagatactgcagactgaagaagtgcttcagagccggcatgaagaaggaggccgtgcagaacgagagagacagaatcagcaccagaagaagcagctacgaggacagcagcctgcccagcatcaacgccctgctgcaggccgaggtgctgagcagacagatcaccgagcccgtgagcggcatcaacggcgacatcagagccaagaagatcgccagcatcgccgacgtgtgcgagagcatgaaggagcagctgctggtgctggtggagtgggccaagtacatccccgccttctgcgagctgcccctggacgaccaggtggccctgctgagagcccacgccggcgagcacctgctgctgggcgccaccaagagaagcatggtgttcaaggacgtgctgctgctgggcaacgactacatcgtgcccagacactgccccgagctggccgagatgagcagagtgagcatcagaatcctggacgagctggtgctgcccttccaggagctgcagatcgacgacaacgagtacgcctacctgaaggccatcatcttcttcgaccccgacgccaagggcctgagcgaccccggcaagatcaagagactgagaagccaggtgcaggtgagcctggaggactacatcaacgacagacagtacgacagcagaggcagattcggcgagctgctgctgctgctgcccaccctgcagagcatcacctggcagatgatcgagcagatccagttcatcaagctgttcggcatggccaagatcgacaacctgctgcaggagatgctgctgggcggcagccccagcgacgccccccacgcccaccaccccctgcacccccacctgatgcaggagcacatgggcaccaacgtgatcgtggccaacaccatgcccacccacctgagcaacggccagatgtgcgagtggcccagacccagaggccaggccgccacccccgagaccccccagcccagcccccccggcggcagcggcagcgagccctacaagctgctgcccggcgccgtggccaccatcgtgaagcccctgagcgccatcccccagcccaccatcaccaagcaggaggtgatctgaggactagttataagactgactagcccgatgggcctcccaacgggccctcctcccctccttgcaccgagattaataaaaaaaaaaaaaaaaaaaaaaaaaaaaaaaaaaaaaaaaaaaaaaaaaaaaaaaaaaaaaaaatgcatcccccccccccccccccccccccccccccccaaaggctcttttcagagccaccagaatt

SEQ ID NO: 1782 - RNA, 1642 nt, synthetic construct
  misc_feature 1..1642: note = mRNA i-3 (A64-N5-C30-hSL-N5) (opt4) from Homo sapiens__NP_000448.3__HNF4A(1-474)(S167A)
  source 1..1642: mol_type = other RNA
aggagaaagcttaccatgagactgagcaagaccctggtggacatggacatggccgactacagcgccgccctggaccccgcctacaccaccctggagttcgagaacgtgcaggtgctgaccatgggcaacgacaccagccccagcgagggcaccaacctgaacgcccccaacagcctgggcgtgagcgccctgtgcgccatctgcggcgacagagccaccggcaagcactacggcgccagcagctgcgacggctgcaagggcttcttcagaagaagcgtgagaaagaaccacatgtacagctgcagattcagcagacagtgcgtggtggacaaggacaagagaaaccagtgcagatactgcagactgaagaagtgcttcagagccggcatgaagaaggaggccgtgcagaacgagagagacagaatcagcaccagaagaagcagctacgaggacagcagcctgcccagcatcaacgccctgctgcaggccgaggtgctgagcagacagatcaccgcccccgtgagcggcatcaacggcgacatcagagccaagaagatcgccagcatcgccgacgtgtgcgagagcatgaaggagcagctgctggtgctggtggagtgggccaagtacatccccgccttctgcgagctgcccctggacgaccaggtggccctgctgagagcccacgccggcgagcacctgctgctgggcgccaccaagagaagcatggtgttcaaggacgtgctgctgctgggcaacgactacatcgtgcccagacactgccccgagctggccgagatgagcagagtgagcatcagaatcctggacgagctggtgctgcccttccaggagctgcagatcgacgacaacgagtacgcctacctgaaggccatcatcttcttcgaccccgacgccaagggcctgagcgaccccggcaagatcaagagactgagaagccaggtgcaggtgagcctggaggactacatcaacgacagacagtacgacagcagaggcagattcggcgagctgctgctgctgctgcccaccctgcagagcatcacctggcagatgatcgagcagatccagttcatcaagctgttcggcatggccaagatcgacaacctgctgcaggagatgctgctgggcggcagccccagcgacgccccccacgcccaccaccccctgcacccccacctgatgcaggagcacatgggcaccaacgtgatcgtggccaacaccatgcccacccacctgagcaacggccagatgtgcgagtggcccagacccagaggccaggccgccacccccgagaccccccagcccagcccccccggcggcagcggcagcgagccctacaagctgctgcccggcgccgtggccaccatcgtgaagcccctgagcgccatcccccagcccaccatcaccaagcaggaggtgatctgaggactagttataagactgactagcccgatgggcctcccaacgggccctcctcccctccttgcaccgagattaataaaaaaaaaaaaaaaaaaaaaaaaaaaaaaaaaaaaaaaaaaaaaaaaaaaaaaaaaaaaaaaatgcatcccccccccccccccccccccccccccccccaaaggctcttttcagagccaccagaatt

SEQ ID NO: 1783 - RNA, 1642 nt, synthetic construct
  misc_feature 1..1642: note = mRNA i-3 (A64-N5-C30-hSL-N5) (opt4) from Homo sapiens__NP_000448.3__HNF4A(1-474)(S167A_S378A_T429A_T432A_ S436A)
  source 1..1642: mol_type = other RNA
aggagaaagcttaccatgagactgagcaagaccctggtggacatggacatggccgactacagcgccgccctggaccccgcctacaccaccctggagttcgagaacgtgcaggtgctgaccatgggcaacgacaccagccccagcgagggcaccaacctgaacgcccccaacagcctgggcgtgagcgccctgtgcgccatctgcggcgacagagccaccggcaagcactacggcgccagcagctgcgacggctgcaagggcttcttcagaagaagcgtgagaaagaaccacatgtacagctgcagattcagcagacagtgcgtggtggacaaggacaagagaaaccagtgcagatactgcagactgaagaagtgcttcagagccggcatgaagaaggaggccgtgcagaacgagagagacagaatcagcaccagaagaagcagctacgaggacagcagcctgcccagcatcaacgccctgctgcaggccgaggtgctgagcagacagatcaccgcccccgtgagcggcatcaacggcgacatcagagccaagaagatcgccagcatcgccgacgtgtgcgagagcatgaaggagcagctgctggtgctggtggagtgggccaagtacatccccgccttctgcgagctgcccctggacgaccaggtggccctgctgagagcccacgccggcgagcacctgctgctgggcgccaccaagagaagcatggtgttcaaggacgtgctgctgctgggcaacgactacatcgtgcccagacactgccccgagctggccgagatgagcagagtgagcatcagaatcctggacgagctggtgctgcccttccaggagctgcagatcgacgacaacgagtacgcctacctgaaggccatcatcttcttcgaccccgacgccaagggcctgagcgaccccggcaagatcaagagactgagaagccaggtgcaggtgagcctggaggactacatcaacgacagacagtacgacagcagaggcagattcggcgagctgctgctgctgctgcccaccctgcagagcatcacctggcagatgatcgagcagatccagttcatcaagctgttcggcatggccaagatcgacaacctgctgcaggagatgctgctgggcggcgcccccagcgacgccccccacgcccaccaccccctgcacccccacctgatgcaggagcacatgggcaccaacgtgatcgtggccaacaccatgcccacccacctgagcaacggccagatgtgcgagtggcccagacccagaggccaggccgccgcccccgaggccccccagcccgccccccccggcggcagcggcagcgagccctacaagctgctgcccggcgccgtggccaccatcgtgaagcccctgagcgccatcccccagcccaccatcaccaagcaggaggtgatctgaggactagttataagactgactagcccgatgggcctcccaacgggccctcctcccctccttgcaccgagattaataaaaaaaaaaaaaaaaaaaaaaaaaaaaaaaaaaaaaaaaaaaaaaaaaaaaaaaaaaaaaaaatgcatcccccccccccccccccccccccccccccccaaaggctcttttcagagccaccagaatt

SEQ ID NO: 1784 - RNA, 1642 nt, synthetic construct
  misc_feature 1..1642: note = mRNA i-3 (A64-N5-C30-hSL-N5) (opt4) from Homo sapiens__NP_000448.3__HNF4A(1-474)(S167E_S378E_T429E_T432E_ S436E)
  source 1..1642: mol_type = other RNA
aggagaaagcttaccatgagactgagcaagaccctggtggacatggacatggccgactacagcgccgccctggaccccgcctacaccaccctggagttcgagaacgtgcaggtgctgaccatgggcaacgacaccagccccagcgagggcaccaacctgaacgcccccaacagcctgggcgtgagcgccctgtgcgccatctgcggcgacagagccaccggcaagcactacggcgccagcagctgcgacggctgcaagggcttcttcagaagaagcgtgagaaagaaccacatgtacagctgcagattcagcagacagtgcgtggtggacaaggacaagagaaaccagtgcagatactgcagactgaagaagtgcttcagagccggcatgaagaaggaggccgtgcagaacgagagagacagaatcagcaccagaagaagcagctacgaggacagcagcctgcccagcatcaacgccctgctgcaggccgaggtgctgagcagacagatcaccgagcccgtgagcggcatcaacggcgacatcagagccaagaagatcgccagcatcgccgacgtgtgcgagagcatgaaggagcagctgctggtgctggtggagtgggccaagtacatccccgccttctgcgagctgcccctggacgaccaggtggccctgctgagagcccacgccggcgagcacctgctgctgggcgccaccaagagaagcatggtgttcaaggacgtgctgctgctgggcaacgactacatcgtgcccagacactgccccgagctggccgagatgagcagagtgagcatcagaatcctggacgagctggtgctgcccttccaggagctgcagatcgacgacaacgagtacgcctacctgaaggccatcatcttcttcgaccccgacgccaagggcctgagcgaccccggcaagatcaagagactgagaagccaggtgcaggtgagcctggaggactacatcaacgacagacagtacgacagcagaggcagattcggcgagctgctgctgctgctgcccaccctgcagagcatcacctggcagatgatcgagcagatccagttcatcaagctgttcggcatggccaagatcgacaacctgctgcaggagatgctgctgggcggcgagcccagcgacgccccccacgcccaccaccccctgcacccccacctgatgcaggagcacatgggcaccaacgtgatcgtggccaacaccatgcccacccacctgagcaacggccagatgtgcgagtggcccagacccagaggccaggccgccgagcccgaggagccccagcccgagccccccggcggcagcggcagcgagccctacaagctgctgcccggcgccgtggccaccatcgtgaagcccctgagcgccatcccccagcccaccatcaccaagcaggaggtgatctgaggactagttataagactgactagcccgatgggcctcccaacgggccctcctcccctccttgcaccgagattaataaaaaaaaaaaaaaaaaaaaaaaaaaaaaaaaaaaaaaaaaaaaaaaaaaaaaaaaaaaaaaaatgcatcccccccccccccccccccccccccccccccaaaggctcttttcagagccaccagaatt

SEQ ID NO: 1785 - RNA, 1642 nt, synthetic construct
  misc_feature 1..1642: note = mRNA i-3 (A64-N5-C30-hSL-N5) (opt4) from Homo sapiens__NP_000448.3__HNF4A(1-474)(S87A)
  source 1..1642: mol_type = other RNA
aggagaaagcttaccatgagactgagcaagaccctggtggacatggacatggccgactacagcgccgccctggaccccgcctacaccaccctggagttcgagaacgtgcaggtgctgaccatgggcaacgacaccagccccagcgagggcaccaacctgaacgcccccaacagcctgggcgtgagcgccctgtgcgccatctgcggcgacagagccaccggcaagcactacggcgccagcagctgcgacggctgcaagggcttcttcagaagagccgtgagaaagaaccacatgtacagctgcagattcagcagacagtgcgtggtggacaaggacaagagaaaccagtgcagatactgcagactgaagaagtgcttcagagccggcatgaagaaggaggccgtgcagaacgagagagacagaatcagcaccagaagaagcagctacgaggacagcagcctgcccagcatcaacgccctgctgcaggccgaggtgctgagcagacagatcaccagccccgtgagcggcatcaacggcgacatcagagccaagaagatcgccagcatcgccgacgtgtgcgagagcatgaaggagcagctgctggtgctggtggagtgggccaagtacatccccgccttctgcgagctgcccctggacgaccaggtggccctgctgagagcccacgccggcgagcacctgctgctgggcgccaccaagagaagcatggtgttcaaggacgtgctgctgctgggcaacgactacatcgtgcccagacactgccccgagctggccgagatgagcagagtgagcatcagaatcctggacgagctggtgctgcccttccaggagctgcagatcgacgacaacgagtacgcctacctgaaggccatcatcttcttcgaccccgacgccaagggcctgagcgaccccggcaagatcaagagactgagaagccaggtgcaggtgagcctggaggactacatcaacgacagacagtacgacagcagaggcagattcggcgagctgctgctgctgctgcccaccctgcagagcatcacctggcagatgatcgagcagatccagttcatcaagctgttcggcatggccaagatcgacaacctgctgcaggagatgctgctgggcggcagccccagcgacgccccccacgcccaccaccccctgcacccccacctgatgcaggagcacatgggcaccaacgtgatcgtggccaacaccatgcccacccacctgagcaacggccagatgtgcgagtggcccagacccagaggccaggccgccacccccgagaccccccagcccagcccccccggcggcagcggcagcgagccctacaagctgctgcccggcgccgtggccaccatcgtgaagcccctgagcgccatcccccagcccaccatcaccaagcaggaggtgatctgaggactagttataagactgactagcccgatgggcctcccaacgggccctcctcccctccttgcaccgagattaataaaaaaaaaaaaaaaaaaaaaaaaaaaaaaaaaaaaaaaaaaaaaaaaaaaaaaaaaaaaaaaatgcatcccccccccccccccccccccccccccccccaaaggctcttttcagagccaccagaatt

SEQ ID NO: 1786 - RNA, 1642 nt, synthetic construct
  misc_feature 1..1642: note = mRNA i-3 (A64-N5-C30-hSL-N5) (opt4) from Homo sapiens__NP_000448.3__HNF4A(1-474)(S87E)
  source 1..1642: mol_type = other RNA
aggagaaagcttaccatgagactgagcaagaccctggtggacatggacatggccgactacagcgccgccctggaccccgcctacaccaccctggagttcgagaacgtgcaggtgctgaccatgggcaacgacaccagccccagcgagggcaccaacctgaacgcccccaacagcctgggcgtgagcgccctgtgcgccatctgcggcgacagagccaccggcaagcactacggcgccagcagctgcgacggctgcaagggcttcttcagaagagaggtgagaaagaaccacatgtacagctgcagattcagcagacagtgcgtggtggacaaggacaagagaaaccagtgcagatactgcagactgaagaagtgcttcagagccggcatgaagaaggaggccgtgcagaacgagagagacagaatcagcaccagaagaagcagctacgaggacagcagcctgcccagcatcaacgccctgctgcaggccgaggtgctgagcagacagatcaccagccccgtgagcggcatcaacggcgacatcagagccaagaagatcgccagcatcgccgacgtgtgcgagagcatgaaggagcagctgctggtgctggtggagtgggccaagtacatccccgccttctgcgagctgcccctggacgaccaggtggccctgctgagagcccacgccggcgagcacctgctgctgggcgccaccaagagaagcatggtgttcaaggacgtgctgctgctgggcaacgactacatcgtgcccagacactgccccgagctggccgagatgagcagagtgagcatcagaatcctggacgagctggtgctgcccttccaggagctgcagatcgacgacaacgagtacgcctacctgaaggccatcatcttcttcgaccccgacgccaagggcctgagcgaccccggcaagatcaagagactgagaagccaggtgcaggtgagcctggaggactacatcaacgacagacagtacgacagcagaggcagattcggcgagctgctgctgctgctgcccaccctgcagagcatcacctggcagatgatcgagcagatccagttcatcaagctgttcggcatggccaagatcgacaacctgctgcaggagatgctgctgggcggcagccccagcgacgccccccacgcccaccaccccctgcacccccacctgatgcaggagcacatgggcaccaacgtgatcgtggccaacaccatgcccacccacctgagcaacggccagatgtgcgagtggcccagacccagaggccaggccgccacccccgagaccccccagcccagcccccccggcggcagcggcagcgagccctacaagctgctgcccggcgccgtggccaccatcgtgaagcccctgagcgccatcccccagcccaccatcaccaagcaggaggtgatctgaggactagttataagactgactagcccgatgggcctcccaacgggccctcctcccctccttgcaccgagattaataaaaaaaaaaaaaaaaaaaaaaaaaaaaaaaaaaaaaaaaaaaaaaaaaaaaaaaaaaaaaaaatgcatcccccccccccccccccccccccccccccccaaaggctcttttcagagccaccagaatt

SEQ ID NO: 1787 - RNA, 1642 nt, synthetic construct
  misc_feature 1..1642: note = mRNA i-3 (A64-N5-C30-hSL-N5) (opt4) from Homo sapiens__NP_000448.3__HNF4A(1-474)(R2V)
  source 1..1642: mol_type = other RNA
aggagaaagcttaccatggtgctgagcaagaccctggtggacatggacatggccgactacagcgccgccctggaccccgcctacaccaccctggagttcgagaacgtgcaggtgctgaccatgggcaacgacaccagccccagcgagggcaccaacctgaacgcccccaacagcctgggcgtgagcgccctgtgcgccatctgcggcgacagagccaccggcaagcactacggcgccagcagctgcgacggctgcaagggcttcttcagaagaagcgtgagaaagaaccacatgtacagctgcagattcagcagacagtgcgtggtggacaaggacaagagaaaccagtgcagatactgcagactgaagaagtgcttcagagccggcatgaagaaggaggccgtgcagaacgagagagacagaatcagcaccagaagaagcagctacgaggacagcagcctgcccagcatcaacgccctgctgcaggccgaggtgctgagcagacagatcaccagccccgtgagcggcatcaacggcgacatcagagccaagaagatcgccagcatcgccgacgtgtgcgagagcatgaaggagcagctgctggtgctggtggagtgggccaagtacatccccgccttctgcgagctgcccctggacgaccaggtggccctgctgagagcccacgccggcgagcacctgctgctgggcgccaccaagagaagcatggtgttcaaggacgtgctgctgctgggcaacgactacatcgtgcccagacactgccccgagctggccgagatgagcagagtgagcatcagaatcctggacgagctggtgctgcccttccaggagctgcagatcgacgacaacgagtacgcctacctgaaggccatcatcttcttcgaccccgacgccaagggcctgagcgaccccggcaagatcaagagactgagaagccaggtgcaggtgagcctggaggactacatcaacgacagacagtacgacagcagaggcagattcggcgagctgctgctgctgctgcccaccctgcagagcatcacctggcagatgatcgagcagatccagttcatcaagctgttcggcatggccaagatcgacaacctgctgcaggagatgctgctgggcggcagccccagcgacgccccccacgcccaccaccccctgcacccccacctgatgcaggagcacatgggcaccaacgtgatcgtggccaacaccatgcccacccacctgagcaacggccagatgtgcgagtggcccagacccagaggccaggccgccacccccgagaccccccagcccagcccccccggcggcagcggcagcgagccctacaagctgctgcccggcgccgtggccaccatcgtgaagcccctgagcgccatcccccagcccaccatcaccaagcaggaggtgatctgaggactagttataagactgactagcccgatgggcctcccaacgggccctcctcccctccttgcaccgagattaataaaaaaaaaaaaaaaaaaaaaaaaaaaaaaaaaaaaaaaaaaaaaaaaaaaaaaaaaaaaaaaatgcatcccccccccccccccccccccccccccccccaaaggctcttttcagagccaccagaatt

SEQ ID NO: 1788 - RNA, 1642 nt, synthetic construct
  misc_feature 1..1642: note = mRNA i-3 (A64-N5-C30-hSL-N5) (opt4) from Homo sapiens__NP_000448.3__HNF4A(1-474)(R2V_K5V)
  source 1..1642: mol_type = other RNA
aggagaaagcttaccatggtgctgagcgtgaccctggtggacatggacatggccgactacagcgccgccctggaccccgcctacaccaccctggagttcgagaacgtgcaggtgctgaccatgggcaacgacaccagccccagcgagggcaccaacctgaacgcccccaacagcctgggcgtgagcgccctgtgcgccatctgcggcgacagagccaccggcaagcactacggcgccagcagctgcgacggctgcaagggcttcttcagaagaagcgtgagaaagaaccacatgtacagctgcagattcagcagacagtgcgtggtggacaaggacaagagaaaccagtgcagatactgcagactgaagaagtgcttcagagccggcatgaagaaggaggccgtgcagaacgagagagacagaatcagcaccagaagaagcagctacgaggacagcagcctgcccagcatcaacgccctgctgcaggccgaggtgctgagcagacagatcaccagccccgtgagcggcatcaacggcgacatcagagccaagaagatcgccagcatcgccgacgtgtgcgagagcatgaaggagcagctgctggtgctggtggagtgggccaagtacatccccgccttctgcgagctgcccctggacgaccaggtggccctgctgagagcccacgccggcgagcacctgctgctgggcgccaccaagagaagcatggtgttcaaggacgtgctgctgctgggcaacgactacatcgtgcccagacactgccccgagctggccgagatgagcagagtgagcatcagaatcctggacgagctggtgctgcccttccaggagctgcagatcgacgacaacgagtacgcctacctgaaggccatcatcttcttcgaccccgacgccaagggcctgagcgaccccggcaagatcaagagactgagaagccaggtgcaggtgagcctggaggactacatcaacgacagacagtacgacagcagaggcagattcggcgagctgctgctgctgctgcccaccctgcagagcatcacctggcagatgatcgagcagatccagttcatcaagctgttcggcatggccaagatcgacaacctgctgcaggagatgctgctgggcggcagccccagcgacgccccccacgcccaccaccccctgcacccccacctgatgcaggagcacatgggcaccaacgtgatcgtggccaacaccatgcccacccacctgagcaacggccagatgtgcgagtggcccagacccagaggccaggccgccacccccgagaccccccagcccagcccccccggcggcagcggcagcgagccctacaagctgctgcccggcgccgtggccaccatcgtgaagcccctgagcgccatcccccagcccaccatcaccaagcaggaggtgatctgaggactagttataagactgactagcccgatgggcctcccaacgggccctcctcccctccttgcaccgagattaataaaaaaaaaaaaaaaaaaaaaaaaaaaaaaaaaaaaaaaaaaaaaaaaaaaaaaaaaaaaaaaatgcatcccccccccccccccccccccccccccccccaaaggctcttttcagagccaccagaatt

SEQ ID NO: 1789 - RNA, 1642 nt, synthetic construct
  misc_feature 1..1642: note = mRNA i-3 (A64-N5-C30-hSL-N5) (opt4) from Homo sapiens__NP_000448.3__HNF4A(1-474)(K179R_K180R)
  source 1..1642: mol_type = other RNA
aggagaaagcttaccatgagactgagcaagaccctggtggacatggacatggccgactacagcgccgccctggaccccgcctacaccaccctggagttcgagaacgtgcaggtgctgaccatgggcaacgacaccagccccagcgagggcaccaacctgaacgcccccaacagcctgggcgtgagcgccctgtgcgccatctgcggcgacagagccaccggcaagcactacggcgccagcagctgcgacggctgcaagggcttcttcagaagaagcgtgagaaagaaccacatgtacagctgcagattcagcagacagtgcgtggtggacaaggacaagagaaaccagtgcagatactgcagactgaagaagtgcttcagagccggcatgaagaaggaggccgtgcagaacgagagagacagaatcagcaccagaagaagcagctacgaggacagcagcctgcccagcatcaacgccctgctgcaggccgaggtgctgagcagacagatcaccagccccgtgagcggcatcaacggcgacatcagagccagaagaatcgccagcatcgccgacgtgtgcgagagcatgaaggagcagctgctggtgctggtggagtgggccaagtacatccccgccttctgcgagctgcccctggacgaccaggtggccctgctgagagcccacgccggcgagcacctgctgctgggcgccaccaagagaagcatggtgttcaaggacgtgctgctgctgggcaacgactacatcgtgcccagacactgccccgagctggccgagatgagcagagtgagcatcagaatcctggacgagctggtgctgcccttccaggagctgcagatcgacgacaacgagtacgcctacctgaaggccatcatcttcttcgaccccgacgccaagggcctgagcgaccccggcaagatcaagagactgagaagccaggtgcaggtgagcctggaggactacatcaacgacagacagtacgacagcagaggcagattcggcgagctgctgctgctgctgcccaccctgcagagcatcacctggcagatgatcgagcagatccagttcatcaagctgttcggcatggccaagatcgacaacctgctgcaggagatgctgctgggcggcagccccagcgacgccccccacgcccaccaccccctgcacccccacctgatgcaggagcacatgggcaccaacgtgatcgtggccaacaccatgcccacccacctgagcaacggccagatgtgcgagtggcccagacccagaggccaggccgccacccccgagaccccccagcccagcccccccggcggcagcggcagcgagccctacaagctgctgcccggcgccgtggccaccatcgtgaagcccctgagcgccatcccccagcccaccatcaccaagcaggaggtgatctgaggactagttataagactgactagcccgatgggcctcccaacgggccctcctcccctccttgcaccgagattaataaaaaaaaaaaaaaaaaaaaaaaaaaaaaaaaaaaaaaaaaaaaaaaaaaaaaaaaaaaaaaaatgcatcccccccccccccccccccccccccccccccaaaggctcttttcagagccaccagaatt

SEQ ID NO: 1790 - RNA, 1642 nt, synthetic construct
  misc_feature 1..1642: note = mRNA i-3 (A64-N5-C30-hSL-N5) (opt4) from Homo sapiens__NP_000448.3__HNF4A(1-474)(K234R)
  source 1..1642: mol_type = other RNA
aggagaaagcttaccatgagactgagcaagaccctggtggacatggacatggccgactacagcgccgccctggaccccgcctacaccaccctggagttcgagaacgtgcaggtgctgaccatgggcaacgacaccagccccagcgagggcaccaacctgaacgcccccaacagcctgggcgtgagcgccctgtgcgccatctgcggcgacagagccaccggcaagcactacggcgccagcagctgcgacggctgcaagggcttcttcagaagaagcgtgagaaagaaccacatgtacagctgcagattcagcagacagtgcgtggtggacaaggacaagagaaaccagtgcagatactgcagactgaagaagtgcttcagagccggcatgaagaaggaggccgtgcagaacgagagagacagaatcagcaccagaagaagcagctacgaggacagcagcctgcccagcatcaacgccctgctgcaggccgaggtgctgagcagacagatcaccagccccgtgagcggcatcaacggcgacatcagagccaagaagatcgccagcatcgccgacgtgtgcgagagcatgaaggagcagctgctggtgctggtggagtgggccaagtacatccccgccttctgcgagctgcccctggacgaccaggtggccctgctgagagcccacgccggcgagcacctgctgctgggcgccaccagaagaagcatggtgttcaaggacgtgctgctgctgggcaacgactacatcgtgcccagacactgccccgagctggccgagatgagcagagtgagcatcagaatcctggacgagctggtgctgcccttccaggagctgcagatcgacgacaacgagtacgcctacctgaaggccatcatcttcttcgaccccgacgccaagggcctgagcgaccccggcaagatcaagagactgagaagccaggtgcaggtgagcctggaggactacatcaacgacagacagtacgacagcagaggcagattcggcgagctgctgctgctgctgcccaccctgcagagcatcacctggcagatgatcgagcagatccagttcatcaagctgttcggcatggccaagatcgacaacctgctgcaggagatgctgctgggcggcagccccagcgacgccccccacgcccaccaccccctgcacccccacctgatgcaggagcacatgggcaccaacgtgatcgtggccaacaccatgcccacccacctgagcaacggccagatgtgcgagtggcccagacccagaggccaggccgccacccccgagaccccccagcccagcccccccggcggcagcggcagcgagccctacaagctgctgcccggcgccgtggccaccatcgtgaagcccctgagcgccatcccccagcccaccatcaccaagcaggaggtgatctgaggactagttataagactgactagcccgatgggcctcccaacgggccctcctcccctccttgcaccgagattaataaaaaaaaaaaaaaaaaaaaaaaaaaaaaaaaaaaaaaaaaaaaaaaaaaaaaaaaaaaaaaaatgcatcccccccccccccccccccccccccccccccaaaggctcttttcagagccaccagaatt

SEQ ID NO: 1791 - RNA, 1642 nt, synthetic construct
  misc_feature 1..1642: note = mRNA i-3 (A64-N5-C30-hSL-N5) (opt4) from Homo sapiens__NP_000448.3__HNF4A(1-474)(K300R)
  source 1..1642: mol_type = other RNA
aggagaaagcttaccatgagactgagcaagaccctggtggacatggacatggccgactacagcgccgccctggaccccgcctacaccaccctggagttcgagaacgtgcaggtgctgaccatgggcaacgacaccagccccagcgagggcaccaacctgaacgcccccaacagcctgggcgtgagcgccctgtgcgccatctgcggcgacagagccaccggcaagcactacggcgccagcagctgcgacggctgcaagggcttcttcagaagaagcgtgagaaagaaccacatgtacagctgcagattcagcagacagtgcgtggtggacaaggacaagagaaaccagtgcagatactgcagactgaagaagtgcttcagagccggcatgaagaaggaggccgtgcagaacgagagagacagaatcagcaccagaagaagcagctacgaggacagcagcctgcccagcatcaacgccctgctgcaggccgaggtgctgagcagacagatcaccagccccgtgagcggcatcaacggcgacatcagagccaagaagatcgccagcatcgccgacgtgtgcgagagcatgaaggagcagctgctggtgctggtggagtgggccaagtacatccccgccttctgcgagctgcccctggacgaccaggtggccctgctgagagcccacgccggcgagcacctgctgctgggcgccaccaagagaagcatggtgttcaaggacgtgctgctgctgggcaacgactacatcgtgcccagacactgccccgagctggccgagatgagcagagtgagcatcagaatcctggacgagctggtgctgcccttccaggagctgcagatcgacgacaacgagtacgcctacctgaaggccatcatcttcttcgaccccgacgccagaggcctgagcgaccccggcaagatcaagagactgagaagccaggtgcaggtgagcctggaggactacatcaacgacagacagtacgacagcagaggcagattcggcgagctgctgctgctgctgcccaccctgcagagcatcacctggcagatgatcgagcagatccagttcatcaagctgttcggcatggccaagatcgacaacctgctgcaggagatgctgctgggcggcagccccagcgacgccccccacgcccaccaccccctgcacccccacctgatgcaggagcacatgggcaccaacgtgatcgtggccaacaccatgcccacccacctgagcaacggccagatgtgcgagtggcccagacccagaggccaggccgccacccccgagaccccccagcccagcccccccggcggcagcggcagcgagccctacaagctgctgcccggcgccgtggccaccatcgtgaagcccctgagcgccatcccccagcccaccatcaccaagcaggaggtgatctgaggactagttataagactgactagcccgatgggcctcccaacgggccctcctcccctccttgcaccgagattaataaaaaaaaaaaaaaaaaaaaaaaaaaaaaaaaaaaaaaaaaaaaaaaaaaaaaaaaaaaaaaaatgcatcccccccccccccccccccccccccccccccaaaggctcttttcagagccaccagaatt

SEQ ID NO: 1792 - RNA, 1642 nt, synthetic construct
  misc_feature 1..1642: note = mRNA i-3 (A64-N5-C30-hSL-N5) (opt4) from Homo sapiens__NP_000448.3__HNF4A(1-474)(K300R_K307R_K309R)
  source 1..1642: mol_type = other RNA
aggagaaagcttaccatgagactgagcaagaccctggtggacatggacatggccgactacagcgccgccctggaccccgcctacaccaccctggagttcgagaacgtgcaggtgctgaccatgggcaacgacaccagccccagcgagggcaccaacctgaacgcccccaacagcctgggcgtgagcgccctgtgcgccatctgcggcgacagagccaccggcaagcactacggcgccagcagctgcgacggctgcaagggcttcttcagaagaagcgtgagaaagaaccacatgtacagctgcagattcagcagacagtgcgtggtggacaaggacaagagaaaccagtgcagatactgcagactgaagaagtgcttcagagccggcatgaagaaggaggccgtgcagaacgagagagacagaatcagcaccagaagaagcagctacgaggacagcagcctgcccagcatcaacgccctgctgcaggccgaggtgctgagcagacagatcaccagccccgtgagcggcatcaacggcgacatcagagccaagaagatcgccagcatcgccgacgtgtgcgagagcatgaaggagcagctgctggtgctggtggagtgggccaagtacatccccgccttctgcgagctgcccctggacgaccaggtggccctgctgagagcccacgccggcgagcacctgctgctgggcgccaccaagagaagcatggtgttcaaggacgtgctgctgctgggcaacgactacatcgtgcccagacactgccccgagctggccgagatgagcagagtgagcatcagaatcctggacgagctggtgctgcccttccaggagctgcagatcgacgacaacgagtacgcctacctgaaggccatcatcttcttcgaccccgacgccagaggcctgagcgaccccggcagaatcagaagactgagaagccaggtgcaggtgagcctggaggactacatcaacgacagacagtacgacagcagaggcagattcggcgagctgctgctgctgctgcccaccctgcagagcatcacctggcagatgatcgagcagatccagttcatcaagctgttcggcatggccaagatcgacaacctgctgcaggagatgctgctgggcggcagccccagcgacgccccccacgcccaccaccccctgcacccccacctgatgcaggagcacatgggcaccaacgtgatcgtggccaacaccatgcccacccacctgagcaacggccagatgtgcgagtggcccagacccagaggccaggccgccacccccgagaccccccagcccagcccccccggcggcagcggcagcgagccctacaagctgctgcccggcgccgtggccaccatcgtgaagcccctgagcgccatcccccagcccaccatcaccaagcaggaggtgatctgaggactagttataagactgactagcccgatgggcctcccaacgggccctcctcccctccttgcaccgagattaataaaaaaaaaaaaaaaaaaaaaaaaaaaaaaaaaaaaaaaaaaaaaaaaaaaaaaaaaaaaaaaatgcatcccccccccccccccccccccccccccccccaaaggctcttttcagagccaccagaatt

SEQ ID NO: 1793 - RNA, 1642 nt, synthetic construct
  misc_feature 1..1642: note = mRNA i-3 (A64-N5-C30-hSL-N5) (opt4) from Homo sapiens__NP_000448.3__HNF4A(1-474)(K447R_K470R)
  source 1..1642: mol_type = other RNA
aggagaaagcttaccatgagactgagcaagaccctggtggacatggacatggccgactacagcgccgccctggaccccgcctacaccaccctggagttcgagaacgtgcaggtgctgaccatgggcaacgacaccagccccagcgagggcaccaacctgaacgcccccaacagcctgggcgtgagcgccctgtgcgccatctgcggcgacagagccaccggcaagcactacggcgccagcagctgcgacggctgcaagggcttcttcagaagaagcgtgagaaagaaccacatgtacagctgcagattcagcagacagtgcgtggtggacaaggacaagagaaaccagtgcagatactgcagactgaagaagtgcttcagagccggcatgaagaaggaggccgtgcagaacgagagagacagaatcagcaccagaagaagcagctacgaggacagcagcctgcccagcatcaacgccctgctgcaggccgaggtgctgagcagacagatcaccagccccgtgagcggcatcaacggcgacatcagagccaagaagatcgccagcatcgccgacgtgtgcgagagcatgaaggagcagctgctggtgctggtggagtgggccaagtacatccccgccttctgcgagctgcccctggacgaccaggtggccctgctgagagcccacgccggcgagcacctgctgctgggcgccaccaagagaagcatggtgttcaaggacgtgctgctgctgggcaacgactacatcgtgcccagacactgccccgagctggccgagatgagcagagtgagcatcagaatcctggacgagctggtgctgcccttccaggagctgcagatcgacgacaacgagtacgcctacctgaaggccatcatcttcttcgaccccgacgccaagggcctgagcgaccccggcaagatcaagagactgagaagccaggtgcaggtgagcctggaggactacatcaacgacagacagtacgacagcagaggcagattcggcgagctgctgctgctgctgcccaccctgcagagcatcacctggcagatgatcgagcagatccagttcatcaagctgttcggcatggccaagatcgacaacctgctgcaggagatgctgctgggcggcagccccagcgacgccccccacgcccaccaccccctgcacccccacctgatgcaggagcacatgggcaccaacgtgatcgtggccaacaccatgcccacccacctgagcaacggccagatgtgcgagtggcccagacccagaggccaggccgccacccccgagaccccccagcccagcccccccggcggcagcggcagcgagccctacagactgctgcccggcgccgtggccaccatcgtgaagcccctgagcgccatcccccagcccaccatcaccagacaggaggtgatctgaggactagttataagactgactagcccgatgggcctcccaacgggccctcctcccctccttgcaccgagattaataaaaaaaaaaaaaaaaaaaaaaaaaaaaaaaaaaaaaaaaaaaaaaaaaaaaaaaaaaaaaaaatgcatcccccccccccccccccccccccccccccccaaaggctcttttcagagccaccagaatt

SEQ ID NO: 1794 - RNA, 1642 nt, synthetic construct
  misc_feature 1..1642: note = mRNA i-3 (A64-N5-C30-hSL-N5) (opt4) from Homo sapiens__NP_000448.3__HNF4A(1-474)(K458R)
  source 1..1642: mol_type = other RNA
aggagaaagcttaccatgagactgagcaagaccctggtggacatggacatggccgactacagcgccgccctggaccccgcctacaccaccctggagttcgagaacgtgcaggtgctgaccatgggcaacgacaccagccccagcgagggcaccaacctgaacgcccccaacagcctgggcgtgagcgccctgtgcgccatctgcggcgacagagccaccggcaagcactacggcgccagcagctgcgacggctgcaagggcttcttcagaagaagcgtgagaaagaaccacatgtacagctgcagattcagcagacagtgcgtggtggacaaggacaagagaaaccagtgcagatactgcagactgaagaagtgcttcagagccggcatgaagaaggaggccgtgcagaacgagagagacagaatcagcaccagaagaagcagctacgaggacagcagcctgcccagcatcaacgccctgctgcaggccgaggtgctgagcagacagatcaccagccccgtgagcggcatcaacggcgacatcagagccaagaagatcgccagcatcgccgacgtgtgcgagagcatgaaggagcagctgctggtgctggtggagtgggccaagtacatccccgccttctgcgagctgcccctggacgaccaggtggccctgctgagagcccacgccggcgagcacctgctgctgggcgccaccaagagaagcatggtgttcaaggacgtgctgctgctgggcaacgactacatcgtgcccagacactgccccgagctggccgagatgagcagagtgagcatcagaatcctggacgagctggtgctgcccttccaggagctgcagatcgacgacaacgagtacgcctacctgaaggccatcatcttcttcgaccccgacgccaagggcctgagcgaccccggcaagatcaagagactgagaagccaggtgcaggtgagcctggaggactacatcaacgacagacagtacgacagcagaggcagattcggcgagctgctgctgctgctgcccaccctgcagagcatcacctggcagatgatcgagcagatccagttcatcaagctgttcggcatggccaagatcgacaacctgctgcaggagatgctgctgggcggcagccccagcgacgccccccacgcccaccaccccctgcacccccacctgatgcaggagcacatgggcaccaacgtgatcgtggccaacaccatgcccacccacctgagcaacggccagatgtgcgagtggcccagacccagaggccaggccgccacccccgagaccccccagcccagcccccccggcggcagcggcagcgagccctacaagctgctgcccggcgccgtggccaccatcgtgagacccctgagcgccatcccccagcccaccatcaccaagcaggaggtgatctgaggactagttataagactgactagcccgatgggcctcccaacgggccctcctcccctccttgcaccgagattaataaaaaaaaaaaaaaaaaaaaaaaaaaaaaaaaaaaaaaaaaaaaaaaaaaaaaaaaaaaaaaaatgcatcccccccccccccccccccccccccccccccaaaggctcttttcagagccaccagaatt

SEQ ID NO: 1795 - RNA, 1642 nt, synthetic construct
  misc_feature 1..1642: note = mRNA i-3 (A64-N5-C30-hSL-N5) (opt4) from Homo sapiens__NP_000448.3__HNF4A(1-474)(K106R_K108R_K126R_K127R)
  source 1..1642: mol_type = other RNA
aggagaaagcttaccatgagactgagcaagaccctggtggacatggacatggccgactacagcgccgccctggaccccgcctacaccaccctggagttcgagaacgtgcaggtgctgaccatgggcaacgacaccagccccagcgagggcaccaacctgaacgcccccaacagcctgggcgtgagcgccctgtgcgccatctgcggcgacagagccaccggcaagcactacggcgccagcagctgcgacggctgcaagggcttcttcagaagaagcgtgagaaagaaccacatgtacagctgcagattcagcagacagtgcgtggtggacagagacagaagaaaccagtgcagatactgcagactgaagaagtgcttcagagccggcatgagaagagaggccgtgcagaacgagagagacagaatcagcaccagaagaagcagctacgaggacagcagcctgcccagcatcaacgccctgctgcaggccgaggtgctgagcagacagatcaccagccccgtgagcggcatcaacggcgacatcagagccaagaagatcgccagcatcgccgacgtgtgcgagagcatgaaggagcagctgctggtgctggtggagtgggccaagtacatccccgccttctgcgagctgcccctggacgaccaggtggccctgctgagagcccacgccggcgagcacctgctgctgggcgccaccaagagaagcatggtgttcaaggacgtgctgctgctgggcaacgactacatcgtgcccagacactgccccgagctggccgagatgagcagagtgagcatcagaatcctggacgagctggtgctgcccttccaggagctgcagatcgacgacaacgagtacgcctacctgaaggccatcatcttcttcgaccccgacgccaagggcctgagcgaccccggcaagatcaagagactgagaagccaggtgcaggtgagcctggaggactacatcaacgacagacagtacgacagcagaggcagattcggcgagctgctgctgctgctgcccaccctgcagagcatcacctggcagatgatcgagcagatccagttcatcaagctgttcggcatggccaagatcgacaacctgctgcaggagatgctgctgggcggcagccccagcgacgccccccacgcccaccaccccctgcacccccacctgatgcaggagcacatgggcaccaacgtgatcgtggccaacaccatgcccacccacctgagcaacggccagatgtgcgagtggcccagacccagaggccaggccgccacccccgagaccccccagcccagcccccccggcggcagcggcagcgagccctacaagctgctgcccggcgccgtggccaccatcgtgaagcccctgagcgccatcccccagcccaccatcaccaagcaggaggtgatctgaggactagttataagactgactagcccgatgggcctcccaacgggccctcctcccctccttgcaccgagattaataaaaaaaaaaaaaaaaaaaaaaaaaaaaaaaaaaaaaaaaaaaaaaaaaaaaaaaaaaaaaaaatgcatcccccccccccccccccccccccccccccccaaaggctcttttcagagccaccagaatt

SEQ ID NO: 1796 - RNA, 1642 nt, synthetic construct
  misc_feature 1..1642: note = mRNA i-3 (A64-N5-C30-hSL-N5) (opt4) from Homo sapiens__NP_000448.3__HNF4A(1-474)(E285Q)
  source 1..1642: mol_type = other RNA
aggagaaagcttaccatgagactgagcaagaccctggtggacatggacatggccgactacagcgccgccctggaccccgcctacaccaccctggagttcgagaacgtgcaggtgctgaccatgggcaacgacaccagccccagcgagggcaccaacctgaacgcccccaacagcctgggcgtgagcgccctgtgcgccatctgcggcgacagagccaccggcaagcactacggcgccagcagctgcgacggctgcaagggcttcttcagaagaagcgtgagaaagaaccacatgtacagctgcagattcagcagacagtgcgtggtggacaaggacaagagaaaccagtgcagatactgcagactgaagaagtgcttcagagccggcatgaagaaggaggccgtgcagaacgagagagacagaatcagcaccagaagaagcagctacgaggacagcagcctgcccagcatcaacgccctgctgcaggccgaggtgctgagcagacagatcaccagccccgtgagcggcatcaacggcgacatcagagccaagaagatcgccagcatcgccgacgtgtgcgagagcatgaaggagcagctgctggtgctggtggagtgggccaagtacatccccgccttctgcgagctgcccctggacgaccaggtggccctgctgagagcccacgccggcgagcacctgctgctgggcgccaccaagagaagcatggtgttcaaggacgtgctgctgctgggcaacgactacatcgtgcccagacactgccccgagctggccgagatgagcagagtgagcatcagaatcctggacgagctggtgctgcccttccaggagctgcagatcgacgacaaccagtacgcctacctgaaggccatcatcttcttcgaccccgacgccaagggcctgagcgaccccggcaagatcaagagactgagaagccaggtgcaggtgagcctggaggactacatcaacgacagacagtacgacagcagaggcagattcggcgagctgctgctgctgctgcccaccctgcagagcatcacctggcagatgatcgagcagatccagttcatcaagctgttcggcatggccaagatcgacaacctgctgcaggagatgctgctgggcggcagccccagcgacgccccccacgcccaccaccccctgcacccccacctgatgcaggagcacatgggcaccaacgtgatcgtggccaacaccatgcccacccacctgagcaacggccagatgtgcgagtggcccagacccagaggccaggccgccacccccgagaccccccagcccagcccccccggcggcagcggcagcgagccctacaagctgctgcccggcgccgtggccaccatcgtgaagcccctgagcgccatcccccagcccaccatcaccaagcaggaggtgatctgaggactagttataagactgactagcccgatgggcctcccaacgggccctcctcccctccttgcaccgagattaataaaaaaaaaaaaaaaaaaaaaaaaaaaaaaaaaaaaaaaaaaaaaaaaaaaaaaaaaaaaaaaatgcatcccccccccccccccccccccccccccccccaaaggctcttttcagagccaccagaatt

SEQ ID NO: 1797 - RNA, 1642 nt, synthetic construct
  misc_feature 1..1642: note = mRNA i-3 (A64-N5-C30-hSL-N5) (opt4) from Homo sapiens__NP_000448.3__HNF4A(1-474)(T166E)
  source 1..1642: mol_type = other RNA
aggagaaagcttaccatgagactgagcaagaccctggtggacatggacatggccgactacagcgccgccctggaccccgcctacaccaccctggagttcgagaacgtgcaggtgctgaccatgggcaacgacaccagccccagcgagggcaccaacctgaacgcccccaacagcctgggcgtgagcgccctgtgcgccatctgcggcgacagagccaccggcaagcactacggcgccagcagctgcgacggctgcaagggcttcttcagaagaagcgtgagaaagaaccacatgtacagctgcagattcagcagacagtgcgtggtggacaaggacaagagaaaccagtgcagatactgcagactgaagaagtgcttcagagccggcatgaagaaggaggccgtgcagaacgagagagacagaatcagcaccagaagaagcagctacgaggacagcagcctgcccagcatcaacgccctgctgcaggccgaggtgctgagcagacagatcgagagccccgtgagcggcatcaacggcgacatcagagccaagaagatcgccagcatcgccgacgtgtgcgagagcatgaaggagcagctgctggtgctggtggagtgggccaagtacatccccgccttctgcgagctgcccctggacgaccaggtggccctgctgagagcccacgccggcgagcacctgctgctgggcgccaccaagagaagcatggtgttcaaggacgtgctgctgctgggcaacgactacatcgtgcccagacactgccccgagctggccgagatgagcagagtgagcatcagaatcctggacgagctggtgctgcccttccaggagctgcagatcgacgacaacgagtacgcctacctgaaggccatcatcttcttcgaccccgacgccaagggcctgagcgaccccggcaagatcaagagactgagaagccaggtgcaggtgagcctggaggactacatcaacgacagacagtacgacagcagaggcagattcggcgagctgctgctgctgctgcccaccctgcagagcatcacctggcagatgatcgagcagatccagttcatcaagctgttcggcatggccaagatcgacaacctgctgcaggagatgctgctgggcggcagccccagcgacgccccccacgcccaccaccccctgcacccccacctgatgcaggagcacatgggcaccaacgtgatcgtggccaacaccatgcccacccacctgagcaacggccagatgtgcgagtggcccagacccagaggccaggccgccacccccgagaccccccagcccagcccccccggcggcagcggcagcgagccctacaagctgctgcccggcgccgtggccaccatcgtgaagcccctgagcgccatcccccagcccaccatcaccaagcaggaggtgatctgaggactagttataagactgactagcccgatgggcctcccaacgggccctcctcccctccttgcaccgagattaataaaaaaaaaaaaaaaaaaaaaaaaaaaaaaaaaaaaaaaaaaaaaaaaaaaaaaaaaaaaaaaatgcatcccccccccccccccccccccccccccccccaaaggctcttttcagagccaccagaatt

SEQ ID NO: 1798 - RNA, 1642 nt, synthetic construct
  misc_feature 1..1642: note = mRNA i-3 (A64-N5-C30-hSL-N5) (opt4) from Homo sapiens__NP_000448.3__HNF4A(1-474)(S148A)
  source 1..1642: mol_type = other RNA
aggagaaagcttaccatgagactgagcaagaccctggtggacatggacatggccgactacagcgccgccctggaccccgcctacaccaccctggagttcgagaacgtgcaggtgctgaccatgggcaacgacaccagccccagcgagggcaccaacctgaacgcccccaacagcctgggcgtgagcgccctgtgcgccatctgcggcgacagagccaccggcaagcactacggcgccagcagctgcgacggctgcaagggcttcttcagaagaagcgtgagaaagaaccacatgtacagctgcagattcagcagacagtgcgtggtggacaaggacaagagaaaccagtgcagatactgcagactgaagaagtgcttcagagccggcatgaagaaggaggccgtgcagaacgagagagacagaatcagcaccagaagaagcagctacgaggacagcgccctgcccagcatcaacgccctgctgcaggccgaggtgctgagcagacagatcaccagccccgtgagcggcatcaacggcgacatcagagccaagaagatcgccagcatcgccgacgtgtgcgagagcatgaaggagcagctgctggtgctggtggagtgggccaagtacatccccgccttctgcgagctgcccctggacgaccaggtggccctgctgagagcccacgccggcgagcacctgctgctgggcgccaccaagagaagcatggtgttcaaggacgtgctgctgctgggcaacgactacatcgtgcccagacactgccccgagctggccgagatgagcagagtgagcatcagaatcctggacgagctggtgctgcccttccaggagctgcagatcgacgacaacgagtacgcctacctgaaggccatcatcttcttcgaccccgacgccaagggcctgagcgaccccggcaagatcaagagactgagaagccaggtgcaggtgagcctggaggactacatcaacgacagacagtacgacagcagaggcagattcggcgagctgctgctgctgctgcccaccctgcagagcatcacctggcagatgatcgagcagatccagttcatcaagctgttcggcatggccaagatcgacaacctgctgcaggagatgctgctgggcggcagccccagcgacgccccccacgcccaccaccccctgcacccccacctgatgcaggagcacatgggcaccaacgtgatcgtggccaacaccatgcccacccacctgagcaacggccagatgtgcgagtggcccagacccagaggccaggccgccacccccgagaccccccagcccagcccccccggcggcagcggcagcgagccctacaagctgctgcccggcgccgtggccaccatcgtgaagcccctgagcgccatcccccagcccaccatcaccaagcaggaggtgatctgaggactagttataagactgactagcccgatgggcctcccaacgggccctcctcccctccttgcaccgagattaataaaaaaaaaaaaaaaaaaaaaaaaaaaaaaaaaaaaaaaaaaaaaaaaaaaaaaaaaaaaaaaatgcatcccccccccccccccccccccccccccccccaaaggctcttttcagagccaccagaatt

SEQ ID NO: 1799 - RNA, 1642 nt, synthetic construct
  misc_feature 1..1642: note = mRNA i-3 (A64-N5-C30-hSL-N5) (opt4) from Homo sapiens__NP_000448.3__HNF4A(1-474)(S148E)
  source 1..1642: mol_type = other RNA
aggagaaagcttaccatgagactgagcaagaccctggtggacatggacatggccgactacagcgccgccctggaccccgcctacaccaccctggagttcgagaacgtgcaggtgctgaccatgggcaacgacaccagccccagcgagggcaccaacctgaacgcccccaacagcctgggcgtgagcgccctgtgcgccatctgcggcgacagagccaccggcaagcactacggcgccagcagctgcgacggctgcaagggcttcttcagaagaagcgtgagaaagaaccacatgtacagctgcagattcagcagacagtgcgtggtggacaaggacaagagaaaccagtgcagatactgcagactgaagaagtgcttcagagccggcatgaagaaggaggccgtgcagaacgagagagacagaatcagcaccagaagaagcagctacgaggacagcgagctgcccagcatcaacgccctgctgcaggccgaggtgctgagcagacagatcaccagccccgtgagcggcatcaacggcgacatcagagccaagaagatcgccagcatcgccgacgtgtgcgagagcatgaaggagcagctgctggtgctggtggagtgggccaagtacatccccgccttctgcgagctgcccctggacgaccaggtggccctgctgagagcccacgccggcgagcacctgctgctgggcgccaccaagagaagcatggtgttcaaggacgtgctgctgctgggcaacgactacatcgtgcccagacactgccccgagctggccgagatgagcagagtgagcatcagaatcctggacgagctggtgctgcccttccaggagctgcagatcgacgacaacgagtacgcctacctgaaggccatcatcttcttcgaccccgacgccaagggcctgagcgaccccggcaagatcaagagactgagaagccaggtgcaggtgagcctggaggactacatcaacgacagacagtacgacagcagaggcagattcggcgagctgctgctgctgctgcccaccctgcagagcatcacctggcagatgatcgagcagatccagttcatcaagctgttcggcatggccaagatcgacaacctgctgcaggagatgctgctgggcggcagccccagcgacgccccccacgcccaccaccccctgcacccccacctgatgcaggagcacatgggcaccaacgtgatcgtggccaacaccatgcccacccacctgagcaacggccagatgtgcgagtggcccagacccagaggccaggccgccacccccgagaccccccagcccagcccccccggcggcagcggcagcgagccctacaagctgctgcccggcgccgtggccaccatcgtgaagcccctgagcgccatcccccagcccaccatcaccaagcaggaggtgatctgaggactagttataagactgactagcccgatgggcctcccaacgggccctcctcccctccttgcaccgagattaataaaaaaaaaaaaaaaaaaaaaaaaaaaaaaaaaaaaaaaaaaaaaaaaaaaaaaaaaaaaaaaatgcatcccccccccccccccccccccccccccccccaaaggctcttttcagagccaccagaatt

SEQ ID NO: 1800 - RNA, 1642 nt, synthetic construct
  misc_feature 1..1642: note = mRNA i-3 (A64-N5-C30-hSL-N5) (opt4) from Homo sapiens__NP_000448.3__HNF4A(1-474)(S183A)
  source 1..1642: mol_type = other RNA
aggagaaagcttaccatgagactgagcaagaccctggtggacatggacatggccgactacagcgccgccctggaccccgcctacaccaccctggagttcgagaacgtgcaggtgctgaccatgggcaacgacaccagccccagcgagggcaccaacctgaacgcccccaacagcctgggcgtgagcgccctgtgcgccatctgcggcgacagagccaccggcaagcactacggcgccagcagctgcgacggctgcaagggcttcttcagaagaagcgtgagaaagaaccacatgtacagctgcagattcagcagacagtgcgtggtggacaaggacaagagaaaccagtgcagatactgcagactgaagaagtgcttcagagccggcatgaagaaggaggccgtgcagaacgagagagacagaatcagcaccagaagaagcagctacgaggacagcagcctgcccagcatcaacgccctgctgcaggccgaggtgctgagcagacagatcaccagccccgtgagcggcatcaacggcgacatcagagccaagaagatcgccgccatcgccgacgtgtgcgagagcatgaaggagcagctgctggtgctggtggagtgggccaagtacatccccgccttctgcgagctgcccctggacgaccaggtggccctgctgagagcccacgccggcgagcacctgctgctgggcgccaccaagagaagcatggtgttcaaggacgtgctgctgctgggcaacgactacatcgtgcccagacactgccccgagctggccgagatgagcagagtgagcatcagaatcctggacgagctggtgctgcccttccaggagctgcagatcgacgacaacgagtacgcctacctgaaggccatcatcttcttcgaccccgacgccaagggcctgagcgaccccggcaagatcaagagactgagaagccaggtgcaggtgagcctggaggactacatcaacgacagacagtacgacagcagaggcagattcggcgagctgctgctgctgctgcccaccctgcagagcatcacctggcagatgatcgagcagatccagttcatcaagctgttcggcatggccaagatcgacaacctgctgcaggagatgctgctgggcggcagccccagcgacgccccccacgcccaccaccccctgcacccccacctgatgcaggagcacatgggcaccaacgtgatcgtggccaacaccatgcccacccacctgagcaacggccagatgtgcgagtggcccagacccagaggccaggccgccacccccgagaccccccagcccagcccccccggcggcagcggcagcgagccctacaagctgctgcccggcgccgtggccaccatcgtgaagcccctgagcgccatcccccagcccaccatcaccaagcaggaggtgatctgaggactagttataagactgactagcccgatgggcctcccaacgggccctcctcccctccttgcaccgagattaataaaaaaaaaaaaaaaaaaaaaaaaaaaaaaaaaaaaaaaaaaaaaaaaaaaaaaaaaaaaaaaatgcatcccccccccccccccccccccccccccccccaaaggctcttttcagagccaccagaatt

SEQ ID NO: 1801 - RNA, 1642 nt, synthetic construct
  misc_feature 1..1642: note = mRNA i-3 (A64-N5-C30-hSL-N5) (opt4) from Homo sapiens__NP_000448.3__HNF4A(1-474)(S183E)
  source 1..1642: mol_type = other RNA
aggagaaagcttaccatgagactgagcaagaccctggtggacatggacatggccgactacagcgccgccctggaccccgcctacaccaccctggagttcgagaacgtgcaggtgctgaccatgggcaacgacaccagccccagcgagggcaccaacctgaacgcccccaacagcctgggcgtgagcgccctgtgcgccatctgcggcgacagagccaccggcaagcactacggcgccagcagctgcgacggctgcaagggcttcttcagaagaagcgtgagaaagaaccacatgtacagctgcagattcagcagacagtgcgtggtggacaaggacaagagaaaccagtgcagatactgcagactgaagaagtgcttcagagccggcatgaagaaggaggccgtgcagaacgagagagacagaatcagcaccagaagaagcagctacgaggacagcagcctgcccagcatcaacgccctgctgcaggccgaggtgctgagcagacagatcaccagccccgtgagcggcatcaacggcgacatcagagccaagaagatcgccgagatcgccgacgtgtgcgagagcatgaaggagcagctgctggtgctggtggagtgggccaagtacatccccgccttctgcgagctgcccctggacgaccaggtggccctgctgagagcccacgccggcgagcacctgctgctgggcgccaccaagagaagcatggtgttcaaggacgtgctgctgctgggcaacgactacatcgtgcccagacactgccccgagctggccgagatgagcagagtgagcatcagaatcctggacgagctggtgctgcccttccaggagctgcagatcgacgacaacgagtacgcctacctgaaggccatcatcttcttcgaccccgacgccaagggcctgagcgaccccggcaagatcaagagactgagaagccaggtgcaggtgagcctggaggactacatcaacgacagacagtacgacagcagaggcagattcggcgagctgctgctgctgctgcccaccctgcagagcatcacctggcagatgatcgagcagatccagttcatcaagctgttcggcatggccaagatcgacaacctgctgcaggagatgctgctgggcggcagccccagcgacgccccccacgcccaccaccccctgcacccccacctgatgcaggagcacatgggcaccaacgtgatcgtggccaacaccatgcccacccacctgagcaacggccagatgtgcgagtggcccagacccagaggccaggccgccacccccgagaccccccagcccagcccccccggcggcagcggcagcgagccctacaagctgctgcccggcgccgtggccaccatcgtgaagcccctgagcgccatcccccagcccaccatcaccaagcaggaggtgatctgaggactagttataagactgactagcccgatgggcctcccaacgggccctcctcccctccttgcaccgagattaataaaaaaaaaaaaaaaaaaaaaaaaaaaaaaaaaaaaaaaaaaaaaaaaaaaaaaaaaaaaaaaatgcatcccccccccccccccccccccccccccccccaaaggctcttttcagagccaccagaatt

SEQ ID NO: 1802 - RNA, 1642 nt, synthetic construct
  misc_feature 1..1642: note = mRNA i-3 (A64-N5-C30-hSL-N5) (opt4) from Homo sapiens__NP_000448.3__HNF4A(1-474)(S461A)
  source 1..1642: mol_type = other RNA
aggagaaagcttaccatgagactgagcaagaccctggtggacatggacatggccgactacagcgccgccctggaccccgcctacaccaccctggagttcgagaacgtgcaggtgctgaccatgggcaacgacaccagccccagcgagggcaccaacctgaacgcccccaacagcctgggcgtgagcgccctgtgcgccatctgcggcgacagagccaccggcaagcactacggcgccagcagctgcgacggctgcaagggcttcttcagaagaagcgtgagaaagaaccacatgtacagctgcagattcagcagacagtgcgtggtggacaaggacaagagaaaccagtgcagatactgcagactgaagaagtgcttcagagccggcatgaagaaggaggccgtgcagaacgagagagacagaatcagcaccagaagaagcagctacgaggacagcagcctgcccagcatcaacgccctgctgcaggccgaggtgctgagcagacagatcaccagccccgtgagcggcatcaacggcgacatcagagccaagaagatcgccagcatcgccgacgtgtgcgagagcatgaaggagcagctgctggtgctggtggagtgggccaagtacatccccgccttctgcgagctgcccctggacgaccaggtggccctgctgagagcccacgccggcgagcacctgctgctgggcgccaccaagagaagcatggtgttcaaggacgtgctgctgctgggcaacgactacatcgtgcccagacactgccccgagctggccgagatgagcagagtgagcatcagaatcctggacgagctggtgctgcccttccaggagctgcagatcgacgacaacgagtacgcctacctgaaggccatcatcttcttcgaccccgacgccaagggcctgagcgaccccggcaagatcaagagactgagaagccaggtgcaggtgagcctggaggactacatcaacgacagacagtacgacagcagaggcagattcggcgagctgctgctgctgctgcccaccctgcagagcatcacctggcagatgatcgagcagatccagttcatcaagctgttcggcatggccaagatcgacaacctgctgcaggagatgctgctgggcggcagccccagcgacgccccccacgcccaccaccccctgcacccccacctgatgcaggagcacatgggcaccaacgtgatcgtggccaacaccatgcccacccacctgagcaacggccagatgtgcgagtggcccagacccagaggccaggccgccacccccgagaccccccagcccagcccccccggcggcagcggcagcgagccctacaagctgctgcccggcgccgtggccaccatcgtgaagcccctggccgccatcccccagcccaccatcaccaagcaggaggtgatctgaggactagttataagactgactagcccgatgggcctcccaacgggccctcctcccctccttgcaccgagattaataaaaaaaaaaaaaaaaaaaaaaaaaaaaaaaaaaaaaaaaaaaaaaaaaaaaaaaaaaaaaaaatgcatcccccccccccccccccccccccccccccccaaaggctcttttcagagccaccagaatt

SEQ ID NO: 1803 - RNA, 1642 nt, synthetic construct
  misc_feature 1..1642: note = mRNA i-3 (A64-N5-C30-hSL-N5) (opt4) from Homo sapiens__NP_000448.3__HNF4A(1-474)(S461E)
  source 1..1642: mol_type = other RNA
aggagaaagcttaccatgagactgagcaagaccctggtggacatggacatggccgactacagcgccgccctggaccccgcctacaccaccctggagttcgagaacgtgcaggtgctgaccatgggcaacgacaccagccccagcgagggcaccaacctgaacgcccccaacagcctgggcgtgagcgccctgtgcgccatctgcggcgacagagccaccggcaagcactacggcgccagcagctgcgacggctgcaagggcttcttcagaagaagcgtgagaaagaaccacatgtacagctgcagattcagcagacagtgcgtggtggacaaggacaagagaaaccagtgcagatactgcagactgaagaagtgcttcagagccggcatgaagaaggaggccgtgcagaacgagagagacagaatcagcaccagaagaagcagctacgaggacagcagcctgcccagcatcaacgccctgctgcaggccgaggtgctgagcagacagatcaccagccccgtgagcggcatcaacggcgacatcagagccaagaagatcgccagcatcgccgacgtgtgcgagagcatgaaggagcagctgctggtgctggtggagtgggccaagtacatccccgccttctgcgagctgcccctggacgaccaggtggccctgctgagagcccacgccggcgagcacctgctgctgggcgccaccaagagaagcatggtgttcaaggacgtgctgctgctgggcaacgactacatcgtgcccagacactgccccgagctggccgagatgagcagagtgagcatcagaatcctggacgagctggtgctgcccttccaggagctgcagatcgacgacaacgagtacgcctacctgaaggccatcatcttcttcgaccccgacgccaagggcctgagcgaccccggcaagatcaagagactgagaagccaggtgcaggtgagcctggaggactacatcaacgacagacagtacgacagcagaggcagattcggcgagctgctgctgctgctgcccaccctgcagagcatcacctggcagatgatcgagcagatccagttcatcaagctgttcggcatggccaagatcgacaacctgctgcaggagatgctgctgggcggcagccccagcgacgccccccacgcccaccaccccctgcacccccacctgatgcaggagcacatgggcaccaacgtgatcgtggccaacaccatgcccacccacctgagcaacggccagatgtgcgagtggcccagacccagaggccaggccgccacccccgagaccccccagcccagcccccccggcggcagcggcagcgagccctacaagctgctgcccggcgccgtggccaccatcgtgaagcccctggaggccatcccccagcccaccatcaccaagcaggaggtgatctgaggactagttataagactgactagcccgatgggcctcccaacgggccctcctcccctccttgcaccgagattaataaaaaaaaaaaaaaaaaaaaaaaaaaaaaaaaaaaaaaaaaaaaaaaaaaaaaaaaaaaaaaaatgcatcccccccccccccccccccccccccccccccaaaggctcttttcagagccaccagaatt

SEQ ID NO: 1804 - RNA, 1642 nt, synthetic construct
  misc_feature 1..1642: note = mRNA i-3 (A64-N5-C30-hSL-N5) (opt4) from Homo sapiens__NP_000448.3__HNF4A(1-474)(S142A_S143A_S313A)
  source 1..1642: mol_type = other RNA
aggagaaagcttaccatgagactgagcaagaccctggtggacatggacatggccgactacagcgccgccctggaccccgcctacaccaccctggagttcgagaacgtgcaggtgctgaccatgggcaacgacaccagccccagcgagggcaccaacctgaacgcccccaacagcctgggcgtgagcgccctgtgcgccatctgcggcgacagagccaccggcaagcactacggcgccagcagctgcgacggctgcaagggcttcttcagaagaagcgtgagaaagaaccacatgtacagctgcagattcagcagacagtgcgtggtggacaaggacaagagaaaccagtgcagatactgcagactgaagaagtgcttcagagccggcatgaagaaggaggccgtgcagaacgagagagacagaatcagcaccagaagagccgcctacgaggacagcagcctgcccagcatcaacgccctgctgcaggccgaggtgctgagcagacagatcaccagccccgtgagcggcatcaacggcgacatcagagccaagaagatcgccagcatcgccgacgtgtgcgagagcatgaaggagcagctgctggtgctggtggagtgggccaagtacatccccgccttctgcgagctgcccctggacgaccaggtggccctgctgagagcccacgccggcgagcacctgctgctgggcgccaccaagagaagcatggtgttcaaggacgtgctgctgctgggcaacgactacatcgtgcccagacactgccccgagctggccgagatgagcagagtgagcatcagaatcctggacgagctggtgctgcccttccaggagctgcagatcgacgacaacgagtacgcctacctgaaggccatcatcttcttcgaccccgacgccaagggcctgagcgaccccggcaagatcaagagactgagagcccaggtgcaggtgagcctggaggactacatcaacgacagacagtacgacagcagaggcagattcggcgagctgctgctgctgctgcccaccctgcagagcatcacctggcagatgatcgagcagatccagttcatcaagctgttcggcatggccaagatcgacaacctgctgcaggagatgctgctgggcggcagccccagcgacgccccccacgcccaccaccccctgcacccccacctgatgcaggagcacatgggcaccaacgtgatcgtggccaacaccatgcccacccacctgagcaacggccagatgtgcgagtggcccagacccagaggccaggccgccacccccgagaccccccagcccagcccccccggcggcagcggcagcgagccctacaagctgctgcccggcgccgtggccaccatcgtgaagcccctgagcgccatcccccagcccaccatcaccaagcaggaggtgatctgaggactagttataagactgactagcccgatgggcctcccaacgggccctcctcccctccttgcaccgagattaataaaaaaaaaaaaaaaaaaaaaaaaaaaaaaaaaaaaaaaaaaaaaaaaaaaaaaaaaaaaaaaatgcatcccccccccccccccccccccccccccccccaaaggctcttttcagagccaccagaatt

SEQ ID NO: 1805 - RNA, 1642 nt, synthetic construct
  misc_feature 1..1642: note = mRNA i-3 (A64-N5-C30-hSL-N5) (opt4) from Homo sapiens__NP_000448.3__HNF4A(1-474)(S142A_S143A_S313A_K458R)
  source 1..1642: mol_type = other RNA
aggagaaagcttaccatgagactgagcaagaccctggtggacatggacatggccgactacagcgccgccctggaccccgcctacaccaccctggagttcgagaacgtgcaggtgctgaccatgggcaacgacaccagccccagcgagggcaccaacctgaacgcccccaacagcctgggcgtgagcgccctgtgcgccatctgcggcgacagagccaccggcaagcactacggcgccagcagctgcgacggctgcaagggcttcttcagaagaagcgtgagaaagaaccacatgtacagctgcagattcagcagacagtgcgtggtggacaaggacaagagaaaccagtgcagatactgcagactgaagaagtgcttcagagccggcatgaagaaggaggccgtgcagaacgagagagacagaatcagcaccagaagagccgcctacgaggacagcagcctgcccagcatcaacgccctgctgcaggccgaggtgctgagcagacagatcaccagccccgtgagcggcatcaacggcgacatcagagccaagaagatcgccagcatcgccgacgtgtgcgagagcatgaaggagcagctgctggtgctggtggagtgggccaagtacatccccgccttctgcgagctgcccctggacgaccaggtggccctgctgagagcccacgccggcgagcacctgctgctgggcgccaccaagagaagcatggtgttcaaggacgtgctgctgctgggcaacgactacatcgtgcccagacactgccccgagctggccgagatgagcagagtgagcatcagaatcctggacgagctggtgctgcccttccaggagctgcagatcgacgacaacgagtacgcctacctgaaggccatcatcttcttcgaccccgacgccaagggcctgagcgaccccggcaagatcaagagactgagagcccaggtgcaggtgagcctggaggactacatcaacgacagacagtacgacagcagaggcagattcggcgagctgctgctgctgctgcccaccctgcagagcatcacctggcagatgatcgagcagatccagttcatcaagctgttcggcatggccaagatcgacaacctgctgcaggagatgctgctgggcggcagccccagcgacgccccccacgcccaccaccccctgcacccccacctgatgcaggagcacatgggcaccaacgtgatcgtggccaacaccatgcccacccacctgagcaacggccagatgtgcgagtggcccagacccagaggccaggccgccacccccgagaccccccagcccagcccccccggcggcagcggcagcgagccctacaagctgctgcccggcgccgtggccaccatcgtgagacccctgagcgccatcccccagcccaccatcaccaagcaggaggtgatctgaggactagttataagactgactagcccgatgggcctcccaacgggccctcctcccctccttgcaccgagattaataaaaaaaaaaaaaaaaaaaaaaaaaaaaaaaaaaaaaaaaaaaaaaaaaaaaaaaaaaaaaaaatgcatcccccccccccccccccccccccccccccccaaaggctcttttcagagccaccagaatt

SEQ ID NO: 1806 - RNA, 1642 nt, synthetic construct
  misc_feature 1..1642: note = mRNA i-3 (A64-N5-C30-hSL-N5) (opt4) from Homo sapiens__NP_000448.3__HNF4A(1-474)(S142A_S143A_S167A_S313A_ S378A_T429A_T432A_S436A_K458R)
  source 1..1642: mol_type = other RNA
aggagaaagcttaccatgagactgagcaagaccctggtggacatggacatggccgactacagcgccgccctggaccccgcctacaccaccctggagttcgagaacgtgcaggtgctgaccatgggcaacgacaccagccccagcgagggcaccaacctgaacgcccccaacagcctgggcgtgagcgccctgtgcgccatctgcggcgacagagccaccggcaagcactacggcgccagcagctgcgacggctgcaagggcttcttcagaagaagcgtgagaaagaaccacatgtacagctgcagattcagcagacagtgcgtggtggacaaggacaagagaaaccagtgcagatactgcagactgaagaagtgcttcagagccggcatgaagaaggaggccgtgcagaacgagagagacagaatcagcaccagaagagccgcctacgaggacagcagcctgcccagcatcaacgccctgctgcaggccgaggtgctgagcagacagatcaccgcccccgtgagcggcatcaacggcgacatcagagccaagaagatcgccagcatcgccgacgtgtgcgagagcatgaaggagcagctgctggtgctggtggagtgggccaagtacatccccgccttctgcgagctgcccctggacgaccaggtggccctgctgagagcccacgccggcgagcacctgctgctgggcgccaccaagagaagcatggtgttcaaggacgtgctgctgctgggcaacgactacatcgtgcccagacactgccccgagctggccgagatgagcagagtgagcatcagaatcctggacgagctggtgctgcccttccaggagctgcagatcgacgacaacgagtacgcctacctgaaggccatcatcttcttcgaccccgacgccaagggcctgagcgaccccggcaagatcaagagactgagagcccaggtgcaggtgagcctggaggactacatcaacgacagacagtacgacagcagaggcagattcggcgagctgctgctgctgctgcccaccctgcagagcatcacctggcagatgatcgagcagatccagttcatcaagctgttcggcatggccaagatcgacaacctgctgcaggagatgctgctgggcggcgcccccagcgacgccccccacgcccaccaccccctgcacccccacctgatgcaggagcacatgggcaccaacgtgatcgtggccaacaccatgcccacccacctgagcaacggccagatgtgcgagtggcccagacccagaggccaggccgccgcccccgaggccccccagcccgccccccccggcggcagcggcagcgagccctacaagctgctgcccggcgccgtggccaccatcgtgagacccctgagcgccatcccccagcccaccatcaccaagcaggaggtgatctgaggactagttataagactgactagcccgatgggcctcccaacgggccctcctcccctccttgcaccgagattaataaaaaaaaaaaaaaaaaaaaaaaaaaaaaaaaaaaaaaaaaaaaaaaaaaaaaaaaaaaaaaaatgcatcccccccccccccccccccccccccccccccaaaggctcttttcagagccaccagaatt

SEQ ID NO: 1807 - RNA, 1642 nt, synthetic construct
  misc_feature 1..1642: note = mRNA i-3 (A64-N5-C30-hSL-N5) (opt4) from Homo sapiens__NP_000448.3__HNF4A(1-474)(S142A_S143A_S148A_S167A_ S313A_S378A_T429A_T432A_S436A_K458R)
  source 1..1642: mol_type = other RNA
aggagaaagcttaccatgagactgagcaagaccctggtggacatggacatggccgactacagcgccgccctggaccccgcctacaccaccctggagttcgagaacgtgcaggtgctgaccatgggcaacgacaccagccccagcgagggcaccaacctgaacgcccccaacagcctgggcgtgagcgccctgtgcgccatctgcggcgacagagccaccggcaagcactacggcgccagcagctgcgacggctgcaagggcttcttcagaagaagcgtgagaaagaaccacatgtacagctgcagattcagcagacagtgcgtggtggacaaggacaagagaaaccagtgcagatactgcagactgaagaagtgcttcagagccggcatgaagaaggaggccgtgcagaacgagagagacagaatcagcaccagaagagccgcctacgaggacagcgccctgcccagcatcaacgccctgctgcaggccgaggtgctgagcagacagatcaccgcccccgtgagcggcatcaacggcgacatcagagccaagaagatcgccagcatcgccgacgtgtgcgagagcatgaaggagcagctgctggtgctggtggagtgggccaagtacatccccgccttctgcgagctgcccctggacgaccaggtggccctgctgagagcccacgccggcgagcacctgctgctgggcgccaccaagagaagcatggtgttcaaggacgtgctgctgctgggcaacgactacatcgtgcccagacactgccccgagctggccgagatgagcagagtgagcatcagaatcctggacgagctggtgctgcccttccaggagctgcagatcgacgacaacgagtacgcctacctgaaggccatcatcttcttcgaccccgacgccaagggcctgagcgaccccggcaagatcaagagactgagagcccaggtgcaggtgagcctggaggactacatcaacgacagacagtacgacagcagaggcagattcggcgagctgctgctgctgctgcccaccctgcagagcatcacctggcagatgatcgagcagatccagttcatcaagctgttcggcatggccaagatcgacaacctgctgcaggagatgctgctgggcggcgcccccagcgacgccccccacgcccaccaccccctgcacccccacctgatgcaggagcacatgggcaccaacgtgatcgtggccaacaccatgcccacccacctgagcaacggccagatgtgcgagtggcccagacccagaggccaggccgccgcccccgaggccccccagcccgccccccccggcggcagcggcagcgagccctacaagctgctgcccggcgccgtggccaccatcgtgagacccctgagcgccatcccccagcccaccatcaccaagcaggaggtgatctgaggactagttataagactgactagcccgatgggcctcccaacgggccctcctcccctccttgcaccgagattaataaaaaaaaaaaaaaaaaaaaaaaaaaaaaaaaaaaaaaaaaaaaaaaaaaaaaaaaaaaaaaaatgcatcccccccccccccccccccccccccccccccaaaggctcttttcagagccaccagaatt

SEQ ID NO: 1808 - RNA, 1642 nt, synthetic construct
  misc_feature 1..1642: note = mRNA i-3 (A64-N5-C30-hSL-N5) (opt4) from Homo sapiens__NP_000448.3__HNF4A(1-474)(K106R_K108R_K126R_K127R_ S142A_S143A_S148A_S167A_S313A_S378A_T429A_T432A_S436A_K458R )
  source 1..1642: mol_type = other RNA
aggagaaagcttaccatgagactgagcaagaccctggtggacatggacatggccgactacagcgccgccctggaccccgcctacaccaccctggagttcgagaacgtgcaggtgctgaccatgggcaacgacaccagccccagcgagggcaccaacctgaacgcccccaacagcctgggcgtgagcgccctgtgcgccatctgcggcgacagagccaccggcaagcactacggcgccagcagctgcgacggctgcaagggcttcttcagaagaagcgtgagaaagaaccacatgtacagctgcagattcagcagacagtgcgtggtggacagagacagaagaaaccagtgcagatactgcagactgaagaagtgcttcagagccggcatgagaagagaggccgtgcagaacgagagagacagaatcagcaccagaagagccgcctacgaggacagcgccctgcccagcatcaacgccctgctgcaggccgaggtgctgagcagacagatcaccgcccccgtgagcggcatcaacggcgacatcagagccaagaagatcgccagcatcgccgacgtgtgcgagagcatgaaggagcagctgctggtgctggtggagtgggccaagtacatccccgccttctgcgagctgcccctggacgaccaggtggccctgctgagagcccacgccggcgagcacctgctgctgggcgccaccaagagaagcatggtgttcaaggacgtgctgctgctgggcaacgactacatcgtgcccagacactgccccgagctggccgagatgagcagagtgagcatcagaatcctggacgagctggtgctgcccttccaggagctgcagatcgacgacaacgagtacgcctacctgaaggccatcatcttcttcgaccccgacgccaagggcctgagcgaccccggcaagatcaagagactgagagcccaggtgcaggtgagcctggaggactacatcaacgacagacagtacgacagcagaggcagattcggcgagctgctgctgctgctgcccaccctgcagagcatcacctggcagatgatcgagcagatccagttcatcaagctgttcggcatggccaagatcgacaacctgctgcaggagatgctgctgggcggcgcccccagcgacgccccccacgcccaccaccccctgcacccccacctgatgcaggagcacatgggcaccaacgtgatcgtggccaacaccatgcccacccacctgagcaacggccagatgtgcgagtggcccagacccagaggccaggccgccgcccccgaggccccccagcccgccccccccggcggcagcggcagcgagccctacaagctgctgcccggcgccgtggccaccatcgtgagacccctgagcgccatcccccagcccaccatcaccaagcaggaggtgatctgaggactagttataagactgactagcccgatgggcctcccaacgggccctcctcccctccttgcaccgagattaataaaaaaaaaaaaaaaaaaaaaaaaaaaaaaaaaaaaaaaaaaaaaaaaaaaaaaaaaaaaaaaatgcatcccccccccccccccccccccccccccccccaaaggctcttttcagagccaccagaatt

SEQ ID NO: 1809 - RNA, 1642 nt, synthetic construct
  misc_feature 1..1642: note = mRNA i-3 (A64-N5-C30-hSL-N5) (opt4) from Homo sapiens__NP_000448.3__HNF4A(1-474)(S142A_S143A_S148A_T166A_ S167A_S313A_S378A_T429A_T432A_S436A_K458R)
  source 1..1642: mol_type = other RNA
aggagaaagcttaccatgagactgagcaagaccctggtggacatggacatggccgactacagcgccgccctggaccccgcctacaccaccctggagttcgagaacgtgcaggtgctgaccatgggcaacgacaccagccccagcgagggcaccaacctgaacgcccccaacagcctgggcgtgagcgccctgtgcgccatctgcggcgacagagccaccggcaagcactacggcgccagcagctgcgacggctgcaagggcttcttcagaagaagcgtgagaaagaaccacatgtacagctgcagattcagcagacagtgcgtggtggacaaggacaagagaaaccagtgcagatactgcagactgaagaagtgcttcagagccggcatgaagaaggaggccgtgcagaacgagagagacagaatcagcaccagaagagccgcctacgaggacagcgccctgcccagcatcaacgccctgctgcaggccgaggtgctgagcagacagatcgccgcccccgtgagcggcatcaacggcgacatcagagccaagaagatcgccagcatcgccgacgtgtgcgagagcatgaaggagcagctgctggtgctggtggagtgggccaagtacatccccgccttctgcgagctgcccctggacgaccaggtggccctgctgagagcccacgccggcgagcacctgctgctgggcgccaccaagagaagcatggtgttcaaggacgtgctgctgctgggcaacgactacatcgtgcccagacactgccccgagctggccgagatgagcagagtgagcatcagaatcctggacgagctggtgctgcccttccaggagctgcagatcgacgacaacgagtacgcctacctgaaggccatcatcttcttcgaccccgacgccaagggcctgagcgaccccggcaagatcaagagactgagagcccaggtgcaggtgagcctggaggactacatcaacgacagacagtacgacagcagaggcagattcggcgagctgctgctgctgctgcccaccctgcagagcatcacctggcagatgatcgagcagatccagttcatcaagctgttcggcatggccaagatcgacaacctgctgcaggagatgctgctgggcggcgcccccagcgacgccccccacgcccaccaccccctgcacccccacctgatgcaggagcacatgggcaccaacgtgatcgtggccaacaccatgcccacccacctgagcaacggccagatgtgcgagtggcccagacccagaggccaggccgccgcccccgaggccccccagcccgccccccccggcggcagcggcagcgagccctacaagctgctgcccggcgccgtggccaccatcgtgagacccctgagcgccatcccccagcccaccatcaccaagcaggaggtgatctgaggactagttataagactgactagcccgatgggcctcccaacgggccctcctcccctccttgcaccgagattaataaaaaaaaaaaaaaaaaaaaaaaaaaaaaaaaaaaaaaaaaaaaaaaaaaaaaaaaaaaaaaaatgcatcccccccccccccccccccccccccccccccaaaggctcttttcagagccaccagaatt

SEQ ID NO: 1810 - RNA, 1642 nt, synthetic construct
  misc_feature 1..1642: note = mRNA i-3 (A64-N5-C30-hSL-N5) (opt4) from Homo sapiens__NP_000448.3__HNF4A(1-474)(S87A_S142A_S143A_S148A_T 166A_S167A_S313A_S378A_T429A_T432A_S436A_K458R)
  source 1..1642: mol_type = other RNA
aggagaaagcttaccatgagactgagcaagaccctggtggacatggacatggccgactacagcgccgccctggaccccgcctacaccaccctggagttcgagaacgtgcaggtgctgaccatgggcaacgacaccagccccagcgagggcaccaacctgaacgcccccaacagcctgggcgtgagcgccctgtgcgccatctgcggcgacagagccaccggcaagcactacggcgccagcagctgcgacggctgcaagggcttcttcagaagagccgtgagaaagaaccacatgtacagctgcagattcagcagacagtgcgtggtggacaaggacaagagaaaccagtgcagatactgcagactgaagaagtgcttcagagccggcatgaagaaggaggccgtgcagaacgagagagacagaatcagcaccagaagagccgcctacgaggacagcgccctgcccagcatcaacgccctgctgcaggccgaggtgctgagcagacagatcgccgcccccgtgagcggcatcaacggcgacatcagagccaagaagatcgccagcatcgccgacgtgtgcgagagcatgaaggagcagctgctggtgctggtggagtgggccaagtacatccccgccttctgcgagctgcccctggacgaccaggtggccctgctgagagcccacgccggcgagcacctgctgctgggcgccaccaagagaagcatggtgttcaaggacgtgctgctgctgggcaacgactacatcgtgcccagacactgccccgagctggccgagatgagcagagtgagcatcagaatcctggacgagctggtgctgcccttccaggagctgcagatcgacgacaacgagtacgcctacctgaaggccatcatcttcttcgaccccgacgccaagggcctgagcgaccccggcaagatcaagagactgagagcccaggtgcaggtgagcctggaggactacatcaacgacagacagtacgacagcagaggcagattcggcgagctgctgctgctgctgcccaccctgcagagcatcacctggcagatgatcgagcagatccagttcatcaagctgttcggcatggccaagatcgacaacctgctgcaggagatgctgctgggcggcgcccccagcgacgccccccacgcccaccaccccctgcacccccacctgatgcaggagcacatgggcaccaacgtgatcgtggccaacaccatgcccacccacctgagcaacggccagatgtgcgagtggcccagacccagaggccaggccgccgcccccgaggccccccagcccgccccccccggcggcagcggcagcgagccctacaagctgctgcccggcgccgtggccaccatcgtgagacccctgagcgccatcccccagcccaccatcaccaagcaggaggtgatctgaggactagttataagactgactagcccgatgggcctcccaacgggccctcctcccctccttgcaccgagattaataaaaaaaaaaaaaaaaaaaaaaaaaaaaaaaaaaaaaaaaaaaaaaaaaaaaaaaaaaaaaaaatgcatcccccccccccccccccccccccccccccccaaaggctcttttcagagccaccagaatt

SEQ ID NO: 1811 - RNA, 1642 nt, synthetic construct
  misc_feature 1..1642: note = mRNA i-3 (A64-N5-C30-hSL-N5) (opt4) from Homo sapiens__NP_000448.3__HNF4A(1-474)(S87A_K106R_K108R_K126R_K 127R_S142A_S143A_S148A_T166A_S167A_S313A_S378A_T429A_T432A_ S436A_K458R)
  source 1..1642: mol_type = other RNA
aggagaaagcttaccatgagactgagcaagaccctggtggacatggacatggccgactacagcgccgccctggaccccgcctacaccaccctggagttcgagaacgtgcaggtgctgaccatgggcaacgacaccagccccagcgagggcaccaacctgaacgcccccaacagcctgggcgtgagcgccctgtgcgccatctgcggcgacagagccaccggcaagcactacggcgccagcagctgcgacggctgcaagggcttcttcagaagagccgtgagaaagaaccacatgtacagctgcagattcagcagacagtgcgtggtggacagagacagaagaaaccagtgcagatactgcagactgaagaagtgcttcagagccggcatgagaagagaggccgtgcagaacgagagagacagaatcagcaccagaagagccgcctacgaggacagcgccctgcccagcatcaacgccctgctgcaggccgaggtgctgagcagacagatcgccgcccccgtgagcggcatcaacggcgacatcagagccaagaagatcgccagcatcgccgacgtgtgcgagagcatgaaggagcagctgctggtgctggtggagtgggccaagtacatccccgccttctgcgagctgcccctggacgaccaggtggccctgctgagagcccacgccggcgagcacctgctgctgggcgccaccaagagaagcatggtgttcaaggacgtgctgctgctgggcaacgactacatcgtgcccagacactgccccgagctggccgagatgagcagagtgagcatcagaatcctggacgagctggtgctgcccttccaggagctgcagatcgacgacaacgagtacgcctacctgaaggccatcatcttcttcgaccccgacgccaagggcctgagcgaccccggcaagatcaagagactgagagcccaggtgcaggtgagcctggaggactacatcaacgacagacagtacgacagcagaggcagattcggcgagctgctgctgctgctgcccaccctgcagagcatcacctggcagatgatcgagcagatccagttcatcaagctgttcggcatggccaagatcgacaacctgctgcaggagatgctgctgggcggcgcccccagcgacgccccccacgcccaccaccccctgcacccccacctgatgcaggagcacatgggcaccaacgtgatcgtggccaacaccatgcccacccacctgagcaacggccagatgtgcgagtggcccagacccagaggccaggccgccgcccccgaggccccccagcccgccccccccggcggcagcggcagcgagccctacaagctgctgcccggcgccgtggccaccatcgtgagacccctgagcgccatcccccagcccaccatcaccaagcaggaggtgatctgaggactagttataagactgactagcccgatgggcctcccaacgggccctcctcccctccttgcaccgagattaataaaaaaaaaaaaaaaaaaaaaaaaaaaaaaaaaaaaaaaaaaaaaaaaaaaaaaaaaaaaaaaatgcatcccccccccccccccccccccccccccccccaaaggctcttttcagagccaccagaatt

SEQ ID NO: 1812 - RNA, 1642 nt, synthetic construct
  misc_feature 1..1642: note = mRNA i-3 (A64-N5-C30-hSL-N5) (opt4) from Homo sapiens__NP_000448.3__HNF4A(1-474)(S87A_K106R_K108R_K126R_K 127R)
  source 1..1642: mol_type = other RNA
aggagaaagcttaccatgagactgagcaagaccctggtggacatggacatggccgactacagcgccgccctggaccccgcctacaccaccctggagttcgagaacgtgcaggtgctgaccatgggcaacgacaccagccccagcgagggcaccaacctgaacgcccccaacagcctgggcgtgagcgccctgtgcgccatctgcggcgacagagccaccggcaagcactacggcgccagcagctgcgacggctgcaagggcttcttcagaagagccgtgagaaagaaccacatgtacagctgcagattcagcagacagtgcgtggtggacagagacagaagaaaccagtgcagatactgcagactgaagaagtgcttcagagccggcatgagaagagaggccgtgcagaacgagagagacagaatcagcaccagaagaagcagctacgaggacagcagcctgcccagcatcaacgccctgctgcaggccgaggtgctgagcagacagatcaccagccccgtgagcggcatcaacggcgacatcagagccaagaagatcgccagcatcgccgacgtgtgcgagagcatgaaggagcagctgctggtgctggtggagtgggccaagtacatccccgccttctgcgagctgcccctggacgaccaggtggccctgctgagagcccacgccggcgagcacctgctgctgggcgccaccaagagaagcatggtgttcaaggacgtgctgctgctgggcaacgactacatcgtgcccagacactgccccgagctggccgagatgagcagagtgagcatcagaatcctggacgagctggtgctgcccttccaggagctgcagatcgacgacaacgagtacgcctacctgaaggccatcatcttcttcgaccccgacgccaagggcctgagcgaccccggcaagatcaagagactgagaagccaggtgcaggtgagcctggaggactacatcaacgacagacagtacgacagcagaggcagattcggcgagctgctgctgctgctgcccaccctgcagagcatcacctggcagatgatcgagcagatccagttcatcaagctgttcggcatggccaagatcgacaacctgctgcaggagatgctgctgggcggcagccccagcgacgccccccacgcccaccaccccctgcacccccacctgatgcaggagcacatgggcaccaacgtgatcgtggccaacaccatgcccacccacctgagcaacggccagatgtgcgagtggcccagacccagaggccaggccgccacccccgagaccccccagcccagcccccccggcggcagcggcagcgagccctacaagctgctgcccggcgccgtggccaccatcgtgaagcccctgagcgccatcccccagcccaccatcaccaagcaggaggtgatctgaggactagttataagactgactagcccgatgggcctcccaacgggccctcctcccctccttgcaccgagattaataaaaaaaaaaaaaaaaaaaaaaaaaaaaaaaaaaaaaaaaaaaaaaaaaaaaaaaaaaaaaaaatgcatcccccccccccccccccccccccccccccccaaaggctcttttcagagccaccagaatt

SEQ ID NO: 1813 - RNA, 1642 nt, synthetic construct
  misc_feature 1..1642: note = mRNA i-3 (A64-N5-C30-hSL-N5) (opt4) from Homo sapiens__NP_000448.3__HNF4A(1-474)(S87A_K106R_K108R_K126R_K 127R_S142A_S143A_S148A_T166A_S167A_S313A_S378A_T429A_T432A_ S436A_K458R_S461A)
  source 1..1642: mol_type = other RNA
aggagaaagcttaccatgagactgagcaagaccctggtggacatggacatggccgactacagcgccgccctggaccccgcctacaccaccctggagttcgagaacgtgcaggtgctgaccatgggcaacgacaccagccccagcgagggcaccaacctgaacgcccccaacagcctgggcgtgagcgccctgtgcgccatctgcggcgacagagccaccggcaagcactacggcgccagcagctgcgacggctgcaagggcttcttcagaagagccgtgagaaagaaccacatgtacagctgcagattcagcagacagtgcgtggtggacagagacagaagaaaccagtgcagatactgcagactgaagaagtgcttcagagccggcatgagaagagaggccgtgcagaacgagagagacagaatcagcaccagaagagccgcctacgaggacagcgccctgcccagcatcaacgccctgctgcaggccgaggtgctgagcagacagatcgccgcccccgtgagcggcatcaacggcgacatcagagccaagaagatcgccagcatcgccgacgtgtgcgagagcatgaaggagcagctgctggtgctggtggagtgggccaagtacatccccgccttctgcgagctgcccctggacgaccaggtggccctgctgagagcccacgccggcgagcacctgctgctgggcgccaccaagagaagcatggtgttcaaggacgtgctgctgctgggcaacgactacatcgtgcccagacactgccccgagctggccgagatgagcagagtgagcatcagaatcctggacgagctggtgctgcccttccaggagctgcagatcgacgacaacgagtacgcctacctgaaggccatcatcttcttcgaccccgacgccaagggcctgagcgaccccggcaagatcaagagactgagagcccaggtgcaggtgagcctggaggactacatcaacgacagacagtacgacagcagaggcagattcggcgagctgctgctgctgctgcccaccctgcagagcatcacctggcagatgatcgagcagatccagttcatcaagctgttcggcatggccaagatcgacaacctgctgcaggagatgctgctgggcggcgcccccagcgacgccccccacgcccaccaccccctgcacccccacctgatgcaggagcacatgggcaccaacgtgatcgtggccaacaccatgcccacccacctgagcaacggccagatgtgcgagtggcccagacccagaggccaggccgccgcccccgaggccccccagcccgccccccccggcggcagcggcagcgagccctacaagctgctgcccggcgccgtggccaccatcgtgagacccctggccgccatcccccagcccaccatcaccaagcaggaggtgatctgaggactagttataagactgactagcccgatgggcctcccaacgggccctcctcccctccttgcaccgagattaataaaaaaaaaaaaaaaaaaaaaaaaaaaaaaaaaaaaaaaaaaaaaaaaaaaaaaaaaaaaaaaatgcatcccccccccccccccccccccccccccccccaaaggctcttttcagagccaccagaatt

SEQ ID NO: 1814 - RNA, 1642 nt, synthetic construct
  misc_feature 1..1642: note = mRNA i-3 (A64-N5-C30-hSL-N5) (opt4) from Homo sapiens__NP_000448.3__HNF4A(1-474)(S87A_K106R_K108R_K126R_K 127R_S142A_S143A_S148A_T166A_S167A_S313A_S378A_T429A_T432A_ S436A_K458R_S461E)
  source 1..1642: mol_type = other RNA
aggagaaagcttaccatgagactgagcaagaccctggtggacatggacatggccgactacagcgccgccctggaccccgcctacaccaccctggagttcgagaacgtgcaggtgctgaccatgggcaacgacaccagccccagcgagggcaccaacctgaacgcccccaacagcctgggcgtgagcgccctgtgcgccatctgcggcgacagagccaccggcaagcactacggcgccagcagctgcgacggctgcaagggcttcttcagaagagccgtgagaaagaaccacatgtacagctgcagattcagcagacagtgcgtggtggacagagacagaagaaaccagtgcagatactgcagactgaagaagtgcttcagagccggcatgagaagagaggccgtgcagaacgagagagacagaatcagcaccagaagagccgcctacgaggacagcgccctgcccagcatcaacgccctgctgcaggccgaggtgctgagcagacagatcgccgcccccgtgagcggcatcaacggcgacatcagagccaagaagatcgccagcatcgccgacgtgtgcgagagcatgaaggagcagctgctggtgctggtggagtgggccaagtacatccccgccttctgcgagctgcccctggacgaccaggtggccctgctgagagcccacgccggcgagcacctgctgctgggcgccaccaagagaagcatggtgttcaaggacgtgctgctgctgggcaacgactacatcgtgcccagacactgccccgagctggccgagatgagcagagtgagcatcagaatcctggacgagctggtgctgcccttccaggagctgcagatcgacgacaacgagtacgcctacctgaaggccatcatcttcttcgaccccgacgccaagggcctgagcgaccccggcaagatcaagagactgagagcccaggtgcaggtgagcctggaggactacatcaacgacagacagtacgacagcagaggcagattcggcgagctgctgctgctgctgcccaccctgcagagcatcacctggcagatgatcgagcagatccagttcatcaagctgttcggcatggccaagatcgacaacctgctgcaggagatgctgctgggcggcgcccccagcgacgccccccacgcccaccaccccctgcacccccacctgatgcaggagcacatgggcaccaacgtgatcgtggccaacaccatgcccacccacctgagcaacggccagatgtgcgagtggcccagacccagaggccaggccgccgcccccgaggccccccagcccgccccccccggcggcagcggcagcgagccctacaagctgctgcccggcgccgtggccaccatcgtgagacccctggaggccatcccccagcccaccatcaccaagcaggaggtgatctgaggactagttataagactgactagcccgatgggcctcccaacgggccctcctcccctccttgcaccgagattaataaaaaaaaaaaaaaaaaaaaaaaaaaaaaaaaaaaaaaaaaaaaaaaaaaaaaaaaaaaaaaaatgcatcccccccccccccccccccccccccccccccaaaggctcttttcagagccaccagaatt

SEQ ID NO: 1815 - RNA, 1642 nt, synthetic construct
  misc_feature 1..1642: note = mRNA i-3 (A64-N5-C30-hSL-N5) (opt4) from Homo sapiens__NP_000448.3__HNF4A(1-474)(S87A_K106R_K108R_K126R_K 127R_S142A_S143A_S148E_T166A_S167E_S313A_S378E_T429E_T432E_ S436E_K458R_S461E)
  source 1..1642: mol_type = other RNA
aggagaaagcttaccatgagactgagcaagaccctggtggacatggacatggccgactacagcgccgccctggaccccgcctacaccaccctggagttcgagaacgtgcaggtgctgaccatgggcaacgacaccagccccagcgagggcaccaacctgaacgcccccaacagcctgggcgtgagcgccctgtgcgccatctgcggcgacagagccaccggcaagcactacggcgccagcagctgcgacggctgcaagggcttcttcagaagagccgtgagaaagaaccacatgtacagctgcagattcagcagacagtgcgtggtggacagagacagaagaaaccagtgcagatactgcagactgaagaagtgcttcagagccggcatgagaagagaggccgtgcagaacgagagagacagaatcagcaccagaagagccgcctacgaggacagcgagctgcccagcatcaacgccctgctgcaggccgaggtgctgagcagacagatcgccgagcccgtgagcggcatcaacggcgacatcagagccaagaagatcgccagcatcgccgacgtgtgcgagagcatgaaggagcagctgctggtgctggtggagtgggccaagtacatccccgccttctgcgagctgcccctggacgaccaggtggccctgctgagagcccacgccggcgagcacctgctgctgggcgccaccaagagaagcatggtgttcaaggacgtgctgctgctgggcaacgactacatcgtgcccagacactgccccgagctggccgagatgagcagagtgagcatcagaatcctggacgagctggtgctgcccttccaggagctgcagatcgacgacaacgagtacgcctacctgaaggccatcatcttcttcgaccccgacgccaagggcctgagcgaccccggcaagatcaagagactgagagcccaggtgcaggtgagcctggaggactacatcaacgacagacagtacgacagcagaggcagattcggcgagctgctgctgctgctgcccaccctgcagagcatcacctggcagatgatcgagcagatccagttcatcaagctgttcggcatggccaagatcgacaacctgctgcaggagatgctgctgggcggcgagcccagcgacgccccccacgcccaccaccccctgcacccccacctgatgcaggagcacatgggcaccaacgtgatcgtggccaacaccatgcccacccacctgagcaacggccagatgtgcgagtggcccagacccagaggccaggccgccgagcccgaggagccccagcccgagccccccggcggcagcggcagcgagccctacaagctgctgcccggcgccgtggccaccatcgtgagacccctggaggccatcccccagcccaccatcaccaagcaggaggtgatctgaggactagttataagactgactagcccgatgggcctcccaacgggccctcctcccctccttgcaccgagattaataaaaaaaaaaaaaaaaaaaaaaaaaaaaaaaaaaaaaaaaaaaaaaaaaaaaaaaaaaaaaaaatgcatcccccccccccccccccccccccccccccccaaaggctcttttcagagccaccagaatt

SEQ ID NO: 1816 - RNA, 1642 nt, synthetic construct
  misc_feature 1..1642: note = mRNA i-3 (A64-N5-C30-hSL-N5) (opt4) from Homo sapiens__NP_000448.3__HNF4A(1-474)(S87A_K106R_K108R_K126R_K 127R_S142A_S143A_S148A_T166A_S167A_K179R_K180R_S313A_S378A_ T429A_T432A_S436A_K458R_S461E)
  source 1..1642: mol_type = other RNA
aggagaaagcttaccatgagactgagcaagaccctggtggacatggacatggccgactacagcgccgccctggaccccgcctacaccaccctggagttcgagaacgtgcaggtgctgaccatgggcaacgacaccagccccagcgagggcaccaacctgaacgcccccaacagcctgggcgtgagcgccctgtgcgccatctgcggcgacagagccaccggcaagcactacggcgccagcagctgcgacggctgcaagggcttcttcagaagagccgtgagaaagaaccacatgtacagctgcagattcagcagacagtgcgtggtggacagagacagaagaaaccagtgcagatactgcagactgaagaagtgcttcagagccggcatgagaagagaggccgtgcagaacgagagagacagaatcagcaccagaagagccgcctacgaggacagcgccctgcccagcatcaacgccctgctgcaggccgaggtgctgagcagacagatcgccgcccccgtgagcggcatcaacggcgacatcagagccagaagaatcgccagcatcgccgacgtgtgcgagagcatgaaggagcagctgctggtgctggtggagtgggccaagtacatccccgccttctgcgagctgcccctggacgaccaggtggccctgctgagagcccacgccggcgagcacctgctgctgggcgccaccaagagaagcatggtgttcaaggacgtgctgctgctgggcaacgactacatcgtgcccagacactgccccgagctggccgagatgagcagagtgagcatcagaatcctggacgagctggtgctgcccttccaggagctgcagatcgacgacaacgagtacgcctacctgaaggccatcatcttcttcgaccccgacgccaagggcctgagcgaccccggcaagatcaagagactgagagcccaggtgcaggtgagcctggaggactacatcaacgacagacagtacgacagcagaggcagattcggcgagctgctgctgctgctgcccaccctgcagagcatcacctggcagatgatcgagcagatccagttcatcaagctgttcggcatggccaagatcgacaacctgctgcaggagatgctgctgggcggcgcccccagcgacgccccccacgcccaccaccccctgcacccccacctgatgcaggagcacatgggcaccaacgtgatcgtggccaacaccatgcccacccacctgagcaacggccagatgtgcgagtggcccagacccagaggccaggccgccgcccccgaggccccccagcccgccccccccggcggcagcggcagcgagccctacaagctgctgcccggcgccgtggccaccatcgtgagacccctggaggccatcccccagcccaccatcaccaagcaggaggtgatctgaggactagttataagactgactagcccgatgggcctcccaacgggccctcctcccctccttgcaccgagattaataaaaaaaaaaaaaaaaaaaaaaaaaaaaaaaaaaaaaaaaaaaaaaaaaaaaaaaaaaaaaaaatgcatcccccccccccccccccccccccccccccccaaaggctcttttcagagccaccagaatt

SEQ ID NO: 1817 - RNA, 1642 nt, synthetic construct
  misc_feature 1..1642: note = mRNA i-3 (A64-N5-C30-hSL-N5) (opt4) from Homo sapiens__NP_000448.3__HNF4A(1-474)(S87A_K106R_K108R_K126R_K 127R_S142A_S143A_S148A_T166A_S167A_K300R_K307R_K309R_S313A_ S378A_T429A_T432A_S436A_K458R_S461E)
  source 1..1642: mol_type = other RNA
aggagaaagcttaccatgagactgagcaagaccctggtggacatggacatggccgactacagcgccgccctggaccccgcctacaccaccctggagttcgagaacgtgcaggtgctgaccatgggcaacgacaccagccccagcgagggcaccaacctgaacgcccccaacagcctgggcgtgagcgccctgtgcgccatctgcggcgacagagccaccggcaagcactacggcgccagcagctgcgacggctgcaagggcttcttcagaagagccgtgagaaagaaccacatgtacagctgcagattcagcagacagtgcgtggtggacagagacagaagaaaccagtgcagatactgcagactgaagaagtgcttcagagccggcatgagaagagaggccgtgcagaacgagagagacagaatcagcaccagaagagccgcctacgaggacagcgccctgcccagcatcaacgccctgctgcaggccgaggtgctgagcagacagatcgccgcccccgtgagcggcatcaacggcgacatcagagccaagaagatcgccagcatcgccgacgtgtgcgagagcatgaaggagcagctgctggtgctggtggagtgggccaagtacatccccgccttctgcgagctgcccctggacgaccaggtggccctgctgagagcccacgccggcgagcacctgctgctgggcgccaccaagagaagcatggtgttcaaggacgtgctgctgctgggcaacgactacatcgtgcccagacactgccccgagctggccgagatgagcagagtgagcatcagaatcctggacgagctggtgctgcccttccaggagctgcagatcgacgacaacgagtacgcctacctgaaggccatcatcttcttcgaccccgacgccagaggcctgagcgaccccggcagaatcagaagactgagagcccaggtgcaggtgagcctggaggactacatcaacgacagacagtacgacagcagaggcagattcggcgagctgctgctgctgctgcccaccctgcagagcatcacctggcagatgatcgagcagatccagttcatcaagctgttcggcatggccaagatcgacaacctgctgcaggagatgctgctgggcggcgcccccagcgacgccccccacgcccaccaccccctgcacccccacctgatgcaggagcacatgggcaccaacgtgatcgtggccaacaccatgcccacccacctgagcaacggccagatgtgcgagtggcccagacccagaggccaggccgccgcccccgaggccccccagcccgccccccccggcggcagcggcagcgagccctacaagctgctgcccggcgccgtggccaccatcgtgagacccctggaggccatcccccagcccaccatcaccaagcaggaggtgatctgaggactagttataagactgactagcccgatgggcctcccaacgggccctcctcccctccttgcaccgagattaataaaaaaaaaaaaaaaaaaaaaaaaaaaaaaaaaaaaaaaaaaaaaaaaaaaaaaaaaaaaaaaatgcatcccccccccccccccccccccccccccccccaaaggctcttttcagagccaccagaatt

SEQ ID NO: 1818 - RNA, 1642 nt, synthetic construct
  misc_feature 1..1642: note = mRNA i-3 (A64-N5-C30-hSL-N5) (opt4) from Homo sapiens__NP_000448.3__HNF4A(1-474)(S87A_K106R_K108R_K126R_K 127R_S142A_S143A_S148A_T166A_S167A_S313A_S378A_T429A_T432A_ S436A_K447R_K458R_S461E_K470R)
  source 1..1642: mol_type = other RNA
aggagaaagcttaccatgagactgagcaagaccctggtggacatggacatggccgactacagcgccgccctggaccccgcctacaccaccctggagttcgagaacgtgcaggtgctgaccatgggcaacgacaccagccccagcgagggcaccaacctgaacgcccccaacagcctgggcgtgagcgccctgtgcgccatctgcggcgacagagccaccggcaagcactacggcgccagcagctgcgacggctgcaagggcttcttcagaagagccgtgagaaagaaccacatgtacagctgcagattcagcagacagtgcgtggtggacagagacagaagaaaccagtgcagatactgcagactgaagaagtgcttcagagccggcatgagaagagaggccgtgcagaacgagagagacagaatcagcaccagaagagccgcctacgaggacagcgccctgcccagcatcaacgccctgctgcaggccgaggtgctgagcagacagatcgccgcccccgtgagcggcatcaacggcgacatcagagccaagaagatcgccagcatcgccgacgtgtgcgagagcatgaaggagcagctgctggtgctggtggagtgggccaagtacatccccgccttctgcgagctgcccctggacgaccaggtggccctgctgagagcccacgccggcgagcacctgctgctgggcgccaccaagagaagcatggtgttcaaggacgtgctgctgctgggcaacgactacatcgtgcccagacactgccccgagctggccgagatgagcagagtgagcatcagaatcctggacgagctggtgctgcccttccaggagctgcagatcgacgacaacgagtacgcctacctgaaggccatcatcttcttcgaccccgacgccaagggcctgagcgaccccggcaagatcaagagactgagagcccaggtgcaggtgagcctggaggactacatcaacgacagacagtacgacagcagaggcagattcggcgagctgctgctgctgctgcccaccctgcagagcatcacctggcagatgatcgagcagatccagttcatcaagctgttcggcatggccaagatcgacaacctgctgcaggagatgctgctgggcggcgcccccagcgacgccccccacgcccaccaccccctgcacccccacctgatgcaggagcacatgggcaccaacgtgatcgtggccaacaccatgcccacccacctgagcaacggccagatgtgcgagtggcccagacccagaggccaggccgccgcccccgaggccccccagcccgccccccccggcggcagcggcagcgagccctacagactgctgcccggcgccgtggccaccatcgtgagacccctggaggccatcccccagcccaccatcaccagacaggaggtgatctgaggactagttataagactgactagcccgatgggcctcccaacgggccctcctcccctccttgcaccgagattaataaaaaaaaaaaaaaaaaaaaaaaaaaaaaaaaaaaaaaaaaaaaaaaaaaaaaaaaaaaaaaaatgcatcccccccccccccccccccccccccccccccaaaggctcttttcagagccaccagaatt

SEQ ID NO: 1819 - RNA, 1642 nt, synthetic construct
  misc_feature 1..1642: note = mRNA i-3 (A64-N5-C30-hSL-N5) (opt4) from Homo sapiens__NP_000448.3__HNF4A(1-474)(S87A_K106R_K108R_K126R_K 127R_S142A_S143A_S148A_T166A_S167A_K179R_K180R_K234R_K300R_ K307R_K309R_S313A_S378A_T429A_T432A_S436A_K447R_K458R_S461E _K470R)
  source 1..1642: mol_type = other RNA
aggagaaagcttaccatgagactgagcaagaccctggtggacatggacatggccgactacagcgccgccctggaccccgcctacaccaccctggagttcgagaacgtgcaggtgctgaccatgggcaacgacaccagccccagcgagggcaccaacctgaacgcccccaacagcctgggcgtgagcgccctgtgcgccatctgcggcgacagagccaccggcaagcactacggcgccagcagctgcgacggctgcaagggcttcttcagaagagccgtgagaaagaaccacatgtacagctgcagattcagcagacagtgcgtggtggacagagacagaagaaaccagtgcagatactgcagactgaagaagtgcttcagagccggcatgagaagagaggccgtgcagaacgagagagacagaatcagcaccagaagagccgcctacgaggacagcgccctgcccagcatcaacgccctgctgcaggccgaggtgctgagcagacagatcgccgcccccgtgagcggcatcaacggcgacatcagagccagaagaatcgccagcatcgccgacgtgtgcgagagcatgaaggagcagctgctggtgctggtggagtgggccaagtacatccccgccttctgcgagctgcccctggacgaccaggtggccctgctgagagcccacgccggcgagcacctgctgctgggcgccaccagaagaagcatggtgttcaaggacgtgctgctgctgggcaacgactacatcgtgcccagacactgccccgagctggccgagatgagcagagtgagcatcagaatcctggacgagctggtgctgcccttccaggagctgcagatcgacgacaacgagtacgcctacctgaaggccatcatcttcttcgaccccgacgccagaggcctgagcgaccccggcagaatcagaagactgagagcccaggtgcaggtgagcctggaggactacatcaacgacagacagtacgacagcagaggcagattcggcgagctgctgctgctgctgcccaccctgcagagcatcacctggcagatgatcgagcagatccagttcatcaagctgttcggcatggccaagatcgacaacctgctgcaggagatgctgctgggcggcgcccccagcgacgccccccacgcccaccaccccctgcacccccacctgatgcaggagcacatgggcaccaacgtgatcgtggccaacaccatgcccacccacctgagcaacggccagatgtgcgagtggcccagacccagaggccaggccgccgcccccgaggccccccagcccgccccccccggcggcagcggcagcgagccctacagactgctgcccggcgccgtggccaccatcgtgagacccctggaggccatcccccagcccaccatcaccagacaggaggtgatctgaggactagttataagactgactagcccgatgggcctcccaacgggccctcctcccctccttgcaccgagattaataaaaaaaaaaaaaaaaaaaaaaaaaaaaaaaaaaaaaaaaaaaaaaaaaaaaaaaaaaaaaaaatgcatcccccccccccccccccccccccccccccccaaaggctcttttcagagccaccagaatt

SEQ ID NO: 1820 - RNA, 1642 nt, synthetic construct
  misc_feature 1..1642: note = mRNA i-3 (A64-N5-C30-hSL-N5) (opt4) from Homo sapiens__NP_000448.3__HNF4A(1-474)(S87A_S95A_S99A_K106R_K10 8R_K126R_K127R_S142A_S143A_S148A_T166A_S167A_S313A_S378A_T4 29A_T432A_S436A_K458R_S461E)
  source 1..1642: mol_type = other RNA
aggagaaagcttaccatgagactgagcaagaccctggtggacatggacatggccgactacagcgccgccctggaccccgcctacaccaccctggagttcgagaacgtgcaggtgctgaccatgggcaacgacaccagccccagcgagggcaccaacctgaacgcccccaacagcctgggcgtgagcgccctgtgcgccatctgcggcgacagagccaccggcaagcactacggcgccagcagctgcgacggctgcaagggcttcttcagaagagccgtgagaaagaaccacatgtacgcctgcagattcgccagacagtgcgtggtggacagagacagaagaaaccagtgcagatactgcagactgaagaagtgcttcagagccggcatgagaagagaggccgtgcagaacgagagagacagaatcagcaccagaagagccgcctacgaggacagcgccctgcccagcatcaacgccctgctgcaggccgaggtgctgagcagacagatcgccgcccccgtgagcggcatcaacggcgacatcagagccaagaagatcgccagcatcgccgacgtgtgcgagagcatgaaggagcagctgctggtgctggtggagtgggccaagtacatccccgccttctgcgagctgcccctggacgaccaggtggccctgctgagagcccacgccggcgagcacctgctgctgggcgccaccaagagaagcatggtgttcaaggacgtgctgctgctgggcaacgactacatcgtgcccagacactgccccgagctggccgagatgagcagagtgagcatcagaatcctggacgagctggtgctgcccttccaggagctgcagatcgacgacaacgagtacgcctacctgaaggccatcatcttcttcgaccccgacgccaagggcctgagcgaccccggcaagatcaagagactgagagcccaggtgcaggtgagcctggaggactacatcaacgacagacagtacgacagcagaggcagattcggcgagctgctgctgctgctgcccaccctgcagagcatcacctggcagatgatcgagcagatccagttcatcaagctgttcggcatggccaagatcgacaacctgctgcaggagatgctgctgggcggcgcccccagcgacgccccccacgcccaccaccccctgcacccccacctgatgcaggagcacatgggcaccaacgtgatcgtggccaacaccatgcccacccacctgagcaacggccagatgtgcgagtggcccagacccagaggccaggccgccgcccccgaggccccccagcccgccccccccggcggcagcggcagcgagccctacaagctgctgcccggcgccgtggccaccatcgtgagacccctggaggccatcccccagcccaccatcaccaagcaggaggtgatctgaggactagttataagactgactagcccgatgggcctcccaacgggccctcctcccctccttgcaccgagattaataaaaaaaaaaaaaaaaaaaaaaaaaaaaaaaaaaaaaaaaaaaaaaaaaaaaaaaaaaaaaaaatgcatcccccccccccccccccccccccccccccccaaaggctcttttcagagccaccagaatt

SEQ ID NO: 1821 - RNA, 1642 nt, synthetic construct
  misc_feature 1..1642: note = mRNA i-3 (A64-N5-C30-hSL-N5) (opt4) from Homo sapiens__NP_000448.3__HNF4A(1-474)(S87A_K106R_K108R_K126R_K 127R_S138A_T139A_S142A_S143A_S148A_T166A_S167A_S313A_S378A_ T429A_T432A_S436A_K458R_S461E)
  source 1..1642: mol_type = other RNA
aggagaaagcttaccatgagactgagcaagaccctggtggacatggacatggccgactacagcgccgccctggaccccgcctacaccaccctggagttcgagaacgtgcaggtgctgaccatgggcaacgacaccagccccagcgagggcaccaacctgaacgcccccaacagcctgggcgtgagcgccctgtgcgccatctgcggcgacagagccaccggcaagcactacggcgccagcagctgcgacggctgcaagggcttcttcagaagagccgtgagaaagaaccacatgtacagctgcagattcagcagacagtgcgtggtggacagagacagaagaaaccagtgcagatactgcagactgaagaagtgcttcagagccggcatgagaagagaggccgtgcagaacgagagagacagaatcgccgccagaagagccgcctacgaggacagcgccctgcccagcatcaacgccctgctgcaggccgaggtgctgagcagacagatcgccgcccccgtgagcggcatcaacggcgacatcagagccaagaagatcgccagcatcgccgacgtgtgcgagagcatgaaggagcagctgctggtgctggtggagtgggccaagtacatccccgccttctgcgagctgcccctggacgaccaggtggccctgctgagagcccacgccggcgagcacctgctgctgggcgccaccaagagaagcatggtgttcaaggacgtgctgctgctgggcaacgactacatcgtgcccagacactgccccgagctggccgagatgagcagagtgagcatcagaatcctggacgagctggtgctgcccttccaggagctgcagatcgacgacaacgagtacgcctacctgaaggccatcatcttcttcgaccccgacgccaagggcctgagcgaccccggcaagatcaagagactgagagcccaggtgcaggtgagcctggaggactacatcaacgacagacagtacgacagcagaggcagattcggcgagctgctgctgctgctgcccaccctgcagagcatcacctggcagatgatcgagcagatccagttcatcaagctgttcggcatggccaagatcgacaacctgctgcaggagatgctgctgggcggcgcccccagcgacgccccccacgcccaccaccccctgcacccccacctgatgcaggagcacatgggcaccaacgtgatcgtggccaacaccatgcccacccacctgagcaacggccagatgtgcgagtggcccagacccagaggccaggccgccgcccccgaggccccccagcccgccccccccggcggcagcggcagcgagccctacaagctgctgcccggcgccgtggccaccatcgtgagacccctggaggccatcccccagcccaccatcaccaagcaggaggtgatctgaggactagttataagactgactagcccgatgggcctcccaacgggccctcctcccctccttgcaccgagattaataaaaaaaaaaaaaaaaaaaaaaaaaaaaaaaaaaaaaaaaaaaaaaaaaaaaaaaaaaaaaaaatgcatcccccccccccccccccccccccccccccccaaaggctcttttcagagccaccagaatt

SEQ ID NO: 1822 - RNA, 1642 nt, synthetic construct
  misc_feature 1..1642: note = mRNA i-3 (A64-N5-C30-hSL-N5) (opt4) from Homo sapiens__NP_000448.3__HNF4A(1-474)(S87A_S95A_S99A_K106R_K10 8R_K126R_K127R_S138A_T139A_S142A_S143A_S148A_T166A_S167A_S3 13A_S378A_T429A_T432A_S436A_K458R_S461E)
  source 1..1642: mol_type = other RNA
aggagaaagcttaccatgagactgagcaagaccctggtggacatggacatggccgactacagcgccgccctggaccccgcctacaccaccctggagttcgagaacgtgcaggtgctgaccatgggcaacgacaccagccccagcgagggcaccaacctgaacgcccccaacagcctgggcgtgagcgccctgtgcgccatctgcggcgacagagccaccggcaagcactacggcgccagcagctgcgacggctgcaagggcttcttcagaagagccgtgagaaagaaccacatgtacgcctgcagattcgccagacagtgcgtggtggacagagacagaagaaaccagtgcagatactgcagactgaagaagtgcttcagagccggcatgagaagagaggccgtgcagaacgagagagacagaatcgccgccagaagagccgcctacgaggacagcgccctgcccagcatcaacgccctgctgcaggccgaggtgctgagcagacagatcgccgcccccgtgagcggcatcaacggcgacatcagagccaagaagatcgccagcatcgccgacgtgtgcgagagcatgaaggagcagctgctggtgctggtggagtgggccaagtacatccccgccttctgcgagctgcccctggacgaccaggtggccctgctgagagcccacgccggcgagcacctgctgctgggcgccaccaagagaagcatggtgttcaaggacgtgctgctgctgggcaacgactacatcgtgcccagacactgccccgagctggccgagatgagcagagtgagcatcagaatcctggacgagctggtgctgcccttccaggagctgcagatcgacgacaacgagtacgcctacctgaaggccatcatcttcttcgaccccgacgccaagggcctgagcgaccccggcaagatcaagagactgagagcccaggtgcaggtgagcctggaggactacatcaacgacagacagtacgacagcagaggcagattcggcgagctgctgctgctgctgcccaccctgcagagcatcacctggcagatgatcgagcagatccagttcatcaagctgttcggcatggccaagatcgacaacctgctgcaggagatgctgctgggcggcgcccccagcgacgccccccacgcccaccaccccctgcacccccacctgatgcaggagcacatgggcaccaacgtgatcgtggccaacaccatgcccacccacctgagcaacggccagatgtgcgagtggcccagacccagaggccaggccgccgcccccgaggccccccagcccgccccccccggcggcagcggcagcgagccctacaagctgctgcccggcgccgtggccaccatcgtgagacccctggaggccatcccccagcccaccatcaccaagcaggaggtgatctgaggactagttataagactgactagcccgatgggcctcccaacgggccctcctcccctccttgcaccgagattaataaaaaaaaaaaaaaaaaaaaaaaaaaaaaaaaaaaaaaaaaaaaaaaaaaaaaaaaaaaaaaaatgcatcccccccccccccccccccccccccccccccaaaggctcttttcagagccaccagaatt

SEQ ID NO: 1823 - RNA, 1642 nt, synthetic construct
  misc_feature 1..1642: note = mRNA i-3 (A64-N5-C30-hSL-N5) (opt5) from Homo sapiens__NP_000448.3__HNF4A(1-474)
  source 1..1642: mol_type = other RNA
aggagaaagcttaccatgagactgagcaagaccctcgtggacatggatatggccgactactccgctgccctggatcccgcgtatacaacgcttgagttcgaaaacgtccaggttctgaccatgggcaatgacacatctcctagcgaggggaccaacctcaatgctccgaactccctgggagtgtctgccctttgcgccatctgtggcgatcgggctacagggaaacactacggagccagctcctgcgacggctgtaaggggtttttccgcagatctgtgcggaaaaatcatatgtatagctgccgcttttccagacaatgtgtcgtggataaggacaaacggaaccagtgccgctactgtagactgaagaagtgcttccgggctggaatgaaaaaggaagccgttcagaatgagcgcgatagaattagcacccggcgcagctcctatgaagacagctctctcccctccatcaacgcgctgctgcaggccgaggtgctcagcagacaaattacatctcctgtctccggcatcaatggcgatattcgggctaaaaagatcgccagcatcgctgacgtgtgtgagtccatgaaagaacagctgcttgttctggtggagtgggccaagtacattcccgcgttttgcgaactccctctggatgaccaggtcgcccttctgcgcgctcacgccggggagcatctcctgctgggagctaccaagagatctatggtgttcaaagacgtgctcctgcttggcaacgattatatcgtcccccggcactgtcctgagctggccgaaatgagcagagtttccattcgcatcctcgacgagctggtgcttccgtttcaggaactgcaaattgatgacaatgagtacgcctacctcaaggctatcattttctttgatcccgacgcgaaagggctgagcgatcctggaaagatcaaacggctgagatctcaggtgcaggtctccctcgaagactatatcaacgatcgccagtacgacagccggggcagattcggggagctgcttctgctcctgcccacgcttcaatctattacctggcagatgatcgagcagattcaatttatcaagctgttcggaatggccaaaattgataatctcctgcaggaaatgctgctcggcggcagcccttccgacgctccccatgcccaccacccgctgcatcctcaccttatgcaggagcatatggggacaaacgtgatcgttgccaataccatgcccacacacctgtctaacggacagatgtgcgaatggcctcgcccccggggccaagctgccacccccgagacgcctcagccgtctccccctgggggatccggcagcgaaccctataagctcctgcctggggcggtggctacaatcgtcaagcccctgtctgccattccgcagcctaccatcacaaaacaggaggtgatttgaggactagttataagactgactagcccgatgggcctcccaacgggccctcctcccctccttgcaccgagattaataaaaaaaaaaaaaaaaaaaaaaaaaaaaaaaaaaaaaaaaaaaaaaaaaaaaaaaaaaaaaaaatgcatcccccccccccccccccccccccccccccccaaaggctcttttcagagccaccagaatt

SEQ ID NO: 1824 - RNA, 1642 nt, synthetic construct
  misc_feature 1..1642: note = mRNA i-3 (A64-N5-C30-hSL-N5) (opt5) from Homo sapiens__NP_000448.3__HNF4A(1-474)(S313A)
  source 1..1642: mol_type = other RNA
aggagaaagcttaccatgagactgagcaagaccctcgtggacatggatatggccgactactccgctgccctggatcccgcgtatacaacgcttgagttcgaaaacgtccaggttctgaccatgggcaatgacacatctcctagcgaggggaccaacctcaatgctccgaactccctgggagtgtctgccctttgcgccatctgtggcgatcgggctacagggaaacactacggagccagctcctgcgacggctgtaaggggtttttccgcagatctgtgcggaaaaatcatatgtatagctgccgcttttccagacaatgtgtcgtggataaggacaaacggaaccagtgccgctactgtagactgaagaagtgcttccgggctggaatgaaaaaggaagccgttcagaatgagcgcgatagaattagcacccggagatcttcctatgaagacagctctctcccctccatcaacgcgctgctgcaggccgaggtgctcagccgccaaattacatctcctgtctccggcatcaatggcgatattcgggctaaaaagatcgccagcatcgctgacgtgtgtgagtccatgaaagaacagctgcttgttctggtggagtgggccaagtacattcccgcgttttgcgaactccctctggatgaccaggtcgcccttctgcgcgctcacgccggggagcatctcctgctgggagctaccaagagatctatggtgttcaaagacgtgctcctgcttggcaacgattatatcgtcccccggcactgtcctgagctggccgaaatgagcagagtttccattcgcatcctcgacgagctggtgcttccgtttcaggaactgcaaattgatgacaatgagtacgcctacctcaaggctatcattttctttgatcccgacgcgaaagggctgagcgatcctggaaagatcaaacggctgagagcccaggtgcaggtctctctcgaagactatatcaacgatcgccagtacgactcccggggcagattcggggagctgcttctgctcctgcccacgcttcaaagcattacctggcagatgatcgagcagattcaatttatcaagctgttcggaatggctaaaattgataatctcctgcaggaaatgctgctcggcggctctcctagcgacgctccccatgcccaccacccgctgcatcctcaccttatgcaggagcatatggggacaaacgtgatcgttgccaataccatgcccacacacctgtccaacggacagatgtgcgaatggcctcgcccccggggccaagccgcgacccccgagacgcctcagccgtctccccctgggggaagcggctccgaaccctataagctcctgcctggggctgtggccacaatcgtcaagcccctgagcgccattccgcagcctaccatcacaaaacaggaggtgatttgaggactagttataagactgactagcccgatgggcctcccaacgggccctcctcccctccttgcaccgagattaataaaaaaaaaaaaaaaaaaaaaaaaaaaaaaaaaaaaaaaaaaaaaaaaaaaaaaaaaaaaaaaatgcatcccccccccccccccccccccccccccccccaaaggctcttttcagagccaccagaatt

SEQ ID NO: 1825 - RNA, 1642 nt, synthetic construct
  misc_feature 1..1642: note = mRNA i-3 (A64-N5-C30-hSL-N5) (opt5) from Homo sapiens__NP_000448.3__HNF4A(1-474)(S313E)
  source 1..1642: mol_type = other RNA
aggagaaagcttaccatgagactgagcaagaccctcgtggacatggatatggccgactactccgctgccctggatcccgcgtatacaacgcttgagttcgaaaacgtccaggttctgaccatgggcaatgacacatctcctagcgaggggaccaacctcaatgctccgaactccctgggagtgtctgccctttgcgccatctgtggcgatcgggctacagggaaacactacggagccagctcctgcgacggctgtaaggggtttttccgcagatctgtgcggaaaaatcatatgtatagctgccgcttttccagacaatgtgtcgtggataaggacaaacggaaccagtgccgctactgtagactgaagaagtgcttccgggctggaatgaaaaaggaagccgttcagaatgagcgcgatagaattagcacccggagatcttcctatgaagacagctctctcccctccatcaacgcgctgctgcaggccgaggtgctcagccgccaaattacatctcctgtctccggcatcaatggcgatattcgggctaaaaagatcgccagcatcgctgacgtgtgtgagtccatgaaagaacagctgcttgttctggtggagtgggccaagtacattcccgcgttttgcgaactccctctggatgaccaggtcgcccttctgcgcgctcacgccggggagcatctcctgctgggagctaccaagagatctatggtgttcaaagacgtgctcctgcttggcaacgattatatcgtcccccggcactgtcctgagctggccgaaatgagcagagtttccattcgcatcctcgacgagctggtgcttccgtttcaggaactgcaaattgatgacaatgagtacgcctacctcaaggctatcattttctttgatcccgacgcgaaagggctgagcgatcctggaaagatcaaacggctgagagaacaggtgcaggtctctctcgaggactatatcaacgatcgccagtacgactcccggggcagattcggggagctgcttctgctcctgcccacgcttcaaagcattacctggcagatgatcgaacagattcaatttatcaagctgttcggaatggccaaaattgataatctcctgcaggagatgctgctcggcggctctcctagcgacgctccccatgcccaccacccgctgcatcctcaccttatgcaggaacatatggggacaaacgtgatcgttgccaataccatgcccacacacctgtccaacggacagatgtgcgagtggcctcgcccccggggccaagctgccacccccgaaacgcctcagccgtctccccctgggggaagcggctccgagccctataagctcctgcctggggcggtggctacaatcgtcaagcccctgagcgccattccgcagcctaccatcacaaaacaggaggtgatttgaggactagttataagactgactagcccgatgggcctcccaacgggccctcctcccctccttgcaccgagattaataaaaaaaaaaaaaaaaaaaaaaaaaaaaaaaaaaaaaaaaaaaaaaaaaaaaaaaaaaaaaaaatgcatcccccccccccccccccccccccccccccccaaaggctcttttcagagccaccagaatt

SEQ ID NO: 1826 - RNA, 1642 nt, synthetic construct
  misc_feature 1..1642: note = mRNA i-3 (A64-N5-C30-hSL-N5) (opt5) from Homo sapiens__NP_000448.3__HNF4A(1-474)(S142A_S143A)
  source 1..1642: mol_type = other RNA
aggagaaagcttaccatgagactgagcaagaccctcgtggacatggatatggccgactactccgctgccctggatcccgcgtatacaacgcttgagttcgaaaacgtccaggttctgaccatgggcaatgacacatctcctagcgaggggaccaacctcaatgctccgaactccctgggagtgtctgccctttgcgccatctgtggcgatcgggctacagggaaacactacggagccagctcctgcgacggctgtaaggggtttttccgcagatctgtgcggaaaaatcatatgtatagctgccgcttttccagacaatgtgtcgtggataaggacaaacggaaccagtgccgctactgtagactgaagaagtgcttccgggctggaatgaaaaaggaagccgttcagaatgagcgcgatagaattagcacccggcgcgcggcctatgaagactcttccctccccagcatcaacgctctgctgcaggccgaggtgctctctagacaaattacatcccctgtcagcggcatcaatggcgatattcgggctaaaaagatcgcctctatcgcggacgtgtgtgagtccatgaaagaacagctgcttgttctggtggagtgggccaagtacattcccgctttttgcgaactccctctggatgaccaggtcgcccttctgcgcgctcacgccggggagcatctcctgctgggagccaccaagagaagcatggtgttcaaagacgtgctcctgcttggcaacgattatatcgtcccccggcactgtcctgagctggctgaaatgtccagagtttctattcgcatcctcgacgagctggtgcttccgtttcaggaactgcaaattgatgacaatgagtacgcgtacctcaaggccatcattttctttgatcccgacgctaaagggctgagcgatcctggaaagatcaaacggctgagatcccaggtgcaggtcagcctcgaagactatatcaacgatcgccagtacgactctcggggcagattcggggagctgcttctgctcctgcccacgcttcaatccattacctggcagatgatcgagcagattcaatttatcaagctgttcggaatggccaaaattgataatctcctgcaggaaatgctgctcggcggcagcccttctgacgctccccatgcccaccacccgctgcatcctcaccttatgcaggagcatatggggacaaacgtgatcgttgccaataccatgcccacacacctgagcaacggacagatgtgcgaatggcctcgcccccggggccaagcggctacccccgagacgcctcagccgtctccccctgggggatccggcagcgaaccctataagctcctgcctggggccgtggccacaatcgtcaagcccctgtccgctattccgcagcctaccatcacaaaacaggaggtgatttgaggactagttataagactgactagcccgatgggcctcccaacgggccctcctcccctccttgcaccgagattaataaaaaaaaaaaaaaaaaaaaaaaaaaaaaaaaaaaaaaaaaaaaaaaaaaaaaaaaaaaaaaaatgcatcccccccccccccccccccccccccccccccaaaggctcttttcagagccaccagaatt

SEQ ID NO: 1827 - RNA, 1642 nt, synthetic construct
  misc_feature 1..1642: note = mRNA i-3 (A64-N5-C30-hSL-N5) (opt5) from Homo sapiens__NP_000448.3__HNF4A(1-474)(S142E_S143E)
  source 1..1642: mol_type = other RNA
aggagaaagcttaccatgagactgagcaagaccctcgtggacatggatatggccgactactccgctgccctggatcccgcgtatacaacgcttgagttcgaaaacgtccaggttctgaccatgggcaatgacacatctcctagcgaggggaccaacctcaatgctccgaactccctgggagtgtctgccctttgcgccatctgtggcgatcgggctacagggaaacactacggagccagctcctgcgacggctgtaaggggtttttccgcagatctgtgcggaaaaatcatatgtatagctgccgcttttccagacaatgtgtcgtggataaggacaaacggaaccagtgccgctactgtagactgaagaagtgcttccgggctggaatgaaaaaggaagccgttcagaatgagcgcgatagaattagcacccggcgcgaagagtatgaggactcttccctccccagcatcaacgcgctgctgcaggccgaagtgctctctagacaaattacatcccctgtcagcggcatcaatggcgatattcgggctaaaaagatcgcctctatcgctgacgtgtgtgagtccatgaaagaacagctgcttgttctggtggagtgggccaagtacattcccgcgttttgcgagctccctctggatgaccaggtcgcccttctgcgcgctcacgccggggaacatctcctgctgggagctaccaagagaagcatggtgttcaaagacgtgctcctgcttggcaacgattatatcgtcccccggcactgtcctgagctggccgaaatgtccagagtttctattcgcatcctcgacgagctggtgcttccgtttcaggaactgcaaattgatgacaatgagtacgcctacctcaaggctatcattttctttgatcccgacgcgaaagggctgagcgatcctggaaagatcaaacggctgagatcccaggtgcaggtcagcctcgaggactatatcaacgatcgccagtacgactctcggggcagattcggggaactgcttctgctcctgcccacgcttcaatccattacctggcagatgatcgagcagattcaatttatcaagctgttcggaatggccaaaattgataatctcctgcaggaaatgctgctcggcggcagcccttctgacgctccccatgcccaccacccgctgcatcctcaccttatgcaggagcatatggggacaaacgtgatcgttgccaataccatgcccacacacctgagcaacggacagatgtgcgaatggcctcgcccccggggccaagctgccacccccgagacgcctcagccgtctccccctgggggatccggcagcgagccctataagctcctgcctggggcggtggctacaatcgtcaagcccctgtccgccattccgcagcctaccatcacaaaacaggaagtgatttgaggactagttataagactgactagcccgatgggcctcccaacgggccctcctcccctccttgcaccgagattaataaaaaaaaaaaaaaaaaaaaaaaaaaaaaaaaaaaaaaaaaaaaaaaaaaaaaaaaaaaaaaaatgcatcccccccccccccccccccccccccccccccaaaggctcttttcagagccaccagaatt

SEQ ID NO: 1828 - RNA, 1642 nt, synthetic construct
  misc_feature 1..1642: note = mRNA i-3 (A64-N5-C30-hSL-N5) (opt5) from Homo sapiens__NP_000448.3__HNF4A(1-474)(S143A)
  source 1..1642: mol_type = other RNA
aggagaaagcttaccatgagactgagcaagaccctcgtggacatggatatggccgactactccgctgccctggatcccgcgtatacaacgcttgagttcgaaaacgtccaggttctgaccatgggcaatgacacatctcctagcgaggggaccaacctcaatgctccgaactccctgggagtgtctgccctttgcgccatctgtggcgatcgggctacagggaaacactacggagccagctcctgcgacggctgtaaggggtttttccgcagatctgtgcggaaaaatcatatgtatagctgccgcttttccagacaatgtgtcgtggataaggacaaacggaaccagtgccgctactgtagactgaagaagtgcttccgggctggaatgaaaaaggaagccgttcagaatgagcgcgatagaattagcacccggcgctctgcgtatgaagactccagcctcccctctatcaacgccctgctgcaggctgaggtgctctccagacaaattacaagccctgtctctggcatcaatggcgatattcgggccaaaaagatcgcttccatcgccgacgtgtgtgagagcatgaaagaacagctgcttgttctggtggagtgggcgaagtacattcccgccttttgcgaactccctctggatgaccaggtcgcccttctgcgcgcccacgctggggagcatctcctgctgggagccaccaagagatccatggtgttcaaagacgtgctcctgcttggcaacgattatatcgtcccccggcactgtcctgagctggccgaaatgtctagagttagcattcgcatcctcgacgagctggtgcttccgtttcaggaactgcaaattgatgacaatgagtacgcttacctcaaggcgatcattttctttgatcccgacgccaaagggctgtccgatcctggaaagatcaaacggctgagaagccaggtgcaggtctctctcgaagactatatcaacgatcgccagtacgactcccggggcagattcggggagctgcttctgctcctgcccacgcttcaaagcattacctggcagatgatcgagcagattcaatttatcaagctgttcggaatggctaaaattgataatctcctgcaggaaatgctgctcggcggctctcctagcgacgctccccatgcccaccacccgctgcatcctcaccttatgcaggagcatatggggacaaacgtgatcgttgctaataccatgcccacacacctgtccaacggacagatgtgcgaatggcctcgcccccggggccaagccgcgacccccgagacgcctcagccgtctccccctgggggaagcggctccgaaccctataagctcctgcctggggctgtggccacaatcgtcaagcccctgagcgccattccgcagcctaccatcacaaaacaggaggtgatttgaggactagttataagactgactagcccgatgggcctcccaacgggccctcctcccctccttgcaccgagattaataaaaaaaaaaaaaaaaaaaaaaaaaaaaaaaaaaaaaaaaaaaaaaaaaaaaaaaaaaaaaaaatgcatcccccccccccccccccccccccccccccccaaaggctcttttcagagccaccagaatt

SEQ ID NO: 1829 - RNA, 1642 nt, synthetic construct
  misc_feature 1..1642: note = mRNA i-3 (A64-N5-C30-hSL-N5) (opt5) from Homo sapiens__NP_000448.3__HNF4A(1-474)(T166A)
  source 1..1642: mol_type = other RNA
aggagaaagcttaccatgagactgagcaagaccctcgtggacatggatatggccgactactccgctgccctggatcccgcgtatacaacgcttgagttcgaaaacgtccaggttctgaccatgggcaatgacacatctcctagcgaggggaccaacctcaatgctccgaactccctgggagtgtctgccctttgcgccatctgtggcgatcgggctacagggaaacactacggagccagctcctgcgacggctgtaaggggtttttccgcagatctgtgcggaaaaatcatatgtatagctgccgcttttccagacaatgtgtcgtggataaggacaaacggaaccagtgccgctactgtagactgaagaagtgcttccgggctggaatgaaaaaggaagccgttcagaatgagcgcgatagaattagcacccggcgcagctcctatgaagacagctctctcccctccatcaacgcgctgctgcaggccgaggtgctcagcagacaaattgcttctcctgtctccggcatcaatggcgatattcgggccaaaaagatcgctagcatcgccgacgtgtgtgagtccatgaaagaacagctgcttgttctggtggagtgggcgaagtacattcccgccttttgcgaactccctctggatgaccaggtcgcccttctgcgcgcccacgctggggagcatctcctgctgggagccacaaagagatctatggtgttcaaagacgtgctcctgcttggcaacgattatatcgtcccccggcactgtcctgagctggccgaaatgagcagagtttccattcgcatcctcgacgagctggtgcttccgtttcaggaactgcaaattgatgacaatgagtacgcttacctcaaggcgatcattttctttgatcccgacgccaaagggctgagcgatcctggaaagatcaaacggctgagatctcaggtgcaggtctccctcgaagactatatcaacgatcgccagtacgacagccggggcagattcggggagctgcttctgctcctgcccacccttcaatctattacgtggcagatgatcgagcagattcaatttatcaagctgttcggaatggctaaaattgataatctcctgcaggaaatgctgctcggcggcagcccttccgacgctccccatgcccaccacccgctgcatcctcaccttatgcaggagcatatggggaccaacgtgatcgttgctaatacaatgcccacccacctgtctaacggacagatgtgcgaatggcctcgcccccggggccaagccgcgacacccgagacccctcagccgtctccccctgggggatccggcagcgaaccctataagctcctgcctggggctgtggccacgatcgtcaagcccctgtctgccattccgcagcctacaatcaccaaacaggaggtgatttgaggactagttataagactgactagcccgatgggcctcccaacgggccctcctcccctccttgcaccgagattaataaaaaaaaaaaaaaaaaaaaaaaaaaaaaaaaaaaaaaaaaaaaaaaaaaaaaaaaaaaaaaaatgcatcccccccccccccccccccccccccccccccaaaggctcttttcagagccaccagaatt

SEQ ID NO: 1830 - RNA, 1642 nt, synthetic construct
  misc_feature 1..1642: note = mRNA i-3 (A64-N5-C30-hSL-N5) (opt5) from Homo sapiens__NP_000448.3__HNF4A(1-474)(S167E)
  source 1..1642: mol_type = other RNA
aggagaaagcttaccatgagactgagcaagaccctcgtggacatggatatggccgactactccgctgccctggatcccgcgtatacaacgcttgagttcgaaaacgtccaggttctgaccatgggcaatgacacatctcctagcgaggggaccaacctcaatgctccgaactccctgggagtgtctgccctttgcgccatctgtggcgatcgggctacagggaaacactacggagccagctcctgcgacggctgtaaggggtttttccgcagatctgtgcggaaaaatcatatgtatagctgccgcttttccagacaatgtgtcgtggataaggacaaacggaaccagtgccgctactgtagactgaagaagtgcttccgggctggaatgaaaaaggaagccgttcagaatgagcgcgatagaattagcacccggagatcttcctatgaagacagctctctcccctccatcaacgcgctgctgcaggccgaggtgctcagccgccaaattacagagcctgtctctggcatcaatggcgatattcgggctaaaaagatcgcctccatcgctgacgtgtgtgaaagcatgaaagagcagctgcttgttctggtggaatgggccaagtacattcccgcgttttgcgagctccctctggatgaccaggtcgcccttctgcgcgctcacgccggggagcatctcctgctgggagctaccaagagatccatggtgttcaaagacgtgctcctgcttggcaacgattatatcgtcccccggcactgtcctgaactggccgagatgtctagagttagcattcgcatcctcgacgaactggtgcttccgtttcaggagctgcaaattgatgacaatgaatacgcctacctcaaggctatcattttctttgatcccgacgcgaaagggctgtccgatcctggaaagatcaaacggctgagaagccaggtgcaggtctctctcgaggactatatcaacgatcgccagtacgactcccggggcagattcggggagctgcttctgctcctgcccacgcttcaaagcattacctggcagatgatcgaacagattcaatttatcaagctgttcggaatggccaaaattgataatctcctgcaggagatgctgctcggcggctctcctagcgacgctccccatgcccaccacccgctgcatcctcaccttatgcaggaacatatggggacaaacgtgatcgttgccaataccatgcccacacacctgtccaacggacagatgtgcgagtggcctcgcccccggggccaagctgccacccccgaaacgcctcagccgtctccccctgggggaagcggctccgagccctataagctcctgcctggggcggtggctacaatcgtcaagcccctgagcgccattccgcagcctaccatcacaaaacaggaggtgatttgaggactagttataagactgactagcccgatgggcctcccaacgggccctcctcccctccttgcaccgagattaataaaaaaaaaaaaaaaaaaaaaaaaaaaaaaaaaaaaaaaaaaaaaaaaaaaaaaaaaaaaaaaatgcatcccccccccccccccccccccccccccccccaaaggctcttttcagagccaccagaatt

SEQ ID NO: 1831 - RNA, 1642 nt, synthetic construct
  misc_feature 1..1642: note = mRNA i-3 (A64-N5-C30-hSL-N5) (opt5) from Homo sapiens__NP_000448.3__HNF4A(1-474)(S167A)
  source 1..1642: mol_type = other RNA
aggagaaagcttaccatgagactgagcaagaccctcgtggacatggatatggccgactactccgctgccctggatcccgcgtatacaacgcttgagttcgaaaacgtccaggttctgaccatgggcaatgacacatctcctagcgaggggaccaacctcaatgctccgaactccctgggagtgtctgccctttgcgccatctgtggcgatcgggctacagggaaacactacggagccagctcctgcgacggctgtaaggggtttttccgcagatctgtgcggaaaaatcatatgtatagctgccgcttttccagacaatgtgtcgtggataaggacaaacggaaccagtgccgctactgtagactgaagaagtgcttccgggctggaatgaaaaaggaagccgttcagaatgagcgcgatagaattagcacccggagatcttcctatgaagacagctctctcccctccatcaacgcgctgctgcaggccgaggtgctcagccgccaaattacagctcctgtctctggcatcaatggcgatattcgggccaaaaagatcgcttccatcgccgacgtgtgtgagagcatgaaagaacagctgcttgttctggtggagtgggcgaagtacattcccgccttttgcgaactccctctggatgaccaggtcgcccttctgcgcgcccacgctggggagcatctcctgctgggagccaccaagagatccatggtgttcaaagacgtgctcctgcttggcaacgattatatcgtcccccggcactgtcctgagctggccgaaatgtctagagttagcattcgcatcctcgacgagctggtgcttccgtttcaggaactgcaaattgatgacaatgagtacgcttacctcaaggcgatcattttctttgatcccgacgccaaagggctgtccgatcctggaaagatcaaacggctgagaagccaggtgcaggtctctctcgaagactatatcaacgatcgccagtacgactcccggggcagattcggggagctgcttctgctcctgcccacgcttcaaagcattacctggcagatgatcgagcagattcaatttatcaagctgttcggaatggctaaaattgataatctcctgcaggaaatgctgctcggcggctctcctagcgacgctccccatgcccaccacccgctgcatcctcaccttatgcaggagcatatggggacaaacgtgatcgttgctaataccatgcccacacacctgtccaacggacagatgtgcgaatggcctcgcccccggggccaagccgcgacccccgagacgcctcagccgtctccccctgggggaagcggctccgaaccctataagctcctgcctggggctgtggccacaatcgtcaagcccctgagcgccattccgcagcctaccatcacaaaacaggaggtgatttgaggactagttataagactgactagcccgatgggcctcccaacgggccctcctcccctccttgcaccgagattaataaaaaaaaaaaaaaaaaaaaaaaaaaaaaaaaaaaaaaaaaaaaaaaaaaaaaaaaaaaaaaaatgcatcccccccccccccccccccccccccccccccaaaggctcttttcagagccaccagaatt

SEQ ID NO: 1832 - RNA, 1642 nt, synthetic construct
  misc_feature 1..1642: note = mRNA i-3 (A64-N5-C30-hSL-N5) (opt5) from Homo sapiens__NP_000448.3__HNF4A(1-474)(S167A_S378A_T429A_T432A_ S436A)
  source 1..1642: mol_type = other RNA
aggagaaagcttaccatgagactgagcaagaccctcgtggacatggatatggccgactactccgctgccctggatcccgcgtatacaacgcttgagttcgaaaacgtccaggttctgaccatgggcaatgacacatctcctagcgaggggaccaacctcaatgctccgaactccctgggagtgtctgccctttgcgccatctgtggcgatcgggctacagggaaacactacggagccagctcctgcgacggctgtaaggggtttttccgcagatctgtgcggaaaaatcatatgtatagctgccgcttttccagacaatgtgtcgtggataaggacaaacggaaccagtgccgctactgtagactgaagaagtgcttccgggctggaatgaaaaaggaagccgttcagaatgagcgcgatagaattagcacccggagatcttcctatgaagacagctctctcccctccatcaacgcgctgctgcaggccgaggtgctcagccgccaaattacagctcctgtctctggcatcaatggcgatattcgggccaaaaagatcgcttccatcgccgacgtgtgtgagagcatgaaagaacagctgcttgttctggtggagtgggcgaagtacattcccgccttttgcgaactccctctggatgaccaggtcgcccttctgcgcgcccacgctggggagcatctcctgctgggagccaccaagagatccatggtgttcaaagacgtgctcctgcttggcaacgattatatcgtcccccggcactgtcctgagctggccgaaatgtctagagttagcattcgcatcctcgacgagctggtgcttccgtttcaggaactgcaaattgatgacaatgagtacgcttacctcaaggcgatcattttctttgatcccgacgccaaagggctgtccgatcctggaaagatcaaacggctgagaagccaggtgcaggtctctctcgaagactatatcaacgatcgccagtacgactcccggggcagattcggggagctgcttctgctcctgcccacgcttcaaagcattacctggcagatgatcgagcagattcaatttatcaagctgttcggaatggctaaaattgataatctcctgcaggaaatgctgctcggcggcgccccttctgacgctccccatgctcaccacccgctgcatcctcaccttatgcaggagcatatggggacaaacgtgatcgttgccaataccatgcccacacacctgagcaacggacagatgtgcgaatggcctcgcccccggggccaagcggctgcccccgaggcccctcagccggctccccctgggggatccggctctgaaccctataagctcctgcctggggccgtggctaccatcgtcaagcccctgagcgccattccgcagcctacgatcacaaaacaggaggtgatttgaggactagttataagactgactagcccgatgggcctcccaacgggccctcctcccctccttgcaccgagattaataaaaaaaaaaaaaaaaaaaaaaaaaaaaaaaaaaaaaaaaaaaaaaaaaaaaaaaaaaaaaaaatgcatcccccccccccccccccccccccccccccccaaaggctcttttcagagccaccagaatt

SEQ ID NO: 1833 - RNA, 1642 nt, synthetic construct
  misc_feature 1..1642: note = mRNA i-3 (A64-N5-C30-hSL-N5) (opt5) from Homo sapiens__NP_000448.3__HNF4A(1-474)(S167E_S378E_T429E_T432E_ S436E)
  source 1..1642: mol_type = other RNA
aggagaaagcttaccatgagactgagcaagaccctcgtggacatggatatggccgactactccgctgccctggatcccgcgtatacaacgcttgagttcgaaaacgtccaggttctgaccatgggcaatgacacatctcctagcgaggggaccaacctcaatgctccgaactccctgggagtgtctgccctttgcgccatctgtggcgatcgggctacagggaaacactacggagccagctcctgcgacggctgtaaggggtttttccgcagatctgtgcggaaaaatcatatgtatagctgccgcttttccagacaatgtgtcgtggataaggacaaacggaaccagtgccgctactgtagactgaagaagtgcttccgggctggaatgaaaaaggaagccgttcagaatgagcgcgatagaattagcacccggagatcttcctatgaagacagctctctcccctccatcaacgcgctgctgcaggccgaggtgctcagccgccaaattacagagcctgtctctggcatcaatggcgatattcgggctaaaaagatcgcctccatcgctgacgtgtgtgaaagcatgaaagagcagctgcttgttctggtggaatgggccaagtacattcccgcgttttgcgagctccctctggatgaccaggtcgcccttctgcgcgctcacgccggggagcatctcctgctgggagctaccaagagatccatggtgttcaaagacgtgctcctgcttggcaacgattatatcgtcccccggcactgtcctgaactggccgagatgtctagagttagcattcgcatcctcgacgaactggtgcttccgtttcaggagctgcaaattgatgacaatgaatacgcctacctcaaggctatcattttctttgatcccgacgcgaaagggctgtccgatcctggaaagatcaaacggctgagaagccaggtgcaggtctctctcgaggactatatcaacgatcgccagtacgactcccggggcagattcggggagctgcttctgctcctgcccacgcttcaaagcattacctggcagatgatcgaacagattcaatttatcaagctgttcggaatggccaaaattgataatctcctgcaggagatgctgctcggcggcgaaccttctgacgctccccatgcccaccacccgctgcatcctcaccttatgcaggagcatatggggacaaacgtgatcgttgccaataccatgcccacacacctgagcaacggacagatgtgcgaatggcctcgcccccggggccaagctgccgagcccgaggaacctcagccggagccccctgggggatccggctctgaaccctataagctcctgcctggggcggtggctaccatcgtcaagcccctgagcgccattccgcagcctacgatcacaaaacaggaggtgatttgaggactagttataagactgactagcccgatgggcctcccaacgggccctcctcccctccttgcaccgagattaataaaaaaaaaaaaaaaaaaaaaaaaaaaaaaaaaaaaaaaaaaaaaaaaaaaaaaaaaaaaaaaatgcatcccccccccccccccccccccccccccccccaaaggctcttttcagagccaccagaatt

SEQ ID NO: 1834 - RNA, 1642 nt, synthetic construct
  misc_feature 1..1642: note = mRNA i-3 (A64-N5-C30-hSL-N5) (opt5) from Homo sapiens__NP_000448.3__HNF4A(1-474)(S87A)
  source 1..1642: mol_type = other RNA
aggagaaagcttaccatgagactgagcaagaccctcgtggacatggatatggccgactactccgctgccctggatcccgcgtatacaacgcttgagttcgaaaacgtccaggttctgaccatgggcaatgacacatctcctagcgaggggaccaacctcaatgctccgaactccctgggagtgtctgccctttgcgccatctgtggcgatcgggctacagggaaacactacggagccagctcctgcgacggctgtaaggggtttttccgcagagctgtgcggaaaaatcatatgtattcttgccgctttagcagacaatgtgtcgtggataaggacaaacggaaccagtgccgctactgtagactgaagaagtgcttccgggccggaatgaaaaaggaagcggttcagaatgagcgcgatagaatttccacccggcgcagctcttatgaagactccagcctcccctctatcaacgccctgctgcaggctgaggtgctctccagacaaattacaagccctgtctctggcatcaatggcgatattcgggccaaaaagatcgcttccatcgccgacgtgtgtgagagcatgaaagaacagctgcttgttctggtggagtgggcgaagtacattcccgccttttgcgaactccctctggatgaccaggtcgcccttctgcgcgcccacgctggggagcatctcctgctgggagccaccaagagatccatggtgttcaaagacgtgctcctgcttggcaacgattatatcgtcccccggcactgtcctgagctggccgaaatgtctagagttagcattcgcatcctcgacgagctggtgcttccgtttcaggaactgcaaattgatgacaatgagtacgcttacctcaaggcgatcattttctttgatcccgacgccaaagggctgtccgatcctggaaagatcaaacggctgagaagccaggtgcaggtctctctcgaagactatatcaacgatcgccagtacgactcccggggcagattcggggagctgcttctgctcctgcccacgcttcaaagcattacctggcagatgatcgagcagattcaatttatcaagctgttcggaatggctaaaattgataatctcctgcaggaaatgctgctcggcggctctcctagcgacgctccccatgcccaccacccgctgcatcctcaccttatgcaggagcatatggggacaaacgtgatcgttgctaataccatgcccacacacctgtccaacggacagatgtgcgaatggcctcgcccccggggccaagccgcgacccccgagacgcctcagccgtctccccctgggggaagcggctccgaaccctataagctcctgcctggggctgtggccacaatcgtcaagcccctgagcgccattccgcagcctaccatcacaaaacaggaggtgatttgaggactagttataagactgactagcccgatgggcctcccaacgggccctcctcccctccttgcaccgagattaataaaaaaaaaaaaaaaaaaaaaaaaaaaaaaaaaaaaaaaaaaaaaaaaaaaaaaaaaaaaaaaatgcatcccccccccccccccccccccccccccccccaaaggctcttttcagagccaccagaatt

SEQ ID NO: 1835 - RNA, 1642 nt, synthetic construct
  misc_feature 1..1642: note = mRNA i-3 (A64-N5-C30-hSL-N5) (opt5) from Homo sapiens__NP_000448.3__HNF4A(1-474)(S87E)
  source 1..1642: mol_type = other RNA
aggagaaagcttaccatgagactgagcaagaccctcgtggacatggatatggccgactactccgctgccctggatcccgcgtatacaacgcttgagttcgaaaacgtccaggttctgaccatgggcaatgacacatctcctagcgaggggaccaacctcaatgctccgaactccctgggagtgtctgccctttgcgccatctgtggcgatcgggctacagggaaacactacggagccagctcctgcgacggctgtaaggggtttttccgcagagaagtgcggaaaaatcatatgtattcttgccgctttagcagacaatgtgtcgtggataaggacaaacggaaccagtgccgctactgtagactgaagaagtgcttccgggctggaatgaaaaaggaggccgttcagaatgaacgcgatagaatttccacccggcgcagctcttatgaggactccagcctcccctctatcaacgcgctgctgcaggccgaggtgctctccagacaaattacaagccctgtctctggcatcaatggcgatattcgggctaaaaagatcgcctccatcgctgacgtgtgtgaaagcatgaaagagcagctgcttgttctggtggaatgggccaagtacattcccgcgttttgcgagctccctctggatgaccaggtcgcccttctgcgcgctcacgccggggagcatctcctgctgggagctaccaagagatccatggtgttcaaagacgtgctcctgcttggcaacgattatatcgtcccccggcactgtcctgaactggccgagatgtctagagttagcattcgcatcctcgacgaactggtgcttccgtttcaggagctgcaaattgatgacaatgaatacgcctacctcaaggctatcattttctttgatcccgacgcgaaagggctgtccgatcctggaaagatcaaacggctgagaagccaggtgcaggtctctctcgaggactatatcaacgatcgccagtacgactcccggggcagattcggggagctgcttctgctcctgcccacgcttcaaagcattacctggcagatgatcgaacagattcaatttatcaagctgttcggaatggccaaaattgataatctcctgcaggagatgctgctcggcggctctcctagcgacgctccccatgcccaccacccgctgcatcctcaccttatgcaggaacatatggggacaaacgtgatcgttgccaataccatgcccacacacctgtccaacggacagatgtgcgagtggcctcgcccccggggccaagctgccacccccgaaacgcctcagccgtctccccctgggggaagcggctccgagccctataagctcctgcctggggcggtggctacaatcgtcaagcccctgagcgccattccgcagcctaccatcacaaaacaggaggtgatttgaggactagttataagactgactagcccgatgggcctcccaacgggccctcctcccctccttgcaccgagattaataaaaaaaaaaaaaaaaaaaaaaaaaaaaaaaaaaaaaaaaaaaaaaaaaaaaaaaaaaaaaaaatgcatcccccccccccccccccccccccccccccccaaaggctcttttcagagccaccagaatt

SEQ ID NO: 1836 - RNA, 1642 nt, synthetic construct
  misc_feature 1..1642: note = mRNA i-3 (A64-N5-C30-hSL-N5) (opt5) from Homo sapiens__NP_000448.3__HNF4A(1-474)(R2V)
  source 1..1642: mol_type = other RNA
aggagaaagcttaccatggtgctgagcaagaccctcgtcgacatggatatggccgactactccgctgccctggatcccgcgtatacaacgcttgagttcgaaaacgttcaggtgctgaccatgggcaatgacacatctcctagcgaggggaccaacctcaatgctccgaactccctgggagtgtctgccctttgcgccatctgtggcgatagagctacagggaaacactacggagccagctcctgcgacggctgtaaggggtttttccggcgctctgtccggaaaaatcatatgtatagctgcagattttcccgccaatgtgtggttgataaggacaaaagaaaccagtgccggtactgtcgcctgaagaagtgcttcagagctggaatgaaaaaggaagccgtgcagaatgagcgggatcgcattagcaccagacggtcttcctatgaagacagctctctcccctccatcaacgcgctgctgcaggccgaggtcctcagccgccaaattacatctcctgtgtccggcatcaatggcgatattagagctaaaaagatcgccagcatcgctgacgtttgtgagtccatgaaagaacagctgcttgtgctggtcgagtgggccaagtacattcccgcgttttgcgaactccctctggatgaccaggtggcccttctgcgggctcacgccggggagcatctcctgctgggagctaccaagcgctctatggtgttcaaagacgtcctcctgcttggcaacgattatatcgttcccagacactgtcctgagctggccgaaatgagccgggtgtccattagaatcctcgacgagctggtgcttccgtttcaggaactgcaaattgatgacaatgagtacgcctacctcaaggctatcattttctttgatcccgacgcgaaagggctgagcgatcctggaaagatcaaacgcctgcggtctcaggtccaggtgtccctcgaagactatatcaacgatagacagtacgacagccgcggccggttcggggagctgcttctgctcctgcccacgcttcaatctattacctggcagatgatcgagcagattcaatttatcaagctgttcggaatggccaaaattgataatctcctgcaggaaatgctgctcggcggcagcccttccgacgctccccatgcccaccacccgctgcatcctcaccttatgcaggagcatatggggacaaacgttatcgtggccaataccatgcccacacacctgtctaacggacagatgtgcgaatggcctagaccccgcggccaagctgccacccccgagacgcctcagccgagccctcccgggggatccggcagcgaaccctataagctcctgcctggggcggtcgctacaatcgtgaagcccctgtctgccattccgcagcctaccatcacaaaacaggaggttatttgaggactagttataagactgactagcccgatgggcctcccaacgggccctcctcccctccttgcaccgagattaataaaaaaaaaaaaaaaaaaaaaaaaaaaaaaaaaaaaaaaaaaaaaaaaaaaaaaaaaaaaaaaatgcatcccccccccccccccccccccccccccccccaaaggctcttttcagagccaccagaatt

SEQ ID NO: 1837 - RNA, 1642 nt, synthetic construct
  misc_feature 1..1642: note = mRNA i-3 (A64-N5-C30-hSL-N5) (opt5) from Homo sapiens__NP_000448.3__HNF4A(1-474)(R2V_K5V)
  source 1..1642: mol_type = other RNA
aggagaaagcttaccatggtgctgagcgtcaccctcgttgacatggatatggccgactactccgctgccctggatcccgcgtatacaacgcttgagttcgaaaacgtccaggtgctgaccatgggcaatgacacatctcctagcgaggggaccaacctcaatgctccgaactccctgggagtgtctgccctttgcgccatctgtggcgatagagctacagggaagcactacggagccagctcctgcgacggctgtaaagggtttttccggcgctctgtgagaaagaatcatatgtatagctgccggttttcccgccaatgtgttgtggataaagacaagagaaaccagtgccggtactgtcgcctgaaaaagtgcttcagagctggaatgaagaaagaagccgtccagaatgagcgggatcgcattagcaccagacggtcttcctatgaagacagctctctcccctccatcaacgcgctgctgcaggccgaggtgctcagccgccaaattacatctcctgtttccggcatcaatggcgatattagagctaagaaaatcgccagcatcgctgacgtgtgtgagtccatgaaggaacagctgcttgtcctggtggagtgggccaaatacattcccgcgttttgcgaactccctctggatgaccaggtggcccttctgcgggctcacgccggggagcatctcctgctgggagctaccaagcgctctatggtcttcaaggacgttctcctgcttggcaacgattatatcgtgcccagacactgtcctgagctggccgaaatgagccgggtgtccattagaatcctcgacgagctggtccttccgtttcaggaactgcaaattgatgacaatgagtacgcctacctcaaagctatcattttctttgatcccgacgcgaaggggctgagcgatcctggaaaaatcaagcgcctgcggtctcaggtgcaggtttccctcgaagactatatcaacgatagacagtacgacagccgcggccggttcggggagctgcttctgctcctgcccacgcttcaatctattacctggcagatgatcgagcagattcaatttatcaaactgttcggaatggccaagattgataatctcctgcaggaaatgctgctcggcggcagcccttccgacgctccccatgcccaccacccgctgcatcctcaccttatgcaggagcatatggggacaaacgtgatcgtcgccaataccatgcccacacacctgtctaacggacagatgtgcgaatggcctagaccccgcggccaagctgccacccccgagacgcctcagccgagccctcccgggggatccggcagcgaaccctataaactcctgcctggggcggtggctacaatcgttaagcccctgtctgccattccgcagcctaccatcacaaagcaggaggtgatttgaggactagttataagactgactagcccgatgggcctcccaacgggccctcctcccctccttgcaccgagattaataaaaaaaaaaaaaaaaaaaaaaaaaaaaaaaaaaaaaaaaaaaaaaaaaaaaaaaaaaaaaaaatgcatcccccccccccccccccccccccccccccccaaaggctcttttcagagccaccagaatt

SEQ ID NO: 1838 - RNA, 1642 nt, synthetic construct
  misc_feature 1..1642: note = mRNA i-3 (A64-N5-C30-hSL-N5) (opt5) from Homo sapiens__NP_000448.3__HNF4A(1-474)(K179R_K180R)
  source 1..1642: mol_type = other RNA
aggagaaagcttaccatgagactgagcaagaccctcgtggacatggatatggccgactactccgctgccctggatcccgcgtatacaacgcttgagttcgaaaacgtccaggttctgaccatgggcaatgacacatctcctagcgaggggaccaacctcaatgctccgaactccctgggagtgtctgccctttgcgccatctgtggcgatcgggctacagggaaacactacggagccagctcctgcgacggctgtaaggggtttttccgcagatctgtgcggaaaaatcatatgtatagctgccgcttttccagacaatgtgtcgtggataaggacaaacggaaccagtgccgctactgtagactgaagaagtgcttccgggctggaatgaaaaaggaagccgttcagaatgagcgcgatagaattagcacccggcgcagctcctatgaagacagctctctcccctccatcaacgcgctgctgcaggccgaggtgctcagcagacaaattacatctcctgtctccggcatcaatggcgatattcgggctcgcagaatcgccagcatcgctgacgtgtgtgagtccatgaaagaacagctgcttgttctggtggagtgggccaagtacattcccgcgttttgcgaactccctctggatgaccaggtcgcccttctgcgggctcacgccggggagcatctcctgctgggagctaccaaaagatctatggtgttcaaggacgtgctcctgcttggcaacgattatatcgtcccccgccactgtcctgagctggccgaaatgagccgggtttccattagaatcctcgacgagctggtgcttccgtttcaggaactgcaaattgatgacaatgagtacgcctacctcaaggctatcattttctttgatcccgacgcgaaagggctgagcgatcctggaaagatcaaacgcctgcggtctcaggtgcaggtctccctcgaagactatatcaacgatagacagtacgacagccgcggccggttcggggagctgcttctgctcctgcccacgcttcaatctattacctggcagatgatcgagcagattcaatttatcaagctgttcggaatggccaaaattgataatctcctgcaggaaatgctgctcggcggcagcccttccgacgctccccatgcccaccacccgctgcatcctcaccttatgcaggagcatatggggacaaacgtgatcgttgccaataccatgcccacacacctgtctaacggacagatgtgcgaatggcctagaccccgcggccaagctgccacccccgagacgcctcagccgtctccccctgggggatccggcagcgaaccctataagctcctgcctggggcggtggctacaatcgtcaaacccctgtctgccattccgcagcctaccatcacaaagcaggaggtgatttgaggactagttataagactgactagcccgatgggcctcccaacgggccctcctcccctccttgcaccgagattaataaaaaaaaaaaaaaaaaaaaaaaaaaaaaaaaaaaaaaaaaaaaaaaaaaaaaaaaaaaaaaaatgcatcccccccccccccccccccccccccccccccaaaggctcttttcagagccaccagaatt

SEQ ID NO: 1839 - RNA, 1642 nt, synthetic construct
  misc_feature 1..1642: note = mRNA i-3 (A64-N5-C30-hSL-N5) (opt5) from Homo sapiens__NP_000448.3__HNF4A(1-474)(K234R)
  source 1..1642: mol_type = other RNA
aggagaaagcttaccatgagactgagcaagaccctcgtggacatggatatggccgactactccgctgccctggatcccgcgtatacaacgcttgagttcgaaaacgtccaggttctgaccatgggcaatgacacatctcctagcgaggggaccaacctcaatgctccgaactccctgggagtgtctgccctttgcgccatctgtggcgatcgggctacagggaaacactacggagccagctcctgcgacggctgtaaggggtttttccgcagatctgtgcggaaaaatcatatgtatagctgccgcttttccagacaatgtgtcgtggataaggacaaacggaaccagtgccgctactgtagactgaagaagtgcttccgggctggaatgaaaaaggaagccgttcagaatgagcgcgatagaattagcacccggcgcagctcctatgaagacagctctctcccctccatcaacgcgctgctgcaggccgaggtgctcagcagacaaattacatctcctgtctccggcatcaatggcgatattcgggctaaaaagatcgccagcatcgctgacgtgtgtgagtccatgaaagaacagctgcttgttctggtggagtgggccaagtacattcccgcgttttgcgaactccctctggatgaccaggtcgcccttctgcgcgctcacgccggggagcatctcctgctgggagctaccagacggtctatggtgttcaaggacgtgctcctgcttggcaacgattatatcgtccccagacactgtcctgagctggccgaaatgagccgcgtttccattcggatcctcgacgagctggtgcttccgtttcaggaactgcaaattgatgacaatgagtacgcctacctcaaagctatcattttctttgatcccgacgcgaaggggctgagcgatcctggaaaaatcaagagactgcgctctcaggtgcaggtctccctcgaagactatatcaacgatcggcagtacgacagcagaggccgcttcggggagctgcttctgctcctgcccacgcttcaatctattacctggcagatgatcgagcagattcaatttatcaaactgttcggaatggccaagattgataatctcctgcaggaaatgctgctcggcggcagcccttccgacgctccccatgcccaccacccgctgcatcctcaccttatgcaggagcatatggggacaaacgtgatcgttgccaataccatgcccacacacctgtctaacggacagatgtgcgaatggcctcggcccagaggccaagctgccacccccgagacgcctcagccgtctccccctgggggatccggcagcgaaccctataaactcctgcctggggcggtggctacaatcgtcaagcccctgtctgccattccgcagcctaccatcacaaagcaggaggtgatttgaggactagttataagactgactagcccgatgggcctcccaacgggccctcctcccctccttgcaccgagattaataaaaaaaaaaaaaaaaaaaaaaaaaaaaaaaaaaaaaaaaaaaaaaaaaaaaaaaaaaaaaaaatgcatcccccccccccccccccccccccccccccccaaaggctcttttcagagccaccagaatt

SEQ ID NO: 1840 - RNA, 1642 nt, synthetic construct
  misc_feature 1..1642: note = mRNA i-3 (A64-N5-C30-hSL-N5) (opt5) from Homo sapiens__NP_000448.3__HNF4A(1-474)(K300R)
  source 1..1642: mol_type = other RNA
aggagaaagcttaccatgagactgagcaagaccctcgtggacatggatatggccgactactccgctgccctggatcccgcgtatacaacgcttgagttcgaaaacgtccaggttctgaccatgggcaatgacacatctcctagcgaggggaccaacctcaatgctccgaactccctgggagtgtctgccctttgcgccatctgtggcgatcgggctacagggaaacactacggagccagctcctgcgacggctgtaaggggtttttccgcagatctgtgcggaaaaatcatatgtatagctgccgcttttccagacaatgtgtcgtggataaggacaaacggaaccagtgccgctactgtagactgaagaagtgcttccgggctggaatgaaaaaggaagccgttcagaatgagcgcgatagaattagcacccggcgcagctcctatgaagacagctctctcccctccatcaacgcgctgctgcaggccgaggtgctcagcagacaaattacatctcctgtctccggcatcaatggcgatattcgggctaaaaagatcgccagcatcgctgacgtgtgtgagtccatgaaagaacagctgcttgttctggtggagtgggccaagtacattcccgcgttttgcgaactccctctggatgaccaggtcgcccttctgcgcgctcacgccggggagcatctcctgctgggagctaccaagagatctatggtgttcaaagacgtgctcctgcttggcaacgattatatcgtcccccggcactgtcctgagctggccgaaatgagcagagtttccattcgcatcctcgacgagctggtgcttccgtttcaggaactgcaaattgatgacaatgagtacgcctacctcaaggctatcattttctttgatcccgacgcgcgggggctgagcgatcctggaaaaatcaagagactgcgctctcaggtgcaggtctccctcgaagactatatcaacgatcggcagtacgacagcagaggccgcttcggggagctgcttctgctcctgcccacgcttcaatctattacctggcagatgatcgagcagattcaatttatcaaactgttcggaatggccaagattgataatctcctgcaggaaatgctgctcggcggcagcccttccgacgctccccatgcccaccacccgctgcatcctcaccttatgcaggagcatatggggacaaacgtgatcgttgccaataccatgcccacacacctgtctaacggacagatgtgcgaatggcctcggcccagaggccaagctgccacccccgagacgcctcagccgtctccccctgggggatccggcagcgaaccctataaactcctgcctggggcggtggctacaatcgtcaagcccctgtctgccattccgcagcctaccatcacaaagcaggaggtgatttgaggactagttataagactgactagcccgatgggcctcccaacgggccctcctcccctccttgcaccgagattaataaaaaaaaaaaaaaaaaaaaaaaaaaaaaaaaaaaaaaaaaaaaaaaaaaaaaaaaaaaaaaaatgcatcccccccccccccccccccccccccccccccaaaggctcttttcagagccaccagaatt

SEQ ID NO: 1841 - RNA, 1642 nt, synthetic construct
  misc_feature 1..1642: note = mRNA i-3 (A64-N5-C30-hSL-N5) (opt5) from Homo sapiens__NP_000448.3__HNF4A(1-474)(K300R_K307R_K309R)
  source 1..1642: mol_type = other RNA
aggagaaagcttaccatgagactgagcaagaccctcgtggacatggatatggccgactactccgctgccctggatcccgcgtatacaacgcttgagttcgaaaacgtccaggttctgaccatgggcaatgacacatctcctagcgaggggaccaacctcaatgctccgaactccctgggagtgtctgccctttgcgccatctgtggcgatcgggctacagggaaacactacggagccagctcctgcgacggctgtaaggggtttttccgcagatctgtgcggaaaaatcatatgtatagctgccgcttttccagacaatgtgtcgtggataaggacaaacggaaccagtgccgctactgtagactgaagaagtgcttccgggctggaatgaaaaaggaagccgttcagaatgagcgcgatagaattagcacccggcgcagctcctatgaagacagctctctcccctccatcaacgcgctgctgcaggccgaggtgctcagcagacaaattacatctcctgtctccggcatcaatggcgatattcgggctaaaaagatcgccagcatcgctgacgtgtgtgagtccatgaaagaacagctgcttgttctggtggagtgggccaagtacattcccgcgttttgcgaactccctctggatgaccaggtcgcccttctgcgcgctcacgccggggagcatctcctgctgggagctaccaagagatctatggtgttcaaagacgtgctcctgcttggcaacgattatatcgtcccccggcactgtcctgagctggccgaaatgagcagagtttccattcgcatcctcgacgagctggtgcttccgtttcaggaactgcaaattgatgacaatgagtacgcctacctcaaggctatcattttctttgatcccgacgcgcgggggctgagcgatcctggaagaatccgccggctgagatctcaggtgcaggtctccctcgaagactatatcaacgatcgccagtacgacagccggggcagattcggggagctgcttctgctcctgcccacgcttcaatctattacctggcagatgatcgagcagattcaatttatcaaactgttcggaatggccaagattgataatctcctgcaggaaatgctgctcggcggcagcccttccgacgctccccatgcccaccacccgctgcatcctcaccttatgcaggagcatatggggacaaacgtgatcgttgccaataccatgcccacacacctgtctaacggacagatgtgcgaatggcctcgcccccggggccaagctgccacccccgagacgcctcagccgtctccccctgggggatccggcagcgaaccctataaactcctgcctggggcggtggctacaatcgtcaagcccctgtctgccattccgcagcctaccatcacaaaacaggaggtgatttgaggactagttataagactgactagcccgatgggcctcccaacgggccctcctcccctccttgcaccgagattaataaaaaaaaaaaaaaaaaaaaaaaaaaaaaaaaaaaaaaaaaaaaaaaaaaaaaaaaaaaaaaaatgcatcccccccccccccccccccccccccccccccaaaggctcttttcagagccaccagaatt

SEQ ID NO: 1842 - RNA, 1642 nt, synthetic construct
  misc_feature 1..1642: note = mRNA i-3 (A64-N5-C30-hSL-N5) (opt5) from Homo sapiens__NP_000448.3__HNF4A(1-474)(K447R_K470R)
  source 1..1642: mol_type = other RNA
aggagaaagcttaccatgagactgagcaagaccctcgtggacatggatatggccgactactccgctgccctggatcccgcgtatacaacgcttgagttcgaaaacgtccaggttctgaccatgggcaatgacacatctcctagcgaggggaccaacctcaatgctccgaactccctgggagtgtctgccctttgcgccatctgtggcgatcgggctacagggaaacactacggagccagctcctgcgacggctgtaaggggtttttccgcagatctgtgcggaaaaatcatatgtatagctgccgcttttccagacaatgtgtcgtggataaggacaaacggaaccagtgccgctactgtagactgaagaagtgcttccgggctggaatgaaaaaggaagccgttcagaatgagcgcgatagaattagcacccggcgcagctcctatgaagacagctctctcccctccatcaacgcgctgctgcaggccgaggtgctcagcagacaaattacatctcctgtctccggcatcaatggcgatattcgggctaaaaagatcgccagcatcgctgacgtgtgtgagtccatgaaagaacagctgcttgttctggtggagtgggccaagtacattcccgcgttttgcgaactccctctggatgaccaggtcgcccttctgcgcgctcacgccggggagcatctcctgctgggagctaccaagagatctatggtgttcaaagacgtgctcctgcttggcaacgattatatcgtcccccggcactgtcctgagctggccgaaatgagcagagtttccattcgcatcctcgacgagctggtgcttccgtttcaggaactgcaaattgatgacaatgagtacgcctacctcaaggctatcattttctttgatcccgacgcgaaagggctgagcgatcctggaaagatcaaacggctgagatctcaggtgcaggtctccctcgaagactatatcaacgatcgccagtacgacagccggggcagattcggggagctgcttctgctcctgcccacgcttcaatctattacctggcagatgatcgagcagattcaatttatcaagctgttcggaatggccaaaattgataatctcctgcaggaaatgctgctcggcggcagcccttccgacgctccccatgcccaccacccgctgcatcctcaccttatgcaggagcatatggggacaaacgtgatcgttgccaataccatgcccacacacctgtctaacggacagatgtgcgaatggcctcgcccccggggccaagctgccacccccgagacgcctcagccgtctccccctgggggatccggcagcgaaccctatagactcctgcctggggcggtggctacaatcgtcaagcccctgtctgccattccgcagcctaccatcacacgccaggaggtgatttgaggactagttataagactgactagcccgatgggcctcccaacgggccctcctcccctccttgcaccgagattaataaaaaaaaaaaaaaaaaaaaaaaaaaaaaaaaaaaaaaaaaaaaaaaaaaaaaaaaaaaaaaaatgcatcccccccccccccccccccccccccccccccaaaggctcttttcagagccaccagaatt

SEQ ID NO: 1843 - RNA, 1642 nt, synthetic construct
  misc_feature 1..1642: note = mRNA i-3 (A64-N5-C30-hSL-N5) (opt5) from Homo sapiens__NP_000448.3__HNF4A(1-474)(K458R)
  source 1..1642: mol_type = other RNA
aggagaaagcttaccatgagactgagcaagaccctcgtggacatggatatggccgactactccgctgccctggatcccgcgtatacaacgcttgagttcgaaaacgtccaggttctgaccatgggcaatgacacatctcctagcgaggggaccaacctcaatgctccgaactccctgggagtgtctgccctttgcgccatctgtggcgatcgggctacagggaaacactacggagccagctcctgcgacggctgtaaggggtttttccgcagatctgtgcggaaaaatcatatgtatagctgccgcttttccagacaatgtgtcgtggataaggacaaacggaaccagtgccgctactgtagactgaagaagtgcttccgggctggaatgaaaaaggaagccgttcagaatgagcgcgatagaattagcacccggcgcagctcctatgaagacagctctctcccctccatcaacgcgctgctgcaggccgaggtgctcagcagacaaattacatctcctgtctccggcatcaatggcgatattcgggctaaaaagatcgccagcatcgctgacgtgtgtgagtccatgaaagaacagctgcttgttctggtggagtgggccaagtacattcccgcgttttgcgaactccctctggatgaccaggtcgcccttctgcgcgctcacgccggggagcatctcctgctgggagctaccaagagatctatggtgttcaaagacgtgctcctgcttggcaacgattatatcgtcccccggcactgtcctgagctggccgaaatgagcagagtttccattcgcatcctcgacgagctggtgcttccgtttcaggaactgcaaattgatgacaatgagtacgcctacctcaaggctatcattttctttgatcccgacgcgaaagggctgagcgatcctggaaagatcaaacggctgagatctcaggtgcaggtctccctcgaagactatatcaacgatcgccagtacgacagccggggcagattcggggagctgcttctgctcctgcccacgcttcaatctattacctggcagatgatcgagcagattcaatttatcaagctgttcggaatggccaaaattgataatctcctgcaggaaatgctgctcggcggcagcccttccgacgctccccatgcccaccacccgctgcatcctcaccttatgcaggagcatatggggacaaacgtgatcgttgccaataccatgcccacacacctgtctaacggacagatgtgcgaatggcctcgcccccggggccaagctgccacccccgagacgcctcagccgtctccccctgggggatccggcagcgaaccctataagctcctgcctggggcggtggctacaatcgtcagacccctgtctgccattccgcagcctaccatcacaaagcaggaggtgatttgaggactagttataagactgactagcccgatgggcctcccaacgggccctcctcccctccttgcaccgagattaataaaaaaaaaaaaaaaaaaaaaaaaaaaaaaaaaaaaaaaaaaaaaaaaaaaaaaaaaaaaaaaatgcatcccccccccccccccccccccccccccccccaaaggctcttttcagagccaccagaatt

SEQ ID NO: 1844 - RNA, 1642 nt, synthetic construct
  misc_feature 1..1642: note = mRNA i-3 (A64-N5-C30-hSL-N5) (opt5) from Homo sapiens__NP_000448.3__HNF4A(1-474)(K106R_K108R_K126R_K127R)
  source 1..1642: mol_type = other RNA
aggagaaagcttaccatgagactgagcaagaccctcgtggacatggatatggccgactactccgctgccctggatcccgcgtatacaacgcttgagttcgaaaacgtccaggttctgaccatgggcaatgacacatctcctagcgaggggaccaacctcaatgctccgaactccctgggagtgtctgccctttgcgccatctgtggcgatcgggctacagggaaacactacggagccagctcctgcgacggctgtaaggggtttttccgcagatctgtgcggaaaaatcatatgtatagctgccgcttttccagacaatgtgtcgtggatcgggaccgcagaaaccagtgccggtactgtcgcctgaagaaatgcttcagagctggaatgcggcgcgaagccgttcagaatgagagagatcggattagcacccgcagatcttcctatgaagacagctctctcccctccatcaacgcgctgctgcaggccgaggtgctcagccggcaaattacatctcctgtctccggcatcaatggcgatattagagctaagaagatcgccagcatcgctgacgtgtgtgagtccatgaaagaacagctgcttgttctggtggagtgggccaagtacattcccgcgttttgcgaactccctctggatgaccaggtcgcccttctgcgcgctcacgccggggagcatctcctgctgggagctaccaaacggtctatggtgttcaaggacgtgctcctgcttggcaacgattatatcgtccccagacactgtcctgagctggccgaaatgagccgcgtttccattcggatcctcgacgagctggtgcttccgtttcaggaactgcaaattgatgacaatgagtacgcctacctcaaagctatcattttctttgatcccgacgcgaaggggctgagcgatcctggaaagatcaaaagactgcgctctcaggtgcaggtctccctcgaagactatatcaacgatcggcagtacgacagcagaggccgcttcggggagctgcttctgctcctgcccacgcttcaatctattacctggcagatgatcgagcagattcaatttatcaagctgttcggaatggccaaaattgataatctcctgcaggaaatgctgctcggcggcagcccttccgacgctccccatgcccaccacccgctgcatcctcaccttatgcaggagcatatggggacaaacgtgatcgttgccaataccatgcccacacacctgtctaacggacagatgtgcgaatggcctcggcccagaggccaagctgccacccccgagacgcctcagccgagccctcccgggggatccggcagcgaaccctataagctcctgcctggggcggtggctacaatcgtcaaacccctgtctgccattccgcagcctaccatcacaaagcaggaggtgatttgaggactagttataagactgactagcccgatgggcctcccaacgggccctcctcccctccttgcaccgagattaataaaaaaaaaaaaaaaaaaaaaaaaaaaaaaaaaaaaaaaaaaaaaaaaaaaaaaaaaaaaaaaatgcatcccccccccccccccccccccccccccccccaaaggctcttttcagagccaccagaatt

SEQ ID NO: 1845 - RNA, 1642 nt, synthetic construct
  misc_feature 1..1642: note = mRNA i-3 (A64-N5-C30-hSL-N5) (opt5) from Homo sapiens__NP_000448.3__HNF4A(1-474)(E285Q)
  source 1..1642: mol_type = other RNA
aggagaaagcttaccatgagactgagcaagaccctcgtggacatggatatggccgactactccgctgccctggatcccgcgtatacaacgcttgagttcgaaaacgtccaggttctgaccatgggcaatgacacatctcctagcgaggggaccaacctcaatgctccgaactccctgggagtgtctgccctttgcgccatctgtggcgatcgggctacagggaaacactacggagccagctcctgcgacggctgtaaggggtttttccgcagatctgtgcggaaaaatcatatgtatagctgccgcttttccagacaatgtgtcgtggataaggacaaacggaaccagtgccgctactgtagactgaagaagtgcttccgggctggaatgaaaaaggaagccgttcagaatgagcgcgatagaattagcacccggcgcagctcctatgaagacagctctctcccctccatcaacgcgctgctgcaggccgaggtgctcagcagacaaattacatctcctgtctccggcatcaatggcgatattcgggctaaaaagatcgccagcatcgctgacgtgtgtgagtccatgaaagaacagctgcttgttctggtggagtgggccaagtacattcccgcgttttgcgaactccctctggatgaccaggtcgcccttctgcgcgctcacgccggggagcatctcctgctgggagctaccaagagatctatggtgttcaaagacgtgctcctgcttggcaacgattatatcgtcccccggcactgtcctgagctggccgaaatgagcagagtttccattcgcatcctcgacgagctggtgcttccgtttcaggaactgcaaattgatgacaatcagtacgcctacctcaaggctatcattttctttgatcccgacgcgaaagggctgagcgatcctggaaagatcaaacggctgagatctcaggtgcaggtctccctcgaggactatatcaacgatcgccaatacgacagccggggcagattcggggaactgcttctgctcctgcccacgcttcagtctattacctggcagatgatcgagcaaattcagtttatcaagctgttcggaatggccaaaattgataatctcctgcaggagatgctgctcggcggcagcccttccgacgctccccatgcccaccacccgctgcatcctcaccttatgcaggaacatatggggacaaacgtgatcgttgccaataccatgcccacacacctgtctaacggacaaatgtgcgagtggcctcgcccccggggccaggctgccacccccgaaacgcctcagccgtctccccctgggggatccggcagcgagccctataagctcctgcctggggcggtggctacaatcgtcaagcccctgtctgccattccgcagcctaccatcacaaaacaagaagtgatttgaggactagttataagactgactagcccgatgggcctcccaacgggccctcctcccctccttgcaccgagattaataaaaaaaaaaaaaaaaaaaaaaaaaaaaaaaaaaaaaaaaaaaaaaaaaaaaaaaaaaaaaaaatgcatcccccccccccccccccccccccccccccccaaaggctcttttcagagccaccagaatt

SEQ ID NO: 1846 - RNA, 1642 nt, synthetic construct
  misc_feature 1..1642: note = mRNA i-3 (A64-N5-C30-hSL-N5) (opt5) from Homo sapiens__NP_000448.3__HNF4A(1-474)(T166E)
  source 1..1642: mol_type = other RNA
aggagaaagcttaccatgagactgagcaagaccctcgtggacatggatatggccgactactccgctgccctggatcccgcgtatacaacgcttgagttcgaaaacgtccaggttctgaccatgggcaatgacacatctcctagcgaggggaccaacctcaatgctccgaactccctgggagtgtctgccctttgcgccatctgtggcgatcgggctacagggaaacactacggagccagctcctgcgacggctgtaaggggtttttccgcagatctgtgcggaaaaatcatatgtatagctgccgcttttccagacaatgtgtcgtggataaggacaaacggaaccagtgccgctactgtagactgaagaagtgcttccgggctggaatgaaaaaggaagccgttcagaatgagcgcgatagaattagcacccggcgcagctcctatgaagacagctctctcccctccatcaacgcgctgctgcaggccgaggtgctcagcagacaaattgagtctcctgtctccggcatcaatggcgatattcgggctaaaaagatcgccagcatcgctgacgtgtgtgaatccatgaaagagcagctgcttgttctggtggaatgggccaagtacattcccgcgttttgcgagctccctctggatgaccaggtcgcccttctgcgcgctcacgccggggagcatctcctgctgggagctacaaagagatctatggtgttcaaagacgtgctcctgcttggcaacgattatatcgtcccccggcactgtcctgaactggccgagatgagcagagtttccattcgcatcctcgacgaactggtgcttccgtttcaggagctgcaaattgatgacaatgaatacgcctacctcaaggctatcattttctttgatcccgacgcgaaagggctgagcgatcctggaaagatcaaacggctgagatctcaggtgcaggtctccctcgaggactatatcaacgatcgccagtacgacagccggggcagattcggggagctgcttctgctcctgcccacccttcaatctattacgtggcagatgatcgaacagattcaatttatcaagctgttcggaatggccaaaattgataatctcctgcaggagatgctgctcggcggcagcccttccgacgctccccatgcccaccacccgctgcatcctcaccttatgcaggaacatatggggaccaacgtgatcgttgccaatacaatgcccacccacctgtctaacggacagatgtgcgagtggcctcgcccccggggccaagctgccacacccgaaacccctcagccgtctccccctgggggatccggcagcgagccctataagctcctgcctggggcggtggctacgatcgtcaagcccctgtctgccattccgcagcctacaatcaccaaacaggaggtgatttgaggactagttataagactgactagcccgatgggcctcccaacgggccctcctcccctccttgcaccgagattaataaaaaaaaaaaaaaaaaaaaaaaaaaaaaaaaaaaaaaaaaaaaaaaaaaaaaaaaaaaaaaaatgcatcccccccccccccccccccccccccccccccaaaggctcttttcagagccaccagaatt

SEQ ID NO: 1847 - RNA, 1642 nt, synthetic construct
  misc_feature 1..1642: note = mRNA i-3 (A64-N5-C30-hSL-N5) (opt5) from Homo sapiens__NP_000448.3__HNF4A(1-474)(S148A)
  source 1..1642: mol_type = other RNA
aggagaaagcttaccatgagactgagcaagaccctcgtggacatggatatggccgactactccgctgccctggatcccgcgtatacaacgcttgagttcgaaaacgtccaggttctgaccatgggcaatgacacatctcctagcgaggggaccaacctcaatgctccgaactccctgggagtgtctgccctttgcgccatctgtggcgatcgggctacagggaaacactacggagccagctcctgcgacggctgtaaggggtttttccgcagatctgtgcggaaaaatcatatgtatagctgccgcttttccagacaatgtgtcgtggataaggacaaacggaaccagtgccgctactgtagactgaagaagtgcttccgggctggaatgaaaaaggaagccgttcagaatgagcgcgatagaattagcacccggagatcttcctatgaagacagcgcgctcccctctatcaacgccctgctgcaggctgaggtgctctcccgccaaattacaagccctgtctctggcatcaatggcgatattcgggccaaaaagatcgcttccatcgccgacgtgtgtgagagcatgaaagaacagctgcttgttctggtggagtgggcgaagtacattcccgccttttgcgaactccctctggatgaccaggtcgcccttctgcgcgcccacgctggggagcatctcctgctgggagccaccaagagatccatggtgttcaaagacgtgctcctgcttggcaacgattatatcgtcccccggcactgtcctgagctggccgaaatgtctagagttagcattcgcatcctcgacgagctggtgcttccgtttcaggaactgcaaattgatgacaatgagtacgcttacctcaaggcgatcattttctttgatcccgacgccaaagggctgtccgatcctggaaagatcaaacggctgagaagccaggtgcaggtctctctcgaagactatatcaacgatcgccagtacgactcccggggcagattcggggagctgcttctgctcctgcccacgcttcaaagcattacctggcagatgatcgagcagattcaatttatcaagctgttcggaatggctaaaattgataatctcctgcaggaaatgctgctcggcggctctcctagcgacgctccccatgcccaccacccgctgcatcctcaccttatgcaggagcatatggggacaaacgtgatcgttgctaataccatgcccacacacctgtccaacggacagatgtgcgaatggcctcgcccccggggccaagccgcgacccccgagacgcctcagccgtctccccctgggggaagcggctccgaaccctataagctcctgcctggggctgtggccacaatcgtcaagcccctgagcgccattccgcagcctaccatcacaaaacaggaggtgatttgaggactagttataagactgactagcccgatgggcctcccaacgggccctcctcccctccttgcaccgagattaataaaaaaaaaaaaaaaaaaaaaaaaaaaaaaaaaaaaaaaaaaaaaaaaaaaaaaaaaaaaaaaatgcatcccccccccccccccccccccccccccccccaaaggctcttttcagagccaccagaatt

SEQ ID NO: 1848 - RNA, 1642 nt, synthetic construct
  misc_feature 1..1642: note = mRNA i-3 (A64-N5-C30-hSL-N5) (opt5) from Homo sapiens__NP_000448.3__HNF4A(1-474)(S148E)
  source 1..1642: mol_type = other RNA
aggagaaagcttaccatgagactgagcaagaccctcgtggacatggatatggccgactactccgctgccctggatcccgcgtatacaacgcttgagttcgaaaacgtccaggttctgaccatgggcaatgacacatctcctagcgaggggaccaacctcaatgctccgaactccctgggagtgtctgccctttgcgccatctgtggcgatcgggctacagggaaacactacggagccagctcctgcgacggctgtaaggggtttttccgcagatctgtgcggaaaaatcatatgtatagctgccgcttttccagacaatgtgtcgtggataaggacaaacggaaccagtgccgctactgtagactgaagaagtgcttccgggctggaatgaaaaaggaagccgttcagaatgagcgcgatagaattagcacccggagatcttcctatgaagacagcgagctcccctctatcaacgcgctgctgcaggccgaggtgctctcccgccaaattacaagccctgtctctggcatcaatggcgatattcgggctaaaaagatcgcctccatcgctgacgtgtgtgaaagcatgaaagagcagctgcttgttctggtggaatgggccaagtacattcccgcgttttgcgagctccctctggatgaccaggtcgcccttctgcgcgctcacgccggggagcatctcctgctgggagctaccaagagatccatggtgttcaaagacgtgctcctgcttggcaacgattatatcgtcccccggcactgtcctgaactggccgagatgtctagagttagcattcgcatcctcgacgaactggtgcttccgtttcaggagctgcaaattgatgacaatgaatacgcctacctcaaggctatcattttctttgatcccgacgcgaaagggctgtccgatcctggaaagatcaaacggctgagaagccaggtgcaggtctctctcgaggactatatcaacgatcgccagtacgactcccggggcagattcggggagctgcttctgctcctgcccacgcttcaaagcattacctggcagatgatcgaacagattcaatttatcaagctgttcggaatggccaaaattgataatctcctgcaggagatgctgctcggcggctctcctagcgacgctccccatgcccaccacccgctgcatcctcaccttatgcaggaacatatggggacaaacgtgatcgttgccaataccatgcccacacacctgtccaacggacagatgtgcgagtggcctcgcccccggggccaagctgccacccccgaaacgcctcagccgtctccccctgggggaagcggctccgagccctataagctcctgcctggggcggtggctacaatcgtcaagcccctgagcgccattccgcagcctaccatcacaaaacaggaggtgatttgaggactagttataagactgactagcccgatgggcctcccaacgggccctcctcccctccttgcaccgagattaataaaaaaaaaaaaaaaaaaaaaaaaaaaaaaaaaaaaaaaaaaaaaaaaaaaaaaaaaaaaaaaatgcatcccccccccccccccccccccccccccccccaaaggctcttttcagagccaccagaatt

SEQ ID NO: 1849 - RNA, 1642 nt, synthetic construct
  misc_feature 1..1642: note = mRNA i-3 (A64-N5-C30-hSL-N5) (opt5) from Homo sapiens__NP_000448.3__HNF4A(1-474)(S183A)
  source 1..1642: mol_type = other RNA
aggagaaagcttaccatgagactgagcaagaccctcgtggacatggatatggccgactactccgctgccctggatcccgcgtatacaacgcttgagttcgaaaacgtccaggttctgaccatgggcaatgacacatctcctagcgaggggaccaacctcaatgctccgaactccctgggagtgtctgccctttgcgccatctgtggcgatcgggctacagggaaacactacggagccagctcctgcgacggctgtaaggggtttttccgcagatctgtgcggaaaaatcatatgtatagctgccgcttttccagacaatgtgtcgtggataaggacaaacggaaccagtgccgctactgtagactgaagaagtgcttccgggctggaatgaaaaaggaagccgttcagaatgagcgcgatagaattagcacccggagatcttcctatgaagacagctctctcccctccatcaacgcgctgctgcaggccgaggtgctcagccgccaaattacatctcctgtctccggcatcaatggcgatattcgggctaaaaagatcgccgctatcgccgacgtgtgtgagagcatgaaagaacagctgcttgttctggtggagtgggcgaagtacattcccgccttttgcgaactccctctggatgaccaggtcgcccttctgcgcgcccacgctggggagcatctcctgctgggagccaccaagagatccatggtgttcaaagacgtgctcctgcttggcaacgattatatcgtcccccggcactgtcctgagctggccgaaatgtctagagttagcattcgcatcctcgacgagctggtgcttccgtttcaggaactgcaaattgatgacaatgagtacgcttacctcaaggcgatcattttctttgatcccgacgccaaagggctgtccgatcctggaaagatcaaacggctgagaagccaggtgcaggtctctctcgaagactatatcaacgatcgccagtacgactcccggggcagattcggggagctgcttctgctcctgcccacgcttcaaagcattacctggcagatgatcgagcagattcaatttatcaagctgttcggaatggctaaaattgataatctcctgcaggaaatgctgctcggcggctctcctagcgacgctccccatgcccaccacccgctgcatcctcaccttatgcaggagcatatggggacaaacgtgatcgttgctaataccatgcccacacacctgtccaacggacagatgtgcgaatggcctcgcccccggggccaagccgcgacccccgagacgcctcagccgtctccccctgggggaagcggctccgaaccctataagctcctgcctggggctgtggccacaatcgtcaagcccctgagcgccattccgcagcctaccatcacaaaacaggaggtgatttgaggactagttataagactgactagcccgatgggcctcccaacgggccctcctcccctccttgcaccgagattaataaaaaaaaaaaaaaaaaaaaaaaaaaaaaaaaaaaaaaaaaaaaaaaaaaaaaaaaaaaaaaaatgcatcccccccccccccccccccccccccccccccaaaggctcttttcagagccaccagaatt

SEQ ID NO: 1850 - RNA, 1642 nt, synthetic construct
  misc_feature 1..1642: note = mRNA i-3 (A64-N5-C30-hSL-N5) (opt5) from Homo sapiens__NP_000448.3__HNF4A(1-474)(S183E)
  source 1..1642: mol_type = other RNA
aggagaaagcttaccatgagactgagcaagaccctcgtggacatggatatggccgactactccgctgccctggatcccgcgtatacaacgcttgagttcgaaaacgtccaggttctgaccatgggcaatgacacatctcctagcgaggggaccaacctcaatgctccgaactccctgggagtgtctgccctttgcgccatctgtggcgatcgggctacagggaaacactacggagccagctcctgcgacggctgtaaggggtttttccgcagatctgtgcggaaaaatcatatgtatagctgccgcttttccagacaatgtgtcgtggataaggacaaacggaaccagtgccgctactgtagactgaagaagtgcttccgggctggaatgaaaaaggaagccgttcagaatgagcgcgatagaattagcacccggagatcttcctatgaagacagctctctcccctccatcaacgcgctgctgcaggccgaggtgctcagccgccaaattacatctcctgtctccggcatcaatggcgatattcgggctaaaaagatcgccgagatcgctgacgtgtgtgaaagcatgaaagagcagctgcttgttctggtggaatgggccaagtacattcccgcgttttgcgagctccctctggatgaccaggtcgcccttctgcgcgctcacgccggggagcatctcctgctgggagctaccaagagatccatggtgttcaaagacgtgctcctgcttggcaacgattatatcgtcccccggcactgtcctgaactggccgagatgtctagagttagcattcgcatcctcgacgaactggtgcttccgtttcaggagctgcaaattgatgacaatgaatacgcctacctcaaggctatcattttctttgatcccgacgcgaaagggctgtccgatcctggaaagatcaaacggctgagaagccaggtgcaggtctctctcgaggactatatcaacgatcgccagtacgactcccggggcagattcggggagctgcttctgctcctgcccacgcttcaaagcattacctggcagatgatcgaacagattcaatttatcaagctgttcggaatggccaaaattgataatctcctgcaggagatgctgctcggcggctctcctagcgacgctccccatgcccaccacccgctgcatcctcaccttatgcaggaacatatggggacaaacgtgatcgttgccaataccatgcccacacacctgtccaacggacagatgtgcgagtggcctcgcccccggggccaagctgccacccccgaaacgcctcagccgtctccccctgggggaagcggctccgagccctataagctcctgcctggggcggtggctacaatcgtcaagcccctgagcgccattccgcagcctaccatcacaaaacaggaggtgatttgaggactagttataagactgactagcccgatgggcctcccaacgggccctcctcccctccttgcaccgagattaataaaaaaaaaaaaaaaaaaaaaaaaaaaaaaaaaaaaaaaaaaaaaaaaaaaaaaaaaaaaaaaatgcatcccccccccccccccccccccccccccccccaaaggctcttttcagagccaccagaatt

SEQ ID NO: 1851 - RNA, 1642 nt, synthetic construct
  misc_feature 1..1642: note = mRNA i-3 (A64-N5-C30-hSL-N5) (opt5) from Homo sapiens__NP_000448.3__HNF4A(1-474)(S461A)
  source 1..1642: mol_type = other RNA
aggagaaagcttaccatgagactgagcaagaccctcgtggacatggatatggccgactactccgctgccctggatcccgcgtatacaacgcttgagttcgaaaacgtccaggttctgaccatgggcaatgacacatctcctagcgaggggaccaacctcaatgctccgaactccctgggagtgtctgccctttgcgccatctgtggcgatcgggctacagggaaacactacggagccagctcctgcgacggctgtaaggggtttttccgcagatctgtgcggaaaaatcatatgtatagctgccgcttttccagacaatgtgtcgtggataaggacaaacggaaccagtgccgctactgtagactgaagaagtgcttccgggctggaatgaaaaaggaagccgttcagaatgagcgcgatagaattagcacccggcgcagctcctatgaagacagctctctcccctccatcaacgcgctgctgcaggccgaggtgctcagcagacaaattacatctcctgtctccggcatcaatggcgatattcgggctaaaaagatcgccagcatcgctgacgtgtgtgagtccatgaaagaacagctgcttgttctggtggagtgggccaagtacattcccgcgttttgcgaactccctctggatgaccaggtcgcccttctgcgcgctcacgccggggagcatctcctgctgggagctaccaagagatctatggtgttcaaagacgtgctcctgcttggcaacgattatatcgtcccccggcactgtcctgagctggccgaaatgagcagagtttccattcgcatcctcgacgagctggtgcttccgtttcaggaactgcaaattgatgacaatgagtacgcctacctcaaggctatcattttctttgatcccgacgcgaaagggctgagcgatcctggaaagatcaaacggctgagatctcaggtgcaggtctccctcgaagactatatcaacgatcgccagtacgacagccggggcagattcggggagctgcttctgctcctgcccacgcttcaatctattacctggcagatgatcgagcagattcaatttatcaagctgttcggaatggccaaaattgataatctcctgcaggaaatgctgctcggcggcagcccttccgacgctccccatgcccaccacccgctgcatcctcaccttatgcaggagcatatggggacaaacgtgatcgttgccaataccatgcccacacacctgtctaacggacagatgtgcgaatggcctcgcccccggggccaagctgccacccccgagacgcctcagccgtctccccctgggggatccggcagcgaaccctataagctcctgcctggggcggtggctacaatcgtcaagcccctggccgccattccgcagcctaccatcacaaaacaggaggtgatttgaggactagttataagactgactagcccgatgggcctcccaacgggccctcctcccctccttgcaccgagattaataaaaaaaaaaaaaaaaaaaaaaaaaaaaaaaaaaaaaaaaaaaaaaaaaaaaaaaaaaaaaaaatgcatcccccccccccccccccccccccccccccccaaaggctcttttcagagccaccagaatt

SEQ ID NO: 1852 - RNA, 1642 nt, synthetic construct
  misc_feature 1..1642: note = mRNA i-3 (A64-N5-C30-hSL-N5) (opt5) from Homo sapiens__NP_000448.3__HNF4A(1-474)(S461E)
  source 1..1642: mol_type = other RNA
aggagaaagcttaccatgagactgagcaagaccctcgtggacatggatatggccgactactccgctgccctggatcccgcgtatacaacgcttgagttcgaaaacgtccaggttctgaccatgggcaatgacacatctcctagcgaggggaccaacctcaatgctccgaactccctgggagtgtctgccctttgcgccatctgtggcgatcgggctacagggaaacactacggagccagctcctgcgacggctgtaaggggtttttccgcagatctgtgcggaaaaatcatatgtatagctgccgcttttccagacaatgtgtcgtggataaggacaaacggaaccagtgccgctactgtagactgaagaagtgcttccgggctggaatgaaaaaggaagccgttcagaatgagcgcgatagaattagcacccggcgcagctcctatgaagacagctctctcccctccatcaacgcgctgctgcaggccgaggtgctcagcagacaaattacatctcctgtctccggcatcaatggcgatattcgggctaaaaagatcgccagcatcgctgacgtgtgtgagtccatgaaagaacagctgcttgttctggtggagtgggccaagtacattcccgcgttttgcgaactccctctggatgaccaggtcgcccttctgcgcgctcacgccggggagcatctcctgctgggagctaccaagagatctatggtgttcaaagacgtgctcctgcttggcaacgattatatcgtcccccggcactgtcctgagctggccgaaatgagcagagtttccattcgcatcctcgacgagctggtgcttccgtttcaggaactgcaaattgatgacaatgagtacgcctacctcaaggctatcattttctttgatcccgacgcgaaagggctgagcgatcctggaaagatcaaacggctgagatctcaggtgcaggtctccctcgaagactatatcaacgatcgccagtacgacagccggggcagattcggggagctgcttctgctcctgcccacgcttcaatctattacctggcagatgatcgagcagattcaatttatcaagctgttcggaatggccaaaattgataatctcctgcaggaaatgctgctcggcggcagcccttccgacgctccccatgcccaccacccgctgcatcctcaccttatgcaggagcatatggggacaaacgtgatcgttgccaataccatgcccacacacctgtctaacggacagatgtgcgaatggcctcgcccccggggccaagctgccacccccgagacgcctcagccgtctccccctgggggatccggcagcgaaccctataagctcctgcctggggcggtggctacaatcgtcaagcccctggaggccattccgcagcctaccatcacaaaacaggaggtgatttgaggactagttataagactgactagcccgatgggcctcccaacgggccctcctcccctccttgcaccgagattaataaaaaaaaaaaaaaaaaaaaaaaaaaaaaaaaaaaaaaaaaaaaaaaaaaaaaaaaaaaaaaaatgcatcccccccccccccccccccccccccccccccaaaggctcttttcagagccaccagaatt

SEQ ID NO: 1853 - RNA, 1642 nt, synthetic construct
  misc_feature 1..1642: note = mRNA i-3 (A64-N5-C30-hSL-N5) (opt5) from Homo sapiens__NP_000448.3__HNF4A(1-474)(S142A_S143A_S313A)
  source 1..1642: mol_type = other RNA
aggagaaagcttaccatgagactgagcaagaccctcgtggacatggatatggccgactactccgctgccctggatcccgcgtatacaacgcttgagttcgaaaacgtccaggttctgaccatgggcaatgacacatctcctagcgaggggaccaacctcaatgctccgaactccctgggagtgtctgccctttgcgccatctgtggcgatcgggctacagggaaacactacggagccagctcctgcgacggctgtaaggggtttttccgcagatctgtgcggaaaaatcatatgtatagctgccgcttttccagacaatgtgtcgtggataaggacaaacggaaccagtgccgctactgtagactgaagaagtgcttccgggctggaatgaaaaaggaagccgttcagaatgagcgcgatagaattagcacccggcgcgcggcctatgaagactcttccctccccagcatcaacgctctgctgcaggccgaggtgctctctagacaaattacatcccctgtcagcggcatcaatggcgatattcgggctaaaaagatcgcctctatcgcggacgtgtgtgagtccatgaaagaacagctgcttgttctggtggagtgggccaagtacattcccgctttttgcgaactccctctggatgaccaggtcgcccttctgcgcgctcacgccggggagcatctcctgctgggagccaccaagagaagcatggtgttcaaagacgtgctcctgcttggcaacgattatatcgtcccccggcactgtcctgagctggctgaaatgtccagagtttctattcgcatcctcgacgagctggtgcttccgtttcaggaactgcaaattgatgacaatgagtacgcgtacctcaaggccatcattttctttgatcccgacgctaaagggctgagcgatcctggaaagatcaaacggctgagagcccaggtgcaggtctccctcgaagactatatcaacgatcgccagtacgacagccggggcagattcggggagctgcttctgctcctgcccacgcttcaatctattacctggcagatgatcgagcagattcaatttatcaagctgttcggaatggccaaaattgataatctcctgcaggaaatgctgctcggcggctcccctagcgacgctccccatgcccaccacccgctgcatcctcaccttatgcaggagcatatggggacaaacgtgatcgttgcgaataccatgcccacacacctgtctaacggacagatgtgcgaatggcctcgcccccggggccaagctgccacccccgagacgcctcagccgagccctcccgggggatccggctctgaaccctataagctcctgcctggggccgtggctacaatcgtcaagcccctgagcgccattccgcagcctaccatcacaaaacaggaggtgatttgaggactagttataagactgactagcccgatgggcctcccaacgggccctcctcccctccttgcaccgagattaataaaaaaaaaaaaaaaaaaaaaaaaaaaaaaaaaaaaaaaaaaaaaaaaaaaaaaaaaaaaaaaatgcatcccccccccccccccccccccccccccccccaaaggctcttttcagagccaccagaatt

SEQ ID NO: 1854 - RNA, 1642 nt, synthetic construct
  misc_feature 1..1642: note = mRNA i-3 (A64-N5-C30-hSL-N5) (opt5) from Homo sapiens__NP_000448.3__HNF4A(1-474)(S142A_S143A_S313A_K458R)
  source 1..1642: mol_type = other RNA
aggagaaagcttaccatgagactgagcaagaccctcgtggacatggatatggccgactactccgctgccctggatcccgcgtatacaacgcttgagttcgaaaacgtccaggttctgaccatgggcaatgacacatctcctagcgaggggaccaacctcaatgctccgaactccctgggagtgtctgccctttgcgccatctgtggcgatcgggctacagggaaacactacggagccagctcctgcgacggctgtaaggggtttttccgcagatctgtgcggaaaaatcatatgtatagctgccgcttttccagacaatgtgtcgtggataaggacaaacggaaccagtgccgctactgtagactgaagaagtgcttccgggctggaatgaaaaaggaagccgttcagaatgagcgcgatagaattagcacccggcgcgcggcctatgaagactcttccctccccagcatcaacgctctgctgcaggccgaggtgctctctagacaaattacatcccctgtcagcggcatcaatggcgatattcgggctaaaaagatcgcctctatcgcggacgtgtgtgagtccatgaaagaacagctgcttgttctggtggagtgggccaagtacattcccgctttttgcgaactccctctggatgaccaggtcgcccttctgcgcgctcacgccggggagcatctcctgctgggagccaccaagagaagcatggtgttcaaagacgtgctcctgcttggcaacgattatatcgtcccccggcactgtcctgagctggctgaaatgtccagagtttctattcgcatcctcgacgagctggtgcttccgtttcaggaactgcaaattgatgacaatgagtacgcgtacctcaaggccatcattttctttgatcccgacgctaaagggctgagcgatcctggaaagatcaaacggctgagagcccaggtgcaggtctccctcgaagactatatcaacgatcgccagtacgacagccggggcagattcggggagctgcttctgctcctgcccacgcttcaatctattacctggcagatgatcgagcagattcaatttatcaagctgttcggaatggccaaaattgataatctcctgcaggaaatgctgctcggcggctcccctagcgacgctccccatgcccaccacccgctgcatcctcaccttatgcaggagcatatggggacaaacgtgatcgttgcgaataccatgcccacacacctgtctaacggacagatgtgcgaatggcctcgcccccggggccaagctgccacccccgagacgcctcagccgagccctcccgggggatccggctctgaaccctataagctcctgcctggggccgtggctacaatcgtcagacccctgagcgccattccgcagcctaccatcacaaagcaggaggtgatttgaggactagttataagactgactagcccgatgggcctcccaacgggccctcctcccctccttgcaccgagattaataaaaaaaaaaaaaaaaaaaaaaaaaaaaaaaaaaaaaaaaaaaaaaaaaaaaaaaaaaaaaaaatgcatcccccccccccccccccccccccccccccccaaaggctcttttcagagccaccagaatt

SEQ ID NO: 1855 - RNA, 1642 nt, synthetic construct
  misc_feature 1..1642: note = mRNA i-3 (A64-N5-C30-hSL-N5) (opt5) from Homo sapiens__NP_000448.3__HNF4A(1-474)(S142A_S143A_S167A_S313A_ S378A_T429A_T432A_S436A_K458R)
  source 1..1642: mol_type = other RNA
aggagaaagcttaccatgagactgagcaagaccctcgtggacatggatatggccgactactccgctgccctggatcccgcgtatacaacgcttgagttcgaaaacgtccaggttctgaccatgggcaatgacacatctcctagcgaggggaccaacctcaatgctccgaactccctgggagtgtctgccctttgcgccatctgtggcgatcgggctacagggaaacactacggagccagctcctgcgacggctgtaaggggtttttccgcagatctgtgcggaaaaatcatatgtatagctgccgcttttccagacaatgtgtcgtggataaggacaaacggaaccagtgccgctactgtagactgaagaagtgcttccgggctggaatgaaaaaggaagccgttcagaatgagcgcgatagaattagcacccggcgcgcggcctatgaagactcttccctccccagcatcaacgctctgctgcaggccgaggtgctctctagacaaattacagctcctgtctccggcatcaatggcgatattcgggccaaaaagatcgcgagcatcgccgacgtgtgtgagtctatgaaagaacagctgcttgttctggtggagtgggctaagtacattcccgccttttgcgaactccctctggatgaccaggtcgcccttctgcgcgcccacgccggggagcatctcctgctgggagctaccaagagatccatggtgttcaaagacgtgctcctgcttggcaacgattatatcgtcccccggcactgtcctgagctggcggaaatgagcagagtttccattcgcatcctcgacgagctggtgcttccgtttcaggaactgcaaattgatgacaatgagtacgcctacctcaaggctatcattttctttgatcccgacgccaaagggctgtctgatcctggaaagatcaaacggctgagagcccaggtgcaggtcagcctcgaagactatatcaacgatcgccagtacgactcccggggcagattcggggagctgcttctgctcctgcccacgcttcaaagcattacctggcagatgatcgagcagattcaatttatcaagctgttcggaatggctaaaattgataatctcctgcaggaaatgctgctcggcggcgccccttctgacgcgccccatgctcaccacccgctgcatcctcaccttatgcaggagcatatggggacaaacgtgatcgttgccaataccatgcccacacacctgtccaacggacagatgtgcgaatggcctcgcccccggggccaagccgctgcccccgaggctcctcagccggctccccctgggggaagcggctctgaaccctataagctcctgcctggggcggtggccaccatcgtcagacccctgagcgctattccgcagcctacgatcacaaagcaggaggtgatttgaggactagttataagactgactagcccgatgggcctcccaacgggccctcctcccctccttgcaccgagattaataaaaaaaaaaaaaaaaaaaaaaaaaaaaaaaaaaaaaaaaaaaaaaaaaaaaaaaaaaaaaaaatgcatcccccccccccccccccccccccccccccccaaaggctcttttcagagccaccagaatt

SEQ ID NO: 1856 - RNA, 1642 nt, synthetic construct
  misc_feature 1..1642: note = mRNA i-3 (A64-N5-C30-hSL-N5) (opt5) from Homo sapiens__NP_000448.3__HNF4A(1-474)(S142A_S143A_S148A_S167A_ S313A_S378A_T429A_T432A_S436A_K458R)
  source 1..1642: mol_type = other RNA
aggagaaagcttaccatgagactgagcaagaccctcgtggacatggatatggccgactactccgctgccctggatcccgcgtatacaacgcttgagttcgaaaacgtccaggttctgaccatgggcaatgacacatctcctagcgaggggaccaacctcaatgctccgaactccctgggagtgtctgccctttgcgccatctgtggcgatcgggctacagggaaacactacggagccagctcctgcgacggctgtaaggggtttttccgcagatctgtgcggaaaaatcatatgtatagctgccgcttttccagacaatgtgtcgtggataaggacaaacggaaccagtgccgctactgtagactgaagaagtgcttccgggctggaatgaaaaaggaagccgttcagaatgagcgcgatagaattagcacccggcgcgcggcctatgaagactctgctctcccctccatcaacgccctgctgcaggctgaggtgctcagcagacaaattacagcccctgtctctggcatcaatggcgatattcgggcgaaaaagatcgcctccatcgctgacgtgtgtgagagcatgaaagaacagctgcttgttctggtggagtgggccaagtacattcccgctttttgcgaactccctctggatgaccaggtcgcccttctgcgcgcccacgctggggagcatctcctgctgggagcgaccaagagatctatggtgttcaaagacgtgctcctgcttggcaacgattatatcgtcccccggcactgtcctgagctggccgaaatgtccagagttagcattcgcatcctcgacgagctggtgcttccgtttcaggaactgcaaattgatgacaatgagtacgcttacctcaaggccatcattttctttgatcccgacgccaaagggctgtccgatcctggaaagatcaaacggctgagagctcaggtgcaggtctctctcgaagactatatcaacgatcgccagtacgacagccggggcagattcggggagctgcttctgctcctgcccacgcttcaatccattacctggcagatgatcgagcagattcaatttatcaagctgttcggaatggccaaaattgataatctcctgcaggaaatgctgctcggcggcgcgcctagcgacgctccccatgcccaccacccgctgcatcctcaccttatgcaggagcatatggggacaaacgtgatcgttgccaataccatgcccacacacctgtctaacggacagatgtgcgaatggcctcgcccccggggccaagctgccgctcccgaggcccctcagccggcgccccctgggggatccggcagcgaaccctataagctcctgcctggggccgtggctaccatcgtcagacccctgtctgccattccgcagcctacgatcacaaagcaggaggtgatttgaggactagttataagactgactagcccgatgggcctcccaacgggccctcctcccctccttgcaccgagattaataaaaaaaaaaaaaaaaaaaaaaaaaaaaaaaaaaaaaaaaaaaaaaaaaaaaaaaaaaaaaaaatgcatcccccccccccccccccccccccccccccccaaaggctcttttcagagccaccagaatt

SEQ ID NO: 1857 - RNA, 1642 nt, synthetic construct
  misc_feature 1..1642: note = mRNA i-3 (A64-N5-C30-hSL-N5) (opt5) from Homo sapiens__NP_000448.3__HNF4A(1-474)(K106R_K108R_K126R_K127R_ S142A_S143A_S148A_S167A_S313A_S378A_T429A_T432A_S436A_K458R )
  source 1..1642: mol_type = other RNA
aggagaaagcttaccatgagactgagcaagaccctcgtggacatggatatggccgactactccgctgccctggatcccgcgtatacaacgcttgagttcgaaaacgtccaggttctgaccatgggcaatgacacatctcctagcgaggggaccaacctcaatgctccgaactccctgggagtgtctgccctttgcgccatctgtggcgatcgggctacagggaaacactacggagccagctcctgcgacggctgtaaggggtttttccgcagatctgtgcggaaaaatcatatgtatagctgccgcttttccagacaatgtgtcgtggatcgggaccgcagaaaccagtgccggtactgtcgcctgaagaaatgcttcagagctggaatgcggcgcgaagccgttcagaatgagagagatcggattagcacccgcagagcggcctatgaagactctgctctcccctccatcaacgccctgctgcaggctgaggtgctcagccggcaaattacagcccctgtctctggcatcaatggcgatattagagcgaagaagatcgcctccatcgctgacgtgtgtgagagcatgaaagaacagctgcttgttctggtggagtgggccaagtacattcccgctttttgcgaactccctctggatgaccaggtcgcccttctgcgcgcccacgctggggagcatctcctgctgggagcgaccaaacggtctatggtgttcaaggacgtgctcctgcttggcaacgattatatcgtccccagacactgtcctgagctggccgaaatgtcccgcgttagcattcggatcctcgacgagctggtgcttccgtttcaggaactgcaaattgatgacaatgagtacgcttacctcaaagccatcattttctttgatcccgacgccaaggggctgtccgatcctggaaagatcaaaagactgcgcgctcaggtgcaggtctctctcgaagactatatcaacgatcggcagtacgacagcagaggccgcttcggggagctgcttctgctcctgcccacgcttcaatccattacctggcagatgatcgagcagattcaatttatcaagctgttcggaatggccaaaattgataatctcctgcaggaaatgctgctcggcggcgcgcctagcgacgctccccatgcccaccacccgctgcatcctcaccttatgcaggagcatatggggacaaacgtgatcgttgccaataccatgcccacacacctgtctaacggacagatgtgcgaatggcctcggcccagaggccaagctgccgctcccgaggcccctcagccggcgccccctgggggatccggcagcgaaccctataagctcctgcctggggccgtggctaccatcgtccgccccctgtctgccattccgcagcctacgatcacaaaacaggaggtgatttgaggactagttataagactgactagcccgatgggcctcccaacgggccctcctcccctccttgcaccgagattaataaaaaaaaaaaaaaaaaaaaaaaaaaaaaaaaaaaaaaaaaaaaaaaaaaaaaaaaaaaaaaaatgcatcccccccccccccccccccccccccccccccaaaggctcttttcagagccaccagaatt

SEQ ID NO: 1858 - RNA, 1642 nt, synthetic construct
  misc_feature 1..1642: note = mRNA i-3 (A64-N5-C30-hSL-N5) (opt5) from Homo sapiens__NP_000448.3__HNF4A(1-474)(S142A_S143A_S148A_T166A_ S167A_S313A_S378A_T429A_T432A_S436A_K458R)
  source 1..1642: mol_type = other RNA
aggagaaagcttaccatgagactgagcaagaccctcgtggacatggatatggccgactactccgctgccctggatcccgcgtatacaacgcttgagttcgaaaacgtccaggttctgaccatgggcaatgacacatctcctagcgaggggaccaacctcaatgctccgaactccctgggagtgtctgccctttgcgccatctgtggcgatcgggctacagggaaacactacggagccagctcctgcgacggctgtaaggggtttttccgcagatctgtgcggaaaaatcatatgtatagctgccgcttttccagacaatgtgtcgtggataaggacaaacggaaccagtgccgctactgtagactgaagaagtgcttccgggctggaatgaaaaaggaagccgttcagaatgagcgcgatagaattagcacccggcgcgcggcctatgaagactctgctctcccctccatcaacgccctgctgcaggctgaggtgctcagcagacaaattgccgcgcctgtctctggcatcaatggcgatattcgggccaaaaagatcgcttccatcgccgacgtgtgtgagagcatgaaagaacagctgcttgttctggtggagtgggctaagtacattcccgccttttgcgaactccctctggatgaccaggtcgcccttctgcgcgctcacgcgggggagcatctcctgctgggagccacaaagagatctatggtgttcaaagacgtgctcctgcttggcaacgattatatcgtcccccggcactgtcctgagctggctgaaatgtccagagttagcattcgcatcctcgacgagctggtgcttccgtttcaggaactgcaaattgatgacaatgagtacgcctacctcaaggccatcattttctttgatcccgacgctaaagggctgtccgatcctggaaagatcaaacggctgagagcccaggtgcaggtctctctcgaagactatatcaacgatcgccagtacgacagccggggcagattcggggagctgcttctgctcctgcccacccttcaatccattacgtggcagatgatcgagcagattcaatttatcaagctgttcggaatggcgaaaattgataatctcctgcaggaaatgctgctcggcggcgctcctagcgacgctccccatgcccaccacccgctgcatcctcaccttatgcaggagcatatggggaccaacgtgatcgttgccaatacaatgcccacccacctgtctaacggacagatgtgcgaatggcctcgcccccggggccaagccgctgcccccgaggcgcctcagccggctccccctgggggatccggcagcgaaccctataagctcctgcctggggccgtggccacaatcgtcagacccctgtctgctattccgcagcctaccatcacgaagcaggaggtgatttgaggactagttataagactgactagcccgatgggcctcccaacgggccctcctcccctccttgcaccgagattaataaaaaaaaaaaaaaaaaaaaaaaaaaaaaaaaaaaaaaaaaaaaaaaaaaaaaaaaaaaaaaaatgcatcccccccccccccccccccccccccccccccaaaggctcttttcagagccaccagaatt

SEQ ID NO: 1859 - RNA, 1642 nt, synthetic construct
  misc_feature 1..1642: note = mRNA i-3 (A64-N5-C30-hSL-N5) (opt5) from Homo sapiens__NP_000448.3__HNF4A(1-474)(S87A_S142A_S143A_S148A_T 166A_S167A_S313A_S378A_T429A_T432A_S436A_K458R)
  source 1..1642: mol_type = other RNA
aggagaaagcttaccatgagactgagcaagaccctcgtggacatggatatggccgactactccgctgccctggatcccgcgtatacaacgcttgagttcgaaaacgtccaggttctgaccatgggcaatgacacatctcctagcgaggggaccaacctcaatgctccgaactccctgggagtgtctgccctttgcgccatctgtggcgatcgggctacagggaaacactacggagccagctcctgcgacggctgtaaggggtttttccgcagagctgtgcggaaaaatcatatgtattcttgccgctttagcagacaatgtgtcgtggataaggacaaacggaaccagtgccgctactgtagactgaagaagtgcttccgggccggaatgaaaaaggaagcggttcagaatgagcgcgatagaatttccacccggcgcgccgcttatgaagacagcgccctcccctctatcaacgctctgctgcaggccgaggtgctctccagacaaattgcggcccctgtcagcggcatcaatggcgatattcgggctaaaaagatcgcctctatcgctgacgtgtgtgagtccatgaaagaacagctgcttgttctggtggagtgggccaagtacattcccgccttttgcgaactccctctggatgaccaggtcgcccttctgcgcgcgcacgccggggagcatctcctgctgggagctacaaagagaagcatggtgttcaaagacgtgctcctgcttggcaacgattatatcgtcccccggcactgtcctgagctggccgaaatgtctagagtttccattcgcatcctcgacgagctggtgcttccgtttcaggaactgcaaattgatgacaatgagtacgcctacctcaaggctatcattttctttgatcccgacgccaaagggctgagcgatcctggaaagatcaaacggctgagagctcaggtgcaggtctccctcgaagactatatcaacgatcgccagtacgactctcggggcagattcggggagctgcttctgctcctgcccacccttcaaagcattacgtggcagatgatcgagcagattcaatttatcaagctgttcggaatggcgaaaattgataatctcctgcaggaaatgctgctcggcggcgccccttccgacgctccccatgctcaccacccgctgcatcctcaccttatgcaggagcatatggggaccaacgtgatcgttgccaatacaatgcccacccacctgagcaacggacagatgtgcgaatggcctcgcccccggggccaagctgccgcgcccgaggcccctcagccggctccccctgggggatctggctccgaaccctataagctcctgcctggggccgtggctacaatcgtcagacccctgagcgccattccgcagcctaccatcacgaagcaggaggtgatttgaggactagttataagactgactagcccgatgggcctcccaacgggccctcctcccctccttgcaccgagattaataaaaaaaaaaaaaaaaaaaaaaaaaaaaaaaaaaaaaaaaaaaaaaaaaaaaaaaaaaaaaaaatgcatcccccccccccccccccccccccccccccccaaaggctcttttcagagccaccagaatt

SEQ ID NO: 1860 - RNA, 1642 nt, synthetic construct
  misc_feature 1..1642: note = mRNA i-3 (A64-N5-C30-hSL-N5) (opt5) from Homo sapiens__NP_000448.3__HNF4A(1-474)(S87A_K106R_K108R_K126R_K 127R_S142A_S143A_S148A_T166A_S167A_S313A_S378A_T429A_T432A_ S436A_K458R)
  source 1..1642: mol_type = other RNA
aggagaaagcttaccatgagactgagcaagaccctcgtggacatggatatggccgactactccgctgccctggatcccgcgtatacaacgcttgagttcgaaaacgtccaggttctgaccatgggcaatgacacatctcctagcgaggggaccaacctcaatgctccgaactccctgggagtgtctgccctttgcgccatctgtggcgatcgggctacagggaaacactacggagccagctcctgcgacggctgtaaggggtttttccgcagagctgtgcggaaaaatcatatgtattcttgccgctttagcagacaatgtgtcgtggatcgggaccgcagaaaccagtgccggtactgtcgcctgaagaaatgcttcagagccggaatgcggcgcgaagcggttcagaatgagagagatcggatttccacccgcagagccgcttatgaagacagcgccctcccctctatcaacgctctgctgcaggccgaggtgctctcccggcaaattgcggcccctgtcagcggcatcaatggcgatattagagctaagaagatcgcctctatcgctgacgtgtgtgagtccatgaaagaacagctgcttgttctggtggagtgggccaagtacattcccgccttttgcgaactccctctggatgaccaggtcgcccttctgcgcgcgcacgccggggagcatctcctgctgggagctacaaaacggagcatggtgttcaaggacgtgctcctgcttggcaacgattatatcgtccccagacactgtcctgagctggccgaaatgtctcgcgtttccattcggatcctcgacgagctggtgcttccgtttcaggaactgcaaattgatgacaatgagtacgcctacctcaaagctatcattttctttgatcccgacgccaaggggctgagcgatcctggaaagatcaaaagactgcgcgctcaggtgcaggtctccctcgaagactatatcaacgatcggcagtacgactctagaggccgcttcggggagctgcttctgctcctgcccacccttcaaagcattacgtggcagatgatcgagcagattcaatttatcaagctgttcggaatggcgaaaattgataatctcctgcaggaaatgctgctcggcggcgccccttccgacgctccccatgctcaccacccgctgcatcctcaccttatgcaggagcatatggggaccaacgtgatcgttgccaatacaatgcccacccacctgagcaacggacagatgtgcgaatggcctcggcccagaggccaagctgccgcgcccgaggcccctcagccggctccccctgggggatctggctccgaaccctataagctcctgcctggggccgtggctacaatcgtccgccccctgagcgccattccgcagcctaccatcacgaaacaggaggtgatttgaggactagttataagactgactagcccgatgggcctcccaacgggccctcctcccctccttgcaccgagattaataaaaaaaaaaaaaaaaaaaaaaaaaaaaaaaaaaaaaaaaaaaaaaaaaaaaaaaaaaaaaaaatgcatcccccccccccccccccccccccccccccccaaaggctcttttcagagccaccagaatt

SEQ ID NO: 1861 - RNA, 1642 nt, synthetic construct
  misc_feature 1..1642: note = mRNA i-3 (A64-N5-C30-hSL-N5) (opt5) from Homo sapiens__NP_000448.3__HNF4A(1-474)(S87A_K106R_K108R_K126R_K 127R)
  source 1..1642: mol_type = other RNA
aggagaaagcttaccatgagactgagcaagaccctcgtggacatggatatggccgactactccgctgccctggatcccgcgtatacaacgcttgagttcgaaaacgtccaggttctgaccatgggcaatgacacatctcctagcgaggggaccaacctcaatgctccgaactccctgggagtgtctgccctttgcgccatctgtggcgatcgggctacagggaaacactacggagccagctcctgcgacggctgtaaggggtttttccgcagagctgtgcggaaaaatcatatgtattcttgccgctttagcagacaatgtgtcgtggatcgggaccgcagaaaccagtgccggtactgtcgcctgaagaaatgcttcagagccggaatgcggcgcgaagcggttcagaatgagagagatcggatttccacccgcagaagctcttatgaagactccagcctcccctctatcaacgccctgctgcaggctgaggtgctctcccggcaaattacaagccctgtctctggcatcaatggcgatattagagccaagaagatcgcttccatcgccgacgtgtgtgagagcatgaaagaacagctgcttgttctggtggagtgggcgaagtacattcccgccttttgcgaactccctctggatgaccaggtcgcccttctgcgcgcccacgctggggagcatctcctgctgggagccaccaaacggtccatggtgttcaaggacgtgctcctgcttggcaacgattatatcgtccccagacactgtcctgagctggccgaaatgtctcgcgttagcattcggatcctcgacgagctggtgcttccgtttcaggaactgcaaattgatgacaatgagtacgcttacctcaaagcgatcattttctttgatcccgacgccaaggggctgtccgatcctggaaagatcaaaagactgcgcagccaggtgcaggtctctctcgaagactatatcaacgatcggcagtacgactccagaggccgcttcggggagctgcttctgctcctgcccacgcttcaaagcattacctggcagatgatcgagcagattcaatttatcaagctgttcggaatggctaaaattgataatctcctgcaggaaatgctgctcggcggctctcctagcgacgctccccatgcccaccacccgctgcatcctcaccttatgcaggagcatatggggacaaacgtgatcgttgctaataccatgcccacacacctgtccaacggacagatgtgcgaatggcctcggcccagaggccaagccgcgacccccgagacgcctcagccgtctccccctgggggaagcggctccgaaccctataagctcctgcctggggctgtggccacaatcgtcaaacccctgagcgccattccgcagcctaccatcacaaagcaggaggtgatttgaggactagttataagactgactagcccgatgggcctcccaacgggccctcctcccctccttgcaccgagattaataaaaaaaaaaaaaaaaaaaaaaaaaaaaaaaaaaaaaaaaaaaaaaaaaaaaaaaaaaaaaaaatgcatcccccccccccccccccccccccccccccccaaaggctcttttcagagccaccagaatt

SEQ ID NO: 1862 - RNA, 1642 nt, synthetic construct
  misc_feature 1..1642: note = mRNA i-3 (A64-N5-C30-hSL-N5) (opt5) from Homo sapiens__NP_000448.3__HNF4A(1-474)(S87A_K106R_K108R_K126R_K 127R_S142A_S143A_S148A_T166A_S167A_S313A_S378A_T429A_T432A_ S436A_K458R_S461A)
  source 1..1642: mol_type = other RNA
aggagaaagcttaccatgagactgagcaagaccctcgtggacatggatatggccgactactccgctgccctggatcccgcgtatacaacgcttgagttcgaaaacgtccaggttctgaccatgggcaatgacacatctcctagcgaggggaccaacctcaatgctccgaactccctgggagtgtctgccctttgcgccatctgtggcgatcgggctacagggaaacactacggagccagctcctgcgacggctgtaaggggtttttccgcagagctgtgcggaaaaatcatatgtattcttgccgctttagcagacaatgtgtcgtggatcgggaccgcagaaaccagtgccggtactgtcgcctgaagaaatgcttcagagccggaatgcggcgcgaagcggttcagaatgagagagatcggatttccacccgcagagccgcttatgaagacagcgccctcccctctatcaacgctctgctgcaggccgaggtgctctcccggcaaattgcggcccctgtcagcggcatcaatggcgatattagagctaagaagatcgcctctatcgctgacgtgtgtgagtccatgaaagaacagctgcttgttctggtggagtgggccaagtacattcccgccttttgcgaactccctctggatgaccaggtcgcccttctgcgcgcgcacgccggggagcatctcctgctgggagctacaaaacggagcatggtgttcaaggacgtgctcctgcttggcaacgattatatcgtccccagacactgtcctgagctggccgaaatgtctcgcgtttccattcggatcctcgacgagctggtgcttccgtttcaggaactgcaaattgatgacaatgagtacgcctacctcaaagctatcattttctttgatcccgacgccaaggggctgagcgatcctggaaagatcaaaagactgcgcgctcaggtgcaggtctccctcgaagactatatcaacgatcggcagtacgactctagaggccgcttcggggagctgcttctgctcctgcccacccttcaaagcattacgtggcagatgatcgagcagattcaatttatcaagctgttcggaatggcgaaaattgataatctcctgcaggaaatgctgctcggcggcgccccttccgacgctccccatgctcaccacccgctgcatcctcaccttatgcaggagcatatggggaccaacgtgatcgttgccaatacaatgcccacccacctgagcaacggacagatgtgcgaatggcctcggcccagaggccaagctgccgcgcccgaggcccctcagccggctccccctgggggatctggctccgaaccctataagctcctgcctggggccgtggctacaatcgtccgccccctggccgcgattccgcagcctaccatcacgaaacaggaggtgatttgaggactagttataagactgactagcccgatgggcctcccaacgggccctcctcccctccttgcaccgagattaataaaaaaaaaaaaaaaaaaaaaaaaaaaaaaaaaaaaaaaaaaaaaaaaaaaaaaaaaaaaaaaatgcatcccccccccccccccccccccccccccccccaaaggctcttttcagagccaccagaatt

SEQ ID NO: 1863 - RNA, 1642 nt, synthetic construct
  misc_feature 1..1642: note = mRNA i-3 (A64-N5-C30-hSL-N5) (opt5) from Homo sapiens__NP_000448.3__HNF4A(1-474)(S87A_K106R_K108R_K126R_K 127R_S142A_S143A_S148A_T166A_S167A_S313A_S378A_T429A_T432A_ S436A_K458R_S461E)
  source 1..1642: mol_type = other RNA
aggagaaagcttaccatgagactgagcaagaccctcgtggacatggatatggccgactactccgctgccctggatcccgcgtatacaacgcttgagttcgaaaacgtccaggttctgaccatgggcaatgacacatctcctagcgaggggaccaacctcaatgctccgaactccctgggagtgtctgccctttgcgccatctgtggcgatcgggctacagggaaacactacggagccagctcctgcgacggctgtaaggggtttttccgcagagctgtgcggaaaaatcatatgtattcttgccgctttagcagacaatgtgtcgtggatcgggaccgcagaaaccagtgccggtactgtcgcctgaagaaatgcttcagagccggaatgcggcgcgaagcggttcagaatgagagagatcggatttccacccgcagagccgcttatgaagacagcgccctcccctctatcaacgctctgctgcaggccgaggtgctctcccggcaaattgcggcccctgtcagcggcatcaatggcgatattagagctaagaagatcgcctctatcgctgacgtgtgtgagtccatgaaagaacagctgcttgttctggtggagtgggccaagtacattcccgccttttgcgaactccctctggatgaccaggtcgcccttctgcgcgcgcacgccggggagcatctcctgctgggagctacaaaacggagcatggtgttcaaggacgtgctcctgcttggcaacgattatatcgtccccagacactgtcctgagctggccgaaatgtctcgcgtttccattcggatcctcgacgagctggtgcttccgtttcaggaactgcaaattgatgacaatgagtacgcctacctcaaagctatcattttctttgatcccgacgccaaggggctgagcgatcctggaaagatcaaaagactgcgcgctcaggtgcaggtctccctcgaagactatatcaacgatcggcagtacgactctagaggccgcttcggggagctgcttctgctcctgcccacccttcaaagcattacgtggcagatgatcgagcagattcaatttatcaagctgttcggaatggcgaaaattgataatctcctgcaggaaatgctgctcggcggcgccccttccgacgctccccatgctcaccacccgctgcatcctcaccttatgcaggagcatatggggaccaacgtgatcgttgccaatacaatgcccacccacctgagcaacggacagatgtgcgaatggcctcggcccagaggccaagctgccgcgcccgaggcccctcagccggctccccctgggggatctggctccgaaccctataagctcctgcctggggccgtggctacaatcgtccgccccctggaggccattccgcagcctaccatcacgaaacaggaggtgatttgaggactagttataagactgactagcccgatgggcctcccaacgggccctcctcccctccttgcaccgagattaataaaaaaaaaaaaaaaaaaaaaaaaaaaaaaaaaaaaaaaaaaaaaaaaaaaaaaaaaaaaaaaatgcatcccccccccccccccccccccccccccccccaaaggctcttttcagagccaccagaatt

SEQ ID NO: 1864 - RNA, 1642 nt, synthetic construct
  misc_feature 1..1642: note = mRNA i-3 (A64-N5-C30-hSL-N5) (opt5) from Homo sapiens__NP_000448.3__HNF4A(1-474)(S87A_K106R_K108R_K126R_K 127R_S142A_S143A_S148E_T166A_S167E_S313A_S378E_T429E_T432E_ S436E_K458R_S461E)
  source 1..1642: mol_type = other RNA
aggagaaagcttaccatgagactgagcaagaccctcgtggacatggatatggccgactactccgctgccctggatcccgcgtatacaacgcttgagttcgaaaacgtccaggttctgaccatgggcaatgacacatctcctagcgaggggaccaacctcaatgctccgaactccctgggagtgtctgccctttgcgccatctgtggcgatcgggctacagggaaacactacggagccagctcctgcgacggctgtaaggggtttttccgcagagctgtgcggaaaaatcatatgtattcttgccgctttagcagacaatgtgtcgtggatcgggaccgcagaaaccagtgccggtactgtcgcctgaagaaatgcttcagagccggaatgcggcgcgaagcggttcagaatgagagagatcggatttccacccgcagagccgcttatgaagacagcgagctcccctctatcaacgccctgctgcaggctgaggtgctctcccggcaaattgccgaacctgtcagcggcatcaatggcgatattagagcgaagaagatcgcctctatcgctgacgtgtgtgagtccatgaaagaacagctgcttgttctggtggagtgggccaagtacattcccgctttttgcgagctccctctggatgaccaggtcgcccttctgcgcgcccacgctggggaacatctcctgctgggagcgacaaaacggagcatggtgttcaaggacgtgctcctgcttggcaacgattatatcgtccccagacactgtcctgagctggccgaaatgtctcgcgtttccattcggatcctcgacgagctggtgcttccgtttcaggaactgcaaattgatgacaatgagtacgcttacctcaaagccatcattttctttgatcccgacgccaaggggctgagcgatcctggaaagatcaaaagactgcgcgctcaggtgcaggtctccctcgaggactatatcaacgatcggcagtacgactctagaggccgcttcggggaactgcttctgctcctgcccacccttcaaagcattacgtggcagatgatcgagcagattcaatttatcaagctgttcggaatggccaaaattgataatctcctgcaggaaatgctgctcggcggcgagccttccgacgcgccccatgctcaccacccgctgcatcctcaccttatgcaggaacatatggggaccaacgtgatcgttgccaatacaatgcccacccacctgagcaacggacagatgtgcgagtggcctcggcccagaggccaagccgctgagcccgaggaacctcagccggaaccccctgggggatctggctccgagccctataagctcctgcctggggccgtggctacaatcgtccgccccctggaagccattccgcagcctaccatcacgaaacaggaggtgatttgaggactagttataagactgactagcccgatgggcctcccaacgggccctcctcccctccttgcaccgagattaataaaaaaaaaaaaaaaaaaaaaaaaaaaaaaaaaaaaaaaaaaaaaaaaaaaaaaaaaaaaaaaatgcatcccccccccccccccccccccccccccccccaaaggctcttttcagagccaccagaatt

SEQ ID NO: 1865 - RNA, 1642 nt, synthetic construct
  misc_feature 1..1642: note = mRNA i-3 (A64-N5-C30-hSL-N5) (opt5) from Homo sapiens__NP_000448.3__HNF4A(1-474)(S87A_K106R_K108R_K126R_K 127R_S142A_S143A_S148A_T166A_S167A_K179R_K180R_S313A_S378A_ T429A_T432A_S436A_K458R_S461E)
  source 1..1642: mol_type = other RNA
aggagaaagcttaccatgagactgagcaagaccctcgtggacatggatatggccgactactccgctgccctggatcccgcgtatacaacgcttgagttcgaaaacgtccaggttctgaccatgggcaatgacacatctcctagcgaggggaccaacctcaatgctccgaactccctgggagtgtctgccctttgcgccatctgtggcgatcgggctacagggaaacactacggagccagctcctgcgacggctgtaaggggtttttccgcagagctgtgcggaaaaatcatatgtattcttgccgctttagcagacaatgtgtcgtggatcgggaccgcagaaaccagtgccggtactgtcgcctgaagaaatgcttcagagccggaatgcggcgcgaagcggttcagaatgagagagatcggatttccacccgcagagccgcttatgaagacagcgccctcccctctatcaacgctctgctgcaggccgaggtgctctcccggcaaattgcggcccctgtcagcggcatcaatggcgatattagagctcgccggatcgcctctatcgctgacgtgtgtgagtccatgaaggaacagctgcttgttctggtggagtgggccaagtacattcccgccttttgcgaactccctctggatgaccaggtcgcccttctgagagcgcacgccggggagcatctcctgctgggagctacaaaacgcagcatggtgttcaaggacgtgctcctgcttggcaacgattatatcgtcccccggcactgtcctgagctggccgaaatgtctagagtttccattcgcatcctcgacgagctggtgcttccgtttcaggaactgcaaattgatgacaatgagtacgcctacctcaaagctatcattttctttgatcccgacgccaaggggctgagcgatcctggaaaaatcaagcggctgagagctcaggtgcaggtctccctcgaagactatatcaacgatcgccagtacgactctcggggcagattcggggagctgcttctgctcctgcccacccttcaaagcattacgtggcagatgatcgagcagattcaatttatcaagctgttcggaatggcgaaaattgataatctcctgcaggaaatgctgctcggcggcgccccttccgacgctccccatgctcaccacccgctgcatcctcaccttatgcaggagcatatggggaccaacgtgatcgttgccaatacaatgcccacccacctgagcaacggacagatgtgcgaatggcctcgcccccggggccaagctgccgcgcccgaggcccctcagccggctccccctgggggatctggctccgaaccctataagctcctgcctggggccgtggctacaatcgtcagacccctggaggccattccgcagcctaccatcacgaaacaggaggtgatttgaggactagttataagactgactagcccgatgggcctcccaacgggccctcctcccctccttgcaccgagattaataaaaaaaaaaaaaaaaaaaaaaaaaaaaaaaaaaaaaaaaaaaaaaaaaaaaaaaaaaaaaaaatgcatcccccccccccccccccccccccccccccccaaaggctcttttcagagccaccagaatt

SEQ ID NO: 1866 - RNA, 1642 nt, synthetic construct
  misc_feature 1..1642: note = mRNA i-3 (A64-N5-C30-hSL-N5) (opt5) from Homo sapiens__NP_000448.3__HNF4A(1-474)(S87A_K106R_K108R_K126R_K 127R_S142A_S143A_S148A_T166A_S167A_K300R_K307R_K309R_S313A_ S378A_T429A_T432A_S436A_K458R_S461E)
  source 1..1642: mol_type = other RNA
aggagaaagcttaccatgagactgagcaagaccctcgtggacatggatatggccgactactccgctgccctggatcccgcgtatacaacgcttgagttcgaaaacgtccaggttctgaccatgggcaatgacacatctcctagcgaggggaccaacctcaatgctccgaactccctgggagtgtctgccctttgcgccatctgtggcgatcgggctacagggaaacactacggagccagctcctgcgacggctgtaaggggtttttccgcagagctgtgcggaaaaatcatatgtattcttgccgctttagcagacaatgtgtcgtggatcgggaccgcagaaaccagtgccggtactgtcgcctgaagaaatgcttcagagccggaatgcggcgcgaagcggttcagaatgagagagatcggatttccacccgcagagccgcttatgaagacagcgccctcccctctatcaacgctctgctgcaggccgaggtgctctcccggcaaattgcggcccctgtcagcggcatcaatggcgatattagagctaagaagatcgcctctatcgctgacgtgtgtgagtccatgaaagaacagctgcttgttctggtggagtgggccaagtacattcccgccttttgcgaactccctctggatgaccaggtcgcccttctgcgcgcgcacgccggggagcatctcctgctgggagctacaaaacggagcatggtgttcaaggacgtgctcctgcttggcaacgattatatcgtccccagacactgtcctgagctggccgaaatgtctcgcgtttccattcggatcctcgacgagctggtgcttccgtttcaggaactgcaaattgatgacaatgagtacgcctacctcaaagctatcattttctttgatcccgacgccagagggctgagcgatcctggacgcatccggagactgcgcgctcaggtgcaggtctccctcgaagactatatcaacgatcggcagtacgactctagaggccgcttcggggagctgcttctgctcctgcccacccttcaaagcattacgtggcagatgatcgagcagattcaatttatcaagctgttcggaatggcgaagattgataatctcctgcaggaaatgctgctcggcggcgccccttccgacgctccccatgctcaccacccgctgcatcctcaccttatgcaggagcatatggggaccaacgtgatcgttgccaatacaatgcccacccacctgagcaacggacagatgtgcgaatggcctcggcccagaggccaagctgccgcgcccgaggcccctcagccggctccccctgggggatctggctccgaaccctataaactcctgcctggggccgtggctacaatcgtccggcccctggaggccattccgcagcctaccatcacgaagcaggaggtgatttgaggactagttataagactgactagcccgatgggcctcccaacgggccctcctcccctccttgcaccgagattaataaaaaaaaaaaaaaaaaaaaaaaaaaaaaaaaaaaaaaaaaaaaaaaaaaaaaaaaaaaaaaaatgcatcccccccccccccccccccccccccccccccaaaggctcttttcagagccaccagaatt

SEQ ID NO: 1867 - RNA, 1642 nt, synthetic construct
  misc_feature 1..1642: note = mRNA i-3 (A64-N5-C30-hSL-N5) (opt5) from Homo sapiens__NP_000448.3__HNF4A(1-474)(S87A_K106R_K108R_K126R_K 127R_S142A_S143A_S148A_T166A_S167A_S313A_S378A_T429A_T432A_ S436A_K447R_K458R_S461E_K470R)
  source 1..1642: mol_type = other RNA
aggagaaagcttaccatgagactgagcaagaccctcgtggacatggatatggccgactactccgctgccctggatcccgcgtatacaacgcttgagttcgaaaacgtccaggttctgaccatgggcaatgacacatctcctagcgaggggaccaacctcaatgctccgaactccctgggagtgtctgccctttgcgccatctgtggcgatcgggctacagggaaacactacggagccagctcctgcgacggctgtaaggggtttttccgcagagctgtgcggaaaaatcatatgtattcttgccgctttagcagacaatgtgtcgtggatcgggaccgcagaaaccagtgccggtactgtcgcctgaagaaatgcttcagagccggaatgcggcgcgaagcggttcagaatgagagagatcggatttccacccgcagagccgcttatgaagacagcgccctcccctctatcaacgctctgctgcaggccgaggtgctctcccggcaaattgcggcccctgtcagcggcatcaatggcgatattagagctaagaagatcgcctctatcgctgacgtgtgtgagtccatgaaagaacagctgcttgttctggtggagtgggccaagtacattcccgccttttgcgaactccctctggatgaccaggtcgcccttctgcgcgcgcacgccggggagcatctcctgctgggagctacaaaacggagcatggtgttcaaggacgtgctcctgcttggcaacgattatatcgtccccagacactgtcctgagctggccgaaatgtctcgcgtttccattcggatcctcgacgagctggtgcttccgtttcaggaactgcaaattgatgacaatgagtacgcctacctcaaagctatcattttctttgatcccgacgccaaggggctgagcgatcctggaaagatcaaaagactgcgcgctcaggtgcaggtctccctcgaagactatatcaacgatcggcagtacgactctagaggccgcttcggggagctgcttctgctcctgcccacccttcaaagcattacgtggcagatgatcgagcagattcaatttatcaagctgttcggaatggcgaaaattgataatctcctgcaggaaatgctgctcggcggcgccccttccgacgctccccatgctcaccacccgctgcatcctcaccttatgcaggagcatatggggaccaacgtgatcgttgccaatacaatgcccacccacctgagcaacggacagatgtgcgaatggcctcggcccagaggccaagctgccgcgcccgaggcccctcagccggctccccctgggggatctggctccgaaccctatcgcctcctgcctggggccgtggctacaatcgtccggcccctggaggccattccgcagcctaccatcacgagacaggaggtgatttgaggactagttataagactgactagcccgatgggcctcccaacgggccctcctcccctccttgcaccgagattaataaaaaaaaaaaaaaaaaaaaaaaaaaaaaaaaaaaaaaaaaaaaaaaaaaaaaaaaaaaaaaaatgcatcccccccccccccccccccccccccccccccaaaggctcttttcagagccaccagaatt

SEQ ID NO: 1868 - RNA, 1642 nt, synthetic construct
  misc_feature 1..1642: note = mRNA i-3 (A64-N5-C30-hSL-N5) (opt5) from Homo sapiens__NP_000448.3__HNF4A(1-474)(S87A_K106R_K108R_K126R_K 127R_S142A_S143A_S148A_T166A_S167A_K179R_K180R_K234R_K300R_ K307R_K309R_S313A_S378A_T429A_T432A_S436A_K447R_K458R_S461E _K470R)
  source 1..1642: mol_type = other RNA
aggagaaagcttaccatgagactgagcaagaccctcgtggacatggatatggccgactactccgctgccctggatcccgcgtatacaacgcttgagttcgaaaacgtccaggttctgaccatgggcaatgacacatctcctagcgaggggaccaacctcaatgctccgaactccctgggagtgtctgccctttgcgccatctgtggcgatcgggctacagggaaacactacggagccagctcctgcgacggctgtaaggggtttttccgcagagctgtgcggaaaaatcatatgtattcttgccgctttagcagacaatgtgtcgtggatcgggaccgcagaaaccagtgccggtactgtcgcctgaagaaatgcttcagagccggaatgcggcgcgaagcggttcagaatgagagagatcggatttccacccgcagagccgcttatgaagacagcgccctcccctctatcaacgctctgctgcaggccgaggtgctctcccggcaaattgcggcccctgtcagcggcatcaatggcgatattagagctcgccggatcgcctctatcgctgacgtgtgtgagtccatgaaggaacagctgcttgttctggtggagtgggccaagtacattcccgccttttgcgaactccctctggatgaccaggtcgcccttctgagagcgcacgccggggagcatctcctgctgggagctacacgccggagcatggtgttcaaagacgtgctcctgcttggcaacgattatatcgtccccagacactgtcctgagctggccgaaatgtctcgcgtttccattcggatcctcgacgagctggtgcttccgtttcaggaactgcaaattgatgacaatgagtacgcctacctcaaggctatcattttctttgatcccgacgccagagggctgagcgatcctggacgcatccggagactgcgcgctcaggtgcaggtctccctcgaagactatatcaacgatcggcagtacgactctagaggccggttcggggagctgcttctgctcctgcccacccttcaaagcattacgtggcagatgatcgagcagattcaatttatcaaactgttcggaatggcgaagattgataatctcctgcaggaaatgctgctcggcggcgccccttccgacgctccccatgctcaccacccgctgcatcctcaccttatgcaggagcatatggggaccaacgtgatcgttgccaatacaatgcccacccacctgagcaacggacagatgtgcgaatggcctcgccccagaggccaagctgccgcgcccgaggcccctcagccggctccccctgggggatctggctccgaaccctatcggctcctgcctggggccgtggctacaatcgtcagacccctggaggccattccgcagcctaccatcacgcgccaggaggtgatttgaggactagttataagactgactagcccgatgggcctcccaacgggccctcctcccctccttgcaccgagattaataaaaaaaaaaaaaaaaaaaaaaaaaaaaaaaaaaaaaaaaaaaaaaaaaaaaaaaaaaaaaaaatgcatcccccccccccccccccccccccccccccccaaaggctcttttcagagccaccagaatt

SEQ ID NO: 1869 - RNA, 1642 nt, synthetic construct
  misc_feature 1..1642: note = mRNA i-3 (A64-N5-C30-hSL-N5) (opt5) from Homo sapiens__NP_000448.3__HNF4A(1-474)(S87A_S95A_S99A_K106R_K10 8R_K126R_K127R_S142A_S143A_S148A_T166A_S167A_S313A_S378A_T4 29A_T432A_S436A_K458R_S461E)
  source 1..1642: mol_type = other RNA
aggagaaagcttaccatgagactgagcaagaccctcgtggacatggatatggccgactactccgctgccctggatcccgcgtatacaacgcttgagttcgaaaacgtccaggttctgaccatgggcaatgacacatctcctagcgaggggaccaacctcaatgctccgaactccctgggagtgtctgccctttgcgccatctgtggcgatcgggctacagggaaacactacggagccagctcctgcgacggctgtaaggggtttttccgcagagctgtgcggaaaaatcatatgtatgcctgccgctttgcgagacaatgtgtcgtggatcgggaccgcagaaaccagtgccggtactgtcgcctgaagaaatgcttcagagccggaatgcggcgcgaagctgttcagaatgagagagatcggatttctacccgcagagccgcttatgaagacagcgccctcccctccatcaacgcgctgctgcaggccgaggtgctcagccggcaaattgctgcccctgtctctggcatcaatggcgatattagagctaagaagatcgcctccatcgccgacgtgtgtgagagcatgaaagaacagctgcttgttctggtggagtgggctaagtacattcccgcgttttgcgaactccctctggatgaccaggtcgcccttctgcgcgctcacgccggggagcatctcctgctgggagccacaaaacggtctatggtgttcaaggacgtgctcctgcttggcaacgattatatcgtccccagacactgtcctgagctggctgaaatgtcccgcgttagcattcggatcctcgacgagctggtgcttccgtttcaggaactgcaaattgatgacaatgagtacgcctacctcaaagcgatcattttctttgatcccgacgctaaggggctgtctgatcctggaaagatcaaaagactgcgcgcccaggtgcaggtctccctcgaagactatatcaacgatcggcagtacgacagcagaggccgcttcggggagctgcttctgctcctgcccacccttcaatccattacgtggcagatgatcgagcagattcaatttatcaagctgttcggaatggccaaaattgataatctcctgcaggaaatgctgctcggcggcgctccttctgacgctccccatgcccaccacccgctgcatcctcaccttatgcaggagcatatggggaccaacgtgatcgttgccaatacaatgcccacccacctgagcaacggacagatgtgcgaatggcctcggcccagaggccaagcggccgctcccgaggcccctcagccggctccccctgggggatccggcagcgaaccctataagctcctgcctggggccgtggcgacaatcgtccgccccctggaggccattccgcagcctaccatcacgaaacaggaggtgatttgaggactagttataagactgactagcccgatgggcctcccaacgggccctcctcccctccttgcaccgagattaataaaaaaaaaaaaaaaaaaaaaaaaaaaaaaaaaaaaaaaaaaaaaaaaaaaaaaaaaaaaaaaatgcatcccccccccccccccccccccccccccccccaaaggctcttttcagagccaccagaatt

SEQ ID NO: 1870 - RNA, 1642 nt, synthetic construct
  misc_feature 1..1642: note = mRNA i-3 (A64-N5-C30-hSL-N5) (opt5) from Homo sapiens__NP_000448.3__HNF4A(1-474)(S87A_K106R_K108R_K126R_K 127R_S138A_T139A_S142A_S143A_S148A_T166A_S167A_S313A_S378A_ T429A_T432A_S436A_K458R_S461E)
  source 1..1642: mol_type = other RNA
aggagaaagcttaccatgagactgagcaagaccctcgtggacatggatatggccgactactccgctgccctggatcccgcgtatacaacgcttgagttcgaaaacgtccaggttctgaccatgggcaatgacacatctcctagcgaggggaccaacctcaatgctccgaactccctgggagtgtctgccctttgcgccatctgtggcgatcgggctacagggaaacactacggagccagctcctgcgacggctgtaaggggtttttccgcagagctgtgcggaaaaatcatatgtattcttgccgctttagcagacaatgtgtcgtggatcgggaccgcagaaaccagtgccggtactgtcgcctgaagaaatgcttcagagccggaatgcggcgcgaagcggttcagaatgagagagatcggattgccgctcgcagagccgcttatgaagactccgccctccccagcatcaacgcgctgctgcaggccgaggtgctctctcggcaaattgctgcccctgtctccggcatcaatggcgatattagagctaagaagatcgccagcatcgccgacgtgtgtgagtctatgaaagaacagctgcttgttctggtggagtgggctaagtacattcccgcgttttgcgaactccctctggatgaccaggtcgcccttctgcgcgctcacgccggggagcatctcctgctgggagccaccaaacggtccatggtgttcaaggacgtgctcctgcttggcaacgattatatcgtccccagacactgtcctgagctggctgaaatgagccgcgtttctattcggatcctcgacgagctggtgcttccgtttcaggaactgcaaattgatgacaatgagtacgcctacctcaaagcgatcattttctttgatcccgacgctaaggggctgtccgatcctggaaagatcaaaagactgcgcgcccaggtgcaggtcagcctcgaagactatatcaacgatcggcagtacgactccagaggccgcttcggggagctgcttctgctcctgcccacacttcaatctattacctggcagatgatcgagcagattcaatttatcaagctgttcggaatggccaaaattgataatctcctgcaggaaatgctgctcggcggcgctcctagcgacgctccccatgcccaccacccgctgcatcctcaccttatgcaggagcatatggggacgaacgtgatcgttgccaataccatgcccacacacctgtccaacggacagatgtgcgaatggcctcggcccagaggccaagcggccgctcccgaggcccctcagccggctccccctgggggaagcggctctgaaccctataagctcctgcctggggccgtggcgaccatcgtccgccccctggaggccattccgcagcctacaatcaccaaacaggaggtgatttgaggactagttataagactgactagcccgatgggcctcccaacgggccctcctcccctccttgcaccgagattaataaaaaaaaaaaaaaaaaaaaaaaaaaaaaaaaaaaaaaaaaaaaaaaaaaaaaaaaaaaaaaaatgcatcccccccccccccccccccccccccccccccaaaggctcttttcagagccaccagaatt

SEQ ID NO: 1871 - RNA, 1642 nt, synthetic construct
  misc_feature 1..1642: note = mRNA i-3 (A64-N5-C30-hSL-N5) (opt5) from Homo sapiens__NP_000448.3__HNF4A(1-474)(S87A_S95A_S99A_K106R_K10 8R_K126R_K127R_S138A_T139A_S142A_S143A_S148A_T166A_S167A_S3 13A_S378A_T429A_T432A_S436A_K458R_S461E)
  source 1..1642: mol_type = other RNA
aggagaaagcttaccatgagactgagcaagaccctcgtggacatggatatggccgactactccgctgccctggatcccgcgtatacaacgcttgagttcgaaaacgtccaggttctgaccatgggcaatgacacatctcctagcgaggggaccaacctcaatgctccgaactccctgggagtgtctgccctttgcgccatctgtggcgatcgggctacagggaaacactacggagccagctcctgcgacggctgtaaggggtttttccgcagagctgtgcggaaaaatcatatgtatgcctgccgctttgcgagacaatgtgtcgtggatcgggaccgcagaaaccagtgccggtactgtcgcctgaagaaatgcttcagagccggaatgcggcgcgaagctgttcagaatgagagagatcggattgccgctcgcagagccgcgtatgaagactctgccctccccagcatcaacgctctgctgcaggccgaggtgctctcccggcaaattgctgcccctgtcagcggcatcaatggcgatattagagccaagaagatcgcttctatcgcggacgtgtgtgagtccatgaaagaacagctgcttgttctggtggagtgggccaagtacattcccgctttttgcgaactccctctggatgaccaggtcgcccttctgcgcgcccacgctggggagcatctcctgctgggagccaccaaacggagcatggtgttcaaggacgtgctcctgcttggcaacgattatatcgtccccagacactgtcctgagctggcggaaatgtctcgcgtttccattcggatcctcgacgagctggtgcttccgtttcaggaactgcaaattgatgacaatgagtacgcttacctcaaagccatcattttctttgatcccgacgccaaggggctgagcgatcctggaaagatcaaaagactgcgcgctcaggtgcaggtctctctcgaagactatatcaacgatcggcagtacgactccagaggccgcttcggggagctgcttctgctcctgcccacacttcaaagcattacctggcagatgatcgagcagattcaatttatcaagctgttcggaatggccaaaattgataatctcctgcaggaaatgctgctcggcggcgctccttccgacgcgccccatgcccaccacccgctgcatcctcaccttatgcaggagcatatggggacgaacgtgatcgttgccaataccatgcccacacacctgtctaacggacagatgtgcgaatggcctcggcccagaggccaagctgccgctcccgaggcccctcagccggcgccccctgggggaagcggctccgaaccctataagctcctgcctggggccgtggctaccatcgtccgccccctggaggccattccgcagcctacaatcaccaaacaggaggtgatttgaggactagttataagactgactagcccgatgggcctcccaacgggccctcctcccctccttgcaccgagattaataaaaaaaaaaaaaaaaaaaaaaaaaaaaaaaaaaaaaaaaaaaaaaaaaaaaaaaaaaaaaaaatgcatcccccccccccccccccccccccccccccccaaaggctcttttcagagccaccagaatt

SEQ ID NO: 1872 - RNA, 1642 nt, synthetic construct
  misc_feature 1..1642: note = mRNA i-3 (A64-N5-C30-hSL-N5) (opt11) from Homo sapiens__NP_000448.3__HNF4A(1-474)
  source 1..1642: mol_type = other RNA
aggagaaagcttaccatgcgtctttccaaaacactcgtagacatggacatggcagactacagcgccgccctcgacccagcctacaccaccctcgaatttgaaaacgtccaagtcctaactatgggaaacgacacatcaccctcagaaggtacaaacctcaacgcccccaactcgctaggcgtctccgcactatgcgcaatctgcggcgaccgtgccaccggcaaacactacggagcctcatcctgcgacggttgtaaaggcttcttccgacgcagcgtcagaaaaaaccacatgtactcctgccgcttctcccgtcaatgcgtcgtcgacaaagacaaacgcaaccaatgccggtactgccgcctaaaaaaatgcttccgcgcaggcatgaaaaaagaagcagtccaaaacgaacgcgaccgcatatcaacccgtcgatcatcatacgaagactcctccctccccagcatcaacgccctcctccaagcagaagtactaagccggcaaataacatccccagtcagcggcatcaacggagacatacgagccaaaaaaatagcttcaatcgccgacgtctgcgaatccatgaaagagcaactactggtcctcgtcgaatgggctaaatacatcccggccttctgcgaactccccctcgacgatcaagtcgcccttctaagagcccacgccggcgaacacctcctcttaggcgcaaccaaacgcagcatggtattcaaagacgtactgctcctcggcaacgattacatcgtcccacgacattgccccgagctcgcagaaatgtcccgagtctccatccgcatactcgacgaactcgtactccccttccaagaactccaaatagacgacaatgaatacgcatacctcaaagcaatcatcttcttcgaccccgacgccaaaggactcagcgacccaggcaaaatcaaacgcctacgatcacaagtacaagtttcacttgaagactacatcaacgacagacaatacgactcaagaggtcgtttcggagaactactcctactactaccaaccctccaaagcataacctggcaaatgatagaacaaatacaatttataaaactcttcggcatggccaaaatcgacaatctcctacaagaaatgctcctcggaggaagcccctcagatgccccacacgcccaccacccactacacccccacctcatgcaagagcacatgggtaccaacgtcatagtcgccaacacaatgcccacccacctctcaaacggccaaatgtgcgaatggccgcgcccacgcggacaagccgccacccccgaaaccccacagccaagcccacccggtggctccggcagcgaaccctacaaactcctacccggcgccgttgcaacaatagtcaaacccctatccgccataccccaaccaacgatcaccaaacaagaagtcatctagggactagttataagactgactagcccgatgggcctcccaacgggccctcctcccctccttgcaccgagattaataaaaaaaaaaaaaaaaaaaaaaaaaaaaaaaaaaaaaaaaaaaaaaaaaaaaaaaaaaaaaaaatgcatcccccccccccccccccccccccccccccccaaaggctcttttcagagccaccagaatt

SEQ ID NO: 1873 - RNA, 1642 nt, synthetic construct
  misc_feature 1..1642: note = mRNA i-3 (A64-N5-C30-hSL-N5) (opt11) from Homo sapiens__NP_000448.3__HNF4A(1-474)(S313A)
  source 1..1642: mol_type = other RNA
aggagaaagcttaccatgcgtctctcaaaaaccctagtcgacatggacatggccgactattctgcagccctagacccagcctacaccaccctcgaattcgaaaacgtacaagtactcaccatgggcaacgatacctccccatctgaaggcaccaacctcaacgcacccaactctctcggagtctccgccctatgcgcaatctgcggcgaccgagccactggaaaacactacggcgcctcctcttgcgacggatgcaaaggcttcttccgaagatcagtccgaaaaaaccacatgtactcatgccgcttctcgcgccaatgcgtcgtcgacaaagacaaacgtaaccaatgcagatactgccgactcaaaaaatgcttccgcgccggcatgaaaaaagaagccgtccagaacgaacgcgaccgcatctcaaccagacgctcgagctacgaagactcctccctaccctccatcaacgccctactccaagcagaagtactatcccgccaaataacctcccccgtcagcggcatcaacggcgacatcagagccaaaaaaatcgcctcaatcgccgacgtatgcgagagcatgaaagaacagctccttgtcctagtagaatgggccaaatacatcccagccttctgcgaactccccctcgacgaccaagtcgccctactcagagcccacgccggcgaacacctcctcctcggcgctaccaagcgatctatggtattcaaggatgtacttctactcggaaacgactacatcgtaccacgccactgcccagaactagccgaaatgtcccgcgtatccatccgaatcctcgatgaactcgtactccccttccaagaactacaaattgacgacaatgaatacgcctacttaaaagccatcatattcttcgaccccgacgccaaaggtctgtccgacccaggcaaaatcaaacgactacgggcccaagtccaagtatcactcgaagactacatcaacgaccgccaatacgactcacgcggccgcttcggcgagctcctcctccttctcccaaccctacaatccataacctggcaaatgatcgaacaaatccaattcataaaactcttcggcatggcaaaaattgacaaccttctccaagaaatgctcctgggcggatccccctccgacgccccacacgcccatcaccccctccacccccacctaatgcaggaacacatgggcacaaatgtcatagtagccaacactatgcccacacatctctcaaacggccagatgtgtgaatggccacgcccacgaggacaagcagccacacccgaaacaccacaaccctcccccccaggcggctccggatccgaaccctacaaactcctacccggcgccgtcgccacaatcgtcaaacccctatccgccatcccccaacccacgatcaccaaacaagaagtcatctaaggactagttataagactgactagcccgatgggcctcccaacgggccctcctcccctccttgcaccgagattaataaaaaaaaaaaaaaaaaaaaaaaaaaaaaaaaaaaaaaaaaaaaaaaaaaaaaaaaaaaaaaaatgcatcccccccccccccccccccccccccccccccaaaggctcttttcagagccaccagaatt

SEQ ID NO: 1874 - RNA, 1642 nt, synthetic construct
  misc_feature 1..1642: note = mRNA i-3 (A64-N5-C30-hSL-N5) (opt11) from Homo sapiens__NP_000448.3__HNF4A(1-474)(S313E)
  source 1..1642: mol_type = other RNA
aggagaaagcttaccatgcgcctgtccaaaaccctcgtcgacatggacatggctgactactccgccgccctcgaccccgcatacaccacactcgaattcgaaaacgtccaggtcctcaccatgggaaacgacacctccccctcagaaggaaccaacctaaacgctcccaactcccttggcgtctccgccctctgcgcaatatgcggagaccgcgccaccggaaaacactacggcgcctcatcctgcgacggttgcaaaggcttcttccgccgatccgtccgcaaaaaccacatgtattcctgccgcttctcgcgacagtgcgtagtcgacaaagataaacgaaaccaatgccgatactgccgccttaaaaaatgcttccgcgccggaatgaaaaaagaagcagtccaaaacgaacgagaccgcatcagcacccgtaggagctcatacgaggactcgagcctcccctcgatcaacgccttactccaagccgaagtactgtcccgccagatcacctcacccgtctccggcatcaacggagacatcagagccaaaaaaatagcatcgatcgccgacgtatgcgagtccatgaaagaacaactcctagtactagtcgaatgggccaaatacatcccagcattctgcgaactacccctagatgatcaagtagccctactacgagcccacgccggcgaacacctcctcctcggggccaccaaacgatcaatggtcttcaaagacgtcctcctcctcggcaacgactacatcgtaccccgccactgcccagaactcgcagaaatgtcacgcgtctcaatccgcatcctggacgaacttgtactcccattccaagaactacaaatagacgacaacgaatacgcatacctgaaagcaatcatctttttcgaccccgacgccaaaggcctatctgaccccggtaaaataaaacgcctccgcgaacaagtacaagtctctctcgaagactacatcaacgaccgccagtacgacagccggggacgcttcggcgaacttctcctcctcctccccactctacaaagcatcacctggcaaatgatcgaacaaatacaattcatcaaactcttcggaatggcaaaaatcgacaacctcctccaagaaatgctcctcggcggctccccgagcgacgcccctcacgcccaccacccactccacccccacctaatgcaagagcacatgggaaccaacgtcatagtcgcaaacacaatgcccacccacctctccaacggccaaatgtgcgaatggccccgcccacgcggccaagccgccacacccgaaacaccccaaccatcacccccaggcggatcaggatccgagccctacaaactcctcccaggcgccgtcgccacaatcgtcaaacccctcagcgccataccacaaccaacaataacgaaacaagaagtcatataaggactagttataagactgactagcccgatgggcctcccaacgggccctcctcccctccttgcaccgagattaataaaaaaaaaaaaaaaaaaaaaaaaaaaaaaaaaaaaaaaaaaaaaaaaaaaaaaaaaaaaaaaatgcatcccccccccccccccccccccccccccccccaaaggctcttttcagagccaccagaatt

SEQ ID NO: 1875 - RNA, 1642 nt, synthetic construct
  misc_feature 1..1642: note = mRNA i-3 (A64-N5-C30-hSL-N5) (opt11) from Homo sapiens__NP_000448.3__HNF4A(1-474)(S142A_S143A)
  source 1..1642: mol_type = other RNA
aggagaaagcttaccatgcgcctatcaaaaacactggtcgacatggacatggcagactattctgccgccctggaccccgcctacactacactcgagttcgaaaacgtccaagtactcaccatgggaaacgacacctccccctccgaaggcaccaacttaaacgcccccaactcccttggggtctccgctctctgcgcaatctgcggagacagagccaccggtaaacactacggagcctcctcctgcgacggatgcaaaggcttcttccgccgctcagtacgcaaaaaccacatgtatagttgccgcttctctcgccagtgcgtggtcgacaaagacaaacgcaaccaatgccgatactgccgcctcaaaaagtgcttccgcgccggaatgaagaaagaagctgtccaaaacgaacgcgaccgcatctcaacccgcagagcggcatacgaagacagctcgctaccctccataaacgccctccttcaagccgaagtcctatcccgacagatcacctcccccgtctctggaataaacggcgacatccgcgcaaagaaaatcgcctccatcgccgacgtatgcgaatccatgaaagaacaactcctagtgctagtagaatgggccaaatacatacccgccttctgcgagctccccctagacgaccaagtagccctactccgcgcacacgcaggcgaacacctcctcctcggcgccaccaaacgatcaatggtcttcaaagacgtactactcctcggcaatgactacatcgtcccacgacactgccccgaattagcagaaatgtcgcgagtctccatacgcatcctagacgaactcgtactccctttccaagaactacaaatcgatgacaacgaatacgcatacctcaaagccatcatcttcttcgacccagacgccaaaggcctttccgatcccggcaaaatcaaaagactacgctcacaagtacaagtctccctcgaagattacatcaacgaccgccaatacgactcacgcggccgcttcggagaactcctactactcctcccaaccctacaatccatcacctggcaaatgatcgaacaaatccagttcattaaactcttcggaatggccaaaatcgataacctcctacaagaaatgctcctaggcggcagtccatccgacgcgccccacgcacaccatccactccacccccacctcatgcaagaacacatgggcaccaacgtaatcgtcgcaaacaccatgcccacacacctttcaaacggccaaatgtgcgaatggccgcgcccccgcggccaagcagccaccccagaaaccccacaaccatcacccccaggcggcagcggctcagaaccctataaactcctccccggcgccgtagccacaatcgtcaaacctctctccgcaatcccccaacccaccatcaccaaacaagaagtcatctaaggactagttataagactgactagcccgatgggcctcccaacgggccctcctcccctccttgcaccgagattaataaaaaaaaaaaaaaaaaaaaaaaaaaaaaaaaaaaaaaaaaaaaaaaaaaaaaaaaaaaaaaaatgcatcccccccccccccccccccccccccccccccaaaggctcttttcagagccaccagaatt

SEQ ID NO: 1876 - RNA, 1642 nt, synthetic construct
  misc_feature 1..1642: note = mRNA i-3 (A64-N5-C30-hSL-N5) (opt11) from Homo sapiens__NP_000448.3__HNF4A(1-474)(S142E_S143E)
  source 1..1642: mol_type = other RNA
aggagaaagcttaccatgcgcctatccaaaaccctagtcgacatggacatggcagactactccgccgccctcgacccagcatacaccacactcgaattcgaaaacgtccaagtgctaaccatgggcaacgacaccagcccgtccgaaggcacaaacctcaacgcccccaactcccttggtgtctcagccctctgcgcaatctgcggcgaccgtgccaccggtaaacactatggcgcctcatcctgcgacggctgcaaaggcttcttcagacgatcggtacgcaaaaaccacatgtactcatgtcgcttctcccgacaatgtgtagtggacaaagacaaaagaaaccaatgccgctactgccgcctcaaaaaatgcttccgcgcaggcatgaaaaaagaagccgtccagaatgaacgagaccgcataagcacccgccgagaagaatatgaagactcctcacttccctcaatcaacgccctactccaagccgaagtactatcacggcaaatcacaagccccgtctcaggaataaacggagacatccgcgccaaaaaaattgcctccatcgcggacgtatgcgaaagcatgaaagaacaactactcgtactcgtcgaatgggcaaaatacatccccgcattctgcgaactccccctcgacgaccaagtagccctgctcagagcacacgccggagaacaccttctcctcggcgccaccaaacgctccatggtcttcaaagacgtcctcctcctagggaacgactacatagtaccacgacactgcccagaactagccgaaatgtccagagtatcaatccgaatcctcgacgaactcgtcctccccttccaagaactacaaatcgacgacaacgaatacgcctacctaaaagccatcatattcttcgatcccgacgcaaaaggcctctccgaccccggcaaaatcaagcgactacgatcacaagtacaagtctccctggaagactacatcaacgaccgccaatacgacagccgcggaagattcggcgaactcctgctactactccccaccctacaatccatcacctggcaaatgatagaacaaatacaattcatcaaactcttcggcatggctaaaatcgacaacctcctacaagaaatgctactaggcggcagcccctcagacgccccccacgcccaccaccccctccacccccacctcatgcaggaacacatgggcaccaacgtcatcgtcgccaacacaatgcccacccatctctccaacggccaaatgtgcgaatggcctaggccacgtggtcaagcagcaacccccgaaaccccccaaccctccccaccaggcggttcaggatccgaaccctacaaactactcccaggcgccgtagccaccattgtcaagccgctcagcgctataccccaacccaccataaccaaacaagaagtcatataaggactagttataagactgactagcccgatgggcctcccaacgggccctcctcccctccttgcaccgagattaataaaaaaaaaaaaaaaaaaaaaaaaaaaaaaaaaaaaaaaaaaaaaaaaaaaaaaaaaaaaaaaatgcatcccccccccccccccccccccccccccccccaaaggctcttttcagagccaccagaatt

SEQ ID NO: 1877 - RNA, 1642 nt, synthetic construct
  misc_feature 1..1642: note = mRNA i-3 (A64-N5-C30-hSL-N5) (opt11) from Homo sapiens__NP_000448.3__HNF4A(1-474)(S143A)
  source 1..1642: mol_type = other RNA
aggagaaagcttaccatgcgactctccaagaccctcgtagacatggatatggcagactacagcgccgccctagatccagcttacaccaccctcgaattcgaaaacgttcaagtcctaacgatgggcaacgacacctcaccatcagaaggcaccaacctcaacgcccccaactccctcggagtctcagccctctgcgcaatctgcggcgaccgcgccaccggcaaacactacggagcctcgtcctgcgacggatgcaaaggattcttcaggcgctccgtacggaaaaaccacatgtactcttgtcgtttctcccgccaatgcgtagtcgacaaagacaaacgcaaccaatgccgctactgtcgcctcaaaaaatgcttccgcgccggcatgaagaaagaagccgtccaaaacgaacgcgaccgcatctccacccgcaggtccgcctacgaagactccagcctaccctccatcaacgcactactccaagccgaagtcctctcccgccaaatcacgtctcccgtctcaggaatcaacggcgacatccgcgctaagaaaatagcatctatcgccgacgtctgtgaatccatgaaagaacaactactcgtactggtagaatgggccaaatacatccccgccttctgcgaacttcccctcgacgaccaagttgcactcctccgagcccacgccggggaacacctactcctcggagccaccaaacgctcaatggtcttcaaagacgtactcctcctcggcaacgactacatcgtgccacgccactgccccgaactagccgaaatgtcccgggtctccattcgaatcctcgacgaactcgtcctccccttccaagaactccaaatagacgacaacgaatacgcttacctcaaagcaataatcttcttcgacccagatgccaaaggcctcagcgacccgggcaagattaaacgcctccgctctcaagtccaagtctcccttgaagactacatcaacgaccgccaatacgactcccgcggtcgattcggggaactactcctactcctcccaacactacaatccatcacctggcaaatgatcgaacaaatccaattcatcaaactcttcggcatggccaaaatcgacaacctcctacaggaaatgctcctaggaggcagcccctccgacgccccccacgcccaccaccccctccacccccacctaatgcaagaacatatgggaaccaacgtaatcgtcgcaaacacaatgcccacccacctctccaacggccaaatgtgcgaatggccccgcccccgcggtcaagcagccacacccgaaacccctcaaccctccccgcccggaggcagcggctccgaaccatacaaactcctcccaggcgccgtagccaccatcgtaaaacccctatcggccataccccaacccacaatcaccaaacaagaagtaatctaaggactagttataagactgactagcccgatgggcctcccaacgggccctcctcccctccttgcaccgagattaataaaaaaaaaaaaaaaaaaaaaaaaaaaaaaaaaaaaaaaaaaaaaaaaaaaaaaaaaaaaaaaatgcatcccccccccccccccccccccccccccccccaaaggctcttttcagagccaccagaatt

SEQ ID NO: 1878 - RNA, 1642 nt, synthetic construct
  misc_feature 1..1642: note = mRNA i-3 (A64-N5-C30-hSL-N5) (opt11) from Homo sapiens__NP_000448.3__HNF4A(1-474)(T166A)
  source 1..1642: mol_type = other RNA
aggagaaagcttaccatgaggctcagcaaaactctagtcgacatggacatggccgactactcagccgcactcgaccccgcatataccacactagagttcgaaaacgtccaagttctcaccatgggaaacgacacttccccctcagaaggcacaaacctcaacgcacccaactccctaggagtctccgccctatgcgcgatctgtggcgaccgagcaaccggcaagcattacggcgcatcctcctgcgacggatgcaaaggcttcttccgccgatccgtccgaaagaaccacatgtactcctgccgattctcccgccaatgcgtagttgacaaagacaaacgcaatcaatgccgatactgccgcctcaagaaatgcttccgagcaggaatgaagaaagaagccgtccaaaacgaacgcgatcgcatatccacccgccgctcctcctacgaagactcctccctcccctccatcaacgcactcctccaagcggaagtactctcacgccaaatcgcgtccccagtctccggcataaacggagacatccgcgccaagaaaatagcctcaatcgctgacgtctgcgaatctatgaaagaacagctcctcgtcctagtcgaatgggccaaatacatccccgccttctgcgaactcccactagacgaccaagtggcactcctccgcgcccacgccggcgaacacctactactcggagccaccaaacgctccatggtgttcaaagacgtactactcctcggaaatgactacatcgtcccccgacactgccccgaactcgccgaaatgtccagggtctccatccgcatcctcgacgaactggtcctcccattccaagaactccaaatcgacgacaacgaatacgcctacctaaaagccatcatcttcttcgaccccgacgccaaaggcctatccgacccgggcaaaatcaaacgactccgctcccaagtccaagtctcactcgaagactacatcaacgatagacagtacgactcacgcggtagattcggagaactcctactcctactccccacactccaatccataacctggcaaatgatagaacaaatacaattcatcaaactcttcggcatggccaaaatcgacaacctactccaggaaatgctcttaggcggctccccatccgacgccccacacgcccaccaccccctccacccccacctcatgcaagaacacatgggcaccaatgtcatagtagcaaacaccatgcccacacacctctccaacggacaaatgtgcgaatggccccgcccacgcggtcaggccgccacccccgaaaccccacaaccctccccacccggaggctccggatcagaaccctacaaactcctccccggcgccgtcgcaaccatcgttaaaccactatccgccataccccaacccaccatcaccaaacaagaggtcatataaggactagttataagactgactagcccgatgggcctcccaacgggccctcctcccctccttgcaccgagattaataaaaaaaaaaaaaaaaaaaaaaaaaaaaaaaaaaaaaaaaaaaaaaaaaaaaaaaaaaaaaaaatgcatcccccccccccccccccccccccccccccccaaaggctcttttcagagccaccagaatt

SEQ ID NO: 1879 - RNA, 1642 nt, synthetic construct
  misc_feature 1..1642: note = mRNA i-3 (A64-N5-C30-hSL-N5) (opt11) from Homo sapiens__NP_000448.3__HNF4A(1-474)(S167E)
  source 1..1642: mol_type = other RNA
aggagaaagcttaccatgcgcctctccaaaaccctcgtcgacatggacatggcagactactctgcagctctcgaccccgcctataccacgctcgaattcgaaaacgtacaagtcctcaccatgggaaacgacacctccccctctgaaggcaccaacctcaacgcacccaacagccttggcgtcagcgccttatgcgccatttgcggagaccgcgccaccggcaaacactacggagcatcctcatgcgacggctgcaaaggcttcttccgccgatcagtccgaaaaaaccacatgtactcctgccgcttctctcgccagtgcgtagtcgataaagataaaagaaatcaatgccgctactgccgcctcaaaaaatgcttccgcgccggcatgaaaaaagaagcagttcaaaacgaacgcgaccgaatctccacccgccgctcatcctacgaagactcttccctcccctctataaacgccctcctccaagccgaagtactctcacgccaaatcaccgaacctgtctccggcattaacggagacatacgcgccaagaaaatagccagcatcgccgacgtctgcgaatcaatgaaagaacaactcctcgtcctagtcgaatgggccaaatacatccccgcattctgcgaacttcccctcgacgaccaagtcgccctcctccgtgcccatgcaggcgaacacctcctcctcggcgccaccaaacgctccatggtctttaaagacgtcctcctcctgggcaacgactacatcgtcccccgacactgcccagaactcgccgagatgagccgcgtgtccatacgcatactcgacgaactcgtcctccccttccaagaactccagatagacgataacgaatacgcatacctaaaagccataatattcttcgaccccgacgctaaaggtctctcagacccaggaaaaatcaaacgtctcagaagccaagtccaagtctcactcgaagactacatcaacgaccgccaatacgactctcgcggccgcttcggcgaactcctcttattactcccaacactccaatcaatcacctggcaaatgatcgaacaaatacaatttatcaaactcttcggcatggctaaaatcgacaatctcctccaagaaatgctcctcggaggctccccctcagatgccccccacgcccaccacccccttcatccccacttaatgcaagaacatatgggcaccaacgtcatcgtagccaacaccatgcccacacacctatccaacggccaaatgtgcgaatggccccgcccccgaggacaagccgccaccccagaaacaccccaaccctccccccccggaggcagcggctccgaaccatacaaactcctcccaggtgccgtcgccactatcgtcaaacccctctcagccatcccccaaccaaccatcacaaagcaagaagtcatctaaggactagttataagactgactagcccgatgggcctcccaacgggccctcctcccctccttgcaccgagattaataaaaaaaaaaaaaaaaaaaaaaaaaaaaaaaaaaaaaaaaaaaaaaaaaaaaaaaaaaaaaaaatgcatcccccccccccccccccccccccccccccccaaaggctcttttcagagccaccagaatt

SEQ ID NO: 1880 - RNA, 1642 nt, synthetic construct
  misc_feature 1..1642: note = mRNA i-3 (A64-N5-C30-hSL-N5) (opt11) from Homo sapiens__NP_000448.3__HNF4A(1-474)(S167A)
  source 1..1642: mol_type = other RNA
aggagaaagcttaccatgcggctctcaaaaaccctagtcgacatggacatggccgactactcagctgccctagaccccgcatacaccacactagaattcgaaaatgtccaagtactaaccatgggcaacgacacctcaccctccgaaggtaccaacctcaacgcgcccaactccctcggcgtctcagccctctgcgccatctgcggcgaccgcgcgaccggcaaacactacggtgcctcctcatgcgacggatgcaaaggcttcttccgacgctcagtccgcaaaaaccacatgtactcctgccgcttctcacgacaatgcgtcgttgacaaagacaaacgcaaccaatgccgctactgccgcctcaaaaaatgcttccgcgcaggaatgaaaaaagaagcagttcaaaacgaacgcgaccgcatctcaacccgcagatcatcatacgaagactcatccctaccatcaataaacgccctcctacaagccgaagtcctctccagacaaatcaccgcccccgtctcaggcataaacggcgacatccgtgcaaaaaaaatcgcctccatcgctgacgtctgcgaatccatgaaagaacaactccttgtcctcgtcgaatgggccaaatacattcctgccttctgcgaactccccctcgacgaccaagtcgcactactcagagcccacgcaggcgaacacctcctcctcggagcaacaaaacgctccatggtcttcaaagacgtcctcctactcggaaatgactacatcgtccccagacactgccccgaactcgctgaaatgtcaagagtctccatacgaatactagacgaactagtcctacccttccaagaactgcaaatagacgacaacgaatacgcctacctcaaagccatcatattcttcgaccccgacgccaagggactctcagaccccggcaaaatcaaacgcctacgctcccaagtgcaagtcagcctcgaagactacataaacgatcgccagtacgactcacgaggacgattcggagaactcctcctcctcctcccaacactccagtccatcacctggcaaatgatcgaacaaatccaatttatcaaactcttcggcatggccaaaatcgacaacctactacaagaaatgctcctcggaggatccccctcagacgccccccacgcccaccaccctctccacccccacctaatgcaagaacacatggggaccaacgtaatcgtcgccaataccatgccaactcatctatcaaacggtcaaatgtgcgaatggccccgcccccggggacaagccgccacccccgagacaccgcaaccctccccccctggcggatccggctcagaaccctataaactactccccggcgcggtcgccaccatagtcaaaccactctctgccatcccccaaccaaccataaccaaacaagaagtcatctaaggactagttataagactgactagcccgatgggcctcccaacgggccctcctcccctccttgcaccgagattaataaaaaaaaaaaaaaaaaaaaaaaaaaaaaaaaaaaaaaaaaaaaaaaaaaaaaaaaaaaaaaaatgcatcccccccccccccccccccccccccccccccaaaggctcttttcagagccaccagaatt

SEQ ID NO: 1881 - RNA, 1642 nt, synthetic construct
  misc_feature 1..1642: note = mRNA i-3 (A64-N5-C30-hSL-N5) (opt11) from Homo sapiens__NP_000448.3__HNF4A(1-474)(S167A_S378A_T429A_T432A_ S436A)
  source 1..1642: mol_type = other RNA
aggagaaagcttaccatgcgcctctccaaaaccctcgttgacatggatatggcggactactccgccgcactcgacccagcctacaccaccctagaatttgaaaacgtccaagtactaaccatgggcaacgacacaagcccctccgaaggcacaaatctcaacgcccccaactcactaggcgtctcagccctatgtgctatctgcggcgaccgcgccaccggcaaacactacggcgcatcatcatgtgacggatgcaaaggattcttccgacgctccgtccgaaagaaccacatgtactcctgccgattcagcagacaatgtgttgtcgacaaagacaaacgcaaccaatgtcgctactgccgcctcaaaaaatgctttagagccggaatgaaaaaagaagccgtccaaaacgaacgcgaccgcatctccacacgccgaagctcatacgaagactcatctctcccctccatcaacgcactcctccaagccgaagtcctatctcgccaaatcaccgcacccgtctccggcatcaacggcgacatacgcgccaaaaaaatagcctccatagcagacgtatgcgaatccatgaaagagcaactcctcgtgctagtcgaatgggccaaatacatccccgccttctgcgagctcccactagacgaccaagtcgccctcctccgcgcccacgccggcgaacacctgctcctaggcgccaccaaaagaagcatggtattcaaagacgtcctactcctcggcaacgactatatagtccctcgccactgtccagaactcgcagaaatgtccagagtcagcatccgaatcctcgacgaactcgtcctacccttccaagaactacaaatcgacgacaacgaatacgcctaccttaaagccatcatcttcttcgaccccgacgccaaaggcctatccgaccccggcaaaatcaaacgcttacgatcccaagtccaggtcagcctcgaagactacataaacgaccgccaatacgactcacgcggccgcttcggcgaactactcctcctcctcccaaccctccaaagcatcacctggcaaatgatagaacaaatacaattcatcaaacttttcggcatggccaaaatcgacaaccttttacaagaaatgctactcggtggcgcgcccagcgacgctccgcacgcccaccaccccctccacccacacctcatgcaggaacacatgggcaccaacgtaatagtcgccaacacaatgccaacccacctctcaaacggccagatgtgcgaatggccccgaccccgaggccaagccgcagccccagaagccccccaaccagcccccccaggaggatccggctcagaaccctataaactcttacccggtgccgtcgcgaccattgtcaaacccctctccgccataccccagcccacaatcaccaaacaagaagtcatctaaggactagttataagactgactagcccgatgggcctcccaacgggccctcctcccctccttgcaccgagattaataaaaaaaaaaaaaaaaaaaaaaaaaaaaaaaaaaaaaaaaaaaaaaaaaaaaaaaaaaaaaaaatgcatcccccccccccccccccccccccccccccccaaaggctcttttcagagccaccagaatt

SEQ ID NO: 1882 - RNA, 1642 nt, synthetic construct
  misc_feature 1..1642: note = mRNA i-3 (A64-N5-C30-hSL-N5) (opt11) from Homo sapiens__NP_000448.3__HNF4A(1-474)(S167E_S378E_T429E_T432E_ S436E)
  source 1..1642: mol_type = other RNA
aggagaaagcttaccatgcgactatctaaaactctcgtagacatggacatggccgactactcggccgccctcgaccccgcatacaccacgctcgagttcgaaaacgttcaagtcctcacaatgggcaacgacacctccccctcagaaggcaccaacctcaacgctccaaactccctaggggtctccgcactctgcgcaatctgcggcgaccgtgccaccggcaaacattacggcgcctcatcctgcgacggctgcaaaggattcttccggcgatccgtccgaaagaaccacatgtacagctgcagattcagccgacaatgcgtcgtggacaaagataaacgcaaccaatgccgctactgccgactcaagaaatgcttccgcgcaggcatgaagaaagaagcagtacaaaacgaacgcgaccgcatctcaacaagacgtagctcctacgaagactcaagcctcccatccatcaacgccctcctccaagccgaagtactctcacgtcaaatcaccgaacccgtgtcaggaatcaacggcgacatccgcgccaagaaaatcgcctccatcgcagacgtctgcgaatccatgaaagaacaactcctcgtcctggtcgaatgggctaaatacatccccgcattctgcgaactccccctagatgaccaagtcgccctactgcgcgcccacgcaggcgaacatctattactcggcgccaccaaacgcagcatggtattcaaagacgtcctcctcctcggcaacgactacatagtcccacgccactgcccagaactggccgaaatgagccgagtctctatccgcatactcgacgagctagtcctccccttccaagaactccaaattgacgacaacgaatacgcctacctcaaagccatcatattcttcgaccccgacgcgaaaggcctatccgaccccggtaaaatcaaaagactacgctcacaagtccaagtctcccttgaagactacatcaacgaccgccagtacgacagccgcggccgcttcggcgaactacttctcctcctccccaccctccaatccatcacctggcaaatgatcgaacaaatccaattcataaaactattcggaatggccaaaatcgacaacctcctgcaagaaatgctcctcggaggcgaaccctcagacgcaccccacgcccatcaccccctccatccacacttaatgcaagaacacatgggcaccaacgtaatcgtagccaacactatgcccacccacctatccaatggccaaatgtgcgaatggcccagaccaagaggacaagccgccgaacccgaagaaccacaaccagaacctcccggtggatccggctcagaaccctacaaactactccccggagccgtagctaccatcgtcaagcccctatcagccatcccccaacccacaatcaccaaacaggaagtcatctaaggactagttataagactgactagcccgatgggcctcccaacgggccctcctcccctccttgcaccgagattaataaaaaaaaaaaaaaaaaaaaaaaaaaaaaaaaaaaaaaaaaaaaaaaaaaaaaaaaaaaaaaaatgcatcccccccccccccccccccccccccccccccaaaggctcttttcagagccaccagaatt

SEQ ID NO: 1883 - RNA, 1642 nt, synthetic construct
  misc_feature 1..1642: note = mRNA i-3 (A64-N5-C30-hSL-N5) (opt11) from Homo sapiens__NP_000448.3__HNF4A(1-474)(S87A)
  source 1..1642: mol_type = other RNA
aggagaaagcttaccatgcgcctaagcaaaacattagtcgacatggacatggccgactactccgccgcactcgacccagcatacaccacattagagttcgaaaacgtccaagtcctcacaatgggcaacgacacctcaccctcagagggcaccaatctcaacgccccaaactcactcggagtaagtgcactatgcgcgatctgcggcgaccgcgccaccggcaaacactacggcgcatcctcctgcgacggctgcaaaggattcttccgacgcgccgtccgcaaaaaccacatgtactcatgccgcttctcacgccagtgcgtcgtagacaaagacaaacgcaatcaatgccgctactgccgactcaagaaatgcttccgcgccggaatgaagaaagaagcagtacaaaacgaacgcgaccgaatctccacccgccgctcctcctacgaagattcctccctcccctccatcaacgccctactccaagccgaagtactctcccgccaaatcacctctccagtttccggcataaacggcgacatacgagcaaagaaaattgcatctatcgccgacgtctgcgaatcgatgaaagagcaactcctagtactcgtagaatgggccaaatacatccccgcattctgcgaactcccacttgacgaccaagtcgcccttctccgagcacacgccggcgaacatctcctgctcggcgctacaaaaagaagcatggtcttcaaagacgtcctcctactcggcaacgactacatcgtcccccgccactgccccgaactagccgaaatgagccgagtctccatcagaatcctcgacgaactcgtactccccttccaagaactccaaatagacgacaacgaatatgcatacctcaaagcaatcatattcttcgaccccgacgccaaaggactttccgaccccggcaaaataaaacgcctccgatcccaagtacaggtctccctcgaagactacatcaacgacagacaatacgacagccgtggacgattcggagagttactcctactacttcccacccttcagtcaatcacctggcaaatgatagaacaaatccaattcatcaaactgttcggaatggctaaaatcgacaacctgctacaagaaatgctcctcggcggctcccctagcgacgccccacacgcacaccaccccctccacccacacctcatgcaagagcacatgggcacaaacgtaatagtagccaacacaatgcccacccacctctcgaacggccaaatgtgcgaatggccccgcccccgcggacaagccgcaaccccagaaacaccccaaccttcacccccaggcggctccggatccgaaccctacaaactactccccggagccgtagcaaccatagtcaaaccgctcagcgccatcccccaacccacaataaccaaacaagaagtcatctagggactagttataagactgactagcccgatgggcctcccaacgggccctcctcccctccttgcaccgagattaataaaaaaaaaaaaaaaaaaaaaaaaaaaaaaaaaaaaaaaaaaaaaaaaaaaaaaaaaaaaaaaatgcatcccccccccccccccccccccccccccccccaaaggctcttttcagagccaccagaatt

SEQ ID NO: 1884 - RNA, 1642 nt, synthetic construct
  misc_feature 1..1642: note = mRNA i-3 (A64-N5-C30-hSL-N5) (opt11) from Homo sapiens__NP_000448.3__HNF4A(1-474)(S87E)
  source 1..1642: mol_type = other RNA
aggagaaagcttaccatgcgcctatccaaaaccctagtcgacatggacatggcagactattcagccgcactagatcccgcctatacaacactcgaattcgaaaacgtgcaggtcctcaccatgggcaacgacacctccccctccgaaggaaccaacctaaacgcaccaaattccctcggcgtctccgccctttgcgccatatgtggggaccgcgcaacaggaaaacactacggcgcctcctcctgcgacggatgcaaaggattcttccgacgcgaagtcagaaaaaaccacatgtactcatgtcgattctcccgccagtgcgtcgtcgacaaagacaaaagaaaccaatgcagatactgtcgcctaaaaaaatgcttccgcgccggaatgaaaaaggaagcagtacagaacgaacgcgaccgcatctccaccagacgctcctcctacgaagactcatccctgccctcgatcaacgcacttctccaagccgaggtcctatcaagacaaatcacttctccagtatccggcatcaatggcgacatccgcgccaaaaaaatcgcctcaatcgccgacgtctgcgagtccatgaaagaacaactactagtccttgtagaatgggctaaatatattcccgccttctgcgaacttcccctagacgaccaagtagcactcctccgcgctcacgccggcgagcacctactactcggcgcaaccaaaagatcaatggtcttcaaagacgtcctcctcctgggcaacgactacatcgtcccccgacactgccccgaactcgcggaaatgtcccgcgtcagcatccgcatcctcgacgaactcgtactccccttccaagaactacaaatcgacgacaacgaatacgcctacctcaaagcgataatcttcttcgacccagacgccaaaggtctatccgacccaggaaaaatcaaacgtctccgctctcaagtacaagtctctctcgaagactacataaacgaccgccaatacgactccagaggccggttcggcgaactcctcctcctactccccacactccaaagcatcacctggcaaatgatcgaacaaatccaattcataaaactattcggcatggccaaaatagacaacctgctacaagaaatgctcctcggaggttccccctcagacgccccccacgcccaccacccccttcacccacacctaatgcaagaacacatgggcactaacgtaatagtagccaacacaatgcccacccacctctccaacggccaaatgtgtgaatggccaagaccacgcggacaagccgcaacccctgagaccccccagccctccccacccggcggctctggcagcgaaccctacaaactgctacccggggccgtcgccacaatcgtaaaaccactctcggcaatcccccaacccaccatcaccaaacaagaagttatctaaggactagttataagactgactagcccgatgggcctcccaacgggccctcctcccctccttgcaccgagattaataaaaaaaaaaaaaaaaaaaaaaaaaaaaaaaaaaaaaaaaaaaaaaaaaaaaaaaaaaaaaaaatgcatcccccccccccccccccccccccccccccccaaaggctcttttcagagccaccagaatt

SEQ ID NO: 1885 - RNA, 1642 nt, synthetic construct
  misc_feature 1..1642: note = mRNA i-3 (A64-N5-C30-hSL-N5) (opt11) from Homo sapiens__NP_000448.3__HNF4A(1-474)(R2V)
  source 1..1642: mol_type = other RNA
aggagaaagcttaccatggtactctccaagaccctagtcgacatggacatggccgactactccgccgccctagacccagcctacaccactctagagttcgaaaacgtccaagtcctcacaatgggaaacgacacctccccctccgaaggcacaaacctcaacgcccccaactccctcggcgtctccgccctatgcgccatatgcggagaccgagccaccggcaagcactacggcgcttcctcctgcgacggatgcaaaggcttcttccggagaagcgtccggaaaaaccacatgtattcctgccgattctcacgccaatgcgtagtcgacaaagacaaacgcaaccaatgccgctactgccgccttaagaaatgtttcagagccggaatgaagaaagaagccgtccaaaacgaacgcgaccgcataagcacccgccgctcctcatacgaagacagcagcctcccctccatcaacgccctcctccaagcagaagtgctctcccgacaaatcaccagccccgtaagcggaatcaacggcgacatacgcgccaagaaaatcgcctccatcgccgacgtctgcgaatcaatgaaagaacaactactcgtccttgtagaatgggccaaatacatccccgccttctgcgagctcccactcgacgaccaagtcgccctcctccgcgcacacgccggtgaacatctcctactaggagcaaccaaacgatcaatggtattcaaagacgtcctcctcctcggtaacgactacatagtcccaagacactgccccgaactagccgaaatgtcacgcgtctccatccgcatcctagacgaactcgtccttccctttcaagaactacaaatcgacgacaacgaatacgcctacctcaaagccatcatcttcttcgacccagacgcaaaaggactctcagaccccggcaaaatcaaacgcctccgctcccaagtccaagtcagcctcgaagactacatcaacgacagacaatacgactcacgaggccgcttcggagaactactactcttgctccccacactacaatcgataacctggcaaatgatcgaacaaatccaatttatcaaactattcggaatggcaaaaatagacaaccttctgcaagaaatgctccttggcggctctccctctgacgctccccacgcccaccaccccctccacccccaccttatgcaagaacacatgggaaccaacgtcatcgtagccaacacaatgcccacccacctatcaaacggccaaatgtgcgaatggccacggccacgcggccaagccgcaacacccgaaaccccacaaccctcacccccaggcggctccggctcagagccgtacaaactactacccggcgccgtagccaccatcgtgaaacctctctccgccatccctcaacccacaatcaccaaacaagaggtcatctaaggactagttataagactgactagcccgatgggcctcccaacgggccctcctcccctccttgcaccgagattaataaaaaaaaaaaaaaaaaaaaaaaaaaaaaaaaaaaaaaaaaaaaaaaaaaaaaaaaaaaaaaaatgcatcccccccccccccccccccccccccccccccaaaggctcttttcagagccaccagaatt

SEQ ID NO: 1886 - RNA, 1642 nt, synthetic construct
  misc_feature 1..1642: note = mRNA i-3 (A64-N5-C30-hSL-N5) (opt11) from Homo sapiens__NP_000448.3__HNF4A(1-474)(R2V_K5V)
  source 1..1642: mol_type = other RNA
aggagaaagcttaccatggtcctcagcgtcaccctcgtcgacatggacatggccgactactccgcagccctcgaccccgcctacaccacactagaatttgaaaacgtccaagtcctgaccatgggcaacgacacctccccctcagaaggtaccaacctcaacgcacccaactcgctcggcgtatcagccctttgtgccatctgcggtgatcgcgcaaccggaaaacactacggcgcatcctcatgcgacggctgcaaaggcttcttccgccgatccgtccgtaaaaaccatatgtactcctgtcgattctcccgccaatgtgtcgtagataaagacaaacgcaaccaatgcagatactgccgcctaaaaaaatgcttccgggcaggtatgaagaaagaagcagtccaaaacgaacgcgaccgcatcagcacccgccgctcctcctacgaagactcgtccctcccatccatcaacgccctactccaagccgaagtcttatcccgacaaatcacttcccccgtctccggcataaacggcgacatccgcgcaaaaaaaatcgcctccatagccgacgtctgcgaatcaatgaaagaacaactcctagtccttgtcgaatgggccaaatacatccccgcattctgcgaactcccactcgatgaccaggtagccctcctccgcgcccacgcgggtgaacacctcctcctcggggccaccaaacgctccatggtattcaaagacgtcctcctcctcggaaacgactacatcgtcccacgccattgccccgagctagccgaaatgtctagagtctccatacgcatcctcgacgaactcgtactccccttccaagaactccaaattgatgacaacgaatacgcctacctcaaagcaatcatcttcttcgaccccgacgccaaagggctctccgacccaggaaaaatcaaacgcctcagatcccaagtccaggtatcactcgaagactacatcaacgaccgacaatacgactcccgaggccgtttcggcgaactcctactcctcttaccaaccctacaatccatcacatggcaaatgatcgaacaaattcaattcatcaaactcttcggaatggccaaaatcgacaatctcctacaagaaatgctcctcggaggatcaccctcagacgccccacacgcccaccaccctttacatccccacctaatgcaagaacacatgggaaccaacgtcatcgtagccaacaccatgccaacacacctctcaaacggacaaatgtgcgagtggcccagaccccgaggccaagccgccacaccagaaacaccccagccctcaccacccggcggctcaggctccgaaccctacaaactactccccggagccgtcgccaccatcgtcaagccactatcagcaatcccacaacccaccatcaccaaacaagaagtaatctaaggactagttataagactgactagcccgatgggcctcccaacgggccctcctcccctccttgcaccgagattaataaaaaaaaaaaaaaaaaaaaaaaaaaaaaaaaaaaaaaaaaaaaaaaaaaaaaaaaaaaaaaaatgcatcccccccccccccccccccccccccccccccaaaggctcttttcagagccaccagaatt

SEQ ID NO: 1887 - RNA, 1642 nt, synthetic construct
  misc_feature 1..1642: note = mRNA i-3 (A64-N5-C30-hSL-N5) (opt11) from Homo sapiens__NP_000448.3__HNF4A(1-474)(K179R_K180R)
  source 1..1642: mol_type = other RNA
aggagaaagcttaccatgcgcctctccaaaacacttgtcgacatggacatggccgactactccgccgcactcgaccccgcctacaccacccttgaattcgaaaacgtccaagtcctcaccatgggaaacgacacctccccctccgaaggaaccaacctaaacgcccccaactccctaggcgtctccgccctctgcgcaatatgcggagaccgcgcaaccggcaaacattacggcgcttcctcctgtgacggttgcaaaggatttttccgccgatccgtccgtaaaaaccacatgtactcctgccgcttcagccgacaatgcgtggtagataaagacaaacgcaaccaatgccgttactgccgactcaaaaaatgcttccgagccggaatgaaaaaagaagcagtccaaaacgaacgcgaccgcatctctacacgcagatcttcatatgaagatagcagcctccccagcatcaacgccctcctccaagccgaagtcctctcccgacaaatcacctccccagtaagcggcataaatggcgacatccgtgcccggcgcatcgcatcaatcgccgacgtatgcgaatcaatgaaagaacaactactagtcctcgtcgaatgggcaaaatacatacccgcattctgcgaactccccctcgacgaccaagtagccctcctacgcgcccacgccggagaacacctactcctcggggccacgaaacgatccatggtcttcaaagacgtcctactcctcggaaatgactacatagtccccaggcactgccccgaactcgccgaaatgtcccgcgtctcaattcgaatcctagacgaactcgtcctacccttccaagaactccaaatagacgacaacgaatacgcttacctcaaagccattatcttcttcgacccagacgccaaaggactctccgacccgggaaaaataaaacgactacgcagccaagtccaagtctccttagaagactacatcaacgaccgccagtacgactcccgcggccgattcggagagcttctcctactcctccccaccctccaatccatcacatggcaaatgatcgaacaaatccaattcataaaactcttcggcatggccaaaatcgataatctactccaagaaatgctcctcggcgggtccccatcagacgccccccacgcacaccacccgctgcacccacacctaatgcaagaacacatgggaacaaacgtcatcgtcgccaacacaatgcccacccacctctcaaacggacagatgtgcgaatggccccgcccacgcggccaagcggcaacccccgaaacaccacagccctccccccccggcggcagcggctcagaaccctacaaactcctcccaggagcagtcgccaccatagtcaagcccctctcagccatcccacaaccaaccatcaccaaacaagaagtaatatagggactagttataagactgactagcccgatgggcctcccaacgggccctcctcccctccttgcaccgagattaataaaaaaaaaaaaaaaaaaaaaaaaaaaaaaaaaaaaaaaaaaaaaaaaaaaaaaaaaaaaaaaatgcatcccccccccccccccccccccccccccccccaaaggctcttttcagagccaccagaatt

SEQ ID NO: 1888 - RNA, 1642 nt, synthetic construct
  misc_feature 1..1642: note = mRNA i-3 (A64-N5-C30-hSL-N5) (opt11) from Homo sapiens__NP_000448.3__HNF4A(1-474)(K234R)
  source 1..1642: mol_type = other RNA
aggagaaagcttaccatgcgcctatctaaaacacttgtagacatggacatggccgactactcagccgcactcgaccccgcctacaccaccttagagttcgagaacgtccaagtcctcacgatgggcaatgacacctccccatccgaaggcaccaaccttaacgcacccaactccctcggagtatccgccctctgcgccatctgcggcgaccgcgccacaggcaaacactacggagcctcatcctgcgacggctgcaaaggcttcttccgacgctccgtcagaaaaaaccacatgtactcctgccgattctcccgtcaatgcgtagtcgacaaagacaaacgcaaccaatgccgatactgccgcctcaaaaagtgcttccgagccggcatgaaaaaagaagccgtccagaacgagcgcgaccgaatctccacaagaagatcatcatacgaagactcctccctcccctccatcaacgccctactccaagccgaagtcctctccagacaaatcacaagccccgtatccggtatcaacggcgacataagagccaaaaaaatcgcctccatagccgacgtctgcgaatccatgaaagaacaactcctcgtgctcgtagaatgggccaaatacattcccgccttctgcgaactccctctcgacgaccaggtcgctctactcagggctcacgccggcgaacacctcctcctcggcgcaacccgccgctccatggtattcaaagacgtcctactactcggaaacgactacatcgttccccgccactgcccagagctcgctgaaatgtctcgcgtctccatccgcatcctcgacgaactcgtcctcccattccaagaactccaaatcgacgacaacgaatacgcctacctaaaagccataatcttcttcgaccccgacgcaaaaggactctccgacccagggaaaattaaacgactccgctcccaagtacaggtaagcctcgaagactacatcaacgaccgccaatacgattcccgaggccgcttcggcgaacttctcctactactacccaccctacagtccatcacctggcaaatgatcgaacaaatccaattcatcaaacttttcggaatggccaaaatcgacaacctcctccaagaaatgctcctcggcggctccccctccgacgccccccacgcacaccaccccctccacccacaccttatgcaagaacatatgggcacaaacgtcatcgtcgccaacaccatgcccacccacctctctaacggccaaatgtgcgaatggccccgcccaagaggccaagccgccaccccagaaaccccgcaacctagcccacccggcggctccggcagcgaaccctacaaactattacccggagcagtggccacgatcgtaaagcccctcagcgcaatcccacaaccaacaatcactaaacaagaagtcatctaaggactagttataagactgactagcccgatgggcctcccaacgggccctcctcccctccttgcaccgagattaataaaaaaaaaaaaaaaaaaaaaaaaaaaaaaaaaaaaaaaaaaaaaaaaaaaaaaaaaaaaaaaatgcatcccccccccccccccccccccccccccccccaaaggctcttttcagagccaccagaatt

SEQ ID NO: 1889 - RNA, 1642 nt, synthetic construct
  misc_feature 1..1642: note = mRNA i-3 (A64-N5-C30-hSL-N5) (opt11) from Homo sapiens__NP_000448.3__HNF4A(1-474)(K300R)
  source 1..1642: mol_type = other RNA
aggagaaagcttaccatgcgcctctcaaaaaccctagtagacatggacatggcagactactccgccgccctcgaccccgcatacaccaccctcgagttcgaaaacgtacaagtcctcactatgggaaacgacacctccccctcggaaggcaccaacctcaacgcccccaactcccttggggtcagtgcactatgcgccatctgcggcgatagagccaccggaaagcactacggcgcctcctcatgcgacggctgcaaaggcttcttccgccgatccgtccgcaaaaaccacatgtactcatgcagattcagcagacaatgcgtcgtcgacaaagacaagagaaaccagtgccgatactgccgcctcaagaaatgtttccgcgccggcatgaagaaagaagcagtccaaaacgaacgcgaccgcatctccacccgccgctcatcctacgaagactccagcctaccctccataaatgccctactccaagcagaagtcctctcccgccaaataacctccccagtatccggaatcaacggcgacatccgcgccaagaaaatcgcctcaatagcagacgtctgcgaatccatgaaagaacaactacttgtcttagtagaatgggccaaatacatccccgccttttgcgaactaccccttgacgaccaagtcgccctcctccgcgcacacgccggcgaacacctattactaggcgccactaaacgctccatggtcttcaaagacgtactcctcctcggcaacgactatatcgtcccccgacactgccccgaactcgccgaaatgtcccgcgtctcaatacgaatcctcgacgaactcgtcctccccttccaagaactacagatcgacgacaacgaatacgcctacctcaaagcaatcatcttcttcgaccccgacgcccgcggcctatccgaccctggcaaaatcaaacgcctgcgctcccaagtacaagtgtccctcgaagactacatcaacgaccgacagtacgattcccgaggccgattcggcgaactcctcctcctactcccaacactccaatccatcacctggcaaatgatcgaacaaatccaattcattaaactcttcggcatggcaaaaatcgacaacctcctacaagaaatgctcctcggtgggtccccctccgatgctccccacgcccaccaccccctccacccccacctcatgcaggaacacatgggcaccaacgtcatcgtcgccaacacaatgccaacccacctctcaaacggacaaatgtgtgaatggccccgaccccgaggccaagcagccacacccgaaacaccccaaccctcacccccaggcggctccggctcagaaccctacaaactactcccaggagccgtcgccaccatcgtaaaaccactaagcgccataccccaaccaactatcacaaaacaggaggtcatctaaggactagttataagactgactagcccgatgggcctcccaacgggccctcctcccctccttgcaccgagattaataaaaaaaaaaaaaaaaaaaaaaaaaaaaaaaaaaaaaaaaaaaaaaaaaaaaaaaaaaaaaaaatgcatcccccccccccccccccccccccccccccccaaaggctcttttcagagccaccagaatt

SEQ ID NO: 1890 - RNA, 1642 nt, synthetic construct
  misc_feature 1..1642: note = mRNA i-3 (A64-N5-C30-hSL-N5) (opt11) from Homo sapiens__NP_000448.3__HNF4A(1-474)(K300R_K307R_K309R)
  source 1..1642: mol_type = other RNA
aggagaaagcttaccatgcgcctcagcaaaacactcgttgacatggatatggccgactactccgccgcactagatcccgcctataccacactcgaattcgaaaacgttcaagtactcaccatgggcaacgacacctccccatccgaaggcaccaacctcaacgccccaaactccctcggtgtatccgcactctgcgcaatctgcggcgaccgcgctacaggcaaacactacggcgcatcctcctgcgacggatgcaagggcttcttccgccgctcagtccggaaaaaccacatgtactcttgccgcttctcacgtcagtgcgtggtcgacaaagacaaacgcaaccaatgccgctactgccgactcaaaaaatgcttccgcgccggaatgaaaaaagaagcagtacaaaacgaacgagaccgcatcagcacccgtcgctccagctacgaagactcttcacttccctccatcaacgccctcctccaagccgaagtcctctcacgccaaatcacgtcccccgtctccggcataaacggcgacatccgagcaaaaaaaatcgcctccatcgcagacgtatgcgaatccatgaaagaacagctcctagtcctcgtcgaatgggccaaatacatcccagcattctgcgaacttcccctagacgaccaagtcgcccttctcagagcacacgctggggaacacctcctactaggcgcaacaaaacgctccatggtcttcaaagacgtactactcctcggcaacgactacatagtccctcgccactgccccgaactcgcagaaatgtcccgagtctcaatacgaatactagacgaactagtcctccctttccaagaactacaaatcgacgacaacgaatacgcttacctaaaagccatcattttcttcgacccagacgcccgcgggctctccgaccccggccgcatacgacgccttcgctcccaagtccaagtatcattagaagactacatcaacgaccgccaatacgactcccgcggccgcttcggagaactcctactcctcctacccacactccagtccatcacctggcaaatgatcgaacaaatccaattcattaaactattcggcatggccaaaatcgacaacctactccaagaaatgctcctcggcggaagcccctctgacgcccctcacgcacaccaccccctacacccacacttgatgcaggaacacatggggaccaacgtcatcgtcgccaacaccatgcccacacatctctcaaatggccaaatgtgcgaatggccacgacctcgcggtcaagctgctaccccagaaaccccccaaccttccccacccggcggttcaggctcggaaccctacaaactccttcccggcgccgtcgccacaatagtcaaaccactatccgcaatcccccaacccacaattaccaaacaagaagtaatctagggactagttataagactgactagcccgatgggcctcccaacgggccctcctcccctccttgcaccgagattaataaaaaaaaaaaaaaaaaaaaaaaaaaaaaaaaaaaaaaaaaaaaaaaaaaaaaaaaaaaaaaaatgcatcccccccccccccccccccccccccccccccaaaggctcttttcagagccaccagaatt

SEQ ID NO: 1891 - RNA, 1642 nt, synthetic construct
  misc_feature 1..1642: note = mRNA i-3 (A64-N5-C30-hSL-N5) (opt11) from Homo sapiens__NP_000448.3__HNF4A(1-474)(K447R_K470R)
  source 1..1642: mol_type = other RNA
aggagaaagcttaccatgcgcctctccaaaaccctcgtcgatatggacatggccgactactccgccgcccttgaccccgcctacaccaccctagaattcgaaaacgtacaagtactcacaatgggcaacgacacctccccatccgaaggaacaaacctcaacgctcccaacagcttaggtgtctccgccctctgcgccatctgcggagatcgcgccaccggcaaacactacggcgcctcatcatgcgacggctgcaaaggcttcttccgacgctcagtccgcaaaaaccacatgtactcctgcagattctcaagacaatgtgtcgttgacaaagacaaacgaaaccaatgccgatactgccgccttaaaaaatgcttccgcgcaggaatgaaaaaagaagcagtccagaacgaacgcgaccgcatatccacccgccgttccagctacgaagacagctcactcccttcaatcaacgccctactacaagccgaagtcctctcccgacaaataacctcacccgtatccggcatcaacggagacatacgcgccaaaaaaatagcctcaatcgccgacgtctgcgaatccatgaaagaacaactcctagtcctagtcgaatgggccaaatacatacccgcattctgcgaactccccctagacgaccaggtagccctcctccgagcccacgccggcgagcacctcttacttggcgcaaccaaacgctccatggtattcaaggacgtcctactcctaggcaatgactacatcgtcccccgccactgccccgaactcgctgaaatgtcccgagtctcaatcagaattctagatgaactagtcctacccttccaagaactccaaatagacgacaacgaatacgcatacctcaaagccatcatattcttcgaccccgatgccaaaggtctaagcgaccccggaaaaataaagcgactacggtcgcaagtacaagtctccctggaagactacataaacgaccgccaatacgacagccgcggacgattcggagaactactcctactcctccccactctccaatccataacatggcaaatgatcgaacaaatccaattcatcaaactattcggcatggccaaaatcgacaatcttttacaggaaatgctacttggaggatccccatccgacgcccctcacgcgcaccacccactccacccacacctcatgcaagaacacatgggcaccaacgtgatagtagcaaacaccatgcccacccacctctccaacggccaaatgtgcgagtggccacgaccacggggccaagccgccaccccagagacaccacaaccctcaccccccggaggctccggctccgaaccctaccgactactgccaggagccgtcgcaaccatcgtaaaaccactcagcgccatcccccaacccaccatcacccggcaagaagtcatctaaggactagttataagactgactagcccgatgggcctcccaacgggccctcctcccctccttgcaccgagattaataaaaaaaaaaaaaaaaaaaaaaaaaaaaaaaaaaaaaaaaaaaaaaaaaaaaaaaaaaaaaaaatgcatcccccccccccccccccccccccccccccccaaaggctcttttcagagccaccagaatt

(The sequence listing continues in the following parts.)
